United States Patent Application Publication US 2024/0327476 A1 - sequence listing, part 24

SEQ ID NO: 26930 - DNA, 6600 bp, Homo sapiens
  source 1..6600: mol_type = unassigned DNA
gtccaagatggcggcgccgggggcgctgcctcctcggccgccgcctccgccgccgccgctgtgagaaacctacgggccgcccgcccgccgcgccagcgccatgaagcggcagagcgagcgagactctagcccgagcgggcgcggctcgtcatcgtccgccaagcgtccgcgggagcgcgaacgggaggcggaggcgggcgggcggcgggcggcgcacaaggcctctggcggcgccaagcacccggttccagcgcgggcccgcgacaaaccccgcggcagcggaagcggcgggggcgggcatcgcgacggccgcggcaccggggacgcgaatcaccgcgcgagtagcgggcgctcctcgggctccggcgctggcggcgggggacgcggcggcaaggcctcgggggacccgggcgcctccggcatgtcgccccgcgcgtctcctctgccgccgcctccgccaccgcctggggccgagcccgcgtgtcccggctcatccgcggccgcgcctgagtacaagacgttgctcatcagcagcttgagccccgcgctgcccgccgagcacctcgaggaccggctcttccaccagttcaagcgcttcggcgagatcagcctccgcctgtcgcacacgcctgagctgggccgtgtggcctacgtgaatttccggcacccacaggacgcacgcgaggcccgccagcacgccctggcccggcagctgctgctctacgaccgcccgctcaaggtagagcccgtgtacctgcgtggcggcggcgggagcagtcggcgaagtagcagcagcagcgccgccgcttccacgcctcccccagggccgcccgcgcccgccgacccgctcggctacctcccgctacacggaggctaccagtacaagcagcgctcgctgtcccccgtcgctgccccgcccctgcgggagccccgtgcccgtcacgccgccgcagccttcgccctggatgccgctgctgccgccgccgtgggactgtcccgggagcgggccctggactactacgggctgtacgacgaccgtgggcgcccctatggctacccagctgtgtgtgaggaggacctgatgcccgaggatgaccagcgggccacgcgcaacctcttcattggtaacctggaccacagcgtatctgaggtggagctgcgaagggccttcgagaaatatggcatcatcgaggaggtggtcatcaagaggcctgcccgtggccagggcggtgcctatgccttcctcaagttccagaacctggacatggcccatagggctaaggtggccatgtcgggccgagtgattggtcgcaaccccattaagataggctatggcaaggccaaccccaccactcgtctctgggtgggtggcctgggacctaacacgtcactggcggctctggcccgagagtttgaccgctttgggagcattcggaccattgatcacgtcaaaggagatagctttgcctatattcagtacgagagcttggacgcagcccaggccgcctgtgctaaaatgaggggttttcccttgggtggaccagaccgcaggctccgcgtggattttgccaaagcagaggagactcggtacccccagcagtaccagccctcgccactccctgtgcattatgagctgctcacagatggatacacccggcaccgcaacctggacgccgacctggtgcgggacaggacgcccccacaccttctgtactcagaccgagaccggacttttttggaaggggactggaccagccccagtaaaagctctgaccgccgaaacagccttgagggctacagtcgctcagtgcgcagccggagtggtgagcgttggggggcagatggagaccgtggtttgcccaagccctgggaagagaggcggaaacggagaagcctttccagtgaccgtgggaggacaacccattcaccatatgaggaacggagtaggaccaagggcagtgggcagcagtcagagcggggctccgaccgcacccctgagcgcagccgcaaggagaaccactccagtgaagggaccaaggagtccagcagcaactccctcagcaacagcagacatggggctgaggaacggggccaccaccaccaccaccacgaggctgcagactcttcccacgggaagaaggcaagagacagcgagcgcaatcaccggaccacagaggccgagcccaagcctctggaagagccaaaacacgagaccaaaaagctgaagaatctttcagagtacgctcagacactacagctgggttggaatgggcttctggtgttgaaaaacagctgcttccccacgtctatgcatatcctagagggggaccagggggtgatcagcagtctcctcaaagaccacacttctgggagcaagctgacccagctgaagatcgcccagcgccttcgactggaccagcccaagcttgacgaggtcacacgacgcatcaagcaggggagccccaacggctatgcggtcctcttagccacccaggcaacccccagtgggcttggcactgaggggatgcccacagtagagcccggtctgcagaggcggcttctcaggaacctggtctcctacttgaaacagaagcaggccgcaggggtgatcagcttgccagtgggggggtccaagggcagagacggcacaggcatgctctacgccttcccaccctgcgacttttcccagcagtacctccagtcagcactaaggacattgggcaagctagaagaagaacacatggtgatagtcatcgtcagagacactgcctagcccaagcctgtctttcccagcgtcatgtttgtgtcacaaaagcagttattttaaaatctgatcccctctctaccctaccactttggtttgaattatctcctgggttattttggttcatttgggtggggatcaaagtcctgtccaccaccaaaactaagttcttagattttgggggatttttttttttaaacgatgagaagggaatccggttatgttgatttctagtgtacaagatactgtctgctgtggttctgtatttttttattttttgaccaactgtatggaaagttgtcagtaaaacctttgacagaggatggatttttaaacctgttcagagtcctggtttaatcaatcaagctaaaagaatcgaagacatccctagtgcatgtacacgaatgccctacgtcatccttccagcaccactgctgcatgggtcactctcggcctctcaattcttcaggctcagtctggactctacttacactcatttttatcttggctgacagcaggcaagcttcagtttgggctgtggacgctgccacacaagcctgagtagagcccatgcaaaggaagggatggggtgagcgcaaggcctgtggtcagcagctactgatggttttttctgccttaaaccgtgtgtgtgtccatcatcatcagtttgagctgtggctgtttgtttgggacagagtgcccactcagcatgtttggcagcaggtagccttcagcagctgtgtagtcttgtacaaggagaagctgtgcactgttgatgccagggggtctcggggcccctgatctgtccaggctcctggttcggcctactttctagcctcactcagcccagggatagccagtgttgggagacagagttgcctcaggttcccaggggcccgggagtccaaatactggaatggagggttggaggcagccttccttggatttactcatgaactttgcctagttgtttgtgatttttggctttctctggtcgttcaggggtgatgggtaatagagcaggcccgtgtccagtcatacctagagatttgtggggggatactgaacctctagactgaagtacttaccggggagcacagtggactaggggatgcccttgataatgacggtttcctaggtgcaagatcagagcatgtgcctacaccttgtgccctgatgccgaggtggagaccattgggaaataattaatagatatttttctggggggaaatcacaagtcactgaggtgtttgtttgtttgttaggcagtgctagagcttgaagccactcaagccagttggggaggaaagggatgcggaggtaccctctagctgggaagaagggtgagattccgtcttcttccctgtctcaagtaagtaaggaaggtactgcggacagtgtgggccagggaggaaaaccagagcacacagttttgtcaccatggaacaccccaaatgccattcttcagcgtgtctggtaccttggatgttcaaacagggaacactgtcagggctgaggagaacagaagctctggtaagcgaatgagcccctagatgataaccaggaactccaggttctgctggccgtggcatcctctctccaggtctgctcccttaccggagctaggataaggtagcatgagtgacacctgagattagaggctggggctcactgcaggctgtggagaggtcatgctggtccacaggaacacttggcagtgctctcgtagacccctcggtgatgtggaatggacaggtgcctcgcaagagagcaagcacgttcataacaaaacagcaacacaaagacatgttaagcatgtttatttatttgcctgtttttgtttttttacttgagctgtggtcacagctgccaggtacctaagcaagtcagttgggtacagcaggacacgccaccattccagggtagctggtaccgccagaaacaggagtgggtcttgtcctgttgcaggcacactgcagtggttttcctgcagctctccaacaaacgcctgagtcacaggccagagctgccttggtatgttgttaagtccaaaacttcttctctgggctacctatcttccttcatgaagcaggtgctcaggacccggaagaatcatctacctcccagctttgtgagacagaaccaagtaaaaggaaacatgctagaaaacgtgcctagagaagacacttcaacctttgccttatccaacccctcttcagagaaaggtgtcccatggccccaaaaagaactgccaagttttggtgaggagtaacaccctggcatgacattccttctctttcctggccctcaaccacttccttcctttggctcttaagacctagcaggttctgtgaactctcaggccttggccagcactagttaggggaggtcaggtggtcaatgtcctggtgattttatgagactgccccactgagaaaacttacttacttcaggcatccagtgcccccacccagggttcaggccctgtctaaggtgttgcttaaagacaaaaaggcaacatgtgcctcactggtggtgtgccactgttctcatgctgcctcctaagtgactccgattttcagccctggtagaataaggaagacagctgatgcctccttagccccttagcacatgttcctaaggtgtgttgtcaagccaacctgaattctgcctccctgttatagtccctgtctcccccacagagacctgtgggtgctcccagcagagttgagactggctccgttgagttaatgactagaatatagtgctttcactacttgattgttaacctgttttcttctgatgccatcagtaccagcagtcagactattccactggttaagtgtttactaccattaaagcgaggcatgaagcaaagagctgagtgagtcctctgctctccagaggaccaagaaatacctgtgtgacacagacccacttcagtgtgtacagcaaattctatagtgcttctgagcccagcagggctttacctgcccctggagagttttagccgtcttgtgtttcttgtttacttcacaaccaaatttgtcccctcttctctctgttaagggagagaagtcactttagctggataatacctatgtaacaaactgagcagctgttatttgggcaaaatcaaaggaagaaagagactatggtcttctatttattgtgggaaggaaaacagggtggggcgggtgagtgaaaaggtggaaatccctggtaccttgcctggtggttacacagtttaaccataggccaattttaggggcctctgaagtatctttctacaaacgcagacaagctccactacccctaacctgccaggatgctcaagtccactgtcacaatccctttcagaaaacattagtggccgctgccccagctacagagacggccgaaatgctttcactccttagctttgccaactccatcctccaaaacttcccagaatacctccctttccagttctaccaaatctgtacttgggagcagcctgctggatccagaacatgacaacagagagctgcgtccacagggaacaaagccctgacctctctctccacattacccttacaaaaacaggccctccccatgagagagctacacggcaggggcagacactgtgagtataagctactttcctccctggagtgctctatgtgggcagaacatgctctccttgcctctcctggaaggtgtcttctctatggcctggctagagctgcaaaaaagggacacaccccacttcggtaaaagaaaatagggaaaggccataaacaaagacagacttgtagtttattttgtattttttttaaataaatacactttacatt

SEQ ID NO: 26931 - DNA, 1669 bp, Homo sapiens
  source 1..1669: mol_type = unassigned DNA
gagcattcggaccattgatcacgtcaaaggagatagctttgcctatattcagtacgagagcttggacgcagcccaggccgcctgtgctaaaatgaggggttttcccttgggtggaccagaccgcaggctccgcgtggattttgccaaagcagaggagactcggtacccccagcagtaccagccctcgccactccctgtgcattatgagctgctcacagatggatacacccggcaccgcaacctggacgccgacctggtgcgggacaggacgcccccacaccttctgtactcagaccgagaccggacttttttggaaggggactggaccagccccagtaaaagctctgaccgccgaaacagccttgagggctacagtcgctcagtgcgcagccggagtggtgagcgttggggggcagatggagaccgtggtttgcccaccctgggaagagaggcggaaacggagaagcctttccagtgaccgtgggaggacaacccattcaccatatgaggaacggagtaggaccaagggcagtgggcagcagtcagagcggggctccgaccgcacccctgagcgcagccgcaaggagaaccactccagtgaagggaccaaggagtccagcagcaactccctcagcaacagcagacatggggctgaggaacggggccaccaccaccaccaccacgaggctgcagactcttcccacgggaagaaggcaagagacagcgagcgcaatcaccggaccacagaggccgagcccaagcctctggaagagccaaaacacgagaccaaaaagctgaagaatctttcagagtacgctcagacactacagctgggttggaatgggcttctggtgttgaaaaacagctgcttccccacgtctatgcatatcctagagggggaccagggggtgatcagcagtctcctcaaagaccacacttctgggagcaagctgacccagctgaagatcgcccagcgccttcgactggaccagcccaagcttgacgaggtcacacgacgcatcaagcaggggagccccaacggctatgcggtcctcttagccacccaggcaacccccagtgggcttggcactgaggggatgcccacagtagagcccggtctgcagaggcggcttctcaggaacctggtctcctacttgaaacagaagcaggccgcaggggtgatcagcttgccagtgggggggtccaagggcagagacggcacaggcatgctctacgccttcccaccctgcgacttttcccagcagtacctccagtcagcactaaggacattgggcaagctagaagaagaacacatggtgatagtcatcgtcagagacactgcctagcccaagcctgtctttcccagcgtcatgtttgtgtcacaaaagcagttattttaaaatctgatcccctctctaccctaccactttggtttgaattatctcctgggttattttggttcatttgggtggggatcaaagtcctgtccaccaccaaaactaagttcttagattttgggggatttttttttttaaacgatgagaagggaatccggttatgttgatttctagtgtacaagatactgtctgctgtggttctgtatttttttattttttgaccaactgtatggaaagttgtcagtaaaacctttgacagaggatggattttt

SEQ ID NO: 26932 - DNA, 1116 bp, Homo sapiens
  source 1..1116: mol_type = unassigned DNA
cgccgccgctgtgagaaacctacgggccgcccgcccgccgcgccagcgccatgaagcggcaaagcgagcgcaatcaccggaccacagaggccgagcccaagcctctggaagagccaaaacacgagaccaaaaagctgaagaatctttcagagtacgctcagacactacagctgggttggaatgggcttctggtgttgaaaaacagctgcttccccacgtctatgcatatcctagagggggaccagggggtgatcagcagtctcctcaaagaccacacttctgggagcaagctgacccagctgaagatcgcccagcgccttcgactggaccagcccaagcttgacgaggtcacacgacgcatcaagcaggggagccccaacggctatgcggtcctcttagccacccaggcaacccccagtgggcttggcactgaggggatgcccacagtagagcccggtctgcagaggcggcttctcaggaacctggtctcctacttgaaacagaagcaggccgcaggggtgatcagcttgccagtgggggggtccaagggcagagacggcacaggcatgctctacgccttcccaccctgcgacttttcccagcagtacctccagtcagcactaaggacattgggcaagctagaagaagaacacatggtgatagtcatcgtcagagacactgcctagcccaagcctgtctttcccagcgtcatgtttgtgtcacaaaagcagttattttaaaatctgatcccctctctaccctaccactttggtttgaattatctcctgggttattttggttcatttgggtggggatcaaagtcctgtccaccaccaaaactaagttcttagattttgggggatttttttttttaaacgatgagaagggaatccggttatgttgatttctagtgtacaagatactgtctgctgtggttctgtatttttttattttttgaccaactgtatggaaagttgtcagtaaaacctttgacagaggatggatttttaaacctgttcagagtcctggtttaatcaatcaagctaaaagaatcgaagacatccctagtgcatgtacacgaatgccctacgtcatccttccagcaccactgctgca

SEQ ID NO: 26933 - DNA, 2446 bp, Homo sapiens
  source 1..2446: mol_type = unassigned DNA
gccgccgctgtgagaaacctacgggccgcccgcccgccgcgccagcgccatgaagcggcagagcgagcgagactctagcccgccgacccgctcggctacctcccgctacacggaggctaccagtacaagcagcgctcgctgtcccccgtcgctgccccgcccctgcgggagccccgtgcccgtcacgccgccgcagccttcgccctggatgccgctgctgccgccgccgtgggactgtcccgggagcgggccctggactactacgggctgtacgacgaccgtgggcgcccctatggctacccagctgtgtgtgaggaggacctgatgcccgaggatgaccagcgggccacgcgcaacctcttcattggtaacctggaccacagcgtatctgaggtggagctgcgaagggccttcgagaaatatggcatcatcgaggaggtggtcatcaagaggcctgcccgtggccagggcggtgcctatgccttcctcaagttccagaacctggacatggcccatagggctaaggtggccatgtcgggccgagtgattggtcgcaaccccattaagataggctatggcaaggccaaccccaccactcgtctctgggtgggtggcctgggacctaacacgtcactggcggctctggcccgagagtttgaccgctttgggagcattcggaccattgatcacgtcaaaggagatagctttgcctatattcagtacgagagcttggacgcagcccaggccgcctgtgctaaaatgaggggttttcccttgggtggaccagaccgcaggctccgcgtggattttgccaaagcagaggagactcggtacccccagcagtaccagccctcgccactccctgtgcattatgagctgctcacagatggatacacccggcaccgcaacctggacgccgacctggtgcgggacaggacgcccccacaccttctgtactcagaccgagaccggacttttttggaaggggactggaccagccccagtaaaagctctgaccgccgaaacagccttgagggctacagtcgctcagtgcgcagccggagtggtgagcgttggggggcagatggagaccgtggtttgcccaagccctgggaagagaggcggaaacggagaagcctttccagtgaccgtgggaggacaacccattcaccatatgaggaacggagtaggaccaagggcagtgggcagcagtcagagcggggctccgaccgcacccctgagcgcagccgcaaggagaaccactccagtgaagggaccaaggagtccagcagcaactccctcagcaacagcagacatggggctgaggaacggggccaccaccaccaccaccacgaggctgcagactcttcccacgggaagaaggcaagagacagcgagcgcaatcaccggaccacagaggccgagcccaagcctctggaagagccaaaacacgagaccaaaaagctgaagaatctttcagagtacgctcagacactacagctgggttggaatgggcttctggtgttgaaaaacagctgcttccccacgtctatgcatatcctagagggggaccagggggtgatcagcagtctcctcaaagaccacacttctgggagcaagctgacccagctgaagatcgcccagcgccttcgactggaccagcccaagcttgacgaggtcacacgacgcatcaagcaggggagccccaacggctatgcggtcctcttagccacccaggcaacccccagtgggcttggcactgaggggatgcccacagtagagcccggtctgcagaggcggcttctcaggaacctggtctcctacttgaaacagaagcaggccgcaggggtgatcagcttgccagtgggggggtccaagggcagagacggcacaggcatgctctacgccttcccaccctgcgacttttcccagcagtacctccagtcagcactaaggacattgggcaagctagaagaagaacacatggtgatagtcatcgtcagagacactgcctagcccaagcctgtctttcccagcgtcatgtttgtgtcacaaaagcagttattttaaaatctgatcccctctctaccctaccactttggtttgaattatctcctgggttattttggttcatttgggtggggatcaaagtcctgtccaccaccaaaactaagttcttagattttgggggatttttttttttaaacgatgagaagggaatccggttatgttgatttctagtgtacaagatactgtctgctgtggttctgtatttttttattttttgaccaactgtatggaaagttgtcagtaaaacctttgacagaggatggatttttaaacctgttcagagtcctggtttaatcaatcaagctaaaagaatcgaagacatccctagtgcatgtacacgaatgccctacgtcatccttccagcaccactgctgca

SEQ ID NO: 26934 - DNA, 3192 bp, Homo sapiens
  source 1..3192: mol_type = unassigned DNA
gcaggcgcaggcgcaggcggggcgcaggcgcgggcgcgctctcccggcagcccgcgctccctgaccccgcgccgccgagcgccctgaggactcagcgaagggtgggcgccgccgaggcctcctgccgctggcgggtttccgcggagtgccgcccggctccgctctgccgccggcgcggctcatgggcagagtcggccgggcgggccggagccaaaggacgaaacaaagtacagtcctcgccccagtcattgacctgaagcgaggtggctcctcagatgaccggcaaattgtggacactccaccgcatgtagcagctgggctgaaggatcctgttcccagtgggttttctgcaggggaagttctgattcccttagctgacgaatatgaccctatgtttcctaatgattatgagaaagtagtgaagcgccaaagagaggaacgacagagacagcgggagctggaaagacaaaaggaaatagaagaaagggaaaaaaggcgtaaagacagacatgaagcaagtgggtttgcaaggagaccagatccagattctgatgaagatgaagattatgagcgagagaggaggaaaagaagtatgggcggagctgccattgccccacccacttctctggtagagaaagacaaagagttaccccgagattttccttatgaagaggactcaagacctcgatcacagtcttccaaagcagccattcctcccccagtgtacgaggaacaagacagaccgagatctccaaccggacctagcaactccttcctcgctaacatggggggcacggtggcgcacaagatcatgcagaagtacggcttccgggagggccagggtctggggaagcatgagcagggcctgagcactgccttgtcagtggagaagaccagcaagcgtggcggcaagatcatcgtgggcgacgccacagagaaagatgcatccaagaagtcagattcaaatccgctgactgaaatacttaagtgtcctactaaagtggtcttactaaggaacatggttggtgcgggagaggtggatgaagacttggaagttgaaaccaaggaagaatgtgaaaaatatggcaaagttggaaaatgtgtgatatttgaaattcctggtgcccctgatgatgaagcagtacggatatttttagaatttgagagagttgaatcagcaattaaagcggttgttgacttgaatgggaggtattttggtggacgggtggtaaaagcatgtttctacaatttggacaaattcagggtcttggatttggcagaacaagtttgattttaagaactagagcacgagtcatctccggtgatccttaaatgaactgcaggctgagaaaagaaggaaaaaggtcacagcctccatggctgttgcataccaagactcttggaaggacttctaagatatatgttgattgatcccttttttattttgtggttttttaatatagtataaaaatccttttaaaaaaacaacaatctgtgtgcctctctggttgtttctcttttttattattactcctgagttgatgacattttttgttagatttcatggtaattctcaagtgcttcaatgatgcagcatttcttgcactaaaaaaaaaaaaaaaaaaaaaactagaaagttttgggacatggggttatattaaattattctttgtttttctttttcttttaataaagcctgcaagttactaaattgtagtttcataaattctgtagtaaagtatcatcttggcagtgtgccaaaggtgaaaatgatgctttctctaacagagaaattcttagtgactccagtcgtagaaaaacgtctttacaacctgaataagattgaagaattgtgaacataccatggcctattggatgaatcatttgccgtaggctaaatcagactgtagggtttgtgatggatttatggagtatgtgggtatagaaatcatgaatctagcatttgttttcagagattcaagcatagtcttaagggtagatcagaaatgacaaatgaattcaaaacctagcaggtgcattgtaaatgtgtgcccagttatgttttggaaatggcagttccttggggtcatgtttctactggcaaaatttgcaatagtgttctattgtatgtaattttaaaatttataagattatccacgttggccaagtaaactgtactgccaatagaattctggaattgtgagaaattgtatcattgaagttcagtaggatgtgtggcttaaaaatttatcaggaccacaaaaaagaaaacaaaaatatttggtactgaggttcattgccagggcaggaggtatttccagaaaatactcatgcctgtgttctgttccttgctttcccaaatactgcatgtgactttcctaagcggcagctgaaagactcgagcccgtgctgtctcctttggttattatgacatgaaagtgtatcaagaactcagcatttctttgcatccatggacttggtttggagacataaggaatattctgaccctttttaaaaaaggattttctcatgtttttatttaacataaataaaagaataacattttatcttttgtggtattattttattgaataaaattgagttttatgataaaagtgcacctgttctgtaaagtaagttggggttaaggaatgtgaggtaaattacataattgaacattgtggaagacagaatcaaaagcagccctggaacttcagttatctatggaattaggcataccattcctcaagtggaaaccatgtttgtgcttacaagtaccggagtgtgcttgtttaattttagaaactaatggttccaacccacctttcatgcatgcatttattgttgttatgctttgtaaaacattgtttgcacctaaatgggtggcttttcctaacattctcatggtcagcaaccagagagttgcaaccaactcatactacttgatttccgttcgcatgaggacagcttggtgtgtgcctttctccccagtcttttatttttaaaataactgtgttaatcagttagtgctttatttataatgaatttctgatagtcgaataatttctaaatctcctgcaagttagtacttgagaaatttgaaattaattttcaatattaacatttaagctaatataaaaattttaaatttcaataaaaattaaaaattatgtaagctacaatgtaactggc

SEQ ID NO: 26935 - DNA, 2755 bp, Homo sapiens
  source 1..2755: mol_type = unassigned DNA
caggcgcaggcgcaggcggggcgcaggcgcgggcgcgctctcccggcagcccgcgctccctgaccccgcgccgccgagcgccctgaggactcagcgaagggtgggcgccgccgaggcctcctgccgctggcgggtttccgcggagtgccgcccggctccgctctgccgccggcgcggctcatgggcagagtcggccgggcgggccggcattaaactgaagaaaagatgtccctgtacgatgacctaggagtggagaccagtgactcaaaaacagaaggctggtccaaaaacttcaaacttctgcagtctcagcttcaggtgaagaaggcagctctcactcaggcaaagagccaaaggacgaaacaaagtacagtcctcgccccagtcattgacctgaagcgaggtggctcctcagatgaccggcaaattgtggacactccaccgcatgtagcagctgggctgaaggatcctgttcccagtgggttttctgcaggggaagttctgattcccttagctgacgaatatgaccctatgtttcctaatgattatgagaaagtagtgaagcgccaaagagaggaacgacagagacagcgggagctggaaagacaaaaggaaatagaagaaagggaaaaaaggcgtaaagacagacatgaagcaagtgggtttgcaaggagaccagatccagattctgatgaagatgaagattatgagcgagagaggaggaaaagaagtatgggcggagctgccattgccccacccacttctctggtagagaaagacaaagagttaccccgagattttccttatgaagaggactcaagacctcgatcacagtcttccaaagcagccattcctcccccagtgtacgaggaacaagacagaccgagatctccaaccggacctagcaactccttcctcgctaacatggggggcacggtggcgcacaagatcatgcagaagtacggcttccgggagggccagggtctggggaagcatgagcagggcctgagcactgccttgtcagtggagaagaccagcaagcgtggcggcaagatcatcgtgggcgacgccacagagaaagatgcatccaagaagtcagattcaaatccgctgactgaaatacttaagtgtcctactaaagtggtcttactaaggaacatggttggtgcgggagaggtggatgaagacttggaagttgaaaccaaggaagaatgtgaaaaatatggcaaagttggaaaatgtgtgatatttgaaattcctggtgcccctgatgatgaagcagtacggatatttttagaatttgagagagttgaatcagcaattaaagcggttgttgacttgaatgggaggtattttggtggacgggtggtaaaagcatgtttctacaatttggacaaattcagggtcttggatttggcagaacaagtttgattttaagaactagagcacgagtcatctccggtgatccttaaatgaactgcaggctgagaaaagaaggaaaaaggtcacagcctccatggctgttgcataccaagactcttggaaggacttctaagatatatgttgattgatcccttttttattttgtggttttttaatatagtataaaaatccttttaaaaaaacaacaatctgtgtgcctctctggttgtttctcttttttattattactcctgagttgatgacattttttgttagatttcatggtaattctcaagtgcttcaatgatgcagcatttcttgcactaaaaaaaaaaaaaaaaaaaaaactagaaagttttgggacatggggttatattaaattattctttgtttttctttttcttttaataaagcctgcaagttactaaattgtagtttcataaattctgtagtaaagtatcatcttggcagtgtgccaaaggtgaaaatgatgctttctctaacagagaaattcttagtgactccagtcgtagaaaaacgtctttacaacctgaataagattgaagaattgtgaacataccatggcctattggatgaatcatttgccgtaggctaaatcagactgtagggtttgtgatggatttatggagtatgtgggtatagaaatcatgaatctagcatttgttttcagagattcaagcatagtcttaagggtagatcagaaatgacaaatgaattcaaaacctagcaggtgcattgtaaatgtgtgcccagttatgttttggaaatggcagttccttggggtcatgtttctactggcaaaatttgcaatagtgttctattgtatgtaattttaaaatttataagattatccacgttggccaagtaaactgtactgccaatagaattctggaattgtgagaaattgtatcattgaagttcagtaggatgtgtggcttaaaaatttatcaggaccacaaaaaagaaaacaaaaatatttggtactgaggttcattgccagggcaggaggtatttccagaaaatactcatgcctgtgttctgttccttgctttcccaaatactgcatgtgactttcctaagcggcagctgaaagactcgagcccgtgctgtctcctttggttattatgacatgaaagtgtatcaagaactcagcatttctttgcatccatggacttggtttggagacataaggaatattctgaccctttttaaaaaaggattttctcatgtttttatttaacataaataaaagaataacattttatcttttgtggtattattttattgaataaaattgagttttatgataaaa

SEQ ID NO: 26936 - DNA, 792 bp, Homo sapiens
  source 1..792: mol_type = unassigned DNA
aatggtaccaggagcctgggcctctgttgctgaaaggtcctggaccttttacctctaaaatttcatgatacttattttaacatgaaaagcctttattgaattgtgcattctttaatccccaccccttttgcctttcagcattaaactgaagaaaagatgtccctgtacgatgacctaggagtggagaccagtgactcaaaaacagaaggctggtccaaaaacttcaaacttctgcagtctcagcttcaggtgaagaaggcagctctcactcaggcaaagagccaaaggacgaaacaaagtacagtcctcgccccagtcattgacctgaagcgaggtggctcctcagatgaccggcaaattgtggacactccaccgcatgtagcagctgggctgaaggatcctgttcccagtgggttttctgcaggggaagttctgattcccttagctgacgaatatgaccctatgtttcctaatgattatgagaaagtagtgaagcgccaaagagaggaacgacagagacagcgggagctggaaagacaaaaggaaatagaagaaagggaaaaaaggcgtaaagacagacatgaagcaagtgggtttgcaaggagaccagatccagattctgatgaagatgaagattatgagcgagagaggaggaaaagaagtatgggcggagctgccattgccccacccacttctctggtagagaaagacaaagagttaccccgagattttccttatgaagaggactcaagacctcgatcacagtcttccaaagcagccattcctccccca

SEQ ID NO: 26937 - DNA, 805 bp, Homo sapiens
  source 1..805: mol_type = unassigned DNA
gaggactcagcgaagggtgggcgccgccgaggcctcctgccgctggcgggtttccgcggagtgccgcccggctccgctctgccgccggcgcggctcatgggcagagtcggccgggcgggccggcattaaactgaagaaaagatgtccctgtacgatgacctaggagtggagaccagtgactcaaaaacagaaggctggtccaaaaacttcaaacttctgcagtctcagcttcaggtgaagaaggcagctctcactcaggcaaagagccaaaggacgaaacaaagtacagtcctcgccccagtcattgacctgaagcgaggtggctcctcagatgaccggcaaattgtggacactccaccgcatgtagcagctgggctgaaggatcctgttcccagtgggttttctgcaggggaagttctgattcccttagctgacgaatatgaccctatgtttcctaatgattatgagaaagtagtgaagcgccaaagagaggaacgacagagacagcgggagctggaaagacaaaaggaaatagaagaaagggaaaagcgtaaagacagacatgaagcaagtgggtttgcaaggagaccagatccagattctgatgaagatgaagattatgagcgagagaggaggaaaagaagtatgggcggagctgccattgccccacccacttctctggtagagaaagacaaagagttaccccgagattttccttatgaagaggactcaagacctcgatcacagtcttccaaagcagccattcctcccccagtgtacgaggaacaagacagaccgagatctc

SEQ ID NO: 26938 - DNA, 844 bp, Homo sapiens
  source 1..844: mol_type = unassigned DNA
gcgccgccgagcgccctgaggactcagcgaagggtgggcgccgccgaggcctcctgccgctggcgggtttccgcggagtgccgcccggctccgctctgccgccggcgcggctcatgggcagagtcggccgggcgggccggagccaaaggacgaaacaaagtacagtcctcgccccagtcattgacctgaagcgaggtggctcctcagatgaccggcaaattgtggacactccaccgcatgtagcagctgggctgaaggatcctgttcccagtgggttttctgcaggggaagttctgattcccttagctgacgaatatgaccctatgtttcctaatgattatgagaaagtagtgaagcgccaaagagaggaacgacagagacagcgggagctggaaagacaaaaggaaatagaagaaagggaaaaaaggcgtaaagacagacatgaagcaagtgggtttgcaaggagaccagatccagattctgatgaagatgaagattatgagcgagagaggaggaaaagaagtatgggcggagctgccattgccccacccacttctctggtagagaaagacaaagagttaccccgagattttccttatgaagaggactcaagacctcgatcacagtcttccaaagcagccattcctcccccagtgtacgaggaacaagacagaccgagatctccaaccggacctagcaactccttcctcgctaacatggggggcacggtggcgcacaagatcatgcagaagtacggcttccgggagggccagggtctggggaagcatgagcagggcctgagcactgccttgtcagtggagaagaccagcaagcgtggcggcaa

SEQ ID NO: 26939 - DNA, 3751 bp, Homo sapiens
  source 1..3751: mol_type = unassigned DNA
agtccccgcggcgggcgctggtctctccacgcggctgcggcccggtaccctccgcccgccgccgcctctggtgaccctggccctgaccttctccctcttcccttcctcctcctcctcctcatgtctgcctcgggctgtttggtgctgaagagcgtttcttctccgtctcgtgcaccgcatcctgacgaaattgtctggtcaccagaaccgagtagcccgtagcgtgtcccccctggccctgcacggttgcccctctctggggctcggagccggttcctcccggggtctcagaactgggagtgcagacgttggcgtttctcagactccggagctgcccgggacaggaatgcagccctaaccccggcgtcgcctcggctcgtgcagtttgagcggtgtttcagcgctcacgtccgaccccaggcagtctttgagcttcgcctcttgccccgagaatgtgtaatgatcggagaatgcaggtggaatgaggttctgcccctgcttgcaggagtttggtttctgggaaagcaggcgtgaaaacccaggcccgggttgatttgagaaacgcaagtggggtctggaaggacctctcttgagagaggaggtcatgcttatgttgagtcttgaagcattaaactgaagaaaagatgtccctgtacgatgacctaggagtggagaccagtgactcaaaaacagaaggctggtccaaaaacttcaaacttctgcagtctcagcttcaggtgaagaaggcagctctcactcaggcaaagagccaaaggacgaaacaaagtacagtcctcgccccagtcattgacctgaagcgaggtggctcctcagatgaccggcaaattgtggacactccaccgcatgtagcagctgggctgaaggatcctgttcccagtgggttttctgcaggggaagttctgattcccttagctgacgaatatgaccctatgtttcctaatgattatgagaaagtagtgaagcgccaaagagaggaacgacagagacagcgggagctggaaagacaaaaggaaatagaagaaagggaaaaaaggcgtaaagacagacatgaagcaagtgggtttgcaaggagaccagatccagattctgatgaagatgaagattatgagcgagagaggaggaaaagaagtatgggcggagctgccattgccccacccacttctctggtagagaaagacaaagagttaccccgagattttccttatgaagaggactcaagacctcgatcacagtcttccaaagcagccattcctcccccagtgtacgaggaacaagacagaccgagatctccaaccggacctagcaactccttcctcgctaacatggggggcacggtggcgcacaagatcatgcagaagtacggcttccgggagggccagggtctggggaagcatgagcagggcctgagcactgccttgtcagtggagaagaccagcaagcgtggcggcaagatcatcgtgggcgacgccacagagaaagatgcatccaagaagtcagattcaaatccgctgactgaaatacttaagtgtcctactaaagtggtcttactaaggaacatggttggtgcgggagaggtggatgaagacttggaagttgaaaccaaggaagaatgtgaaaaatatggcaaagttggaaaatgtgtgatatttgaaattcctggtgcccctgatgatgaagcagtacggatatttttagaatttgagagagttgaatcagcaattaaagcggttgttgacttgaatgggaggtattttggtggacgggtggtaaaagcatgtttctacaatttggacaaattcagggtcttggatttggcagaacaagtttgattttaagaactagagcacgagtcatctccggtgatccttaaatgaactgcaggctgagaaaagaaggaaaaaggtcacagcctccatggctgttgcataccaagactcttggaaggacttctaagatatatgttgattgatcccttttttattttgtggttttttaatatagtataaaaatccttttaaaaaaacaacaatctgtgtgcctctctggttgtttctcttttttattattactcctgagttgatgacattttttgttagatttcatggtaattctcaagtgcttcaatgatgcagcatttcttgcactaaaaaaaaaaaaaaaaaaaaaactagaaagttttgggacatggggttatattaaattattctttgtttttctttttcttttaataaagcctgcaagttactaaattgtagtttcataaattctgtagtaaagtatcatcttggcagtgtgccaaaggtgaaaatgatgctttctctaacagagaaattcttagtgactccagtcgtagaaaaacgtctttacaacctgaataagattgaagaattgtgaacataccatggcctattggatgaatcatttgccgtaggctaaatcagactgtagggtttgtgatggatttatggagtatgtgggtatagaaatcatgaatctagcatttgttttcagagattcaagcatagtcttaagggtagatcagaaatgacaaatgaattcaaaacctagcaggtgcattgtaaatgtgtgcccagttatgttttggaaatggcagttccttggggtcatgtttctactggcaaaatttgcaatagtgttctattgtatgtaattttaaaatttataagattatccacgttggccaagtaaactgtactgccaatagaattctggaattgtgagaaattgtatcattgaagttcagtaggatgtgtggcttaaaaatttatcaggaccacaaaaaagaaaacaaaaatatttggtactgaggttcattgccagggcaggaggtatttccagaaaatactcatgcctgtgttctgttccttgctttcccaaatactgcatgtgactttcctaagcggcagctgaaagactcgagcccgtgctgtctcctttggttattatgacatgaaagtgtatcaagaactcagcatttctttgcatccatggacttggtttggagacataaggaatattctgaccctttttaaaaaaggattttctcatgtttttatttaacataaataaaagaataacattttatcttttgtggtattattttattgaataaaattgagttttatgataaaagtgcacctgttctgtaaagtaagttggggttaaggaatgtgaggtaaattacataattgaacattgtggaagacagaatcaaaagcagccctggaacttcagttatctatggaattaggcataccattcctcaagtggaaaccatgtttgtgcttacaagtaccggagtgtgcttgtttaattttagaaactaatggttccaacccacctttcatgcatgcatttattgttgttatgctttgtaaaacattgtttgcacctaaatgggtggcttttcctaacattctcatggtcagcaaccagagagttgcaaccaactcatactacttgatttccgttcgcatgaggacagcttggtgtgtgcctttctccccagtcttttatttttaaaataactgtgttaatcagttagtgctttatttataatgaatttctgatagtcgaataatttctaaatctcctgcaagttagtacttgagaaatttgaaattaattttcaatattaacatttaagctaatataaaaattttaaatttcaataaaaattaaaaattatgtaagctacaatgtaactggc

SEQ ID NO: 26940 - DNA, 676 bp, Homo sapiens
  source 1..676: mol_type = unassigned DNA
ttcccttagctgacgaatatgaccctatgtttcctaatgattatgagaaagtagtgaagcgccaaagagaggaacgacagagacagcgggagctggaaagacaaaaggaaatagaagaaagggaaaaaaggcgtaaagacagacatgaagcaagtgggtttgcaaggagaccagatccagattctgatgaagatgaagattatgagcgagagaggaggaaaagaagtatgggcggagctgccattgccccacccacttctctggtagagaaagacaaagagttaccccgagattttccttatgaagaggactcaagacctcgatcacagtcttccaaagcagccattcctcccccagtgtacgaggaacaagacagaccgagatctccaaccggacctagcaactccttcctcgctaacatggggggcacggtggcgcacaagatcatgcagaagtacggcttccgggagggccagggtctggggaagcatgagcagggcctgagcactgccttgtcagtggagaagaccagcaagcgtggcggcaagatcatcgtgggcgacgccacagagaaaggtgtgtccccagggaagcgtgtgactagagggaaaggactggccccatccatatcagacatggccagtcttgatcctcatgtgtcagcagggggacaatg

SEQ ID NO: 26941 - DNA, 7233 bp, Homo sapiens
  source 1..7233: mol_type = unassigned DNA
ccgggaccgcccctcccttgagctctctcgccgcgatcccgggcgggtctcgccccgcatggtgctggcagcagccatgagccaggacgcggaccccagcggtccggagcagccggacagagttgcctgcagtgtgcctggtgcccgggcgtccccggcaccctccggcccgcgagggatgcagcagccgccgccgccgccccagccaccgcccccgccccaagccggcctaccccagatcatccaaaatgccgccaagctcctggacaagaacccattctcggtcagtaacccgaaccctctgcttccttcacctgccagtctccagctggctcaactgcaggcccagctcaccctccaccggctgaagctggcacagacagctgtcaccaacaacactgcagccgccacagtcctgaaccaagtcctctccaaagtggccatgtcccagcctctcttcaatcaactgaggcatccgtctgtgatcactggcccccacggccatgctggggttccccaacatgctgcagccatacccagtacccggtttccctctaatgcaattgccttttcaccccccagccagacacgaggccccggaccctccatgaaccttcccaaccagccacccagtgccatggtgatgcatcctttcactggggtaatgcctcagacccctggccagccagcagtcatcttgggcattggcaagactgggcctgctccagctacagcaggattctatgagtatggcaaagccagctctggccagacatatggccctgaaacagatggtcagcctggcttcctgccatcctcggcctcaacctcgggcagtgtgacctatgaagggcactacagccacacagggcaggatggtcaagctgccttttccaaagatttttacggacccaactcccaaggttcacatgtggccagcggatttccagctgagcaggctgggggcctgaaaagtgaggtcgggccactgctgcagggcacaaacagccaatgggagagcccccatggattctcgggccaaagcaagcctgatctcacagcaggtcccatgtggcctccaccccacaaccagccctatgagctgtacgaccccgaggaaccaacctcagacaggacacctccttccttcgggggtcggcttaacaacagcaaacagggttttatcggtgctgggcggagggccaaggaggaccaggcgttgctatctgtgcggcccctgcaggctcatgagctgaacgactttcacggtgtggcccccctccacttgccgcatatctgtagcatctgtgacaagaaggtgtttgatttgaaggactgggagctgcatgtgaaagggaagctgcacgctcagaaatgcctggtcttctctgaaaatgctggcatccggtgtatacttggttcggcagagggaacattgtgtgcttctcccaacagcacagctgtttataaccctgctgggaatgaagattatgcctcaaatcttggaacatcatacgtgcccattccagcaaggtcattcactcagtcaagccccacatttcctttggcttctgtggggacaacttttgcacagcggaaaggggctggccgtgtggtgcacatctgcaatctccctgaaggaagctgcactgagaatgacgtcattaacctggggctgccctttggaaaggtcactaattacatcctcatgaagtcgactaatcaggcctttttagagatggcttacacagaagctgcacaggccatggtccagtattatcaagaaaaatctgctgtgatcaatggtgagaagttgctcattcggatgtccaagagatacaaggaattgcagctcaagaaacccgggaaggccgtggctgccatcatccaggacatccattcccagagggagagggacatgttccgggaagcagacagatatggcccagaaaggccgcggtctcgtagtccggtgagccggtcactctccccgaggtcccacactcccagcttcacctcctgcagctcttcccacagccctccgggcccctcccgggctgactggggcaatggccgggactcctgggagcactctccctatgccaggagggaggaagagcgagacccggctccctggagggacaacggagatgacaagagggacaggatggacccctgggcacatgatcgcaaacaccacccccggcaactggacaaggctgagttggacgagcgaccagaaggagggaggccccaccgggagaagtacccgagatctgggtctcccaacctgccccactctgtgtccagctacaaaagccgtgaagacggctactaccggaaagagcccaaagccaagtgggacaagtatctgaagcagcagcaggatgcccccgggaggtccaggaggaaagacgaggccaggctgcgggaaagcagacacccccatccggatgactcaggcaaggaagatgggctggggccaaaggtcactagggcccctgagggcgccaaggccaagcagaatgagaaaaataaaaccaagagaactgatagagaccaagaaggagctgatgatagaaaagaaaacacaatggcagagaatgaggctggaaaagaggaacaggagggcatggaagaaagccctcaatcagtgggcagacaggagaaagaagcagagttctctgatccggaaaacacaaggacaaagaaggaacaagattgggagagtgaaagtgaggcagagggggagagctggtatcccactaacatggaggagctggtgacagtggacgaggttggggaagaagaagattttatcgtggaaccagacatcccagagctggaagaaattgtgcccattgaccagaaagacaaaatttgcccagaaacatgtctgtgtgtgacaaccaccttagacttagacctggcccaggatttccccaaggaaggagtcaaggccgtagggaatggggctgcagaaatcagcctcaagtcacccagagaactgccctctgcttccacaagctgtcccagtgacatggacgtggaaatgcctggcctaaatctggatgctgagcggaagccagctgaaagtgagacaggcctctccctggaggattcagattgctacgagaaggaggcaaagggagtggagagctcagatgttcatccagcccctacagtccagcaaatgtcttcccctaagccagcagaggagagggcccggcagccaagcccatttgtggatgattgcaagaccagggggacccccgaagatggggcttgtgaaggcagccccctggaggagaaagccagcccccccatcgaaactgacctccaaaaccaagcttgccaagaagtgttgaccccggaaaactccaggtacgtggaaatgaaatctctggaggtgaggtcaccagagtacactgaagtggaactgaaacagcccctttctttgccctcttgggaaccagaggatgtgttcagtgaacttagcattcctctaggggtggagttcgtggttcccaggactggcttttattgcaagctgtgtgggctgttctacacgagcgaggagacagcaaagatgagccactgccgcagcgctgtccactacaggaacttacagaaatatttgtcccagctggccgaggagggcctcaaggagaccgagggggcagatagcccgaggccagaggacagcggaatcgtgccacgcttcgaaaggaaaaagctctgatgcttctgcttctgctgctactgctgctgctgcaaggttggaaaggagagcttgctgaagtggggccttcctgattctggggacaggactaaagcctgagaggaaggaaaaccaagcagggcacattgcttgggcttgttcccagagactcagtgaaatgcccctgatatgtctccaggagcaagtcacccaggtgtgtccagcccactgagggtcaccaactctctccctgctgactcttgtttctctcaatctttcaattcgtttttctctcttttcctcttgttctttctctccctccctccttatgtgccaaggatcgtttccttttcacaaaacccaacttctcagggattttcacagtgtttaaattcttggtaggatataacaggtcaggcctagctgagtcaggcaaggaaaaggtttaatggaaactcctgggtcaggcgaacccctgcagtgagtctacagcagtatctctgcctggtgtcccatgtatcccctgcatgaggagctgagtcaggtctgcagtcctggtgaggggacatcacggacaatctgttggcagagctgggagggtcttcattaacctcttcctccaactgggccacccttttgaaaagcccctgtttttaataactgtttcatcctctcagttattctagaaatctgccagacttatgccttaaagtaaaattaaatgaattttagagaagatgaaaagagcccttcattttggaagctctgataagtttcctccaaacttattcccctcctcttgatttcaggagatgtcagggtttttctattctggacaatgaatttggtacagagtcactgtaattaaatataaaaacagaagcatcttcctccagctaaagcagcagttggcgcgggcttaggttgaatgctggcctctctgcaaagcacagctttggctcgagaggcacagctccaggctgtggaaaacagagttgtcttgggggttaaatgagcttatttaagtcaaggaaacatcatctgtccttgattcagccttggtgcctgcactctggggtacaaccacctcacagtaggatggtttttaaatggccccccagttgggggagaagctaaggaaagagaaggctgcagatccaaagagtggcattgaagtttgctgggtgtctgtaggtggaccctttccagctgggcagatagttgagggctccctgggtttgactgtatgtgcagactttgataccaaaatgttatgaaaagtcgtgattcccgctgctctttctggtactggagggtgggtaccttcaggctgtggggtctctagcctgatattccattgaaagggtgtgggataaaggtgctgggggaaatgaggctctgccacagccatagagaggccctcgggcagttaagaagggagcctggagctgttttcatgagcagagatactctcctgaaagcacccttcatagcttagcccaggaaaaataaaacaaggaagacaggtcactctcccctaggcagttcctgttgtttctgttcctgaccttgggcaggcagactgagaagggactgtgtagggttttgttttgttttttttcattttcctttttatggcatgtgagagcatactgtacattctgtcctctgtactaatggaggaagggcagagagattagttcaaggctaacattttatatcaggtaactgaggcacacaaagggaacaaatgaagaacataaaatgatcagtgtaaacctgaaagcacgcagtcattggcaagggacaggctcatgggagctggtgagagagagcagttaaggcaagcaccaggggaaagcagaccaacttgaacagatgtgatgcggagaggttggaagaagcaagaaacctgaactcatcatcaggctattaaataaaatttataggaggctgttggtttggactgagctcctgcaataggcccaacagaccaaaacaaaagggagtcactcatgttgaagttctgtcttccaggaaatcaggagagagagagagagaaagaatagccaaatccccaaacaggccagttttaaccagcatgatgaagtgtccttggttttaacctttataaggaaagcagctttgagatgaccagtctggtttttgttctttgtgtctgctttcctcagcccttttctgtctataaagccaacctcctccgctcagctcatgggaacactcattctattttatagaatgacatgttgcccaattctagaatcaaaaataaaggccaactaagatcttcaaagtaaatttgttgtaattttatcttttgagaagaccatatgggggctgctgaaaagttggtatctcaaataaagtctgaagatcacggctcagcccagattgttcccctggccaactccacaggtttgaacctggcattctggacaccagctatgcctcctccatttctcagaaaacctttgatcttgtgtgtctttcttcctactgaagggaattgtgggggcagttctttggccttcttgctgaactttgctggaaatagcccacaatttttatcagaggttagaactgtacattatcagagagactggacactttatcccctagcaaagtgggagaagattttaccagctcattccactccaccctggccttcccccaccccccatccccagcagcatttccatggaaatccagatggtcgtgtagtgttatggctctcttgtgatagactggccttcatattggagagctagggagagcccctgggagggagagagataaggcgctatctgccttcaatcagaaccttcggtttaaaatcatctaagagtctatacttgtgtgtacatacgtatttatttttatttatttttatacaattccattggcatggtccttcaccgaccctatgatttgcactttttatttctatgtgtgccacacacaatgcagtattaatggcaaccaggtaaatattgatttattttttaaagcttttcttcagtgttttgtcaaccatttcaaagtgtctcccaaaaaaggatgctgaagagcaattgctcccttaagcaacagattcatatttaccctgggttaatacaacaaaaggcctgtataattgtcttttcattgttaacacccaaaatagcatctatctagacagtatccccaaagaatttggaaaatctgatggtgtgagcagcagccgttagtatcagggtttcccattcttggacagtccgaggctgtgacctgttagataattagattatacttgaactggaccagagtttgttttttgaatttatgagaaaaaccaaaacactaagttaagtttgaacttgtaaagtattgaaatttgttgagtgtcctataaattgtcactacttttcctgatctgtataactgactgcaaagtgtttgtttttacaaaagagaaaagaaaagatttttaataaagagaatttgaaagctgt

SEQ ID NO: 26942 - DNA, 7271 bp, Homo sapiens
  source 1..7271: mol_type = unassigned DNA
ccgggaccgcccctcccttgagctctctcgccgcgatcccgggcgggtctcgccccgcatggtgctggcagcagccatgagccaggacgcggaccccagcggtccggagcagccggacagagttgcctgcagtgtgcctggtgcccgggcgtccccggcaccctccggcccgcgagggatgcagcagccgccgccgccgccccagccaccgcccccgccccaagccggcctaccccagatcatccaaaatgccgccaagctcctggacaagaacccattctcggtcagtaacccgaaccctctgcttccttcacctgccagtctccagctggctcaactgcaggcccagctcaccctccaccggctgaagctggcacagacagctgtcaccaacaacactgcagccgccacagtcctgaaccaagtcctctccaaagtggccatgtcccagcctctcttcaatcaactgaggcatccgtctgtgatcactggcccccacggccatgctggggttccccaacatgctgcagccatacccagtacccggtttccctctaatgcaattgccttttcaccccccagccagacacgaggccccggaccctccatgaaccttcccaaccagccacccagtgccatggtgatgcatcctttcactggggtaatgcctcagacccctggccagccagcagtcatcttgggcattggcaagactgggcctgctccagctacagcaggattctatgagtatggcaaagccagctctggccagacatatggccctgaaacagatggtcagcctggcttcctgccatcctcggcctcaacctcgggcagtgtgacctatgaagggcactacagccacacagggcaggatggtcaagctgccttttccaaagatttttacggacccaactcccaaggttcacatgtggccagcggatttccagctgagcaggctgggggcctgaaaagtgaggtcgggccactgctgcagggcacaaacagccaatgggagagcccccatggattctcgggccaaagcaagcctgatctcacagcaggtcccatgtggcctccaccccacaaccagccctatgagctgtacgaccccgaggaaccaacctcagacaggacacctccttccttcgggggtcggcttaacaacagcaaacagggttttatcggtgctgggcggagggccaaggaggaccaggcgttgctatctgtgcggcccctgcaggctcatgagctgaacgactttcacggtgtggcccccctccacttgccgcatatctgtagcatctgtgacaagaaggtgtttgatttgaaggactgggagctgcatgtgaaagggaagctgcacgctcagaaatgcctggtcttctctgaaaatgctggcatccggtgtatacttggttcggcagagggaacattgtgtgcttctcccaacagcacagctgtttataaccctgctgggaatgaagattatgcctcaaatcttggaacatcatacgtgcccattccagcaaggtcattcactcagtcaagccccacatttcctttggcttctgtggggacaacttttgcacagcggaaaggggctggccgtgtggtgcacatctgcaatctccctgaaggaagctgcactgagaatgacgtcattaacctggggctgccctttggaaaggtcactaattacatcctcatgaagtcgactaatcaggcctttttagagatggcttacacagaagctgcacaggccatggtccagtattatcaagaaaaatctgctgtgatcaatggtgagaagttgctcattcggatgtccaagagatacaaggaattgcagctcaagaaacccgggaaggccgtggctgccatcatccaggacatccattcccagagggagagggacatgttccgggaagcagacagatatggcccagaaaggccgcggtctcgtagtccggtgagccggtcactctccccgaggtcccacactcccagcttcacctcctgcagctcttcccacagccctccgggcccctcccgggctgactggggcaatggccgggactcctgggagcactctccctatgccaggagggaggaagagcgagacccggctccctggagggacaacggagatgacaagagggacaggatggacccctgggcacatgatcgcaaacaccacccccggcaactggacaaggctgagttggacgagcgaccagaaggagggaggccccaccgggagaagtacccgagatctgggtctcccaacctgccccactctgtgtccagctacaaaagccgtgaagacggctactaccggaaagagcccaaagccaagtgggacaagtatctgaagcagcagcaggatgcccccgggaggtccaggaggaaagacgaggccaggctgcgggaaagcagacacccccatccggatgactcaggcaaggaagatgggctggggccaaaggtcactagggcccctgagggcgccaaggccaagcagaatgagaaaaataaaaccaagagaactgatagagaccaagaaggagctgatgatagaaaagaaaacacaatggcagagaatgaggctggaaaagaggaacaggagggcatggaagaaagccctcaatcagtgggcagacaggagaaagaagcagagttctctgatccggaaaacacaaggacaaagaaggaacaagattgggagagtgaaagtgaggcagagggggagagctggtatcccactaacatggaggagctggtgacagtggacgaggttggggaagaagaagattttatcgtggaaccagacatcccagagctggaagaaattgtgcccattgaccagaaagacaaaatttgcccagaaacatgtctgtgtgtgacaaccaccttagacttagacctggcccaggatttccccaaggaaggagtcaaggccgtagggaatggggctgcagaaatcagcctcaagtcacccagagaactgccctctgcttccacaagctgtcccagtgacatggacgtggaaatgcctggcctaaatctggatgctgagcggaagccagctgaaagtgagacaggcctctccctggaggattcagattgctacgagaaggaggcaaagggagtggagagctcagatgttcatccagcccctacagtccagcaaatgtcttcccctaagccagcagaggagagggcccggcagccaagcccatttgtggatgattgcaagaccagggggacccccgaagatggggcttgtgaaggcagccccctggaggagaaagccagcccccccatcgaaactgacctccaaaaccaagcttgccaagggtctgacagtgatacaagacttgtttcaggatattctctcactccattggagaaaactccaggtacgtggaaatgaaatctctggaggtgaggtcaccagagtacactgaagtggaactgaaacagcccctttctttgccctcttgggaaccagaggatgtgttcagtgaacttagcattcctctaggggtggagttcgtggttcccaggactggcttttattgcaagctgtgtgggctgttctacacgagcgaggagacagcaaagatgagccactgccgcagcgctgtccactacaggaacttacagaaatatttgtcccagctggccgaggagggcctcaaggagaccgagggggcagatagcccgaggccagaggacagcggaatcgtgccacgcttcgaaaggaaaaagctctgatgcttctgcttctgctgctactgctgctgctgcaaggttggaaaggagagcttgctgaagtggggccttcctgattctggggacaggactaaagcctgagaggaaggaaaaccaagcagggcacattgcttgggcttgttcccagagactcagtgaaatgcccctgatatgtctccaggagcaagtcacccaggtgtgtccagcccactgagggtcaccaactctctccctgctgactcttgtttctctcaatctttcaattcgtttttctctcttttcctcttgttctttctctccctccctccttatgtgccaaggatcgtttccttttcacaaaacccaacttctcagggattttcacagtgtttaaattcttggtaggatataacaggtcaggcctagctgagtcaggcaaggaaaaggtttaatggaaactcctgggtcaggcgaacccctgcagtgagtctacagcagtatctctgcctggtgtcccatgtatcccctgcatgaggagctgagtcaggtctgcagtcctggtgaggggacatcacggacaatctgttggcagagctgggagggtcttcattaacctcttcctccaactgggccacccttttgaaaagcccctgtttttaataactgtttcatcctctcagttattctagaaatctgccagacttatgccttaaagtaaaattaaatgaattttagagaagatgaaaagagcccttcattttggaagctctgataagtttcctccaaacttattcccctcctcttgatttcaggagatgtcagggtttttctattctggacaatgaatttggtacagagtcactgtaattaaatataaaaacagaagcatcttcctccagctaaagcagcagttggcgcgggcttaggttgaatgctggcctctctgcaaagcacagctttggctcgagaggcacagctccaggctgtggaaaacagagttgtcttgggggttaaatgagcttatttaagtcaaggaaacatcatctgtccttgattcagccttggtgcctgcactctggggtacaaccacctcacagtaggatggtttttaaatggccccccagttgggggagaagctaaggaaagagaaggctgcagatccaaagagtggcattgaagtttgctgggtgtctgtaggtggaccctttccagctgggcagatagttgagggctccctgggtttgactgtatgtgcagactttgataccaaaatgttatgaaaagtcgtgattcccgctgctctttctggtactggagggtgggtaccttcaggctgtggggtctctagcctgatattccattgaaagggtgtgggataaaggtgctgggggaaatgaggctctgccacagccatagagaggccctcgggcagttaagaagggagcctggagctgttttcatgagcagagatactctcctgaaagcacccttcatagcttagcccaggaaaaataaaacaaggaagacaggtcactctcccctaggcagttcctgttgtttctgttcctgaccttgggcaggcagactgagaagggactgtgtagggttttgttttgttttttttcattttcctttttatggcatgtgagagcatactgtacattctgtcctctgtactaatggaggaagggcagagagattagttcaaggctaacattttatatcaggtaactgaggcacacaaagggaacaaatgaagaacataaaatgatcagtgtaaacctgaaagcacgcagtcattggcaagggacaggctcatgggagctggtgagagagagcagttaaggcaagcaccaggggaaagcagaccaacttgaacagatgtgatgcggagaggttggaagaagcaagaaacctgaactcatcatcaggctattaaataaaatttataggaggctgttggtttggactgagctcctgcaataggcccaacagaccaaaacaaaagggagtcactcatgttgaagttctgtcttccaggaaatcaggagagagagagagagaaagaatagccaaatccccaaacaggccagttttaaccagcatgatgaagtgtccttggttttaacctttataaggaaagcagctttgagatgaccagtctggtttttgttctttgtgtctgctttcctcagcccttttctgtctataaagccaacctcctccgctcagctcatgggaacactcattctattttatagaatgacatgttgcccaattctagaatcaaaaataaaggccaactaagatcttcaaagtaaatttgttgtaattttatcttttgagaagaccatatgggggctgctgaaaagttggtatctcaaataaagtctgaagatcacggctcagcccagattgttcccctggccaactccacaggtttgaacctggcattctggacaccagctatgcctcctccatttctcagaaaacctttgatcttgtgtgtctttcttcctactgaagggaattgtgggggcagttctttggccttcttgctgaactttgctggaaatagcccacaatttttatcagaggttagaactgtacattatcagagagactggacactttatcccctagcaaagtgggagaagattttaccagctcattccactccaccctggccttcccccaccccccatccccagcagcatttccatggaaatccagatggtcgtgtagtgttatggctctcttgtgatagactggccttcatattggagagctagggagagcccctgggagggagagagataaggcgctatctgccttcaatcagaaccttcggtttaaaatcatctaagagtctatacttgtgtgtacatacgtatttatttttatttatttttatacaattccattggcatggtccttcaccgaccctatgatttgcactttttatttctatgtgtgccacacacaatgcagtattaatggcaaccaggtaaatattgatttattttttaaagcttttcttcagtgttttgtcaaccatttcaaagtgtctcccaaaaaaggatgctgaagagcaattgctcccttaagcaacagattcatatttaccctgggttaatacaacaaaaggcctgtataattgtcttttcattgttaacacccaaaatagcatctatctagacagtatccccaaagaatttggaaaatctgatggtgtgagcagcagccgttagtatcagggtttcccattcttggacagtccgaggctgtgacctgttagataattagattatacttgaactggaccagagtttgttttttgaatttatgagaaaaaccaaaacactaagttaagtttgaacttgtaaagtattgaaatttgttgagtgtcctataaattgtcactacttttcctgatctgtataactgactgcaaagtgtttgtttttacaaaagagaaaagaaaagatttttaataaagagaatttgaaagctgt

SEQ ID NO: 26943 - DNA, 2342 bp, Homo sapiens
  source 1..2342: mol_type = unassigned DNA
aagaagccctagacgcgtaaataagacgccgaccggcgcggcgctagcctcggggcttgacgggattgtggcggtcctctctcccaattcggaagctacagctacctccggacgctctcaagatggcgacctctctgggttccaacacctacaacaggcagaactgggaggatgcggacttccccattctgtgccagacatgtcttggagaaaacccatatatccgaatgaccaaagaaaagtatgggaaggaatgcaaaatctgtgccaggccattcacagtgtttcgctggtgccctggagtccgcatgcgtttcaagaagactgaagtgtgccaaacctgcagtaaattgaagaatgtctgtcagacctgcctcttagacctagagtatggcctgcccatccaggttcgtgacgcaggattgtcttttaaagatgacatgccaaagtcagatgtcaacaaagagtactatacacagaatatggagagagagatttctaactctgatggaacacggccagttggcatgctggggaaagccacatctaccagtgacatgctgctcaaactggcccggaccacaccctactacaaaaggaatcgaccccacatttgctccttctgggtgaaaggagagtgtaagagaggagaggaatgtccatacagacatgagaagcctacagatccagatgacccccttgctgatcagaatattaaagaccgttattacggaatcaatgatcctgtagctgacaagcttctaaagcgggcttcaacaatgcctcggctggacccaccagaggataaaactatcaccacactatatgttggtggtctaggtgataccattactgagacagatttaagaaatcatttctaccagttcggagagatccggacgatcactgttgtgcagagacagcagtgtgctttcatccagtttgccacacggcaggctgcagaagtggctgctgagaagtcctttaataagttgattgtaaatggccgcagactgaatgtgaaatggggaagatcccaggcagccagaggaaaagaaaaagagaaagatggaactacagactctgggatcaaactagaacctgttccaggattgccaggagctcttcctcctcctcctgcagcagaagaagaagcctctgccaactacttcaacttgcccccaagtggtcctccagctgtggtgaacattgctctgccaccgccccctggcattgctccacccccacccccaggttttgggccacacatgttccacccaatgggaccaccccctcctttcatgcgggctccaggaccaatccactatccttctcaggaccctcagaggatgggagctcatgctggaaaacacagcagcccctagcaccttgtcaccactctggggctctgtggaagaaagggcacttaaaactcccagtaaatcttggaataaatatatttttccttcccttgtagtttccatggtagctgaatgtgctcagatgtgagcagtcagagactgacagccatgctttcctatacttgttcaaaggatcgatggaccgtaaataagctgccattaacacatctggttactgctgtaacatgactaataaaaccgaacgcctgttccccttacccgtgtgggggacacgcagatgagtgaattggaatgtccagcagagttaccctcccaattatatgttcattttgtatattttttggtcgggggaaaaattgacctgcagtaaaaaaacctttgaccatttttatgtccattggatactttcctttttatcatcttaaaaaaagataactagtactaatcattgtagtggcctaagtgtgatttaactcttgaagtcacaccctccgaaagatgagtagaaaccagcaccagcacagcccagatcttctctttcctctccttttcctcatttattcctaaaggaatctgaccattttacgtctctacggcccaaaaaaagacaaaaataaaaattcctttttattcctgtcaactggatggaaacacaaatttcatggagctgtgtaccatcgaagaaacctggtgtctggcatgaaattactgtaaagaacttcctgtaaaacacgttctttaacaaactgaaatgaaaagcattggagcgtctgaatgaaagacgtgacctcctgctgggactctgatggtcttcagcattcaccttcgtgtgtcttcagtgtctcattgtcatccctgcttctgtttggtcttagagtgtttggatataactgaattgtagatggtaaaggaaatttgatgtgttttttgtttttaaataattaaaacgggtcaattttt

SEQ ID NO: 26944 - DNA, 1386 bp, Homo sapiens
  source 1..1386: mol_type = unassigned DNA
caattcggaagctacagctacctccggacgctctcaagatggcgacctctctgggttccaacacctacaacaggcagaactgggaggatgcggacttccccattctgtgccagacatgtcttggagaaaacccatatatccgaatgaccaaagaaaagtatggcctgcccatccaggttcgtgacgcaggattgtcttttaaagatgacatgccaaagtcagatgtcaacaaagagtactatacacagaatatggagagagagatttctaactctgatggaacacggccagttggcatgctggggaaagccacatctaccagtgacatgctgctcaaactggcccggaccacaccctactacaaaaggaatcgaccccacatttgctccttctgggtgaaaggagagtgtaagagaggagaggaatgtccatacagacatgagaagcctacagatccagatgacccccttgctgatcagaatattaaagaccgttattacggaatcaatgatcctgtagctgacaagcttctaaagcgggcttcaacaatgcctcggctggacccaccagaggataaaactatcaccacactatatgttggtggtctaggtgataccattactgagacagatttaagaaatcatttctaccagttcggagagatccggacgatcactgttgtgcagagacagcagtgtgctttcatccagtttgccacacggcaggctgcagaagtggctgctgagaagtcctttaataagttgattgtaaatggccgcagactgaatgtgaaatggggaagatcccaggcagccagaggaaaagaaaaagagaaagatggaactacagactctgggatcaaactagaacctgttccaggattgccaggagctcttcctcctcctcctgcagcagaagaagaagcctctgccaactacttcaacttgcccccaagtggtcctccagctgtggtgaacattgctctgccaccgccccctggcattgctccacccccacccccaggttttgggccacacatgttccacccaatgggaccaccccctcctttcatgcgggctccaggaccaatccactatccttctcaggaccctcagaggatgggagctcatgctggaaaacacagcagcccctagcaccttgtcaccactctggggctctgtggaagaaagggcacttaaaactcccagtaaatcttggaataaatatatttttccttcccttgtagtttccatggtagctgaatgtgctcagatgtgagcagtcagagactgacagccatgctttcctatacttgttcaaaggatcgatggaccgtaaataagctgccattaacacatctggttactgctgtaacatgactaataa

SEQ ID NO: 26945 - DNA, 2128 bp, Homo sapiens
  source 1..2128: mol_type = unassigned DNA
gtggcggtcctctctcccaattcggaagctacagctacctccggacgctctcaagatggcgacctctctgggttccaacacctacaacaggcagaactgggaggatgcggacttccccattctgtgccagacatgtcttggagaaaacccatatatccgaatggaaagggaaaaatcaggcctgcccatccaggttcgtgacgcaggattgtcttttaaagatgacatgccaaagtcagatgtcaacaaagagtactatacacagaatatggagagagagatttctaactctgatggaacacggccagttggcatgctggggaaagccacatctaccagtgacatgctgctcaaactggcccggaccacaccctactacaaaaggaatcgaccccacatttgctccttctgggtgaaaggagagtgtaagagaggagaggaatgtccatacagacatgagaagcctacagatccagatgacccccttgctgatcagaatattaaagaccgttattacggaatcaatgatcctgtagctgacaagcttctaaagcgggcttcaacaatgcctcggctggacccaccagaggataaaactatcaccacactatatgttggtggtctaggtgataccattactgagacagatttaagaaatcatttctaccagttcggagagatccggacgatcactgttgtgcagagacagcagtgtgctttcatccagtttgccacacggcaggctgcagaagtggctgctgagaagtcctttaataagttgattgtaaatggccgcagactgaatgtgaaatggggaagatcccaggcagccagaggaaaagaaaaagagaaagatggaactacagactctgggatcaaactagaacctgttccaggattgccaggagctcttcctcctcctcctgcagcagaagaagaagcctctgccaactacttcaacttgcccccaagtggtcctccagctgtggtgaacattgctctgccaccgccccctggcattgctccacccccacccccaggttttgggccacacatgttccacccaatgggaccaccccctcctttcatgcgggctccaggaccaatccactatccttctcaggaccctcagaggatgggagctcatgctggaaaacacagcagcccctagcaccttgtcaccactctggggctctgtggaagaaagggcacttaaaactcccagtaaatcttggaataaatatatttttccttcccttgtagtttccatggtagctgaatgtgctcagatgtgagcagtcagagactgacagccatgctttcctatacttgttcaaaggatcgatggaccgtaaataagctgccattaacacatctggttactgctgtaacatgactaataaaaccgaacgcctgttccccttacccgtgtgggggacacgcagatgagtgaattggaatgtccagcagagttaccctcccaattatatgttcattttgtatattttttggtcgggggaaaaattgacctgcagtaaaaaaacctttgaccatttttatgtccattggatactttcctttttatcatcttaaaaaaagataactagtactaatcattgtagtggcctaagtgtgatttaactcttgaagtcacaccctccgaaagatgagtagaaaccagcaccagcacagcccagatcttctctttcctctccttttcctcatttattcctaaaggaatctgaccattttacgtctctacggcccaaaaaaagacaaaaataaaaattcctttttattcctgtcaactggatggaaacacaaatttcatggagctgtgtaccatcgaagaaacctggtgtctggcatgaaattactgtaaagaacttcctgtaaaacacgttctttaacaaactgaaatgaaaagcattggagcgtctgaatgaaagacgtgacctcctgctgggactctgatggtcttcagcattcaccttcgtgtgtcttcagtgtctcattgtcatccctgcttctgtttggtcttagagtgtttggatataactgaattgtagatggtaaaggaaatttgatgtgttttttgtttttaaataattaaaacgggtcaattttt

SEQ ID NO: 26946 - DNA, 4426 bp, Homo sapiens
  source 1..4426: mol_type = unassigned DNA
tggtgagtcagagccaacagcggagacgatctatatacgttcttctctatggttccgcgctccccgcccccggccgcagtgcacgccgggcaagaggaagacctccatcagctcgccgcgcagcgcggctgtatttgcggcctgtgcgagtaggcgcttgggcactcagtctccctggcgagcgacgggcagaaatctcgaaccagtggagcgcactcgtaacctggatcccagaaggtcgcgaaggcagtaccgtttcctcagcggcggactgctgcagtaagaatgtcttttccacctcatttgaatcgccctcccatgggaatcccagcactcccaccagggatcccacccccgcagtttccaggatttcctccacctgtacctccagggaccccaatgattcctgtaccaatgagcattatggctcctgctccaactgtcttagtacccactgtgtctatggttggaaagcatttgggcgcaagaaaggatcatccaggcttaaaggctaaagaaaatgatgaaaattgtggtcctactaccactgtttttgttggcaacatttccgagaaagcttcagacatgcttataagacaactcttagctaaatgtggtttggttttgagctggaagagagtacaaggtgcttccggaaagcttcaagccttcggattctgtgagtacaaggagccagaatctaccctccgtgcactcagattattacatgacctgcaaattggagagaaaaagctactcgttaaagttgatgcaaagacaaaggcacagctggatgaatggaaagcaaagaagaaagcttctaatgggaatgcaaggccagaaactgtcactaatgacgatgaagaagccttggatgaagaaacaaagaggagagatcagatgattaaaggggctattgaagttttaattcgtgaatactccagtgagctaaatgccccctcacaggaatctgattctcaccccaggaagaagaagaaggaaaagaaggaggacattttccgcagatttccagtggccccactgatcccttatccactcatcactaaggaggatataaatgctatagaaatggaagaagacaaaagagacctgatatctcgagagatcagcaaattcagagacacacataagaaactggaagaagagaaaggcaaaaaggaaaaagaaagacaggaaattgagaaagaacggagagaaagagagagggagcgtgaaagggaacgagaaaggcgagaacgggaacgagaaagggaaagagaacgtgaacgagaaaaggagaaagaacgggagcgggaacgagaacgggatagggaccgtgaccggacaaaagagagagaccgagatcgggatcgagagagagatcgtgaccgggatagagaaaggagctcagatcgtaataaggatcgcagtcgatcaagagaaaaaagcagagatcgtgaaagggaacgagagcgggaaagagagagagagagagaacgagagcgagaacgagaacgggagcgagagagagagcgagagagggaacgggagcgagaaagagaaaaagacaaaaaacgggaccgagaagaagatgaagaagatgcatacgaacgaagaaaacttgaaagaaaactccgagagaaagaagctgcttatcaagagcgccttaagaattgggaaatcagagaacgaaagaaaacccgggaatatgagaaagaagctgaaagagaagaagaaagaagaagagaaatggccaaagaagctaaacgactaaaagaattcttagaagactatgatgatgatagagatgaccccaaatattacagaggaagtgctcttcagaaaaggttgcgtgatagagaaaaggaaatggaagcagatgaacgagataggaagagagagaaggaggagcttgaggaaatcaggcagcgccttctggcagaagggcatccagatccagatgcagagctccagaggatggaacaagaggctgagaggcgcaggcagccacaaataaagcaagagccagaatcagaagaggaggaagaagaaaagcaagaaaaagaagaaaaacgagaagaacccatggaagaggaagaggagccagagcaaaagccttgtctgaaacctactctgaggcccatcagctctgctccatctgtttcctctgccagtggcaatgcaacacctaacactcctggggatgagtctccctgtggtattattattcctcatgaaaactcaccagatcaacagcaacctgaggagcataggccaaaaataggactaagtcttaaactgggtgcttccaatagtcctggtcagcctaattctgtgaagagaaagaaactacctgtagatagtgtctttaacaaatttgaggatgaagacagtgatgacgtaccccgaaaaaggaaactggttcccttggattatggtgaagatgataaaaatgcaaccaaaggcactgtaaacactgaagaaaagcgtaaacacattaagagtctcattgagaaaatccctacagccaaacctgagctcttcgcttatcccctggattggtctattgtggattctatactgatggaacgtcgaattagaccatggattaataagaaaatcatagaatatataggtgaagaagaagctacattagttgattttgtttgttctaaggttatggctcatagttcaccccagagcattttagatgatgttgccatggtacttgatgaagaagcagaagtttttatagtcaaaatgtggagattattgatatatgaaacagaagccaagaaaattggtcttgtgaagtaaaactttttatatttagagttccatttcagatttcttctttgccacccttttaaggactttgaatttttctttgtctttgaagacattgtgagatctgtaattttttttttttgtagaaaatgtgaattttttggtcctctaatttgttgttgccctgtgtactcccttggttgtaaagtcatctgaatccttggttctctttatactcaccaggtacaaattactggtatgttttataagccgcagctactgtacacagcctatctgatataatcttgttctgctgatttgtttcttgtaaatattaaaacgactccccaattattttgcagaattgcacttaatattgaaatgtactgtataggaaccaacatgaacaattttaattgaaaacaccagtcataaactattaccacccccactctcttttgatcagaaatggcaagcccttgtgaaggcatggagtttaaaattggaatgcaaaaattagcagacaatccattcctactgtatttctgtatgaatgtgtttgtgaatgtatgtgtaaaagtctttcttttccctaatttgctttggtggggtccttaaaacatttcccaactaaagaatagaattgtaaaggaaaagtggtactgttccaacctgaaatgtctgttataattaggttattagtttcccagagcatggtgttctcgtgtcgtgagcaatgtggtttgctaactggatggggttttcttattaataagatggctgcttcagcttctcttttaaaggaatgtggatcatagtgatttttccttttaattttattgctcagaaatgaggcatatcctaaaaatcctggagagctgtatttaatgcatttttgcactaattggtccttagtttaattctattgtatctgtttatttaacaaaaaattcatcataccaaaaagtgtaagtgaaaaccccctttaaaacaaaacaaaaaaatgaaataaaattaggcaaattgacagacagtgagagttttacaaacatgataggtattctgctcggcaatttgtaagtttacatgttatttaaggataaaggtaaatcattcaaggcagttaccaaccactaactatttgttttcatttttgtcttgtagaaggtttatatcttgttttaccttggctcattagtgtttaaaaatgtactgatgatgtgcttagagaaattcctggggctttcttcgttgtagatcagaatttcaccagggagtaaaattacctgaaaacgtaagaagttttaaacagcttttcacacaaattagatgcaactgttcccatgtctgagtacttatttaaaagaaaggtaaagattggcctgttagaaaaagcataatgtgagctttggattactggattttttttttttttaaacacacctggagaggacatttgaaaacactgttcttaccctcgaaccctgatgtggttccattatgtaaatatttcaaatattaaaaatgtatatatttgatcctggggactcatattctttcagaatcatgtaaataaatggcatcatgttgtaattgtgtggtgcatactagaaaagttaaaaatatgggctgaactttt

SEQ ID NO: 26947 - DNA, 541 bp, Homo sapiens
  source 1..541: mol_type = unassigned DNA
agaaggtcgcgaaggcagtaccgtttcctcagcggcgggtgagtttgtgtctctgaacgcgtgtggaaaccgggagaccgggtgcctcagctggtggaggaggaaaagccggggtggctgcgaaagcgccagggtggggtagagactgctgcagtaagaatgtcttttccacctcatttgaatcgccctcccatgggaatcccagcactcccaccagggatcccacccccgcagtttccaggatttcctccacctgtacctccagggaccccaatgattcctgtaccaatgagcattatggctcctgctccaactgtcttagtacccactgtgtctatggttggaaagcatttgggcgcaagaaaggatcatccaggcttaaaggctaaagaaaatgatgaaaattgtggtcctactaccactgtttttgttggcaacatttccgagaaagcttcagacatgcttataagacaactcttagctaaatgtggtttggttttgagctggaagagagtacaaggtgcttccggaaagcttcaag

SEQ ID NO: 26948 - DNA, 2470 bp, Homo sapiens
  source 1..2470: mol_type = unassigned DNA
ctcgccgcgcagcgcggctgtatttgcggcctgtgcgagtaggcgcttgggcactcagtctccctggcgagcgacgggcagaaatctcgaaccagtggagcgcactcgtaacctggatcccagaaggtcgcgaaggcagtaccgtttcctcagcggcggactgctgcagtaagaatgtcttttccacctcatttgaatcgccctcccatgggaatcccagcactcccaccagggatcccacccccgcagtttccaggatttcctccacctgtacctccagggaccccaatgattcctgtaccaatgagcattatggctcctgctccaactgtcttagtacccactgtgtctatggttggaaagcatttgggcgcaagaaaggatcatccaggcttaaaggctaaagaaaatgatgaaaattgtggtcctactaccactgtttttgttggcaacatttccgagaaagcttcagacatgcttataagacaactcttagctaaatgtggtttggttttgagctggaagagagtacaaggtgcttccggaaagcttcaagccttcggattctgtgagtacaaggagccagaatctaccctccgtgcactcagattattacatgacctgcaaattggagagaaaaagctactcgttaaagttgatgcaaagacaaaggcacagctggatgaatggaaagcaaagaagaaagcttctaatgggaatgcaaggccagaaactgtcactaatgacgatgaagaagccttggatgaagaaacaaagaggagagatcagatgattaaaggggctattgaagttttaattcgtgaatactccagtgagctaaatgccccctcacaggaatctgattctcaccccaggaagaagaagaaggaaaagaaggaggacattttccgcagatttccagtggccccactgatcccttatccactcatcactaaggaggatataaatgctatagaaatggaagaagacaaaagagacctgatatctcgagagatcagcaaattcagagacacacataaggtagtattcttgtcttttcacttgataccaatctagactttttacagaatccaaagcaaagagacaaaaaaaatcaaccttaaattagaatataattttaaatgttttttataggtttaattgatatttagatagaaaaaagaaacagaagaccaataccatattaaagtggtccttgacatgttgtgcttagttttttcagttactgactattctgcagtcatctcactttaatatgaatagaagctaattttatttttagatttcaacataaacatcaaggtcagacttaaattagattcagggggcagcaggataacatacactgtagtgtatttctgggggcagttatttaacttgatcttaggaataccttttctttagagctgagattaaaatttacattttatatttgtatagatttaagttgagtgggggagattttaaacagtaggtcagtggttaccagacttaccaaattttagatgcatggaagaactgtaaattcccataaagctaatctattcattgacccccaccattatgatagagatcatatggtgactaatgcaagatgaaactctcagcttggaaagtaacaaggaataggatgtaagtatgagcttctgttttttattatatttatggatgccccctcagaaaaatatgcaaaggggtaactggcttggaaatgggtatttatgcatagtaaatcccactcacgagttttgcctatttgaagcttctctcaatgacagtgcatctgtgaatgttcgctggtgttgaaaatgatgcttttgaacggtgcaatgcaaacactgcatgaaatgtattttgatggtcgagataataaggtgttgctggttcttactgatagactgagagatctttaactcagtgaaatgttaaatgttcattttctcttttattcttactttttcccattgctttcaaaatctgcagttcacaaataatgccaatgaatcagtgctgctgaacacttactatccagatgcccagcccttgctcacaaacacaatgctttttcaagaattaaatgtgtctaagagcacaaacataattctcccaaaattaattttgagagttgaaaaggtggtctatgggaaatcattttagatgaataattttggttaggtataatactgaaattcaggaccgagtaagcttaaaaatggtatatggttgtgtgtgtggtttaccccctttttgtttttatttatttgttaaaccctgtcatgttattggtaaattatgaggaaatcatgttttaagaaaaattcaaaaatatatttgctttaaagtttgggaatctgttaggcattttactgccttagtattatttcactggagggaatgttttgaattttcagaatgtcttttcaaaataaaaagaaatcaaaatgaaaaa

SEQ ID NO: 26949 - DNA, 1567 bp, Homo sapiens
  source 1..1567: mol_type = unassigned DNA
cgccgcgcagcgcggctgtatttgcggcctgtgcgagtaggcgcttgggcactcagtctccctggcgagcgacgggcagaaatctcgaaccagtggagcgcactcgtaacctggatcccagaaggtcgcgaaggcagtaccgtttcctcagcggcggactgctgcagtaagaatgtcttttccacctcatttgaatcgccctcccatgggaatcccagcactcccaccagggatcccacccccgcagtttccaggatttcctccacctgtacctccagggaccccaatgattcctgtaccaatgagcattatggctcctgctccaactgtcttagtacccactgtgtctatggttggaaagcatttgggcgcaagaaaggatcatccaggcttaaaggctaaagaaaatgatgaaaattgtggtcctactaccactgtttttgttggcaacatttccgagaaagcttcagacatgcttataagacaactcttagctaaatgtggtttggttttgagctggaagagagtacaaggtgcttccggaaagcttcaagccttcggattctgtgagtacaaggagccagaatctaccctccgtgcactcagattattacatgacctgcaaattggagagaaaaagctactcgttaaagttgatgcaaagacaaaggcacagctggatgaatggaaagcaaagaagaaagcttctaatgggaatgcaaggccagaaactgtcactaatgacgatgaagaagccttggatgaagaaacaaagaggagagatcagatgattaaaggggctattgaagttttaattcgtgaatactccagtgagctaaatgccccctcacaggaatctgattctcaccccaggaagaagaagaaggaaaagaaggaggacattttccgcagatttccagtggccccactgatcccttatccactcatcactaaggaggatataaatgctatagaaatggaagaagacaaaagagacctgatatctcgagagatcagcaaattcagagacacacataagagatcatatggtgactaatgcaagatgaaactctcagcttggaaagtaacaaggaataggatttcacaaataatgccaatgaatcagtgctgctgaacacttactatccagatgcccagcccttgctcacaaacacaatgctttttcaagaattaaatgtgtctaagagcacaaacataattctcccaaaattaattttgagagttgaaaaggtggtctatgggaaatcattttagatgaataattttggttaggtataatactgaaattcaggaccgagtaagcttaaaaatggtatatggttgtgtgtgtggtttaccccctttttgtttttatttatttgttaaaccctgtcatgttattggtaaattatgaggaaatcatgttttaagaaaaattcaaaaatatatttgctttaaagtttgggaatctgttaggcattttactgccttagtattatttcactggagggaatgttttgaattttcagaatgtcttttcaaaataaaaagaaatcaaaatgaaaaa

SEQ ID NO: 26950 - DNA, 3375 bp, Homo sapiens
  source 1..3375: mol_type = unassigned DNA
gaagacctccatcagctcgccgcgcagcgcggctgtatttgcggcctgtgcgagtaggcgcttgggcactcagtctccctggcgagcgacgggcagaaatctcgaaccagtggagcgcactcgtaacctggatcccagaaggtcgcgaaggcagtaccgtttcctcagcggcggggtctttctctgtctctcagcctcaagccatcctcctgcatcagcctcccaagtagttgggaccatagactgctgcagtaagaatgtcttttccacctcatttgaatcgccctcccatgggaatcccagcactcccaccagggatcccacccccgcagtttccaggatttcctccacctgtacctccagggaccccaatgattcctgtaccaatgagcattatggctcctgctccaactgtcttagtacccactgtgtctatggttggaaagcatttgggcgcaagaaaggatcatccaggcttaaaggctaaagaaaatgatgaaaattgtggtcctactaccactgtttttgttggcaacatttccgagaaagcttcagacatgcttataagacaactcttagctaaatgtggtttggttttgagctggaagagagtacaaggtgcttccggaaagcttcaagccttcggattctgtgagtacaaggagccagaatctaccctccgtgcactcagattattacatgacctgcaaattggagagaaaaagctactcgttaaagttgatgcaaagacaaaggcacagctggatgaatggaaagcaaagaagaaagcttctaatgggaatgcaaggccagaaactgtcactaatgacgatgaagaagccttggatgaagaaacaaagaggagagatcagatgattaaaggggctattgaagttttaattcgtgaatactccagtgagctaaatgccccctcacaggaatctgattctcaccccaggaagaagaagaaggaaaagaaggaggacattttccgcagatttccagtggccccactgatcccttatccactcatcactaaggaggatataaatgctatagaaatggaagaagacaaaagagacctgatatctcgagagatcagcaaattcagagacacacataagaaactggaagaagagaaaggcaaaaaggaaaaagaaagacaggaaattgagaaagaacggagagaaagagagagggagcgtgaaagggaacgagaaaggcgagaacgggaacgagaaagggaaagagaacgtgaacgagaaaaggagaaagaacgggagcgggaacgagaacgggatagggaccgtgaccggacaaaagagagagaccgagatcgggatcgagagagagatcgtgaccgggatagagaaaggagctcagatcgtaataaggatcgcagtcgatcaagagaaaaaagcagagatcgtgaaagggaacgagagcgggaaagagagagagagagagaacgagagcgagaacgagaacgggagcgagagagagagcgagagagggaacgggagcgagaaagagaaaaagacaaaaaacgggaccgagaagaagatgaagaagatgcatacgaacgaagaaaacttgaaagaaaactccgagagaaagaagctgcttatcaagagcgccttaagaattgggaaatcagagaacgaaagaaaacccgggaatatgagaaagaagctgaaagagaagaagaaagaagaagagaaatggccaaagaagctaaacgactaaaagaattcttagaagactatgatgatgatagagatgaccccaaatattacagaggaagtgctcttcagaaaaggttgcgtgatagagaaaaggaaatggaagcagatgaacgagataggaagagagagaaggaggagcttgaggaaatcaggcagcgccttctggcagaagggcatccagatccagatgcagagctccagaggatggaacaagaggctgagaggcgcaggcagccacaaataaagcaagagccagaatcagaagaggaggaagaagaaaagcaagaaaaagaagaaaaacgagaagaacccatggaagaggaagaggagccagagcaaaagccttgtctgaaacctactctgaggcccatcagctctgctccatctgtttcctctgccagtggcaatgcaacacctaacactcctggggatgagtctccctgtggtattattattcctcatgaaaactcaccagatcaacagcaacctgaggagcataggccaaaaataggactaagtcttaaactgggtgcttccaatagtcctggtcagcctaattctgtgaagagaaagaaactacctgtagatagtgtctttaacaaatttgaggatgaagacagtgatgacgtaccccgaaaaaggaaactggttcccttggattatggtgaagatgataaaaatgcaaccaaaggcactgtaaacactgaagaaaagcgtaaacacattaagagtctcattgagaaaatccctacagccaaacctgagctcttcgcttatcccctggattggtctattgtggattctatactgatggaacgtcgaattagaccatggattaataagaaaatcatagaatatataggtgaagaagaagctacattagttgattttgtttgttctaaggttatggctcatagttcaccccagagcattttagatgatgttgccatggtacttgatgaagaagcagaagtttttatagtcaaaatgtggagattattgatatatgaaacagaagccaagaaaattggtcttgtgaagtaaaactttttatatttagagttccatttcagatttcttctttgccacccttttaaggactttgaatttttctttgtctttgaagacattgtgagatctgtaattttttttttttgtagaaaatgtgaattttttggtcctctaatttgttgttgccctgtgtactcccttggttgtaaagtcatctgaatccttggttctctttatactcaccaggtacaaattactggtatgttttataagccgcagctactgtacacagcctatctgatataatcttgttctgctgatttgtttcttgtaaatattaaaacgactccccaattattttgcagaattgcacttaatattgaaatgtactgtataggaaccaacatgaacaattttaattgaaaacaccagtcataaactattaccacccccactctcttttgatcagaaatggcaagcccttgtgaaggcatggagtttaaaattggaatgcaaaaattagcagacaatccattcctactgtatttctgtatgaatgtgtttgtgaatgtatgtgtaaaagtctttcttttccctaatttgctttggtggggtcctt

SEQ ID NO: 26951 - DNA, 1039 bp, Homo sapiens
  source 1..1039: mol_type = unassigned DNA
aagacctccatcagctcgccgcgcagcgcggctgtatttgcggcctgtgcgagtaggcgcttgggcactcagtctccctggcgagcgacgggcagaaatctcgaaccagtggagcgcactcgtaacctggatcccagaaggtcgcgaaggcagtaccgtttcctcagcggcggacggagtcttactctgtcgttcaggttggagtgcagtggcgcgacctcggctcactgcaacatctgcctcccaggttcaagcaattctcctgcctcaccttccagagtagctgggattacagactgctgcagtaagaatgtcttttccacctcatttgaatcgccctcccatgggaatcccagcactcccaccagggatcccacccccgcagtttccaggatttcctccacctgtacctccagggaccccaatgattcctgtaccaatgagcattatggctcctgctccaactgtcttagtacccactgtgtctatggttggaaagcatttgggcgcaagaaaggatcatccaggcttaaaggctaaagaaaatgatgaaaattgtggtcctactaccactgtttttgttggcaacatttccgagaaagcttcagacatgcttataagacaactcttagctaaatgtggtttggttttgagctggaagagagtacaaggtgcttccggaaagcttcaagccttcggattctgtgagtacaaggagccagaatctaccctccgtgcactcagattattacatgacctgcaaattggagagaaaaagctactcgttaaagttgatgcaaagacaaaggcacagctggatgaatggaaagcaaagaagaaagcttctaatgggaatgcaaggccagaaactgtcactaatgacgatgaagaagccttggatgaagaaacaaagaggagagatcagatgattaaaggggctattgaagttttaattcgtgaatactccagtgagctaaatgccccctcacaggaatctgattctcaccccaggaagaagaagaaggaaaagaaggaggac

SEQ ID NO: 26952 - DNA, 1093 bp, Homo sapiens
  source 1..1093: mol_type = unassigned DNA
agtgcacgccgggcaagaggaagacctccatcagctcgccgcgcagcgcggctgtatttgcggcctgtgcgagtaggcgcttgggcactcagtctccctggcgagcgacgggcagaaatctcgaaccagtggagcgcactcgtaacctggatcccagaaggtcgcgaaggcagtaccgtttcctcagcggcggactgctgcagtaagaatgtcttttccacctcatttgaatcgccctcccatgggaatcccagcactcccaccagggatcccacccccgcagtttccaggatttcctccacctgtacctccagggaccccaatgattcctgtaccaatgagcattatggctcctgctccaactgtcttagtacccactgtgtctatggttggaaagcatttgggcgcaagaaaggatcatccaggcttaaaggctaaagaaaatgatgaaaattgtggtcctactaccactgtttttgttggcaacatttccgagaaagcttcagacatgcttataagacaactcttagctaaatgtggtttggttttgagctggaagagagtacaaggtgcttccggaaagcttcaagccttcggattctgtgagtacaaggagccagaatctaccctccgtgcactcagattattacatgacctgcaaattggagagaaaaagctactcgttaaagttgatgcaaagacaaaggcacagctggatgaatggaaagcaaagaagaaagcttctaatgggaatgcaaggccagaaactgtcactaatgacgatgaagaagccttggatgaagaaacaaagaggagagatcagatgattaaaggggctattgaagttttaattcgtgaatactccagtgagctaaatgccccctcacaggaatctgattctcaccccaggaagaagaagaaggaaaagaaggaggacattttccgcagatttccagtggccccactgatcccttatccactcatcactaaggaggatataaatgctatagaaatggaagaagacaaaagagacctgatatctcgagagatcagcaaattcagagacacacataagagatcatatggtgactaa

SEQ ID NO: 26953 - DNA, 2808 bp, Homo sapiens
  source 1..2808: mol_type = unassigned DNA
acttccggaatctctcggcgtgtgagcttggttgtcctaccaaagccagcgtttcggctcgcgtgcgccggcctagtttgctcgcgtcctcacgcgctttgggtttcccggtctcatggccggcctgaccttatttgtgggccgcctcccgccctcggcccgcagtgagcagctggaggaactgttcagtcaggtggggccggtgaagcagtgcttcgtggtgactgaaaaagggagtaaggcatgtcgaggctttggctatgtcactttttcaatgctggaagatgttcagagggccctcaaggagattaccacctttgaaggttgcaagatcaacgtgactgttgccaagaaaaaactgaggaacaagacaaaggaaaaggggaaaaatgaaaactcagagtgcccaaagaaggagccgaaggctaaaaaagccaaagtggcagataagaaagccagattaattattcggaacctgagctttaagtgttcagaagatgacttgaagacagtatttgctcaatttggagctgtcctggaagtaaatatccctaggaaaccagatgggaagatgcgcggttttggttttgttcagttcaaaaacctcctagaagcaggtaaagctctcaaaggcatgaacatgaaagagataaaaggccggacagtggctgtggattgggccgtggcaaaggataaatataaagatacacagtctgtttctgctataggtgaggaaaagagccatgaatctaaacatcaggaatcagttaaaaagaagggcagagaggaagaggatatggaagaggaagaaaacgatgatgatgacgatgatgatgatgaagaagatggggtttttgatgatgaagatgaagaggaagagaatatagaatcaaaggtgaccaagcctgtgcaaattcagaagagagcagtcaagagaccagcccctgcaaaaagcagtgatcattctgaggaggacagtgacctagaggaaagcgatagtattgatgatggagaggaactggctcagagtgataccagcactgaggagcaagaggataaagctgtgcaagtctcaaacaaaaagaagaggaaattaccctctgatgtgaatgaagggaaaactgtttttatcagaaatctgtcctttgactcagaagaagaagaacttggggagcttctccaacagtttggagaactcaaatatgtccgcattgtcttgcatccagacacagagcattctaaaggttgtgcatttgcccagttcatgactcaagaagcagctcagaaatgccttctagctgcttctccagagaatgaggctggtgggcttaaactggatggccggcagctcaaggttgacttggcggtgacccgtgatgaggctgcaaagcttcagacgacgaaggtgaagaagccgactggcacccggaatctctatctggcccgagaaggcttgattcgtgctgggacgaaggctgcagagggtgtgagtgctgctgatatggccaaaagagaacggtttgagctgctgaagcatcagaaactcaaggaccagaatatctttgtctcccgaaccaggctctgcctgcacaatctcccaaaggctgtagatgacaaacagctcagaaagctgctgctgagtgctactagtggagagaaaggggtgcgcatcaaggagtgtagagtgatgcgagacctcaaaggagttcatgggaacatgaagggtcagtccctgggctacgcctttgcggagttccaagagcacgagcatgccctgaaagccctccgcctcatcaacaacaatccagaaatctttgggcctctgaagagaccaatagtggagttctctttagaagatcgaagaaaacttaaaatgaaggaattaaggatccagcgcagcttgcaaaaaatgagatccaagcctgcaactggtgagcctcagaaggggcaaccagagcctgcaaaagaccagcaacagaaggcagctcaacaccacacagaggaacaaagcaaggtgcccccagagcagaagagaaaggcgggctctacctcatggaccgggttccagaccaaggctgaagtggagcaggtggagctgcctgatggaaagaagagaagaaaggtcctggcgctcccctcacaccgaggccccaaaatcaggttgcgggacaaaggcaaagtgaagcccgtccatcccaaaaagccaaagccacagataaaccagtggaagcaggagaagcagcaattatcgtccgagcaggtatctaggaaaaaagctaagggaaataagacggaaacccgcttcaaccagctggtcgaacaatataagcagaaattattgggaccttctaaaggagcacctcttgcaaagaggagcaaatggtttgatagttgatgatggcagcaggctgggtaagaagctgggttgtgtactttctggtgacactcctgggctcctccccatcccccgtgtctctcactgagggaaagaaaatccccaagggcactgccactgtgctcggaggtgccctggactgtgtacatctgaactttggtccatcctttgatgtgtggttcgttagccacaaagagaaatatctgaaagtcaacatgatgcttcttgcatattatccagattattgtatgaagttgtgtctataattattaccaatttttattctttatttctcaaatggaaacacctgaaaaagcattctggagtgctgaatttttaagatgtatattttgttaagcatattctctaaatgagatattgtgtggctttttagtaacaacgtcatttctaat

SEQ ID NO: 26954 - DNA, 2251 bp, Homo sapiens
  source 1..2251: mol_type = unassigned DNA
accaaagccagcgtttcggctcgcgtgcgccggcctagtttgctcgcgtcctcacgcgctttgggtttcccggtctcatggccggcctgaccttatttgtgggccgcctcccgccctcggcccgcagtgagcagctggaggaactgttcagtcaggtggggccggtgaagcagtgcttcgtggtgactgaaaaaggccggacagtggctgtggattgggccgtggcaaaggataaatataaagatacacagtctgtttctgctataggtgaggaaaagagccatgaatctaaacatcaggaatcagttaaaaagaagggcagagaggaagaggatatggaagaggaagaaaacgatgatgatgacgatgatgatgatgaagaagatggggtttttgatgatgaagatgaagaggaagagaatatagaatcaaaggtgaccaagcctgtgcaaattcagaagagagcagtcaagagaccagcccctgcaaaaagcagtgatcattctgaggaggacagtgacctagaggaaagcgatagtattgatgatggagaggaactggctcagagtgataccagcactgaggagcaagaggataaagctgtgcaagtctcaaacaaaaagaagaggaaattaccctctgatgtgaatgaagggaaaactgtttttatcagaaatctgtcctttgactcagaagaagaagaacttggggagcttctccaacagtttggagaactcaaatatgtccgcattgtcttgcatccagacacagagcattctaaaggttgtgcatttgcccagttcatgactcaagaagcagctcagaaatgccttctagctgcttctccagagaatgaggctggtgggcttaaactggatggccggcagctcaaggttgacttggcggtgacccgtgatgaggctgcaaagcttcagacgacgaaggtgaagaagccgactggcacccggaatctctatctggcccgagaaggcttgattcgtgctgggacgaaggctgcagagggtgtgagtgctgctgatatggccaaaagagaacggtttgagctgctgaagcatcagaaactcaaggaccagaatatctttgtctcccgaaccaggctctgcctgcacaatctcccaaaggctgtagatgacaaacagctcagaaagctgctgctgagtgctactagtggagagaaaggggtgcgcatcaaggagtgtagagtgatgcgagacctcaaaggagttcatgggaacatgaagggtcagtccctgggctacgcctttgcggagttccaagagcacgagcatgccctgaaagccctccgcctcatcaacaacaatccagaaatctttgggcctctgaagagaccaatagtggagttctctttagaagatcgaagaaaacttaaaatgaaggaattaaggatccagcgcagcttgcaaaaaatgagatccaagcctgcaactggtgagcctcagaaggggcaaccagagcctgcaaaagaccagcaacagaaggcagctcaacaccacacagaggaacaaagcaaggtgcccccagagcagaagagaaaggcgggctctacctcatggaccgggttccagaccaaggctgaagtggagcaggtggagctgcctgatggaaagaagagaagaaaggtcctggcgctcccctcacaccgaggccccaaaatcaggttgcgggacaaaggcaaagtgaagcccgtccatcccaaaaagccaaagccacagataaaccagtggaagcaggagaagcagcaattatcgtccgagcaggtatctaggaaaaaagctaagggaaataagacggaaacccgcttcaaccagctggtcgaacaatataagcagaaattattgggaccttctaaaggagcacctcttgcaaagaggagcaaatggtttgatagttgatgatggcagcaggctgggtaagaagctgggttgtgtactttctggtgacactcctgggctcctccccatcccccgtgtctctcactgagggaaagaaaatccccaagggcactgccactgtgctcggaggtgccctggactgtgtacatctgaactttggtccatcctttgatgtgtggttcgttagccacaaagagaaatatctgaaagtcaacatgatgcttcttgcatattatccagattattgtatgaagttgtgtctataattattaccaatttttattctttatttctcaaatggaaacacctgaaaaagc

SEQ ID NO: 26955 - DNA, 2382 bp, Homo sapiens
  source 1..2382: mol_type = unassigned DNA
gcagcgccggtcgggagcgcagcgcggcgcacgtcggcgcgcacggcgggacgggcgccggagtggtcgggcctggcggctggacgggcgcccctcgctgccccgcgcgctccccgccgccccccatgagcgcagccccgcgcggcccgggtccgtaggcggcggggcgccccccatgctgctgcagcccgcgccgtgcgccccgagcgcgggcttcccgcggcccctggccgcccccggcgccatgcacggctcgcagaaggacaccacgttcaccaagatcttcgtgggcggcctgccgtaccacactaccgacgcctcgctcaggaagtacttcgagggcttcggcgacatcgaggaggccgtggtcatcaccgaccgccagacgggcaagtcccgcggctacggcttcgtgaccatggccgaccgggcggcagctgagagggcttgcaaagacccgaaccccatcatcgacggccgcaaggccaacgtgaacctggcatatctgggcgccaagccgcggagcctccagacgggctttgccattggggtgcagcagctgcaccccaccttgatccagcggacttacgggctgaccccgcactacatctacccaccagccatcgtgcagcccagcgtggtgatcccagccgcccctgtcccgtcgctgtcctcgccctacattgagtacacgccggccagcccggcctacgcccagtacccaccggccacctatgaccagtacccatacgccgcctcgcctgccacggctgccagcttcgtgggctacagctaccctgccgccgtgccccaggccctctcagccgcagcacccgcgggcaccactttcgtgcagtaccaggcgccgcagctgcagcctgacaggatgcagtgaggggcgttcctgccccgaggactgtggcattgtcaccttcacagcagacagagctgccaggccatgatgggctggcgacagcccggctgagcttcagtgaggtgccaccagcacccgtgcctccgaagaccgctcgggcattccgcctgcgccctgggacagcggagagacggcttctctttaatctaggtcccattgtgtcttgagggaggactttaagaatgactgagaactatttaaagacgcaatcccaggttccttgcacaccatggcagcctctccttgcaccttctcctgcctctccacactccaggttccctcaggcttgtgtccccactgctgcatcgtggcggggtgtcacagaccctctgcagcccctggctgccctggactgtgcagagatgcctgactccagggaaacctgaaagcaagaagttaatggactgtttattgtaacttgatcctcccgagctgtgagcgcagtctgaggtgtgaggacacggcctcctgttggagtcccattttctccatcagggcacgtgggcggcttcctcaagcccggaggagctcccaggcgcacaggggccgccggtaacaggggccgccggccaaaggcccctttccagtcatagcactgaagttgcaacttttttcttgtaattgttttgctactaagataatttcagaagttcagtctattttttcagcggatactgccgccaccaagaatccaaaacctatttttgacttggagagacttgcttttgttggttccgcccgtggagacgacgatagtgtttctgtataataaagtgtctgccggctcgcgggccaggatcctctcggtgggatgggcaccacagacaggaggcccctcaggcccgtgcgggccactgtctgctgccgcctgccggggtggcagagtgagttgtctcaggaccccgtcactgcgacgttgacactcctctcccttcccttcctccccaactccccaaacactgtggaaggggagaaggaagtgatccacagcattcaggccacttggggtctagaccatggtggtgccagcctggggggggcagtggccctcagctctgcccgctggagcggttgagtgcagaagggtgcgcctcttccctctacccccgcaccacctgctgtgtgccagcctgagacggttcctgcctgtcttgggggttggtggagggtggaggcagttctgccagccgtggcagggctgctatggggcatccagggctgtgggggtctggaggaggggacatgaggtgagaggtatcctggccgagggcggggggcagcggggggtctccctccggacctacctcagggagctgagcgtgcaggcgctccagggcaggcctgggacagagtcaaggctcagagaataaaggtagctaatctcatcataatatttttattagaatgttctgatgataaaaataaaacttgttttctttaaagaaaaa

SEQ ID NO: 26956 - DNA, 760 bp, Homo sapiens
  source 1..760: mol_type = unassigned DNA
ataaacatcagcttaagtaaaaacgtcttgaagacactttcctgcttaccttccaagcatagcgtcgcaaactccttctcagaggaaagtctcggccctcactggtgggcaagtccaggcggccccccaagctcccttcggggttcatttttgccctatccccgcaggggattatttttgtccttgaaggccacatttcccaggccttgaactttgacgggaggagctggaatccaggaggcatctttgtgggagagccccaggtgaccatggccgaccgggcggcagctgagagggcttgcaaagacccgaaccccatcatcgacggccgcaaggccaacgtgaacctggcatatctgggcgccaagccgcggagcctccagacgggctttgccattggggtgcagcagctgcaccccaccttgatccagcggacttacgggctgaccccgcactacatctacccaccagccatcgtgcagcccagcgtggtgatcccagccgcccctgtcccgtcgctgtcctcgccctacattgagtacacgccggccagcccggcctacgcccagtacccaccggccacctatgaccagtacccatacgccgcctcgcctgccacggctgccagcttcgtgggctacagctaccctgccgccgtgccccaggccctctcagccgcagcacccgcgggcaccactttcgtgcagtaccaggcgccgcagctgcagcctgacaggatgcagtgaggggcgttcctgcc

SEQ ID NO: 26957 - DNA, 686 bp, Homo sapiens
  source 1..686: mol_type = unassigned DNA
gcgcggcgcacgtcggcgcgcacggcgggacgggcgccggagtggtcgggcctggcggctggacgggcgcccctcgctgccccgcgcgctccccgccgccccccatgagcgcagccccgcgcggcccgggtccgtaggcggcggggcgccccccatgctgctgcagcccgcgccgtgcgccccgagcgcgggcttcccgcggcccctggccgcccccggcgccatgcacggctcgcagaaggacaccacgttcaccaagatcttcgtgggcggcctgccgtaccacactaccgacgcctcgctcaggaagtacttcgagggcttcggcgacatcgaggaggccgtggtcatcaccgaccgccagacgggcaagtcccgcggctacggcttcgtgaccatggccgaccgggcggcagctgagagggcttgcaaagacccgaaccccatcatcgacggccgcaaggccaacgtgaacctggcatatctgggcgccaagccgcggagcctccagacgggctgaccccgcactacatctacccaccagccatcgtgcagcccagcgtggtgatcccagccgcccctgtcccgtcgctgtcctcgccctacattgagtacacgccggccagcccggcctacgcccagtacccaccggccacctatgaccagtacccatacgccgcctcgcc

SEQ ID NO: 26958 - DNA, 1694 bp, Homo sapiens
  source 1..1694: mol_type = unassigned DNA
actttcttgagtggccaatccggttgtaggctcacctcccccttctactcagagcactgctgcggccgccgccattttagcgttttgtcagaagcgtccgcgccgcgaggaggaggccctgctggtttctgtgcgggctcttgtcaggatggtgaagctgttcatcggaaacctgccccgggaggctacagagcaggagattcgctcactcttcgagcagtatgggaaggtgctggaatgtgacatcattaagaattacggctttgtgcacatagaagacaagacggcagctgaggatgccatacgcaacctgcaccattacaagcttcatggggtgaacatcaacgtggaagccagcaagaataagagcaaaacctcaacaaagttgcatgtgggcaacatcagtcccacctgcaccaataaggagcttcgagccaagtttgaggagtatggtccggtcatcgaatgtgacatcgtgaaagattatgccttcgtacacatggagcgggcagaggatgcagtggaggccatcaggggccttgataacacagagtttcaaggcaaacgaatgcacgtgcagttgtccaccagccggcttaggactgcgcccgggatgggagaccagagcggctgctatcggtgcgggaaagaggggcactggtccaaagagtgtccgatagatcgttcaggccgcgtggcagacttgaccgagcaatataatgagcaatacggagcagtgcgtacgccttacaccatgagctatggggattcattgtattacaacaacgcgtacggagcgctcgatgcctactacaagcgctgccgtgctgcccggtcctatgaggcagtggcagctgcagctgcctccgtgtataattacgcagagcagaccctgtcccagctgccacaagtccagaatacagccatggccagtcacctcacctccacctctctcgatccctacgatagacacctgttgccgacctcaggagctgctgccacagctgctgctgcagcagcagccgctgctgctgttactgcagcttccacttcatattacgggcgggatcggagccccctgcgtcgcgctacagccccagtccccactgttggagagggctacggttacgggcatgagagtgagttgtcccaagcttcagcagccgcgcggaattctctgtacgacatggcccggtatgagcgggagcagtatgccgatcgggcgcggtactcagccttttaaagcttgaggtgggatgtgtgtgggctgaaattccgagctgcggttgtgcatgagaatacacccttcgtggtaccccatctccgggacgttctcggctctgtgcgttcagtccctcaggaaccgtggaccttaatttaccttgctaagttcagaccttctcttcctttcctttcctttcctctcctgcccattttcctgttcttctgtccttcaatacttctgtagcttcccattcatgttctcttctcccagcaggcctcattgtgtgcagaaactgtggtgggggctgtgctgtctcctccctgcctcctgcctcctgcggctgttggatttgggaatgaccttggtgagagtctcactgctccagggtctctttttggtccaaaggctagacctatagagttggatcactttttttctttccggtgaaataaatggtttttcaacttag

SEQ ID NO: 26959 - DNA, 1763 bp, Homo sapiens
  source 1..1763: mol_type = unassigned DNA
actgctgcggccgccgccattttagcgttttgtcagaagcgtccgcgccgcgaggaggaggccctgctggtttctgtgcgggtgagactccgagcctttccactgcctttcttgtactgtgttaaatcttctctcactcccttgggcttcgggggtgtcctggtaggtccgcagtctccacacccgtcactgagagccgacctcggtcctcggcattgcgcggctcttgtcaggatggtgaagctgttcatcggaaacctgccccgggaggctacagagcaggagattcgctcactcttcgagcagtatgggaaggtgctggaatgtgacatcattaagaattacggctttgtgcacatagaagacaagacggcagctgaggatgccatacgcaacctgcaccattacaagcttcatggggtgaacatcaacgtggaagccagcaagaataagagcaaaacctcaacaaagttgcatgtgggcaacatcagtcccacctgcaccaataaggagcttcgagccaagtttgaggagtatggtccggtcatcgaatgtgacatcgtgaaagattatgccttcgtacacatggagcgggcagaggatgcagtggaggccatcaggggccttgataacacagagtttcaaggcaaacgaatgcacgtgcagttgtccaccagccggcttaggactgcgcccgggatgggagaccagagcggctgctatcggtgcgggaaagaggggcactggtccaaagagtgtccgatagatcgttcaggccgcgtggcagacttgaccgagcaatataatgagcaatacggagcagtgcgtacgccttacaccatgagctatggggattcattgtattacaacaacgcgtacggagcgctcgatgcctactacaagcgctgccgtgctgcccggtcctatgaggcagtggcagctgcagctgcctccgtgtataattacgcagagcagaccctgtcccagctgccacaagtccagaatacagccatggccagtcacctcacctccacctctctcgatccctacgatagacacctgttgccgacctcaggagctgctgccacagctgctgctgcagcagcagccgctgctgctgttactgcagcttccacttcatattacgggcgggatcggagccccctgcgtcgcgctacagccccagtccccactgttggagagggctacggttacgggcatgagagtgagttgtcccaagcttcagcagccgcgcggaattctctgtacgacatggcccggtatgagcgggagcagtatgccgatcgggcgcggtactcagccttttaaagcttgaggtgggatgtgtgtgggctgaaattccgagctgcggttgtgcatgagaatacacccttcgtggtaccccatctccgggacgttctcggctctgtgcgttcagtccctcaggaaccgtggaccttaatttaccttgctaagttcagaccttctcttcctttcctttcctttcctctcctgcccattttcctgttcttctgtccttcaatacttctgtagcttcccattcatgttctcttctcccagcaggcctcattgtgtgcagaaactgtggtgggggctgtgctgtctcctccctgcctcctgcctcctgcggctgttggatttgggaatgaccttggtgagagtctcactgctccagggtctctttttggtccaaaggctagacctatagagttggatcactttttttctttccggtgaaataa

SEQ ID NO: 26960 - DNA, 2321 bp, Homo sapiens
  source 1..2321: mol_type = unassigned DNA
accttgctttttttcgcccaccctgtcccgcgcccgacatggctgctcttggagcctcgagatttccactgggataaccccctttcccttatatctgacagttacattctcgtttcgggaatttctcgggccgtgagacatcgtctggttaatgaatctgaagctcttttccgcggccgcgcatttcagtgttcggcaggagctaggacggtgccccgagagaggcgttcaccactccagtatttcctttatctcccactcctcgctgtctgatccgagtcgcgcgttcattacttccaaaggaaactcaaatgtagctattacaaggcccattttcccggaaatgatggctgctttggttcctacgtgaggaaaagcctgttgataatttcaggcaggcagtcagcaagcctagtagacttttgttttctgttgtcctcctagtggatagaaaagcctagtacccccatttcttcatatgctgtctttcatgcccatttctgttggaaggtatcggttcttaccaaaccctttgtctactaaggacctccctattgcagacgtcttcttattcttacaggttcatggcggctactatagcaggccttagttcactcccacttccatttgattattgtgtggaggtgtgtgtgcaggcgtgtgagagagaaaactggaaatatacattagagtgaaagtcgttgtcttttgtgaacggatgtgggcctgaggtcttttgtcagatgtcttgtttttctctcccaggctcttgtcaggatggtgaagctgttcatcggaaacctgccccgggaggctacagagcaggagattcgctcactcttcgagcagtatgggaaggtgctggaatgtgacatcattaagaattacggctttgtgcacatagaagacaagacggcagctgaggatgccatacgcaacctgcaccattacaagcttcatggggtgaacatcaacgtggaagccagcaagaataagagcaaaacctcaacaaagttgcatgtgggcaacatcagtcccacctgcaccaataaggagcttcgagccaagtttgaggagtatggtccggtcatcgaatgtgacatcgtgaaagattatgccttcgtacacatggagcgggcagaggatgcagtggaggccatcaggggccttgataacacagagtttcaaggcaaacgaatgcacgtgcagttgtccaccagccggcttaggactgcgcccgggatgggagaccagagcggctgctatcggtgcgggaaagaggggcactggtccaaagagtgtccgatagatcgttcaggccgcgtggcagacttgaccgagcaatataatgagcaatacggagcagtgcgtacgccttacaccatgagctatggggattcattgtattacaacaacgcgtacggagcgctcgatgcctactacaagcgctgccgtgctgcccggtcctatgaggcagtggcagctgcagctgcctccgtgtataattacgcagagcagaccctgtcccagctgccacaagtccagaatacagccatggccagtcacctcacctccacctctctcgatccctacgatagacacctgttgccgacctcaggagctgctgccacagctgctgctgcagcagcagccgctgctgctgttactgcagcttccacttcatattacgggcgggatcggagccccctgcgtcgcgctacagccccagtccccactgttggagagggctacggttacgggcatgagagtgagttgtcccaagcttcagcagccgcgcggaattctctgtacgacatggcccggtatgagcgggagcagtatgccgatcgggcgcggtactcagccttttaaagcttgaggtgggatgtgtgtgggctgaaattccgagctgcggttgtgcatgagaatacacccttcgtggtaccccatctccgggacgttctcggctctgtgcgttcagtccctcaggaaccgtggaccttaatttaccttgctaagttcagaccttctcttcctttcctttcctttcctctcctgcccattttcctgttcttctgtccttcaatacttctgtagcttcccattcatgttctcttctcccagcaggcctcattgtgtgcagaaactgtggtgggggctgtgctgtctcctccctgcctcctgcctcctgcggctgttggatttgggaatgaccttggtgagagtctcactgctccagggtctctttttggtccaaaggctagacctatagagttggatcactttttttctttccggtgaaataaatggtttttcaactt

SEQ ID NO: 26961 - DNA, 1548 bp, Homo sapiens
  source 1..1548: mol_type = unassigned DNA
gttttgtcagaagcgtccgcgccgcgaggaggaggccctgctggtttctgtgcgggctcttgtcaggatggtgaagctgttcatcggaaacctgccccgggaggctacagagcaggagattcgctcactcttcgagcagtatgggaaggtgctggaatgtgacatcattaagaattacggctttgtgcacatagaagacaagacggcagctgaggatgccatacgcaacctgcaccattacaagcttcatggggtgaacatcaacgtggaagccagcaagaataagagcaaaacctcaacaaagttgcatgtgggcaacatcagtcccacctgcaccaataaggagcttcgagccaagtttgaggagtatggtccggtcatcgaatgtgacatcgtgaaagattatgccttcgtacacatggagcgggcagaggatgcagtggaggccatcaggggccttgataacacagagtttcaaggtgaaccaccctctttgggtagagggctgaacacaaggctgtgtgcagaaaatggttggataagtaaaaggagaggtttggtaaagataacagctgttggctggctggtgatgaagaaataagtgtgggtgatggacttcttatgatgtagaatgcatgggacttaggggctttaccttaggcaaatgtctcctggagaaaagccactcaccttttatttggagcccctacggcttttgtgcttatcagtgcagaaacccttttctttgaaggctttctgagttactgggccttttttattttttatttttttgtagtagagcacagttcagagttcctcactctgaatttattgccctcagcacaggatcagaattctgcattttacgtgaagaacctctcaaaaacatgtcaagcgacacttataggaccagaatccttgttaagctgtcctaccttacacaaactctttaaagggttacagctcttgttgcttttatattatacctgtaccaagggattgtattttgagtttaaggccactctagaattacaaggctgattttaggacttcctggggaggaggcactggggttttaggggcggtaatgactgtcttttcattggtttggggggctggactttataagattttggtgaatagagcacttagatttgtgttatcttggagtcttaaccaaatgaatcttttgtgcctggagggcagcatgggtgatatgtggattgtcacttcatttggaagcatctcaaatccccagcattttgaatgcctacatgttgctcaaaggaaatgcttgttagagcattttggattttgaattttcagatttgggatgctaaaatggtacgtagaacgcaaatattccaaaatctgaggtctgaagcaacagtggcagttcaggggtggtgatcatggtgagttgctatctgaactcttctttcacctcctttgggttcccagtgtcaaaaagagtggtgtccttttttagcttaattaagcaggactgaacaaaaataataaaaaataaaaaaagccttattcaaatta

SEQ ID NO: 26962 - DNA, 757 bp, Homo sapiens
  source 1..757: mol_type = unassigned DNA
aggaggccctgctggtttctgtgcgggtgagactccgagcctttccactgcctttcttgtactgtgttaaatcttctctcactcccttgggcttcgggggtgtcctggtaggtccgcagtctccacacccgtcactgagagccgacctcggtcctcggcattgcgcggctcttgtcaggatggtgaagctgttcatcggaaacctgccccgggaggctacagagcaggagattcgctcactcttcgagcagtatgggaaggtgctggaatgtgacatcattaagaattacggctttgtgcacatagaagacaagacggcagctgaggatgccatacgcaacctgcaccattacaagcttcatggggtgaacatcaacgtggaagccagcaagaataagagcaaaacctcaacaaagttgcatgtgggcaacatcagtcccacctgcaccaataaggagcttcgagccaagtttgaggagtatggtccggtcatcgaatgtgacatcgtgaaagattatgccttcgtacacatggagcgggcagaggatgcagtggaggccatcaggggccttgataacacagagtttcaaggtgaaccaccctctttgggtagagggctgaacacaaggctgtgtgcagaaaatggttggataagtaaaaggagaggtttggtaaagataacagctgttggctggctggtgatgaagaaataagtgtgggtgatggacttcttatgatgtagaatgcatgggactta

SEQ ID NO: 26963 - DNA, 1337 bp, Homo sapiens
  source 1..1337: mol_type = unassigned DNA
agagcactgctgcggccgccgccattttagcgttttgtcagaagcgtccgcgccgcgaggaggaggccctgctggtttctgtgcgggctcttgtcaggatggtgaagctgttcatcggaaacctgccccgggaggctacagagcaggagattcgctcactcttcgagcagtatgggaaggtgctggaatgtgacatcattaagaattacggctttgtgcacatagaagacaagacggcagctgaggatgccatacgcaacctgcaccattacaagcttcatggggtgaacatcaacgtggaagccagcaagaataagagcaaaacctcaacaaagttgcatgtgggcaacatcagtcccacctgcaccaataaggagcttcgagccaagtttgaggagtatggtccggtcatcgaatgtgacatcgtgaaagattatgccttcgtacacatggagcgggcagaggatgcagtggaggccatcaggggccttgataacacagagtttcaaggcaagataacccctgtgacagaaggctactgttgctgtaacaaagggcatacatacattttcaagaactgcaatttaattttggagtccaggaaaagcagaagatgctgagatgtcatatatggcgaattgcactattctaaatgtgttttgttttaatctttcacagtaaacaagctttcagaaatgatggtcacaaggggtaggatatcaaggagcagccagtcattcacccaattccaacacacctacatgtcacactgtcacagagtgagagccacagttccagtagttcccctaattgaccaaatctcccttgccaaatcaaaagaaatcattcctagaattctctaatccttctattgatgatgggaactccagacaccaatggctgggggaaaaaaaaagttaactcacaccaagttcctctacttattacagacaaagggccaaatcttggtcttgatctgtgccaatcgacttcaaaagttgtgacgttcttggatcagttctgctagggtgagacccgaatttggatccccaacagttctggagtatttcatcctggcagcctcattaacatcaggctcctgggactgcaaccaactcagggttattcagtccatttgaggttcacacctggaaggtaagtttctttaaaagtcatcgctaaaaagaggttagttgaacaaccactgcttgcagtcaaaattcattttaaaatgtcctagcaataccttttgaagaccacaatatatgaatttaatatttaactttgaaacataagagacaggttatctgatagatttataccagcttacttcggaa

SEQ ID NO: 26964 - DNA, 921 bp, Homo sapiens
  source 1..921: mol_type = unassigned DNA
gttttgtcagaagcgtccgcgccgcgaggaggaggccctgctggtttctgtgcgggctcttgtcaggatggtgaagctgttcatcggaaacctgccccgggaggctacagagcaggagattcgctcactcttcgagcagtatgggaaggtgctggaatgtgacatcattaagaattacggctttgtgcacatagaagacaagacggcagctgaggatgccatacgcaacctgcaccattacaagcttcatggggtgaacatcaacgtggaagccagcaagaataagagcaaaacctcaacaaagttgcatgtgggcaacatcagtcccacctgcaccaataaggagcttcgagccaagtttgaggagtatggtccggtcatcgaatgtgacatcgtgaaagattatgccttcgtacacatggagcgggcagaggatgcagtggaggccatcaggggccttgataacacagagtttcaaggtgggatgtgtgtgggctgaaattccgagctgcggttgtgcatgagaatacacccttcgtggtaccccatctccgggacgttctcggctctgtgcgttcagtccctcaggaaccgtggaccttaatttaccttgctaagttcagaccttctcttcctttcctttcctttcctctcctgcccattttcctgttcttctgtccttcaatacttctgtagcttcccattcatgttctcttctcccagcaggcctcattgtgtgcagaaactgtggtgggggctgtgctgtctcctccctgcctcctgcctcctgcggctgttggatttgggaatgaccttggtgagagtctcactgctccagggtctctttttggtccaaaggctagacctatagagttggatcactttttttctttccggtgaaataaatggtttttcaactta

SEQ ID NO: 26965 - DNA, 1649 bp, Homo sapiens
  source 1..1649: mol_type = unassigned DNA
ggggagagtagacagcagaaccagcggcggcggctaagcagagactgtagtagcggcgacagcgacgacggcagcgatggctggggcggggccagccccgggactcccgggtgcaggaggacccgtggtcccgggtcctggcgctggcatcccgggcaaaagcggcgaggaacgcttgaaggaaatggaggcggagatggccctgtttgagcaggaagttctgggggctccagtacctggaatcccaactgctgtgcctgcggtgcccactgtccccacggtccccacagtagaagcgatgcaggtcccagcggctcctgtgatccgcccaattatcgcgaccaacacataccagcaggtccagcagactctggaggcccgagcagctgctgcagccacagtagttcctcccatggtgggtggccctccttttgtaggccctgttggctttggccctggtgatcggagtcacctggacagcccagaggctcgagaagccatgttcctgcggcgggcagctgtggccccccagagggcccctatcctgcgtccagccttcgtcccccacgtgctacagagagcagattccgctctctcctctgcagcagccggcccccgccctatggccctacggccccctcaccaggccctcgtgggcccccctctgcctgggccccctggaccacccatgatgctgccaccaatggctcgggctccagggcccccgctgggctccatggctgcactgaggccccctctggaagagccagcagcaccccgagagctgggcctaggcctggggttgggcctgaaagagaaggaagaggcagtggtggcggcggcggctgggctggaggaggctagcgcggctgtggccgtgggggcaggaggtgccccagctggccctgcagtcattgggcccagcctgccgctggccctggccatgccattgcccgagcctgagcccctgcccctcccgttggaggtcgtccgcggcctcctgcccccgctgcgcattcctgaactcctgtccctgcgtcctcggccccggccccctcggccagagccacccccaggcctcatggctcttgaggtcccagagcccctgggtgaagacaagaagaaggggaagccagagaaattgaaacggtgcattcgcacagcggcagggagcagctgggaggaccccagcctgctggagtgggatgcagatgacttccggatcttctgtggggatctgggcaatgaggtgaacgatgacatcttggcacgcgccttcagccgcttcccatccttccttaaggccaaggtgatccgtgacaagcgcacaggcaagaccaagggctacggcttcgtcagcttcaaggaccccagcgactacgtgcgcgccatgcgtgagatgaatgggaagtatgtgggctcgcgccccatcaagcttcgcaagagcatgtggaaggaccggaatctggacgtggtccgcaagaagcagaaggaaaagaagaagctgggcctgagatagggtctgtggccaggcacccgctcccacctggccgggcgctggctcctccctcagttctctttggaaaacccccagctgtccacccatcccctgccccaaaaccagtttcaataaatttacgttcatttcc

SEQ ID NO: 26966 - DNA, 1562 bp, Homo sapiens
  source 1..1562: mol_type = unassigned DNA
ggggagagtagacagcagaaccagcggcggcggctaagcagagactgtagtagcggcgacagcgacgacggcagcgatggctggggcggggccagccccgggactcccgggtgcaggaggacccgtggtcccgggtcctggcgctggcatcccgggcaaaagcggcgaggaacgcttgaaggaaatggaggcggagatggccctgtttgagcaggaagttctgggggctccagtacctggaatcccaactgctgtgcctgcggtgcccactgtccccacggtccccacagtagaagcgatgcaggtcccagcggctcctgtgatccgcccaattatcgcgaccaacacataccagcaggtccagcagactctggaggcccgagcagctgctgcagccacagtagttcctcccatggtgggtggccctccttttgtaggccctgttggctttggccctggtgatcggagtcacctggacagcccagaggctcgagaagccatgttcctgcggcgggcagcagccggcccccgccctatggccctacggccccctcaccaggccctcgtgggcccccctctgcctgggccccctggaccacccatgatgctgccaccaatggctcgggctccagggcccccgctgggctccatggctgcactgaggccccctctggaagagccagcagcaccccgagagctgggcctaggcctggggttgggcctgaaagagaaggaagaggcagtggtggcggcggcggctgggctggaggaggctagcgcggctgtggccgtgggggcaggaggtgccccagctggccctgcagtcattgggcccagcctgccgctggccctggccatgccattgcccgagcctgagcccctgcccctcccgttggaggtcgtccgcggcctcctgcccccgctgcgcattcctgaactcctgtccctgcgtcctcggccccggccccctcggccagagccacccccaggcctcatggctcttgaggtcccagagcccctgggtgaagacaagaagaaggggaagccagagaaattgaaacggtgcattcgcacagcggcagggagcagctgggaggaccccagcctgctggagtgggatgcagatgacttccggatcttctgtggggatctgggcaatgaggtgaacgatgacatcttggcacgcgccttcagccgcttcccatccttccttaaggccaaggtgatccgtgacaagcgcacaggcaagaccaagggctacggcttcgtcagcttcaaggaccccagcgactacgtgcgcgccatgcgtgagatgaatgggaagtatgtgggctcgcgccccatcaagcttcgcaagagcatgtggaaggaccggaatctggacgtggtccgcaagaagcagaaggaaaagaagaagctgggcctgagatagggtctgtggccaggcacccgctcccacctggccgggcgctggctcctccctcagttctctttggaaaacccccagctgtccacccatcccctgccccaaaaccagtttcaataaatttacgttcatttcc

SEQ ID NO: 26967 - DNA, 4243 bp, Homo sapiens
  source 1..4243: mol_type = unassigned DNA
agatcgggttcaacggcagggattgggtaaggtgagaatctggcttggcggctccggccccggccatctggttcccttgggctccggccgccaccatccactcgacggctctcggcccgaacgcttggtcgcaccgcctgccgaggtcctagatgaatcgcttcaggcctggaaacgaggaagccgtctccggagaccatcgccaacgctgacgcccgcggtctgaggtcgccatgggaagagcggtaggccaccctgctcctctgatcaccggaggacagggacacattgttcagggccatattcaaacactgcccgcagtacttgcgttacgtccctttgtgaaggcaggcccttcgcggctccccagatcagtccagcctgtgtcggacccgatgactaagcacacaggaacccataactgagcctgcggaagagccagaagccgccttgcctttaacgaggggtatcctggcgagcatgcgcagaccgtccgcgcacgtcgtcgcccgctgagagcaagcgcaacgggcgttttcgtttgtgacgccagggagcgtgaggacgtggggcttccgtgaatgcgcagtgggtgcgtcggccacgaccttttggccaggttagggagggggcgacgctgagatgggggcggcggcggcggaagcggatcgcactctctttgtgggcaaccttgaaacgaaagtgaccgaggagctccttttcgagcttttccaccaggctgggccagtaataaaggtgaaaattccaaaagataaggatggtaaaccaaagcagtttgcgtttgtgaatttcaaacatgaagtgtctgttccttatgcaatgaatctacttaatggaatcaaactttatggaaggcctatcaaaattcaatttagatcaggaagtagtcatgccccacaagatgtcagtttgtcatatccccaacatcatgttggaaattcaagccctacctccacatctcctagcaggtacgaaaggactatggataacatgacttcatcagcacagataattcagagatctttctcttctccagaaaattttcagagacaagcagtgatgaacagtgctttgagacaaatgtcatatggtggaaaatttggttcttcacctctggatcaatcaggattttcaccatcagttcaatcacacagtcatagtttcaatcagtcttcaagctcccagtggcgccaaggtacaccatcatcacagcgtaaagtcagaatgaattcttatccctacctagcagatagacattatagccgggaacagcgttacactgatcatgggtctgaccatcattacagaggaaagagagatgatttcttctatgaagacaggaatcatgatgactggagccatgactatgataacagaagagacagtagtagagatggaaaatggcgctcatctcgacactaacacatgttaaaaggacattgtttttatagggtcattttaggccctttgactaagttgatatggaaatattttgttgaaaaactgtacagagcagctttacaagttgtcacatttctttataaatttttttaaagctacagtttaatacaaaatgaattgcggttttattacattaataacctttcacctcagggttttatgaagaggaaagggttttatgcaaaagaaagtgctacaattcctaatcattttagacactttaggagggggtgaagttgtatgataaagcagatattttaattatttgttatctttttgtattgcaagaaatttcttgctagtgaatcaagaaaacatccaggttgacagtctaaaatggctactggtattttagttaattcaaaaatgaaacttttcagtgattcactttactaacattctatttgagaaggcttattggtaaagtttggggataaaggcattgcttaacttcttatataatttaggtataaattctgtgacatgctcttgagctttaccctagttgaacatacatgtgtagatttacacatactgtttcattctaaaatttagaaattgttcattaaatcccatttgaggtataagtcactcaggaagttaaaatatctctacacgtatatttttacattaaaaatacagtgttagcataaatccccttttcaggaagaacaaaaatgtcagtgcatagttagataaaatggtaaaatgttttactgaaagcatacttttttggaaaatagattcatgaagcctttaagtgctgcttctgtcagtcaaacgttaaaaactttaacattttcaaagtgcccagactgtgtacaaagacacatgtaatggagattgtacaggttgtttttttgtttgaacctttgaaagagtttaatcttaacgttttctaattttaaaattttaaaatcttgtttaacaaaagcttgtattaagatactgttttcatttcattacagaattgtttataaaagttcatttgttgaaaaataaggatcctttttaataccacagcatttgtactgttcctttttaatatactgaaaatataaaaggaagggtgtgtgttatttttttttttttatgtcactgacttcagagacattgtacacaaagaattaacatacttttattcactgattgcctgctgtttagaatatcagttctttaattttgagcatcctgaaatacatcttttgtacatatagagcatgatgtttcacaatcagattttcagtgacccctcgattatagcttggagtactttagttaccctcagtggtctctaggagttaaagtacacttagatttcctgtttataaatgaattcagtttttctgtttctaagtaaatgtagctattcaactactcactatagaattaagataaacaatttgtttgcttaagcattttcacagaatttgtttccaatgagattattatttttgggtatcttatccatatgaaaacttagtaggtttgtagatgttaacgaagattaatactgcatgtttgtttttgttttttttttgagacagagtcttgctacgacacccaggctagagtgcaatggcgggatctcaggtcactgcaacctccatatcccgggttcaagtgattctcctgccttagcctcccgagtagctgggattacaggcacccaccaccacgcctggctagtttttgtatttttagtagagatggggtttcaccacattggccaggctggtctcaaactcctgacctcaagtgatccacctaccttggcctaccgaggtgctggaattacaggtgtgagccaccgcgcctggcctaatactgctttattacaacgttatctgtgggtcggatccttttatattggttaacagatgaccctgactcagaataatctttttcaatggctttttgagggaagcttgtgaagttctggtgaatcttctttttcacttcactttcagtgagctgaaagtaaccaaactaaatacatgtattgtgtaaagggacaggacaagacagccttaaaaaattgaatatagttggtgagacaactcagaagtacaggtttgagcatcccttattcaaaatgcttgagaagtgttttgggttctggaatatttgcattaatgcttgccagttgagcatcccaggtccggaaatccacagtgctccaatgagcctttcccctgagtgtcacatctgtattggcactcaaaaagtttcatattttggagcatttcagatttcagatttgggatgcttcatctatattgacagctgcaagaacagaaaggaagaagagattatttttgtgggagaacagtttctcccatagtgtttcctgtggaatgctagtgtctcataaagtcttctaaaaaaaagaaaaaaaaaatcaaatgtttggaagccattttgtgttactgtgtgactttcttttactcaaaaacagcaccataaaatttctgacaagtactataggtaaagaaatccctttatacttaacctagtattttctacctttccccatctaaaataaaatttttataccactttctaattatgttgtgtgtgcccactttccccatacctactgctaccatcttagagtaggcaattttctcaagaggattattccaagaacaccctaatgttttcctgcttccagtcttctttcctcaaatttattccacactcttaagaattgaagatgtaaatctgtcactcgcctgaataaagcttcagtggcctctga

SEQ ID NO: 26968 - DNA, 2827 bp, Homo sapiens
  source 1..2827: mol_type = unassigned DNA
ccctctgcgacagtttcccgaggtacctagtgtctgagcggcacagacgagatctcgatcgaaggcgagatggcggacgtgctagatcttcacgaggctgggggcgaagatttcgccatggatgaggatggggacgagagcattcacaaactgaaagaaaaagcgaagaaacggaagggtcgcggctttggctccgaagaggggtcccgagcgcggatgcgtgaggattatgacagcgtggagcaggatggcgatgaacccggaccacaacgctctgttgaaggctggattctctttgtaactggagtccatgaggaagccaccgaagaagacatacacgacaaattcgcagaatatggggaaattaaaaacattcatctcaacctcgacaggcgaacaggatatctgaaggggtatactctagttgaatatgaaacatacaaggaagcccaggctgctatggagggactcaatggccaggatttgatgggacagcccatcagcgttgactggtgttttgttcggggtccaccaaaaggcaagaggagaggtggccgaagacgcagcagaagtccagaccggagacgtcgctgacaggtcctctgttgtccaggtgttctcttcaagattccatttgaccatgcagccttggacaaataggactggggtggaacttgctgtgtttatatttaatctcttaccgtatatgcgtagtatttgagttgcgaataaatgttccatttttgttttctacatttaatgttactttcctgtcctaaaattgaaagttctaaagcatagcaaggctgtatggatcattgtgaagatacttctagggactgaactctatgtatttcttttttttcttttttttgagatagagtcttgctgtgttacccagggtggattgcagctgatcatagctcactgcagcttcaaactcttgggctcaagccatccttctgcctcactgtccctagtagttgggattacaggcacatgccaccatgcccagctaaatttttaatatttttgtagagatggggtcttgctgtgttacctgggctagttatgtgagtttctatattagacatagtctcaagtttcaggtagggtttaaagtagagacactggtcagtatttcttttttggggggaactaggagagcaggagtagaagtgagatgttaagatcttatggcactaaagacttactattctgttcctacatactctgttaggatcagatagatgttatagaaatgccttttgtttctcctgcccttcttgatgtcacagttttttgtacttccagctgtctaaaggcatgaatctcctcttggagcattctcccagacccttctttagaagagtctatactaagttcttggtgccctcttcggcagccaagggtgaaggccccatagaggagaggatccaaaggagcattgaggaggcccaagaggaaaaggatgtggctcaggctgggagggacttcagttagcatggtgggggagaaccagtaccacatacccagtaggtaataaggtgtccagcagaggatgaaggtcagcaagataagcagggccagtctcagggcccggagacgaacacggggacaattgtcaaaggagcgggggagggcaaattcaccagcaggggctaggaatttagaaaatatactgtaattcagacactcagcttctgatctgagtatagggtgaattgatggaggggcatagctagtgagacagagctcacctcctacaaggaggagaatgttgcaaaccgttttccccttcccaacctgggactatatgatttcttacccccagggattatgatagaaatatgaagccaccaagtctagacttgatggtgttcaagaataaataatactgattgcctccctagtccttgtccagctaactcagctgtttataattgaagggattcaacaaaattatctctagcatcaggtgctagacatggttagaatctcaccatggtttagtgactggtagatagctattaggtaggtagataaataaatgatgctagaggcaacaggtctagggttaaggattaaggcctgggaattggagtctcaccatggctccccttccttgtctggggcctggacacactgaggacaatgcggctatagcagatggccatggcagtcagtggcagcagaaagaggcagcagaaggtgaagaggttataggtggtctcttgccattgagccttgaagctgcctttggtgacacactgagtgaaagggactgggccagctcagtggaccgtgtggaacaggaacagctggagtggagttgaggactattagaactggttcccctcaccacccaacctacccacctatgtcatactgtctcctcccaattcatccttaattccaagtgaagcagcacagtgctgagaaacagttcatccatggtgccatgttaaagaagttggaaatatatcttgaaaatcctatcttccttttaggcttgaatatgatgctgaacagtaagtttgttaaatcttggaacttaaaacaatcctgctttctcaagtactattctaacattgcgctttataagggatgatatttctaccacctcactcatatttttagctgaaatgattttcctggtatgtctgttattttgtggaaaaagaaatattgtgtaaaatgggtgctgccaaaattccaggccattttgcagggactctgaagtgacctttagtagtaatagtcttatgtgcagtaactataatggtaaagaatgttaaataataaaatttaacattttccaaatgct

SEQ ID NO: 26969 - DNA, 796 bp, Homo sapiens
  source 1..796: mol_type = unassigned DNA
gagcggcacagacgagatctcgatcgaaggcgagatggcggacgtgctagatcttcacgaggctgggggcgaagatttcgccatggatgaggatggggacgagagcattcacaaactgaaagaaaaagcgaagaaacggaagggtcgcggctttggctccgaggggtcccgagcgcggatgcgtgaggattatgacagcgtggagcaggatggcgatgaacccggaccacaacgctctgttgaaggctggattctctttgtaactggagtccatgaggaagccaccgaagaagacatacacgacaaattcgcagaatatggggaaattaaaaacattcatctcaacctcgacaggcgaacaggatatctgaaggggtatactctagttgaatatgaaacatacaaggaagcccaggctgctatggagggactcaatggccaggatttgatgggacagcccatcagcgttgactggtgttttgttcggggtccaccaaaaggcaagaggagaggtggccgaagacgcagcagaagtccagaccggagacgtcgctgacaggtcctctgttgtccaggtgttctcttcaagattccatttgaccatgcagccttggacaaataggactggggtggaacttgctgtgtttatatttaatctcttaccgtatatgcgtagtatttgagttgcgaataaatgttccatttttgttttctacatttaatgttactttcctgtcctaaaattgaaagttctaaagcatagcaaggctgtatggatcattgtgaagatacttct

SEQ ID NO: 26970 - DNA, 2215 bp, Homo sapiens
  source 1..2215: mol_type = unassigned DNA
aacagccgaccaatcacaggcagcaggggcgcgccctgcagcggggctccggctgcggttccgtggactcggcgactaggcgccgcctgaccagtaggagccgccctcgacgagcgagctcgaaggctgcgactggcgccgcctcaccgcctcccaccgccactgaccgaccgttcgaccggcaaacatggttgaagcggatcgcccggggaagctgttcattgggggcctcaacctcgaaaccgacgagaaagccctcgaagccgagtttggcaagtatggccgcatcgtcgaggtgctcctgatgaaagaccgagaaaccaacaagtcgaggggcttcgcgttcgtcacctttgaaagccccgcagacgccaaggccgccgccagagacatgaacggcaagtccctggatggtaaggccatcaaggtggcccaggccaccaaaccggcgttcgagagcagccggcggggcccgccgcctccccgcagccgcggtcgcccgaggttcctgcgcggaacccgcgggggtggcggcggcccgcggcgttccccatcccggggcgggcccgatgatgacggcggctacacggcggatttcgacctgcggccctccagggccccgatgcccatgaagcgtgggccgccgccgcgcagggtcggcccaccccccaagagggccgcgccgtcgggcccggctcgcagcagcggcggtggaatgcgcgggagggccctggccgtgcgggggcgagacggctactcaggcccaccgcgccgggagccgctgcccccgcgccgcgacccctacctgggcccgcgggatgagggctactcgtccagagacggctactcgagccgagactaccgcgaaccccggggttttgccccctcgcccggagagtacacccaccgcgattacggccactccagtgtccgggacgactgtcccttgagaggctacagcgaccgagacggctacggaggtcgcgaccgtgactacggggatcatctgagcagaggctcccatcgagagccctttgagagctacggagagctgcgcggcgccgccccaggacgggggacaccgccatcttacggaggaggaggccgctacgaggagtaccggggctactcacccgatgcctacagcggcggccgcgacagttacagcagcagttatggccggagcgaccgctactcgaggggccgacaccgggtgggcagaccagatcgtgggctctctctgtccatggaaaggggctgccctccccagcgtgattcttacagccggtcaggctgcagggtgcccaggggcggaggccgtctaggaggccgcttggagagaggaggaggccggagcagatactaagcaggaacagacttgggaccaaaaatcccttttcaacgaaactaacaaaaagaagaacctgttgtatggtaactacccaaggactagtacaaggaagagttgtttttaccttttaagaatttcctgttaagatcgtctccatttttatgcttttgggagaaaaaacttaaaattcgtttagtttagttttggaattgttaacgtttctttcaacaagctcctgttaaaagtatatgaacctgagtactagtcttcttacatttacaagtagaaattcgattaatggcttcttcccttgtaaattttcttgataaatgaggcaaacagttctaagatctttgataaacatctgctcacctaaaatggaaaaacggatcattctgctcatttaaaccaactagattttgggtggagagtgggagggattggtgtatgctactcttaagatttcagggtatctttcaaactgaatctttgtttccagtattaaaaagcaaacaaccagcaacaacaacaacaaaagtgatttagatcaaatgtttatgtaaagaaaattattttcactcagtaaatctgaaaagtaaatggataatgttggccatgttttgcctttttgctttttctttgggaatctacaggatcacctgtcccctcactcccaaaagtactatctatgttttgaacaacagtggaatactatatcaaaggtttggccaaccaaccacaaagctacaaaacaagcaaatcccaaatccttcaattgatagcattcattttcactaccaacaaatttattaagaaacaagtagaaaataaatcagtggtcgacttggggaccgtaatggcttc

SEQ ID NO: 26971 - DNA, 1767 bp, Homo sapiens
  source 1..1767: mol_type = unassigned DNA
atggtagaagcagatcatcctggcaagcttttcattggtggcctcaatagagaaaccaatgagaagatgcttaaagcagtatttgggaaacatggtcccatatcagaagttcttttgataaaggatcgaaccagcaaatccagaggctttgcatttattacttttgagaaccctgcagatgctaagaatgctgccaaagatatgaatggaaagtctttgcatggaaaagcaataaaagtagaacaagccaagaaaccatcttttcaaagtggtggtaggcggagaccaccagcttcttcgagaaacagaagcccttcaggaagtctgagatctgcaagaggaagccgtggaggaacaagagggtggcttccctcacatgaagggcacctggatgatggtggatacactcctgatctcaagatgagttattctaggggactcattccagttaaaagaggtccatcttcaagaagtggaggtcctcctccgaaaaaatctgctccttctgctgtggcaagaagcaatagttggatgggaagccaaggtcccatgtcacaaagaagagagaattatggagttcctccacgcagagcgacaatatcttcctggagaaatgatcgcatgtcaacaagacatgatggttatgcaactaacgatggaaatcatccaagttgccaagaaacgagggattatgctccaccatctagaggctatgcataccgtgataatggtcattctaatcgggatgaacattcctctagaggatatagaaatcatcgaagttcccgagaaactagggattatgctccaccatctagaggccatgcataccgtgattatggtcattctcgtcgggatgaaagttattctagaggatacagaaatcgtcgaagttcccgagaaactagggagtatgctccaccatctagaggccatggataccgtgattatggtcattctcgtcgacatgaaagttattctagaggatatagaaatcatccaagttcccgagaaaccagggattatgctccaccacatagagactatgcataccgtgattatggtcattctagttgggatgaacattcctctagaggatatagttatcatgatggctacggtgaggcccttggtagagatcattctgaacatctaagtggaagttcttatagagatgcacttcagagatacgggacctctcatggtgcaccacctgcaagagggcctcggatgtcttatggtggaagcacctgccacgcatatagtaatacacgagatagatatggcagaagttgggagagttactcgagctgtggtgattttcattattgtgatcgtgagcatgtttgcagaaaagaccaaaggaatccgccttctctgggtagggtgctccctgatcctcgtgaagcatgtggtagctcaagttatgtggcatctatagtagatggtggggagagtcgatctgaaaaaggagactcgagcagatattaaagcaagcattgaaaataatagttattgcataccaatccttgtttgcaaatcaaaaattgaaatgttatttctgcattgttacctgcatattactgaaagaaacatgttggttttgtggagagaggtagatactaacttcctccatgaattttttgaggtattcaaaggaaaaggaattgttttcaaagtaatttcatacttgttgatgctatttgaaaagtgtttagatgtaatatctaccttaaaattttcacaataaaatttgacatgtactgc

SEQ ID NO: 26972 - DNA, 1921 bp, Homo sapiens
  source 1..1921: mol_type = unassigned DNA
atttccgggcacggcttccggcgtccttccctctcagggaagctccagctgtccctcccgcagttggccctgtggtgttccgaagccggttacgtacggcctgagggccaggcgaacctcaggctctttgtcctactaaaaagcgcagcacaatggtagaagcagatcatcctggcaagcttttcattggtggcctcaatagagaaaccaatgagaagatgcttaaagcagtatttgggaaacatggtcccatatcagaagttcttttgataaaggatcgaaccagcaaatccagaggctttgcatttattacttttgagaaccctgcagatgctaagaatgctgccaaagatatgaatggaaagtctttgcatggaaaagcaataaaagtagaacaagccaagaaaccatcttttcaaagtggtggtaggcggagaccaccagcttcttcgagaaacagaagcccttcaggaagtctgagatctgcaagaggaagccgtggaggaacaagagggtggcttccctcacatgaagggcacctggatgatggtggatacactcctgatctcaagatgagttattctaggggactcattccagttaaaagaggtccatcttcaagaagtggaggtcctcctccgaaaaaatctgctccttctgctgtggcaagaagcaatagttggatgggaagccaaggtcccatgtcacaaagaagagagaattatggagttcctccacgcagagcgacaatatcttcctggagaaatgatcgcatgtcaacaagacatgatggttatgcaactaacgatggaaatcatccaagttgccaagaaacgagggattatgctccaccatctagaggctatgcataccgtgataatggtcattctaatcgggatgaacattcctctagaggatatagaaatcatcgaagttcccgagaaactagggattatgctccaccatctagaggccatgcataccgtgattatggtcattctcgtcgggatgaaagttattctagaggatacagaaatcgtcgaagttcccgagaaactagggagtatgctccaccatctagaggccatggataccgtgattatggtcattctcgtcgacatgaaagttattctagaggatatagaaatcatccaagttcccgagaaaccagggattatgctccaccacatagagactatgcataccgtgattatggtcattctagttgggatgaacattcctctagaggatatagttatcatgatggctacggtgaggcccttggtagagatcattctgaacatctaagtggaagttcttatagagatgcacttcagagatacgggacctctcatggtgcaccacctgcaagagggcctcggatgtcttatggtggaagcacctgccacgcatatagtaatacacgagatagatatggcagaagttgggagagttactcgagctgtggtgattttcattattgtgatcgtgagcatgtttgcagaaaagaccaaaggaatccgccttctctgggtagggtgctccctgatcctcgtgaagcatgtggtagctcaagttatgtggcatctatagtagatggtggggagagtcgatctgaaaaaggagactcgagcagatattaaagcaagcattgaaaataatagttattgcataccaatccttgtttgcaaatcaaaaattgaaatgttatttctgcattgttacctgcatattactgaaagaaacatgttggttttgtggagagaggtagatactaacttcctccatgaattttttgaggtattcaaaggaaaaggaattgttttcaaagtaatttcatacttgttgatgctatttgaaaagtgtttagatgtaatatctaccttaaaattttcacaataaaatttgacatgtactgcaa

SEQ ID NO: 26973 - DNA, 1885 bp, Homo sapiens
  source 1..1885: mol_type = unassigned DNA
cagggaagctccagctgtccctcccgcagttggccctgtggtgttccgaagccggttacgtacggcctgagggccaggcgaacctcaggctctttgtcctactaaaaagcgcagcacaatggtagaagcagatcatcctggcaagcttttcattggtggcctcaatagagaaaccaatgagaagatgcttaaagcagtatttgggaaacatggtcccatatcagaagttcttttgataaaggatcgaaccagcaaatccagaggctttgcatttattacttttgagaaccctgcagatgctaagaatgctgccaaagatatgaatggaaagtctttgcatggaaaagcaataaaagtagaacaagccaagaaaccatcttttcaaagtggtggtaggcggagaccaccagcttcttcgagaaacagaagcccttcaggaagtctgagatctgcaagaggaagccgtggaggaacaagagggtggcttccctcacatgaagggcacctggatgatggtggatacactcctgatctcaagatgagttattctaggggactcattccagttaaaagaggtccatcttcaagaagtggaggtcctcctccgaaaaaatctgctccttctgctgtggcaagaagcaatagttggatgggaagccaaggtcccatgtcacaaagaagagagaattatggagttcctccacgcagagcgacaatatcttcctggagaaatgatcgcatgtcaacaagacatgatggttatgcaactaacgatggaaatcatccaagttgccaagaaacgagggattatgctccaccatctagaggctatgcataccgtgataatggtcattctaatcgggatgaacattcctctagaggatatagaaatcatcgaagttcccgagaaactagggattatgctccaccatctagaggccatgcataccgtgattatggtcattctcgtcgggatgaaagttattctagaggatacagaaatcgtcgaagttcccgagaaactagggagtatgctccaccatctagaggccatggataccgtgattatggtcattctcgtcgacatgaaagttattctagaggatatagaaatcatccaagttcccgagaaaccagggattatgctccaccacatagagactatgcataccgtgattatggtcattctagttgggatgaacattcctctagaggatatagttatcatgatggctacggtgaggcccttggtagagatcattctgaacatctaagtggaagttcttatagagatgcacttcagagatacgggacctctcatggtgcaccacctgcaagagggcctcggatgtcttatggtggaagcacctgccacgcatatagtaatacacgagatagatatggcagaagttgggagagttactcgagctgtggtgattttcattattgtgatcgtgagcatgtttgcagaaaagaccaaaggaatccgccttctctgggtagggtgctccctgatcctcgtgaagcatgtggtagctcaagttatgtggcatctatagtagatggtggggagagtcgatctgaaaaaggagactcgagcagatattaaagcaagcattgaaaataatagttattgcataccaatccttgtttgcaaatcaaaaattgaaatgttatttctgcattgttacctgcatattactgaaagaaacatgttggttttgtggagagaggtagatactaacttcctccatgaattttttgaggtattcaaaggaaaaggaattgttttcaaagtaatttcatacttgttgatgctatttgaaaagtgtttagatgtaatatctaccttaaaattttcacaataaaatttgacatgtactgc

SEQ ID NO: 26974 - DNA, 1547 bp, Homo sapiens
  source 1..1547: mol_type = unassigned DNA
gagtggtggagtctctgaagcctcatcagtcaccgggactgtcaggaatagtggtttaagaggaagctcggcctggggcactataccctgtcatccagttccctgcctcggagataaagattccagctacatgggcaaacgcctggatcagccacaaatgtacccccagtacacttactactatcctcattatctccaaaccaagcagtcctatgcaccagctccccaccccatggctcctcccagccccagcacaaacagcagcagcaacaacagcagcaacaacagcagcggggaacagttgagtaaaaccaacctgtacattcgaggcctcccaccaggcaccactgaccaggacctaatcaagctgtgccaaccgtatggaaaaattgtatctacaaaggcaattcttgacaaaaacacaaatcagtgcaaaggttatggttttgtagattttgacagtcctgcagccgcacagaaagcggtagcatctctcaaggcaaatggcgtgcaggcacagatggctaagcaacaagagcaagacccaacaaacctatacatctcaaatctccccatttctatggatgagcaggagcttgagaatatgctgaaaccctttggacatgtcatttccacaagaatactaagagacgctaatggagtcagcagaggtgttggctttgccagaatggagtctactgaaaaatgtgaagtggtaattcaacattttaatggaaaatatctgaaaacaccaccaggcatcccagcccccagtgagcctttgctgtgcaaattcgctgatggaggacaaaagaagcgacagaatcaaagcaaatatacccagaatgggaggccttggcccagggaaggagaggctggcatggctttgacctatgaccccacagctgccatacagaatggattttattcttcaccgtacagtattgcaaccaaccgcatgattccacagacatctatcacgccattcattgctgcttcccctgtctccacataccaggtccagagtacttcatggatgcctcatccgccatacgttatgcaaccaacaggtgctgtgattacaccaaccatggaccatcccatgtcaatgcagccagccaacatgatgggcccactgacacagcagatgaatcacctttcgttgggcacaacaggaacgtatatgactgctgctgctcctatgcaagggacctacattcctcagtacacgcctgtgcctccgacagctgtttctattgaaggtgttgttgctgatacctctccccagacagtggcaccttcatcccaggacaccagtggtcagcagcaacagatagcagtggacacatccaacgaacatgcacctgcatattcttaccaacagtctaaaccataaacaggactgaagaatgtctgtctgaatctttgccttgaatgaagaaacttcattgaacaagaagttggcttccagtttgcacagacgtcaatggaatgcatttttttgttgttgttgttgttttttttttagtgttataccttacccaatg

SEQ ID NO: 26975 - DNA, 1598 bp, Homo sapiens
  source 1..1598: mol_type = unassigned DNA
ttctacagatctcactcctcgccctttttttttttcctttggtgtgtgttttttgttttgttttgttttttaaaaaaattcttgctgtgttggaactagcgagtggtggagtctctgaagcctcatcagtcaccgggactgtcaggaatagtggtttaagaggaagctcggcctggggcactataccctgtcatccagttccctgcctcggagataaagattccagctacatgggcaaacgcctggatcagccacaaatgtacccccagtacacttactactatcctcattatctccaaaccaagcagtcctatgcaccagctccccaccccatggctcctcccagccccagcacaaacagcagcagcaacaacagcagcaacaacagcagcggggaacagttgagtaaaaccaacctgtacattcgaggcctcccaccaggcaccactgaccaggacctaatcaagctgtgccaaccgtatggaaaaattgtatctacaaaggcaattcttgacaaaaacacaaatcagtgcaaaggttatggttttgtagattttgacagtcctgcagccgcacagaaagcggtagcatctctcaaggcaaatggcgtgcaggcacagatggctaagcaacaagagcaagacccaacaaacctatacatctcaaatctccccatttctatggatgagcaggagcttgagaatatgctgaaaccctttggacatgtcatttccacaagaatactaagagacgctaatggagtcagcagaggtgttggctttgccagaatggagtctactgaaaaatgtgaagtggtaattcaacattttaatggaaaatatctgaaaacaccaccaggcatcccagcccccagtgagcctttgctgtgcaaattcgctgatggaggacaaaagaagcgacagaatcaaagcaaatatacccagaatgggaggccttggcccagggaaggagaggctggcatggctttgacctatgaccccacagctgccatacagaatggattttattcttcaccgtacagtattgcaaccaaccgcatgattccacagacatctatcacgccattcattgctgcttcccctgtctccacataccaggtccagagtacttcatggatgcctcatccgccatacgttatgcaaccaacaggtgctgtgattacaccaaccatggaccatcccatgtcaatgcagccagccaacatgatgggcccactgacacagcagatgaatcacctttcgttgggcacaacaggaacgtatatgactgctgctgctcctatgcaagggacctacattcctcagtacacgcctgtgcctccgacagctgtttctattgaaggtgttgttgctgatacctctccccagacagtggcaccttcatcccaggacaccagtggtcagcagcaacagatagcagtggacacatccaacgaacatgcacctgcatattcttaccaacagtctaagtaagtctgggctgtgctaagctcttttcctcaagatcagccatcttgacatcactctctcatgttgtatgtgttagcttttgctgaaatataaaccatcccaaactta

SEQ ID NO: 26976 - DNA, 2757 bp, Homo sapiens
  source 1..2757: mol_type = unassigned DNA
ttctacagatctcactcctcgccctttttttttttcctttggtgtgtgttttttgttttgttttgttttttaaaaaaattcttgctgtgttggaactagcgagtggtggagtctctgaagcctcatcagtcaccgggactgtcaggaatagtggtttaagaggaagctcggcctggggcactataccctgtcatccagttccctgcctcggagataaagattccagctacatgggcaaacgcctggatcagccacaaatgtacccccagtacacttactactatcctcattatctccaaaccaagtcctatgcaccagctccccaccccatggctcctcccagccccagcacaaacagcagcagcaacaacagcagcaacaacagcagcggggaacagttgagtaaaaccaacctgtacattcgaggcctcccaccaggcaccactgaccaggacctaatcaagctgtgccaaccgtatggaaaaattgtatctacaaaggcaattcttgacaaaaacacaaatcagtgcaaaggttatggttttgtagattttgacagtcctgcagccgcacagaaagcggtagcatctctcaaggcaaatggcgtgcaggcacagatggctaagcaacaagagcaagacccaacaaacctatacatctcaaatctccccatttctatggatgagcaggagcttgagaatatgctgaaaccctttggacatgtcatttccacaagaatactaagagacgctaatggagtcagcagaggtgttggctttgccagaatggagtctactgaaaaatgtgaagtggtaattcaacattttaatggaaaatatctgaaaacaccaccaggcatcccagcccccagtgagcctttgctgtgcaaattcgctgatggaggacaaaagaagcgacagaatcaaagcaaatatacccagaatgggaggccttggcccagggaaggagaggctggcatggctttgacctatgaccccacagctgccatacagaatggattttattcttcaccgtacagtattgcaaccaaccgcatgattccacagacatctatcacgccattcattgctgcttcccctgtctccacataccagggtgctgtgattacaccaaccatggaccatcccatgtcaatgcagccagccaacatgatgggcccactgacacagcagatgaatcacctttcgttgggcacaacaggaacgattcaatcccaagacaggattatgatactccaccagctgttgtgtcagtatatgactgctgctgctcctatgcaagggacctacattcctcagtacacgcctgtgcctccgacagctgtttctattgaaggtgttgttgctgatacctctccccagacagtggcaccttcatcccaggacaccagtggtcagcagcaacagatagcagtggacacatccaacgaacatgcacctgcatattcttaccaacagtctaaaccataaacaggactgaagaatgtctgtctgaatctttgccttgaatgaagaaacttcattgaacaagaagttggcttccagtttgcacagacgtcaatggaatgcatttttttgttgttgttgttgttttttttttagtgttataccttacccaatgaaagcaaagtttttatgtgctgtgcaaatggtcttcatgtggtctgacaatttatttttgccatcatttttttaattaaagaaaaaatttccagaagaggaaaaaaaaactacaaaaaacaaaacattgaaggttgatattttatgtggaagaacatttgaattgaattcagaatttttctgaaggtgtagatactttttttttttttttaacagaaaacctgatgtcaagaggtgggcaatagaaatggaaacaaattgtcttcctcaataattaagctactttctctttttcccttcttgttttaatctagtgggttttttattttattttttcttagaaatatgtaggtaaggtttatcttgaatcttaattgccttaattttaaggacgtcaaaggctctcgaggcaagctgtcaacgtcttgttgaaaacaaaaatcaagaaagaattgaaatactgtgccggctttcactggcacagaagtttaagactatgagtttttagggtgaagaaaaaactgtacagtttaaatgaaaatgtttttcttcatttgaagaaaatttgttgataaaccatggcaactgcaagaattggaaaaatgctgggacttttcatgaactttgtcttaagtgttgacatgaatcattctaaaaggctaaaacattttacagtaaagttattaaggttggtttaaaaacaactgcattagaaataatgcgtgtttggggggcagaatgcagatttttttaatttacaaagcgtgatcgctagcaaaagcattagtgctttttatctgcagtcttttttatgagctttacaaagtttttagtcagctttgcttgtcacattgcaaaacctagcttaagagcattaaaaaaaaaaacttaagtagataggagcttatggtcaaaaagtgcaaaaaaaaaaacaaaaaaaaagcaatagatagagaaattgttgacaatttctgtagtctttcctagttgtgatcaaattcagcctatggatggcctattttataccaaagatgaagtgacaccctattacagtccagaagatagaggttgttttcgtttcttttctttttaaaaaaaaaaaaatttatttgaccga

SEQ ID NO: 26977 - DNA, 1864 bp, Homo sapiens
  source 1..1864: mol_type = unassigned DNA
atcactacagacagcctggttagagaacaaactgcctcatcccaagtggaccccggcagctgggggaagccaggcaagatctgggaaggctgtgtgtgggtgttttttctacagatctcactcctcgccctttttttttttcctttggtgtgtgttttttgttttgttttgttttttaaaaaaattcttgctgtgttggaactagcgagtggtggagtctctgaagcctcatcagtcaccgggactgtcaggaatagtggtttaagaggaagctcggcctggggcactataccctgtcatccagttccctgcctcggagataaagattccagctacatgggcaaacgcctggatcagccacaaatgtacccccagtacacttactactatcctcattatctccaaaccaagcagtcctatgcaccagctccccaccccatggctcctcccagccccagcacaaacagcagcagcaacaacagcagcaacaacagcagcggggaacagttgagtaaaaccaacctgtacattcgaggcctcccaccaggcaccactgaccaggacctaatcaagctgtgccaaccgtatggaaaaattgtatctacaaaggcaattcttgacaaaaacacaaatcagtgcaaaggttatggttttgtagattttgacagtcctgcagccgcacagaaagcggtagcatctctcaaggcaaatggcgtgcaggcacagatggctaagcaacaagagcaagacccaacaaacctatacatctcaaatctccccatttctatggatgagcaggagcttgagaatatgctgaaaccctttggacatgtcatttccacaagaatactaagagacgctaatggagtcagcagaggtgttggctttgccagaatggagtctactgaaaaatgtgaagtggtaattcaacattttaatggaaaatatctgaaaacaccaccaggcatcccagcccccagtgagcctttgctgtgcaaattcgctgatggaggacaaaagaagcgacagaatcaaagcaaatatacccagaatgggaggccttggcccagggaaggagaggctggcatggctttgacctatgaccccacagctgccatacagaatggattttattcttcaccgtacagtattgcaaccaaccgcatgattccacagacatctatcacgccattcattgctgcttcccctgtctccacataccaggtccagagtacttcatggatgcctcatccgccatacgttatgcaaccaacaggtgctgtgattacaccaaccatggaccatcccatgtcaatgcagccagccaacatgatgggcccactgacacagcagatgaatcacctttcgttgggcacaacaggaacgattcaatcccaagacaggattatgatactccaccagctgttgtgtcagtatatgactgctgctgctcctatgcaagggacctacattcctcagtacacgcctgtgcctccgacagctgtttctattgaaggtgttgttgctgatacctctccccagacagtggcaccttcatcccaggacaccagtggtcagcagcaacagatagcagtggacacatccaacgaacatgcacctgcatattcttaccaacagtctaaaccataaacaggactgaagaatgtctgtctgaatctttgccttgaatgaagaaacttcattgaacaagaagttggcttccagtttgcacagacgtcaatggaatgcatttttttgttgttgttgttgttttttttttagtgttataccttacccaatgaaagcaaagtttttatgtgctgtgcaaatggtcttcatgtggtctgacaatttatttttgcca

SEQ ID NO: 26978 - DNA, 8208 bp, Homo sapiens
  source 1..8208: mol_type = unassigned DNA
tttttttccccctttacgaacgctggcaattgacatcactacagacagcctggttagagaacaaactgcctcatcccaagtggaccccggcagctgggggaagccaggcaagatctgggaaggctgtgtgtgggtgttttttctacagatctcactcctcgccctttttttttttcctttggtgtgtgttttttgttttgttttgttttttaaaaaaattcttgctgtgttggaactagcgagtggtggagtctctgaagcctcatcagtcaccgggactgtcaggaatagtggtttaagaggaagctcggcctggggcactataccctgtcatccagttccctgcctcggagataaagattccagctacatgggcaaacgcctggatcagccacaaatgtacccccagtacacttactactatcctcattatctccaaaccaagcagtcctatgcaccagctccccaccccatggctcctcccagccccagcacaaacagcagcagcaacaacagcagcaacaacagcagcggggaacagttgagtaaaaccaacctgtacattcgaggcctcccaccaggcaccactgaccaggacctaatcaagctgtgccaaccgtatggaaaaattgtatctacaaaggcaattcttgacaaaaacacaaatcagtgcaaaggttatggttttgtagattttgacagtcctgcagccgcacagaaagcggtagcatctctcaaggcaaatggcgtgcaggcacagatggctaagcaacaagagcaagacccaacaaacctatacatctcaaatctccccatttctatggatgagcaggagcttgagaatatgctgaaaccctttggacatgtcatttccacaagaatactaagagacgctaatggagtcagcagaggtgttggctttgccagaatggagtctactgaaaaatgtgaagtggtaattcaacattttaatggaaaatatctgaaaacaccaccaggcatcccagcccccagtgagcctttgctgtgcaaattcgctgatggaggacaaaagaagcgacagaatcaaagcaaatatacccagaatgggaggccttggcccagggaaggagaggtactcagaggcaggactgtccctaggcaaaatcgtgaagctggcatggctttgacctatgaccccacagctgccatacagaatggattttattcttcaccgtacagtattgcaaccaaccgcatgattccacagacatctatcacgccattcattgctgcttcccctgtctccacataccaggtccagagtacttcatggatgcctcatccgccatacgttatgcaaccaacaggtgctgtgattacaccaaccatggaccatcccatgtcaatgcagccagccaacatgatgggcccactgacacagcagatgaatcacctttcgttgggcacaacaggaacgtatatgactgctgctgctcctatgcaagggacctacattcctcagtacacgcctgtgcctccgacagctgtttctattgaaggtgttgttgctgatacctctccccagacagtggcaccttcatcccaggacaccagtggtcagcagcaacagatagcagtggacacatccaacgaacatgcacctgcatattcttaccaacagtctaaaccataaacaggactgaagaatgtctgtctgaatctttgccttgaatgaagaaacttcattgaacaagaagttggcttccagtttgcacagacgtcaatggaatgcatttttttgttgttgttgttgttttttttttagtgttataccttacccaatgaaagcaaagtttttatgtgctgtgcaaatggtcttcatgtggtctgacaatttatttttgccatcatttttttaattaaagaaaaaatttccagaagaggaaaaaaaaactacaaaaaacaaaacattgaaggttgatattttatgtggaagaacatttgaattgaattcagaatttttctgaaggtgtagatactttttttttttttttaacagaaaacctgatgtcaagaggtgggcaatagaaatggaaacaaattgtcttcctcaataattaagctactttctctttttcccttcttgttttaatctagtgggttttttattttattttttcttagaaatatgtaggtaaggtttatcttgaatcttaattgccttaattttaaggacgtcaaaggctctcgaggcaagctgtcaacgtcttgttgaaaacaaaaatcaagaaagaattgaaatactgtgccggctttcactggcacagaagtttaagactatgagtttttagggtgaagaaaaaactgtacagtttaaatgaaaatgtttttcttcatttgaagaaaatttgttgataaaccatggcaactgcaagaattggaaaaatgctgggacttttcatgaactttgtcttaagtgttgacatgaatcattctaaaaggctaaaacattttacagtaaagttattaaggttggtttaaaaacaactgcattagaaataatgcgtgtttggggggcagaatgcagatttttttaatttacaaagcgtgatcgctagcaaaagcattagtgctttttatctgcagtcttttttatgagctttacaaagtttttagtcagctttgcttgtcacattgcaaaacctagcttaagagcattaaaaaaaaaaacttaagtagataggagcttatggtcaaaaagtgcaaaaaaaaaaacaaaaaaaaagcaatagatagagaaattgttgacaatttctgtagtctttcctagttgtgatcaaattcagcctatggatggcctattttataccaaagatgaagtgacaccctattacagtccagaagatagaggttgttttcgtttcttttctttttaaaaaaaaaaaaatttatttgaccgacatggccggaccagttctttctttgttgtttgtttaaactaccttccactggtgttttacatagtgcaaaaaaaaaaagagggtggggggagttgtctctcttttctttaaatgtgtattcattgatagcagaagcttgtacctgctgtgtttagcagtttcagcatgaagagttctggatatgaactgattcatagagccaagtggctttaaattctgtgagcttttctggtttctcactagctgtcttgaatagtgaaacctgtattgatggccactagtaaaccaagatgcttatttaacaggtggaatattctttatatgaaatttcagctaaagacactttctggacctggtctgaaaggtcatttgtcaaaaaagcttagggatattctgtgaaatggtgagtggtctcctggaaaggtctcattgtatttgaacaatagtcttccctctaaattacaacacctctgggttttgtctttacacctctgtctttgtcatcacctaccatgaatagtcaccttggttttgcaaatggggagggggtatcatctttttgcctgttttcactgtatttttgtatattggtgttgccgaaagaactttttctttcagtttaattctttgaggcatgtaggaccaataagattgagaattctattggtggaatttagggaagtccttaaaatgctagttgacaatcaaggaacagtatgatttatatcaataagaaccaaaagaattaggtttgatcaatcatttaagccaaggaggaatacttgcatttagaacaatgcaaaactttgtctaaaatgaattaaattgacccacctgtaaaatatatctacatttttaattcatgagatgatatgtgttcaacctttacagttttacctgaaattaaggacaatggaatagaatttgttaagtgaaccattcactagattgctttctgaatgaatcctttgaatcaaataggtgaaactcttttcaaaaactaagtcagtcacaggagcctgtcttagtccaaaagaagcagggaaatgtatttaagtgtactataaaacagggtaggctttttaaaaactaaaaagttttaaaggtaaatcatattcccattaggtcaacatgagtaataaggttgactcatgtgaaattgtcaatattctactatttctgtaaactctggttctcttatttgcaaccccatgcactggaagcccaaatcagagaatgactccatatatttatggtcacattggagacaaaagtgtatccaagaaaatgtagtgtgcgttatagagaaattccaactggtcacactcaccattatggtttttcatgctttagagaaaatgctagatttatactgtcttttgttccatccttcagcttcccatgcattataaaggtggcacttaagtttttatctttgaaaagtgggccccaaagttttttggggtacaaaaagacatgtatgagaaccatattttctgtttctctttttcactctctaaactctttttgtataaataaggattatcctgggcataattcatttgaatatgaaaccaacatactttctttcatttttgtgaaaaaataaccaaaaacatgtattaatgtgatacaaagaaagtctcattcacacaatcaacaatgaggctaagaggtagctaccatgtggctaatgaatgtgcctaggtaacttcctgtttctattcaaaactgctgctttatttgtacattcagaaatatttttttcaactatgaaatttcaatatcaattttttaagccagtttctgcaaaaggaaatgacctgtcatttgatgtgttcatgtgtgttttgtgtttggatagtttatatcatgccattctataaaatgtatgttttcaaaccaaaaagaaaaaaaatagaaggaaaacaacggcacatactcaaatttgccctgctttgtctgttgtcttacctaagacttgttttgaagagccaagtctgggagagaaaaaaaagcatcaacaggtaagcagcattacattgtgtggtaataaaccaaaataagttttcaatatatacagacaacagaattcaaatttaatcaacaaaatatattgtagtgatttgtttgtttgtttgtttgagacggagtctcgctctgtcgcccatcctaactaggactataatctttttttttttctttaagttgaagttaattttctgtgcattctggtccaccagattttcaagcatttatttggatgtttccatttttccttttgactttaatagccaagacttagcttaaacatcaggaaacaaactaaagccacaatccaaatgagagaaacactgtctcgtctaaactctagtttcatggtcagtgcaacagtgagttttcttttaataatggtatggtattgtcaagggaggcaaagtgttcatggtaacttggagctccccaatacatggccatgtcttctaaagacaacgtaatgagcccaagtgaactgaaggtcatactggcaggtgctgatgacagtttgtccttgaatgctgacatgtcttgaatattgcaaatgtcataatactcttttaaaacagtcctctacctgactctagttttgcgaggattagtttgtttccttggtagatttcaacatttcagaatgttacctccaaatttcacttgaattacttcctcctgtgaccttagcagatctgtcacatttgaaagcatatgactcacttccacccccttctaatgaaaaactgcatggtgttaaaagcactctcattagaaatataaggctgagaactgaagaaggctgtttaaagcaggaatttcactttattttactatgcctaaaaatacatctttggaccccttgcaaagtgctttaaaagtactttcaatttatgcatgactccaaaaaagtaatttttttttcccaaaaaaacctctttatttaaataattgggatatttgctaaatacctatttttttttacagtggcctaaaacccctattaatgaaaagtgaaatttgatttaattaggactcttgcagtcatcttcacgactgaggagaagtttcaataggctgtctagacattatgatgttaataggagattaaaatacatttggcaattcattttcattcttaatttgagtgcatgaaccactgcagatgagctgataagcagaaattctcaagtgggtttcactaataaatgtttttttatatgatttgaaatcaagtaaagggacaatgtttatgtacgtgtataacaacattcagcacatttgaggaatcacacactataataaagcttaaacctgtcatagaaccttgatctatattactttgtcttcagtaaaaagtgaaggatgagattttgtctttcatgttattgtagctggcatgcttcaaaattttgagcttactgggactgacagcctctcacttcaatctgagggattgacagaatttaaacaggctcattgattctgtacactctacccttcctgtggcaagtgataatgggatttcattaatgaatcaatttgttttacaaatgacatccactgtggcattggaagacagttgggtctgactcaagtttaacatttcttaccaaacattcttaagtatgaaattggtcctttaatccaaatgctcttggtcatggctgtcctttgcggattacatagcattcaggaaagtacaaaaactaaacactaaatccccaactggccccaaagaccttttatgatgtgagagacaagagttcaccccagattaatttcttttatcattggctttatactctaacatatagatactctctatagcaaaaaagggatgaatggctttcaatattcatttctgtttatttttgtgagggaaaataatatatcaagaaaattttcttccacttagaaagctttaaagctgaagtagaggtgcagtcaagcttggatctgcaggaagaaccactaggccactgagtcatacttgagcttttcttactactgccccaatttctaaattgtgcataaatacaatcactctcaatttttgaagggctaattatctactttgtgggtgtgttttgttttttcttttcagcgtgtagggcttgggctctgtttccttttattagcatgtcacctgagggtggaacaaacaattggaaataaaatttgattattttatttcttataaagtattaatttcttaagggggtttgaaatcattggtaaaattaatatcagtacattatatgtcataaattttgattatctataatgtcttttcttatctaccacaaataattgagagttggctaaattcttgcagaatatatgggaaaaaaatcatagcaaagaattcagcttccctcaaaagaaagctatttttgtttccttcactccactaaatttgaaccagtagcacggatcaacacgacttctgcaatgagagtataacggtagctcttggtacagtcatattcatatttttaaatctttctttgaccaaaactattgcattgttttcattacattttgactgcgttacttattaaggccgaatgactttgacacccccgtggattatttttatgatcacatcaaatttaaacaatgtccaaagtgtaactttaatgttatattttgtttcaaaccctctggtctaagattattgagaaagatgttttttcctcctccctcaaatatgttatctcttcatatataaaaaaataagttattccatgcttttcaggaactgtaaaaattatttcaaaaagatatttgaaaaagttttctctattctggacacaaatgcttccatttatttcaaaagaagaagaagaaaaatggaatcttaatttaaaaaaatatatgtagtagtatctgctatgagatattcagtctctataaaaaaaaaaagggacacagcttcttttaaaacccttgtttcagtccatattcaacttcatggaacttctgaaacatcattcaattttgaactttatttaagagcatttttgtactgctgtctctgactgtcatggaaagttctgtaattctaaggtgtttctggttttatttttaatttcttcatctgtaccacagtcaaattagcaaccatctcccccatcccttgggctttctgtagatcagtggatgttaggtttaaacttctgttttctttgatgaagctttcaataaaaaatgaaaataaaatcaattgaatagg

SEQ ID NO: 26979 - DNA, 3278 bp, Homo sapiens
  source 1..3278: mol_type = unassigned DNA
acgctgctccctggagaggctctctcggttccacccaccggctggaaggaggggaagtgaatgaaaggacaggacaagccccgaacaccatgtcactctgggagggagacagcagcaactaagctgtacaaggttttttttttttttttttcttcctttttttctttttttttttctttttcccctttctttttctttctttctttctttttctttctttctttctctttctctctctcttttttctttttctttaaggtggggaaagagacaaccaagagacaggaagctgatctgcaaggattcggagttgtgctaaaaggactttgatttttttccccctttacgaacgctggcaattgacatcactacagacagcctggttagagaacaaactgcctcatcccaagtggaccccggcagctgggggaagccaggcaagatctgggaaggctgtgtgtgggtgttttttctacagatctcactcctcgccctttttttttttcctttggtgtgtgttttttgttttgttttgttttttaaaaaaattcttgctgtgttggaactagcgagtggtggagtctctgaagcctcatcagtcaccgggactgtcaggaatagtggtttaagaggaagctcggcctggggcactataccctgtcatccagttccctgcctcggagataaagattccagctacatgggcaaacgcctggatcagccacaaatgtacccccagtacacttactactatcctcattatctccaaaccaagtcctatgcaccagctccccaccccatggctcctcccagccccagcacaaacagcagcagcaacaacagcagcaacaacagcagcggggaacagttgagtaaaaccaacctgtacattcgaggcctcccaccaggcaccactgaccaggacctaatcaagctgtgccaaccgtatggaaaaattgtatctacaaaggcaattcttgacaaaaacacaaatcagtgcaaaggttatggttttgtagattttgacagtcctgcagccgcacagaaagcggtagcatctctcaaggcaaatggcgtgcaggcacagatggctaagcaacaagagcaagacccaacaaacctatacatctcaaatctccccatttctatggatgagcaggagcttgagaatatgctgaaaccctttggacatgtcatttccacaagaatactaagagacgctaatggagtcagcagaggtgttggctttgccagaatggagtctactgaaaaatgtgaagtggtaattcaacattttaatggaaaatatctgaaaacaccaccaggcatcccagcccccagtgagcctttgctgtgcaaattcgctgatggaggacaaaagaagcgacagaatcaaagcaaatatacccagaatgggaggccttggcccagggaaggagaggctggcatggctttgacctatgaccccacagctgccatacagaatggattttattcttcaccgtacagtattgcaaccaaccgcatgattccacagacatctatcacgccattcattgctgcttcccctgtctccacataccaggtccagagtacttcatggatgcctcatccgccatacgttatgcaaccaacaggtgctgtgattacaccaaccatggaccatcccatgtcaatgcagccagccaacatgatgggcccactgacacagcagatgaatcacctttcgttgggcacaacaggaacgattcaatcccaagacaggattatgatactccaccagctgttgtgtcagtatatgactgctgctgctcctatgcaagggacctacattcctcagtacacgcctgtgcctccgacagctgtttctattgaaggtgttgttgctgatacctctccccagacagtggcaccttcatcccaggacaccagtggtcagcagcaacagatagcagtggacacatccaacgaacatgcacctgcatattcttaccaacagtctaaaccataaacaggactgaagaatgtctgtctgaatctttgccttgaatgaagaaacttcattgaacaagaagttggcttccagtttgcacagacgtcaatggaatgcatttttttgttgttgttgttgttttttttttagtgttataccttacccaatgaaagcaaagtttttatgtgctgtgcaaatggtcttcatgtggtctgacaatttatttttgccatcatttttttaattaaagaaaaaatttccagaagaggaaaaaaaaactacaaaaaacaaaacattgaaggttgatattttatgtggaagaacatttgaattgaattcagaatttttctgaaggtgtagatactttttttttttttttaacagaaaacctgatgtcaagaggtgggcaatagaaatggaaacaaattgtcttcctcaataattaagctactttctctttttcccttcttgttttaatctagtgggttttttattttattttttcttagaaatatgtaggtaaggtttatcttgaatcttaattgccttaattttaaggacgtcaaaggctctcgaggcaagctgtcaacgtcttgttgaaaacaaaaatcaagaaagaattgaaatactgtgccggctttcactggcacagaagtttaagactatgagtttttagggtgaagaaaaaactgtacagtttaaatgaaaatgtttttcttcatttgaagaaaatttgttgataaaccatggcaactgcaagaattggaaaaatgctgggacttttcatgaactttgtcttaagtgttgacatgaatcattctaaaaggctaaaacattttacagtaaagttattaaggttggtttaaaaacaactgcattagaaataatgcgtgtttggggggcagaatgcagatttttttaatttacaaagcgtgatcgctagcaaaagcattagtgctttttatctgcagtcttttttatgagctttacaaagtttttagtcagctttgcttgtcacattgcaaaacctagcttaagagcattaaaaaaaaaaacttaagtagataggagcttatggtcaaaaagtgcaaaaaaaaaaacaaaaaaaaagcaatagatagagaaattgttgacaatttctgtagtctttcctagttgtgatcaaattcagcctatggatggcctattttataccaaagatgaagtgacaccctattacagtccagaagatagaggttgttttcgtttcttttctttttaaaaaaaaaaaaatttatttgaccga

SEQ ID NO: 26980 - DNA, 1394 bp, Homo sapiens
  source 1..1394: mol_type = unassigned DNA
agctcggcctggggcactataccctgtcatccagttccctgcctcggagataaagattccagctacatgggcaaacgcctggatcagccacaaatgtacccccagtacacttactactatcctcattatctccaaaccaagcagtcctatgcaccagctccccaccccatggctcctcccagccccagcacaaacagcagcagcaacaacagcagcaacaacagcagcggggaacagttgagtaaaaccaacctgtacattcgaggcctcccaccaggcaccactgaccaggacctaatcaagctgtgccaaccgtatggaaaaattgtatctacaaaggcaattcttgacaaaaacacaaatcagtgcaaaggttatggttttgtagattttgacagtcctgcagccgcacagaaagcggtagcatctctcaaggcaaatggcgtgcaggcacagatggctaagcaacaagagcaagacccaacaaacctatacatctcaaatctccccatttctatggatgagcaggagcttgagaatatgctgaaaccctttggacatgtcatttccacaagaatactaagagacgctaatggagtcagcagaggtgttggctttgccagaatggagtctactgaaaaatgtgaagtggtaattcaacattttaatggaaaatatctgaaaacaccaccaggcatcccagcccccagtgagcctttgctgtgcaaattcgctgatggaggacaaaagaagcgacagaatcaaagcaaatatacccagaatgggaggccttggcccagggaaggagaggtactcagaggcaggactgtccctaggcaaaatcgtgaagctggcatggctttgacctatgaccccacagctgccatacagaatggattttattcttcaccgtacagtattgcaaccaaccgcatgattccacagacatctatcacgccattcattgctgcttcccctgtctccacataccaggtccagagtacttcatggatgcctcatccgccatacgttatgcaaccaacaggtgctgtgattacaccaaccatggaccatcccatgtcaatgcagccagccaacatgatgggcccactgacacagcagatgaatcacctttcgttgggcacaacaggaacgtatatgactgctgctgctcctatgcaagggacctacattcctcagtacacgcctgtgcctccgacagctgtttctattgaaggtgttgttgctgatacctctccccagacagtggcaccttcatcccaggacaccagtggtcagcagcaacagatagcagtggacacatccaacgaacatgcacctgcatattcttaccaacagtctaagtaagtctgggctgtgctaagctcttttcc

SEQ ID NO: 26981 - DNA, 2974 bp, Homo sapiens
  source 1..2974: mol_type = unassigned DNA
atcccggacttcccagagcctgcctggagcgcgtactcagcggctctcgggtcccagcgtcccagccgcggcccgcgctcctccgccccgctcctcctcctcctcttcctcctcctcctcctctctaggcacccccgtcccctccttccagcggctgcagcccccagccccaactctccgcgcttactcctgggacgcgcgtcctcgccccatcctttgcttccttccttccttccttcttccttcctcccctggctcccgccctccctctccaggtcgccctcccggggcccgattgtctcggtgccccgctcccggcccgcgccctgccccgtctctcccttgcacttcctgagtcgcccgccgccgccgtcgcagactcgccgcgggagccccagcccaacccgagcccgacagccactgccccggctccagctccagccccacagcccgcggcgcccgcccgagggagccccggcgcccggggaaggctccagtgggctagcgcgccctcgcccagccccgcgccccagccctgcccggcccggcgaggaaggaccgggaagatgaacaacggcggcaaagccgagaaggagaacaccccgagcgaggccaaccttcaggaggaggaggtccggaccctatttgtcagtggccttcctctggatatcaaacctcgggagctctatctgcttttcagaccatttaagggctatgagggttctcttataaagctcacatctaaacagcctgtaggttttgtcagttttgacagtcgctcagaagcagaggctgcaaagaatgctttgaatggcatccgcttcgatcctgaaattccgcaaacactacgactagagtttgctaaggcaaacacgaagatggccaagaacaaactcgtagggactccaaaccccagtactcctctgcccaacactgtacctcagttcattgccagagagccatatgagctcacagtgcctgcactttaccccagtagccctgaagtgtgggccccgtaccctctgtacccagcggagttagcgcctgctctacctcctcctgctttcacctatcccgcttcactgcatgcccagctctgtgaaggtcagactgtgaggagaagccaccccttgagcgctccgtctcctgatagtgccagcctggcctggtttcctgtttgatgcgctggctccctccctccgaggctacttctcagggctggaagtcccgtcagttctgctgaatactatgtcccaggtgtgtgatggcggctgcaatctgtcttgtgggtattaatgcaatcttcagtggtggctactgttctctagctgttctacaaaactggagcatgctggcttgaaaaacccttgcccagttttgatcccttcaagactttgtcacagcctctatcacacatctgtttttctcgaagaaaaaaatataattaataaaaatgttttactcttttacactgtataattgtaagaaatagcgtattatttgtgaatgcatggtctgaaatttctgtacagtttggagatattttcaaacgaaacgtaagagaagtcaacaataaaaccaagaaaagtgagtatttttataccaaacattttaagtatgctgggatggacgatcttacactggtttggatcacagtttttgttcttgacttttgaatgcttgtaattaaaaatatctatttttttcctctgaagtaagttgcatgtttgaggcatgtttccaaatattatcaaaatatcctgaattgtattgtgaatatatagaaatctgtgcctggccggagtccagggtaaattagtagcatggtgttagatgttagaaacagaactgttatttgcagtgttaggtctaggatcccagttctagtaggacagccctgcaagacaatcaaccagaagcctccaggagcttctacctatggcttattcacaactgggcaagaaaacatcattggtaagaactgctgagtgtgcccttagaaagccctagtagctccagctgtgactatatcaactgtgtgccaagtgtgactttgtacagttttatgtttccactctcctgtatgtgtagccactcgatgcctaacctaccttccacaagccagccccgcatccctgctcccgcagtgtaagtgcagagcctgcctcactggtaagggaaaaccttggcttgggaggccagccctggcccttgaaggggttggctgtgcccagcccacctggctgcagtgggcagctcatgtctgtatctccaaagtgatgtttgtttgcaaaacaccggctgaactgagctggtgttgccaactcttggcagcactgggccaaaccgaccacataccatgagctcccaaatggcgtgtgctcactgtgagacgtcctgccacaccccacaggagacggaggcagtgggcatttggaaccaattctattcagacttcgtcaaagccaaagtcagtctggtgttgtcagttgacacatctccagagttcatgacagctcaacctctccccttgtacagaagccatttttgtaaaaccacactgacctaaattcagctgccaaacacagtctttcctattgatccgctcggcttatgttgaaaatttcaatgtcatgattacctggttggtttgggtttttgttttgttattttccattagaaatataaagatgtcaagaagcttttaaaggtcaacacaaaaaaccaaggccaggagtgaggggctctttcttaccgtaaataaggggaaaaggcagttagctcaaggacttgtgacggatccactttggtgttcaaggacctgcttatgccctcagtgccaatcggctcttggtgagatgactgtactcctaaggaaaatagccacttctgcagtctattatgcttttataactgtttaaaggtacttttctattgtcatttttaaaaaataaagtgcttattccagctgtca

SEQ ID NO: 26982 - DNA, 3110 bp, Homo sapiens
  source 1..3110: mol_type = unassigned DNA
aaagggagctgcttccatcccggacttcccagagcctgcctggagcgcgtactcagcggctctcgggtcccagcgtcccagccgcggcccgcgctcctccgccccgctcctcctcctcctcttcctcctcctcctcctctctaggcacccccgtcccctccttccagcggctgcagcccccagccccaactctccgcgcttactcctgggacgcgcgtcctcgccccatcctttgcttccttccttccttccttcttccttcctcccctggctcccgccctccctctccaggtcgccctcccggggcccgattgtctcggtgccccgctcccggcccgcgccctgccccgtctctcccttgcacttcctgagtcgcccgccgccgccgtcgcagactcgccgcgggagccccagcccaacccgagcccgacagccactgccccggctccagctccagccccacagcccgcggcgcccgcccgagggagccccggcgcccggggaaggctccagtgggctagcgcgccctcgcccagccccgcgccccagccctgcccggcccggcgaggaaggaccgggaagatgaacaacggcggcaaagccgagaaggagaacaccccgagcgaggccaaccttcaggaggaggaggtccggaccctatttgtcagtggccttcctctggatatcaaacctcgggagctctatctgcttttcagaccatttaagggctatgagggttctcttataaagctcacatctaaacagcctgtaggttttgtcagttttgacagtcgctcagaagcagaggctgcaaagaatgctttgaatggcatccgcttcgatcctgaaattccgcaaacactacgactagagtttgctaaggcaaacacgaagatggccaagaacaaactcgtagggactccaaaccccagtactcctctgcccaacactgtacctcagttcattgccagagagccatatgagctcacagtgcctgcactttaccccagtagccctgaagtgtgggccccgtaccctctgtacccagcggagttagcgcctgctctacctcctcctgctttcacctatcccgcttcactgcatgcccagatgcgctggctccctccctccgaggctacttctcagggctggaagtcccgtcagttctgctgaatactatacccttcagcaatggctactagaaggacgaacaattgccctcctttggaagtacggctaatagaagccctagatccgaataagatccgaataagaatatgtaatggaccaggcgcagtgcctcacgcctgtcatcccagcactttgggaggctgaggcaggcggatcacttgatgccagaagtttgagaccagcccagccaacatggtcccaggtgtgtgatggcggctgcaatctgtcttgtgggtattaatgcaatcttcagtggtggctactgttctctagctgttctacaaaactggagcatgctggcttgaaaaacccttgcccagttttgatcccttcaagactttgtcacagcctctatcacacatctgtttttctcgaagaaaaaaatataattaataaaaatgttttactcttttacactgtataattgtaagaaatagcgtattatttgtgaatgcatggtctgaaatttctgtacagtttggagatattttcaaacgaaacgtaagagaagtcaacaataaaaccaagaaaagtgagtatttttataccaaacattttaagtatgctgggatggacgatcttacactggtttggatcacagtttttgttcttgacttttgaatgcttgtaattaaaaatatctatttttttcctctgaagtaagttgcatgtttgaggcatgtttccaaatattatcaaaatatcctgaattgtattgtgaatatatagaaatctgtgcctggccggagtccagggtaaattagtagcatggtgttagatgttagaaacagaactgttatttgcagtgttaggtctaggatcccagttctagtaggacagccctgcaagacaatcaaccagaagcctccaggagcttctacctatggcttattcacaactgggcaagaaaacatcattggtaagaactgctgagtgtgcccttagaaagccctagtagctccagctgtgactatatcaactgtgtgccaagtgtgactttgtacagttttatgtttccactctcctgtatgtgtagccactcgatgcctaacctaccttccacaagccagccccgcatccctgctcccgcagtgtaagtgcagagcctgcctcactggtaagggaaaaccttggcttgggaggccagccctggcccttgaaggggttggctgtgcccagcccacctggctgcagtgggcagctcatgtctgtatctccaaagtgatgtttgtttgcaaaacaccggctgaactgagctggtgttgccaactcttggcagcactgggccaaaccgaccacataccatgagctcccaaatggcgtgtgctcactgtgagacgtcctgccacaccccacaggagacggaggcagtgggcatttggaaccaattctattcagacttcgtcaaagccaaagtcagtctggtgttgtcagttgacacatctccagagttcatgacagctcaacctctccccttgtacagaagccatttttgtaaaaccacactgacctaaattcagctgccaaacacagtctttcctattgatccgctcggcttatgttgaaaatttcaatgtcatgattacctggttggtttgggtttttgttttgttattttccattagaaatataaagatgtcaagaagcttttaaaggtcaacacaaaaaaccaaggccaggagtgaggggctctttcttaccgtaaataaggggaaaaggcagttagctcaaggacttgtgacggatccactttggtgttcaaggacctgcttatgccctcagtgccaatcggctcttggtgagatgactgtactcctaaggaaaatagccacttctgcagtctattatgcttttataactgtttaaaggtacttttctattgtcatttttaaaaaataaagtgcttattccagctgtca

SEQ ID NO: 26983 - DNA, 1341 bp, Homo sapiens
  source 1..1341: mol_type = unassigned DNA
aaagggagctgcttccatcccggacttcccagagcctgcctggagcgcgtactcagcggctctcgggtcccagcgtcccagccgcggcccgcgctcctccgccccgctcctcctcctcctcttcctcctcctcctcctctctaggcacccccgtcccctccttccagcggctgcagcccccagccccaactctccgcgcttactcctgggacgcgcgtcctcgccccatcctttgcttccttccttccttccttcttccttcctcccctggctcccgccctccctctccaggtcgccctcccggggcccgattgtctcggtgccccgctcccggcccgcgccctgccccgtctctcccttgcacttcctgagtcgcccgccgccgccgtcgcagactcgccgcgggagccccagcccaacccgagcccgacagccactgccccggctccagctccagccccacagcccgcggcgcccgcccgagggagccccggcgcccggggaaggctccagtgggctagcgcgccctcgcccagccccgcgccccagccctgcccggcccggcgaggaaggaccgggaagatgaacaacggcggcaaagccgagaaggagaacaccccgagcgaggccaaccttcaggaggaggaggtccggaccctatttgtcagtggccttcctctggatatcaaacctcgggagctctatctgcttttcagaccatttaagggctatgagggttctcttataaagctcacatctaaacagcctgtaggttttgtcagttttgacagtcgctcagaagcagaggctgcaaagaatgctttgaatggcatccgcttcgatcctgaaattccgcaaacactacgactagagtttgctaaggcaaacacgaagatggccaagaacaaactcgtagggactccaaaccccagtactcctctgcccaacactgtacctcagttcattgccagagagccatatgagctcacagtgcctgcactttaccccagtagccctgaagtgtgggccccgtaccctctgtacccagcggagttagcgcctgctctacctcctcctgctttcacctatcccgcttcactgcatgcccagtgtttctctcctgaggcaaagcccaacacacctgtcttttgtccacttctccagcaaattagatttgtctctgggaatgtgtttgtaacataccaacctactgcagaccagcagagggagctcccatgttgaatttgtttgttagctattttcccccctttcacaaaaactatttcttgacgacctttgagagatttcaataaaaattttaatcagagcaaaaatgaactc

SEQ ID NO: 26984 - DNA, 2941 bp, Homo sapiens
  source 1..2941: mol_type = unassigned DNA
gggaggggagaggggagggaggaaggcgagagaaagggagctgcttccatcccggacttcccagagcctgcctggagcgcgtactcagcggctctcgggtcccagcgtcccagccgcggcccgcgctcctccgccccgctcctcctcctcctcttcctcctcctcctcctctctaggcacccccgtcccctccttccagcggctgcagcccccagccccaactctccgcgcttactcctgggacgcgcgtcctcgccccatcctttgcttccttccttccttccttcttccttcctcccctggctcccgccctccctctccaggtcgccctcccggggcccgattgtctcggtgccccgctcccggcccgcgccctgccccgtctctcccttgcacttcctgagtcgcccgccgccgccgtcgcagactcgccgcgggagccccagcccaacccgagcccgacagccactgccccggctccagctccagccccacagcccgcggcgcccgcccgagggagccccggcgcccggggaaggctccagtgggctagcgcgccctcgcccagccccgcgccccagccctgcccggcccggcgaggaaggaccgggaagatgaacaacggcggcaaagccgagaaggagaacaccccgagcgaggccaaccttcaggaggaggaggtccggaccctatttgtcagtggccttcctctggatatcaaacctcgggagctctatctgcttttcagaccatttaagggctatgagggttctcttataaagctcacatctaaacagcctgtaggttttgtcagttttgacagtcgctcagaagcagaggctgcaaagaatgctttgaatggcatccgcttcgatcctgaaattccgcaaacactacgactagagtttgctaaggcaaacacgaagatggccaagaacaaactcgtagggactccaaaccccagtactcctctgcccaacactgtacctcagttcattgccagagagccatatgagctcacagtgcctgcactttaccccagtagccctgaagtgtgggccccgtaccctctgtacccagcggagttagcgcctgctctacctcctcctgctttcacctatcccgcttcactgcatgcccagatgcgctggctccctccctccgaggctacttctcagggctggaagtcccgtcagttctgctgaatactatgtcccaggtgtgtgatggcggctgcaatctgtcttgtgggtattaatgcaatcttcagtggtggctactgttctctagctgttctacaaaactggagcatgctggcttgaaaaacccttgcccagttttgatcccttcaagactttgtcacagcctctatcacacatctgtttttctcgaagaaaaaaatataattaataaaaatgttttactcttttacactgtataattgtaagaaatagcgtattatttgtgaatgcatggtctgaaatttctgtacagtttggagatattttcaaacgaaacgtaagagaagtcaacaataaaaccaagaaaagtgagtatttttataccaaacattttaagtatgctgggatggacgatcttacactggtttggatcacagtttttgttcttgacttttgaatgcttgtaattaaaaatatctatttttttcctctgaagtaagttgcatgtttgaggcatgtttccaaatattatcaaaatatcctgaattgtattgtgaatatatagaaatctgtgcctggccggagtccagggtaaattagtagcatggtgttagatgttagaaacagaactgttatttgcagtgttaggtctaggatcccagttctagtaggacagccctgcaagacaatcaaccagaagcctccaggagcttctacctatggcttattcacaactgggcaagaaaacatcattggtaagaactgctgagtgtgcccttagaaagccctagtagctccagctgtgactatatcaactgtgtgccaagtgtgactttgtacagttttatgtttccactctcctgtatgtgtagccactcgatgcctaacctaccttccacaagccagccccgcatccctgctcccgcagtgtaagtgcagagcctgcctcactggtaagggaaaaccttggcttgggaggccagccctggcccttgaaggggttggctgtgcccagcccacctggctgcagtgggcagctcatgtctgtatctccaaagtgatgtttgtttgcaaaacaccggctgaactgagctggtgttgccaactcttggcagcactgggccaaaccgaccacataccatgagctcccaaatggcgtgtgctcactgtgagacgtcctgccacaccccacaggagacggaggcagtgggcatttggaaccaattctattcagacttcgtcaaagccaaagtcagtctggtgttgtcagttgacacatctccagagttcatgacagctcaacctctccccttgtacagaagccatttttgtaaaaccacactgacctaaattcagctgccaaacacagtctttcctattgatccgctcggcttatgttgaaaatttcaatgtcatgattacctggttggtttgggtttttgttttgttattttccattagaaatataaagatgtcaagaagcttttaaaggtcaacacaaaaaaccaaggccaggagtgaggggctctttcttaccgtaaataaggggaaaaggcagttagctcaaggacttgtgacggatccactttggtgttcaaggacctgcttatgccctcagtgccaatcggctcttggtgagatgactgtactcctaaggaaaatagccacttctgcagtctattatgcttttataactgtttaaaggtacttttctattgtcatttttaaaaaataaagtgcttattccagctgtcacacca

SEQ ID NO: 26985 - DNA, 2819 bp, Homo sapiens
  source 1..2819: mol_type = unassigned DNA
ggcagcccacgtccagggagggcggagggaggaggagaggcgcggagaggagggaggggagaggggagggaggaaggcgagagaaagggagctgcttccatcccggacttcccagagcctgcctggagcgcgtactcagcggctctcgggtcccagcgtcccagccgcggcccgcgctcctccgccccgctcctcctcctcctcttcctcctcctcctcctctctaggcacccccgtcccctccttccagcggctgcagcccccagccccaactctccgcgcttactcctgggacgcgcgtcctcgccccatcctttgcttccttccttccttccttcttccttcctcccctggctcccgccctccctctccaggtcgccctcccggggcccgattgtctcggtgccccgctcccggcccgcgccctgccccgtctctcccttgcacttcctgagtcgcccgccgccgccgtcgcagactcgccgcgggagccccagcccaacccgagcccgacagccactgccccggctccagctccagccccacagcccgcggcgcccgcccgagggagccccggcgcccggggaaggctccagtgggctagcgcgccctcgcccagccccgcgccccagccctgcccggcccggcgaggaaggaccgggaagatgaacaacggcggcaaagccgagaaggagaacaccccgagcgaggccaaccttcaggaggaggaggtccggaccctatttgtcagtggccttcctctggatatcaaacctcgggagctctatctgcttttcagaccatttaagggctatgagggttctcttataaagctcacatctaaacagcctgtaggttttgtcagttttgacagtcgctcagaagcagaggctgcaaagaatgctttgaatggcatccgcttcgatcctgaaattccgcaaacactacgactagagtttgctaaggcaaacacgaagatggccaagaacaaactcgtagggactccaaaccccagtactcctctgcccaacactgtacctcagttcattgccagagagccattgatgcgctggctccctccctccgaggctacttctcagggctggaagtcccgtcagttctgctgaatactatgtcccaggtgtgtgatggcggctgcaatctgtcttgtgggtattaatgcaatcttcagtggtggctactgttctctagctgttctacaaaactggagcatgctggcttgaaaaacccttgcccagttttgatcccttcaagactttgtcacagcctctatcacacatctgtttttctcgaagaaaaaaatataattaataaaaatgttttactcttttacactgtataattgtaagaaatagcgtattatttgtgaatgcatggtctgaaatttctgtacagtttggagatattttcaaacgaaacgtaagagaagtcaacaataaaaccaagaaaagtgagtatttttataccaaacattttaagtatgctgggatggacgatcttacactggtttggatcacagtttttgttcttgacttttgaatgcttgtaattaaaaatatctatttttttcctctgaagtaagttgcatgtttgaggcatgtttccaaatattatcaaaatatcctgaattgtattgtgaatatatagaaatctgtgcctggccggagtccagggtaaattagtagcatggtgttagatgttagaaacagaactgttatttgcagtgttaggtctaggatcccagttctagtaggacagccctgcaagacaatcaaccagaagcctccaggagcttctacctatggcttattcacaactgggcaagaaaacatcattggtaagaactgctgagtgtgcccttagaaagccctagtagctccagctgtgactatatcaactgtgtgccaagtgtgactttgtacagttttatgtttccactctcctgtatgtgtagccactcgatgcctaacctaccttccacaagccagccccgcatccctgctcccgcagtgtaagtgcagagcctgcctcactggtaagggaaaaccttggcttgggaggccagccctggcccttgaaggggttggctgtgcccagcccacctggctgcagtgggcagctcatgtctgtatctccaaagtgatgtttgtttgcaaaacaccggctgaactgagctggtgttgccaactcttggcagcactgggccaaaccgaccacataccatgagctcccaaatggcgtgtgctcactgtgagacgtcctgccacaccccacaggagacggaggcagtgggcatttggaaccaattctattcagacttcgtcaaagccaaagtcagtctggtgttgtcagttgacacatctccagagttcatgacagctcaacctctccccttgtacagaagccatttttgtaaaaccacactgacctaaattcagctgccaaacacagtctttcctattgatccgctcggcttatgttgaaaatttcaatgtcatgattacctggttggtttgggtttttgttttgttattttccattagaaatataaagatgtcaagaagcttttaaaggtcaacacaaaaaaccaaggccaggagtgaggggctctttcttaccgtaaataaggggaaaaggcagttagctcaaggacttgtgacggatccactttggtgttcaaggacctgcttatgccctcagtgccaatcggctcttggtgagatgactgtactcctaaggaaaatagccacttctgcagtctattatgcttttataactgtttaaaggtacttttctat

SEQ ID NO: 26986 - DNA, 3268 bp, Homo sapiens
  source 1..3268: mol_type = unassigned DNA
accttccattttggtagcttcaactttgcagctgctgtgtctcttcgtcgtctgggaagaaaactttcacattaagagttgctgatgcggattttctttctttcctctcccggcgttgatgagtgcttggctcctgacagaagggatttggctcccagctttgtagttcggaagaagttgggtctatagatttccccctaactctccattgatgtgttgagcttcagagggaataataactctacgtaaagcatgctggcgtctcaaggagttctcctgcatccttatggcgtgcctatgattgtaccggcagctccttaccttcctggactgattcagggtaatcaggaagcagccgctgcccctgacacaatggctcagccttacgcttcggcccagtttgctcccccgcagaacggtatccccgcggaatacacggcccctcatccccaccccgcgccagagtacacaggccagaccacggttcccgagcacacattaaacctgtaccctcccgcccagacgcactccgagcagagcccggcggacacgagcgctcagaccgtctctggcaccgccacacagacagatgacgcagcaccgacggatggccagccccagacacaaccttctgaaaacacggaaaacaagtctcagcccaagcggctgcatgtctccaatatccccttcaggttccgggatccggacctcagacaaatgtttggtcaatttggtaaaatcttagatgttgaaattatttttaatgagcgaggctcaaagggatttggtttcgtaactttcgaaaatagtgccgatgcggacagggcgagggagaaattacacggcaccgtggtagagggccgtaaaatcgaggtaaataatgccacagcacgtgtaatgacaaataaaaagaccgtcaacccttatacaaatggctggaaattgaatccagttgtgggtgcagtctacagtcccgaattctatgcaggcacggtcctgttgtgccaggccaaccaggagggatcttccatgtacagtgcccccagttcacttgtatatacttctgcaatgccaggcttcccgtatccagcagccaccgccgcggccgcctaccgaggggcgcacctgcgaggccgcggtcgcaccgtgtacaacaccttcagggccgcggcgcccccgcccccgatcccggcctacggcggagtagtgtatcaagagcctgtgtatggcaataaattgctgcagggtggttatgctgcataccgctacgcccagcctacccctgccactgccgctgcctacagtgacagttacggacgagtttatgctgccgacccctaccaccacgcacttgctccagcccccacctacggcgttggtgccatgaatgcttttgcacctttgactgatgccaagactaggagccatgctgatgatgtgggtctcgttctttcttcattgcaggctagtatataccgagggggatacaaccgttttgctccatactaaatgacaaaaccataaaaaccttccaatgtggggagaaaggaagctttccgaggcctgagtattgcaatacatgcagtagtacatcattttagcaactctaaaaaaaaaaaaaatacaaataaaaaggaaaaaaaattacattttttatcttatacctcagatattttgttctgtgtattttaatattgtgggtctttaatttctgaaggttccgtagtttggttgctggctgtaggagtttttgtggttgatctagacagatgctagataatgaataaaaactggtttagggccatatccagagtgctatattatgtaaatgaattatatatgctgaatattaagctactggggttatcagctatttgggaagagtgtaagtgactacagtagtcatttttttctgcacctgcattattttattttgcgaaaggggaggttgggaggggcttaggggattggaactggggtttggctgaaagaaaaaaaaaaaaatgtaactgatgaatctaaacgacccactgcaccaacaatcatttatcaatggttctaagttactcattgccagttcaagccaaaggtcatgttgttaagggggtgcttctagtagcacttgtgcatctgagttgaatgaagctgtgcaaacccaccctttaaaccattccacccggcagtattcagcttcttaaccagtcgctatttaggaaaaaaaacccactagttaggccatcaacaagcattctttttatatttcttccagtataataaattattgatatcactgctgacttttatattatgggagggaaaaaataacattaataaaaaggtgataaaaaagcactgtttctatttttttctttttttccaaaaaaagaaagtaataaaaacttaaattctttgtaccagttaaaaaaaatgtataaaatttacatctgtgcagtggagttgttaagttctagaaacagtctatgaagctttagttttagcctagtagaacaactgttagagacagacgtataatttttatggaattacatgataatcatattcggatttatagaagcattttacaagtattgcaatcattgagtagagataatcatggtattttcatcagcttggtactttttgaaacgtgactgcgttgtgtgaacaatctgcaatttttcagtccgtgagatcctgcccttccacctctttcccatacccccaaggattatctcaaaatgatctctttagttctgtctccaaggcccaggacacttgtcagaaggatgcaaaaaaagaaaaaagtacatccaccctcttaatcccaaaagaacaaagtctccccacctttctcggatgcagggccagagtgacacagccgaaaaattgcagtttgtctgtacttctgtttgaactttccacgttgtcctgtttacaagttaacttaagttggggtatccgtcacgggtcttcctgttttgtatttaaataaaaacaacagcagcaggctgtccctgagtagttttgctgccataggttaagtcctcatgtgtacagtgcaggccctgtggcccgcacttcagtaagttatcaactctcaccgctgtgaacctgccaatccgctgtaacaactctgctttaaaacaaaaccaaacaaaactttaaaaaaaaatgtgtgatccagctttctcttgccatcctatgtgcatgccgtaagatcagttggatattaaaccatcaataaagtttcacaagatttgaaaacaaa

SEQ ID NO: 26987 - DNA, 4099 bp, Homo sapiens
  source 1..4099: mol_type = unassigned DNA
accttccattttggtagcttcaactttgcagctgctgtgtctcttcgtcgtctgggaagaaaactttcacattaagagttgctgatgcggattttctttctttcctctcccggcgttgatgagtgcttggctcctgacagaagggatttggctcccagctttgtagttcggaagaagttgggtctatagatttccccctaactctccattgatgtgttgagcttcagagggaataataactctacgtaaagcatgctggcgtctcaaggagttctcctgcatccttatggcgtgcctatgattgtaccggcagctccttaccttcctggactgattcagggtaatcaggaagcagccgctgcccctgacacaatggctcagccttacgcttcggcccagtttgctcccccgcagaacggtatccccgcggaatacacggcccctcatccccaccccgcgccagagtacacaggccagaccacggttcccgagcacacattaaacctgtaccctcccgcccagacgcactccgagcagagcccggcggacacgagcgctcagaccgtctctggcaccgccacacagacagatgacgcagcaccgacggatggccagccccagacacaaccttctgaaaacacggaaaacaagtctcagcccaagcggctgcatgtctccaatatccccttcaggttccgggatccggacctcagacaaatgtttggtcaatttggtaaaatcttagatgttgaaattatttttaatgagcgaggctcaaagggatttggtttcgtaactttcgaaaatagtgccgatgcggacagggcgagggagaaattacacggcaccgtggtagagggccgtaaaatcgaggtaaataatgccacagcacgtgtaatgacaaataaaaagaccgtcaacccttatacaaatggctggaaattgaatccagttgtgggtgcagtctacagtcccgaattctatgcaggcacggtcctgttgtgccaggccaaccaggagggatcttccatgtacagtgcccccagttcacttgtatatacttctgcaatgccaggcttcccgtatccagcagccaccgccgcggccgcctaccgaggggcgcacctgcgaggccgcggtcgcaccgtgtacaacaccttcagggccgcggcgcccccgcccccgatcccggcctacggcggtgttgtttaccaggatggattttatggtgcagacatttatggtggttatgctgcataccgctacgcccagcctacccctgccactgccgctgcctacagtgacagttacggacgagtttatgctgccgacccctaccaccacgcacttgctccagcccccacctacggcgttggtgccatgaatgcttttgcacctttgactgatgccaagactaggagccatgctgatgatgtgggtctcgttctttcttcattgcaggctagtatataccgagggggatacaaccgttttgctccatactaaatgacaaaaccataaaaaccttccaatgtggggagaaaggaagctttccgaggcctgagtattgcaatacatgcagtagtacatcattttagcaactctaaaaaaaaaaaaaatacaaataaaaaggaaaaaaaattacattttttatcttatacctcagatattttgttctgtgtattttaatattgtgggtctttaatttctgaaggttccgtagtttggttgctggctgtaggagtttttgtggttgatctagacagatgctagataatgaataaaaactggtttagggccatatccagagtgctatattatgtaaatgaattatatatgctgaatattaagctactggggttatcagctatttgggaagagtgtaagtgactacagtagtcatttttttctgcacctgcattattttattttgcgaaaggggaggttgggaggggcttaggggattggaactggggtttggctgaaagaaaaaaaaaaaaatgtaactgatgaatctaaacgacccactgcaccaacaatcatttatcaatggttctaagttactcattgccagttcaagccaaaggtcatgttgttaagggggtgcttctagtagcacttgtgcatctgagttgaatgaagctgtgcaaacccaccctttaaaccattccacccggcagtattcagcttcttaaccagtcgctatttaggaaaaaaaacccactagttaggccatcaacaagcattctttttatatttcttccagtataataaattattgatatcactgctgacttttatattatgggagggaaaaaataacattaataaaaaggtgataaaaaagcactgtttctatttttttctttttttccaaaaaaagaaagtaataaaaacttaaattctttgtaccagttaaaaaaaatgtataaaatttacatctgtgcagtggagttgttaagttctagaaacagtctatgaagctttagttttagcctagtagaacaactgttagagacagacgtataatttttatggaattacatgataatcatattcggatttatagaagcattttacaagtattgcaatcattgagtagagataatcatggtattttcatcagcttggtactttttgaaacgtgactgcgttgtgtgaacaatctgcaatttttcagtccgtgagatcctgcccttccacctctttcccatacccccaaggattatctcaaaatgatctctttagttctgtctccaaggcccaggacacttgtcagaaggatgcaaaaaaagaaaaaagtacatccaccctcttaatcccaaaagaacaaagtctccccacctttctcggatgcagggccagagtgacacagccgaaaaattgcagtttgtctgtacttctgtttgaactttccacgttgtcctgtttacaagttaacttaagttggggtatccgtcacgggtcttcctgttttgtatttaaataaaaacaacagcagcaggctgtccctgagtagttttgctgccataggttaagtcctcatgtgtacagtgcaggccctgtggcccgcacttcagtaagttatcaactctcaccgctgtgaacctgccaatccgctgtaacaactctgctttaaaacaaaaccaaacaaaactttaaaaaaaaatgtgtgatccagctttctcttgccatcctatgtgcatgccgtaagatcagttggatattaaaccatcaataaagtttcacaagatttgaaaacaaagtttctgtagcttcgatacctaagacagacgatagtgatcttgaaaagagaaaagggggaggggggagctacttatcagccaaaagcatataaagtgttcttttcaccagacttctttgggtgggtgaggggaggggcaagagggtgttttatagcatcactaagacattctcattcccccacctggaaaacagtgttatggcaatgggtgcctggttgatgttcttaaaggaaacgaattattaaaacactatgacatcctccagagggaagaaagagtaggagcagggggctatggagaataaatttctcccaattgccgcctcagatttcaaaatccagaatttgtattgtgtttcgaatcacaaacatagaattcttactgtgttggttaaagtaaaattcatttgcagttttgattttcatcaatgagctgtactttcccccatgactgtatgtagttttaataaaatcatttagagtgagtgagtgccaaccgatgttgcagaatcttttgtctaggcactccaagatgccaataagtcattttaaaatgtatgtcagagatgtaaacaaacattttggattttttttaaacagtatttatttggaatgttttcatttatctaaataactattgctattatgaattatggaaaattaatattatgtgtggcatatagtgacttcttaacacacacatcacgcaatctgcaaacccagaaaatgtgtatatctgtctttagaaattagtgtttatatcacttacagtggtttgtgaataaagaaaactggtttgtaatatcaaaaaaataaaagcttagtctgaaaagg

SEQ ID NO: 26988 - DNA, 4021 bp, Homo sapiens
  source 1..4021: mol_type = unassigned DNA
accttccattttggtagcttcaactttgcagctgctgtgtctcttcgtcgtctgggaagaaaactttcacattaagagttgctgatgcggattttctttctttcctctcccggcgttgatgagtgcttggctcctgacagaagggatttggctcccagctttgtagttcggaagaagttgggtctatagatttccccctaactctccattgatgtgttgagcttcagagggaataataactctacgtaaagcatgctggcgtctcaaggagttctcctgcatccttatggcgtgcctatgattgtaccggcagctccttaccttcctggactgattcagggtaatcaggaagcagccgctgcccctgacacaatggctcagccttacgcttcggcccagtttgctcccccgcagaacggtatccccgcggaatacacggcccctcatccccaccccgcgccagagtacacaggccagaccacggttcccgagcacacattaaacctgtaccctcccgcccagacgcactccgagcagagcccggcggacacgagcgctcagaccgtctctggcaccgccacacagacagatgacgcagcaccgacggatggccagccccagacacaaccttctgaaaacacggaaaacaagtctcagcccaagcggctgcatgtctccaatatccccttcaggttccgggatccggacctcagacaaatgtttggtcaatttggtaaaatcttagatgttgaaattatttttaatgagcgaggctcaaagggatttggtttcgtaactttcgaaaatagtgccgatgcggacagggcgagggagaaattacacggcaccgtggtagagggccgtaaaatcgaggtaaataatgccacagcacgtgtaatgacaaataaaaagaccgtcaacccttatacaaatggctggaaattgaatccagttgtgggtgcagtctacagtcccgaattctatgcagtgccaggcttcccgtatccagcagccaccgccgcggccgcctaccgaggggcgcacctgcgaggccgcggtcgcaccgtgtacaacaccttcagggccgcggcgcccccgcccccgatcccggcctacggcggagtagtgtatcaagagcctgtgtatggcaataaattgctgcagggtggttatgctgcataccgctacgcccagcctacccctgccactgccgctgcctacagtgacagttacggacgagtttatgctgccgacccctaccaccacgcacttgctccagcccccacctacggcgttggtgccatgaatgcttttgcacctttgactgatgccaagactaggagccatgctgatgatgtgggtctcgttctttcttcattgcaggctagtatataccgagggggatacaaccgttttgctccatactaaatgacaaaaccataaaaaccttccaatgtggggagaaaggaagctttccgaggcctgagtattgcaatacatgcagtagtacatcattttagcaactctaaaaaaaaaaaaaatacaaataaaaaggaaaaaaaattacattttttatcttatacctcagatattttgttctgtgtattttaatattgtgggtctttaatttctgaaggttccgtagtttggttgctggctgtaggagtttttgtggttgatctagacagatgctagataatgaataaaaactggtttagggccatatccagagtgctatattatgtaaatgaattatatatgctgaatattaagctactggggttatcagctatttgggaagagtgtaagtgactacagtagtcatttttttctgcacctgcattattttattttgcgaaaggggaggttgggaggggcttaggggattggaactggggtttggctgaaagaaaaaaaaaaaaatgtaactgatgaatctaaacgacccactgcaccaacaatcatttatcaatggttctaagttactcattgccagttcaagccaaaggtcatgttgttaagggggtgcttctagtagcacttgtgcatctgagttgaatgaagctgtgcaaacccaccctttaaaccattccacccggcagtattcagcttcttaaccagtcgctatttaggaaaaaaaacccactagttaggccatcaacaagcattctttttatatttcttccagtataataaattattgatatcactgctgacttttatattatgggagggaaaaaataacattaataaaaaggtgataaaaaagcactgtttctatttttttctttttttccaaaaaaagaaagtaataaaaacttaaattctttgtaccagttaaaaaaaatgtataaaatttacatctgtgcagtggagttgttaagttctagaaacagtctatgaagctttagttttagcctagtagaacaactgttagagacagacgtataatttttatggaattacatgataatcatattcggatttatagaagcattttacaagtattgcaatcattgagtagagataatcatggtattttcatcagcttggtactttttgaaacgtgactgcgttgtgtgaacaatctgcaatttttcagtccgtgagatcctgcccttccacctctttcccatacccccaaggattatctcaaaatgatctctttagttctgtctccaaggcccaggacacttgtcagaaggatgcaaaaaaagaaaaaagtacatccaccctcttaatcccaaaagaacaaagtctccccacctttctcggatgcagggccagagtgacacagccgaaaaattgcagtttgtctgtacttctgtttgaactttccacgttgtcctgtttacaagttaacttaagttggggtatccgtcacgggtcttcctgttttgtatttaaataaaaacaacagcagcaggctgtccctgagtagttttgctgccataggttaagtcctcatgtgtacagtgcaggccctgtggcccgcacttcagtaagttatcaactctcaccgctgtgaacctgccaatccgctgtaacaactctgctttaaaacaaaaccaaacaaaactttaaaaaaaaatgtgtgatccagctttctcttgccatcctatgtgcatgccgtaagatcagttggatattaaaccatcaataaagtttcacaagatttgaaaacaaagtttctgtagcttcgatacctaagacagacgatagtgatcttgaaaagagaaaagggggaggggggagctacttatcagccaaaagcatataaagtgttcttttcaccagacttctttgggtgggtgaggggaggggcaagagggtgttttatagcatcactaagacattctcattcccccacctggaaaacagtgttatggcaatgggtgcctggttgatgttcttaaaggaaacgaattattaaaacactatgacatcctccagagggaagaaagagtaggagcagggggctatggagaataaatttctcccaattgccgcctcagatttcaaaatccagaatttgtattgtgtttcgaatcacaaacatagaattcttactgtgttggttaaagtaaaattcatttgcagttttgattttcatcaatgagctgtactttcccccatgactgtatgtagttttaataaaatcatttagagtgagtgagtgccaaccgatgttgcagaatcttttgtctaggcactccaagatgccaataagtcattttaaaatgtatgtcagagatgtaaacaaacattttggattttttttaaacagtatttatttggaatgttttcatttatctaaataactattgctattatgaattatggaaaattaatattatgtgtggcatatagtgacttcttaacacacacatcacgcaatctgcaaacccagaaaatgtgtatatctgtctttagaaattagtgtttatatcacttacagtggtttgtgaataaagaaaactggtttgtaatatcaaaaaaataaaagcttagtctgaaaagg

SEQ ID NO: 26989 - DNA, 3321 bp, Homo sapiens
  source 1..3321: mol_type = unassigned DNA
accttccattttggtagcttcaactttgcagctgctgtgtctcttcgtcgtctgggaagaaaactttcacattaagagttgctgatgcggattttctttctttcctctcccggcgttgatgagtgcttggctcctgacagaagggatttggctcccagctttgtagttcggaagaagttgggtctatagatttccccctaactctccattgatgtgttgagcttcagagggaataataactctacgtaaagcatgctggcgtctcaaggagttctcctgcatccttatggcgtgcctatgattgtaccggcagctccttaccttcctggactgattcagggtaatcaggaagcagccgctgcccctgacacaatggctcagccttacgcttcggcccagtttgctcccccgcagaacggtatccccgcggaatacacggcccctcatccccaccccgcgccagagtacacaggccagaccacggttcccgagcacacattaaacctgtaccctcccgcccagacgcactccgagcagagcccggcggacacgagcgctcagaccgtctctggcaccgccacacagacagatgacgcagcaccgacggatggccagccccagacacaaccttctgaaaacacggaaaacaagtctcagcccaagcggctgcatgtctccaatatccccttcaggttccgggatccggacctcagacaaatgtttggtcaatttggtaaaatcttagatgttgaaattatttttaatgagcgaggctcaaagggatttggtttcgtaactttcgaaaatagtgccgatgcggacagggcgagggagaaattacacggcaccgtggtagagggccgtaaaatcgaggtaaataatgccacagcacgtgtaatgacaaataaaaagaccgtcaacccttatacaaatggctggaaattgaatccagttgtgggtgcagtctacagtcccgaattctatgcaggcacggtcctgttgtgccaggccaaccaggagggatcttccatgtacagtgcccccagttcacttgtatatacttctgcaatgccaggcttcccgtatccagcagccaccgccgcggccgcctaccgaggggcgcacctgcgaggccgcggtcgcaccgtgtacaacaccttcagggccgcggcgcccccgcccccgatcccggcctacggcggagtagtgtatcaagagcctgtgtatggcaataaattgctgcagggtggttatgctgcataccgctacgcccagcctacccctgccactgccgctgcctacagtgacagaaatcagttcgtcttcgttgcagcagatgaaatttcttgtaacacctctgcagttacggacgagtttatgctgccgacccctaccaccacgcacttgctccagcccccacctacggcgttggtgccatgaatgcttttgcacctttgactgatgccaagactaggagccatgctgatgatgtgggtctcgttctttcttcattgcaggctagtatataccgagggggatacaaccgttttgctccatactaaatgacaaaaccataaaaaccttccaatgtggggagaaaggaagctttccgaggcctgagtattgcaatacatgcagtagtacatcattttagcaactctaaaaaaaaaaaaaatacaaataaaaaggaaaaaaaattacattttttatcttatacctcagatattttgttctgtgtattttaatattgtgggtctttaatttctgaaggttccgtagtttggttgctggctgtaggagtttttgtggttgatctagacagatgctagataatgaataaaaactggtttagggccatatccagagtgctatattatgtaaatgaattatatatgctgaatattaagctactggggttatcagctatttgggaagagtgtaagtgactacagtagtcatttttttctgcacctgcattattttattttgcgaaaggggaggttgggaggggcttaggggattggaactggggtttggctgaaagaaaaaaaaaaaaatgtaactgatgaatctaaacgacccactgcaccaacaatcatttatcaatggttctaagttactcattgccagttcaagccaaaggtcatgttgttaagggggtgcttctagtagcacttgtgcatctgagttgaatgaagctgtgcaaacccaccctttaaaccattccacccggcagtattcagcttcttaaccagtcgctatttaggaaaaaaaacccactagttaggccatcaacaagcattctttttatatttcttccagtataataaattattgatatcactgctgacttttatattatgggagggaaaaaataacattaataaaaaggtgataaaaaagcactgtttctatttttttctttttttccaaaaaaagaaagtaataaaaacttaaattctttgtaccagttaaaaaaaatgtataaaatttacatctgtgcagtggagttgttaagttctagaaacagtctatgaagctttagttttagcctagtagaacaactgttagagacagacgtataatttttatggaattacatgataatcatattcggatttatagaagcattttacaagtattgcaatcattgagtagagataatcatggtattttcatcagcttggtactttttgaaacgtgactgcgttgtgtgaacaatctgcaatttttcagtccgtgagatcctgcccttccacctctttcccatacccccaaggattatctcaaaatgatctctttagttctgtctccaaggcccaggacacttgtcagaaggatgcaaaaaaagaaaaaagtacatccaccctcttaatcccaaaagaacaaagtctccccacctttctcggatgcagggccagagtgacacagccgaaaaattgcagtttgtctgtacttctgtttgaactttccacgttgtcctgtttacaagttaacttaagttggggtatccgtcacgggtcttcctgttttgtatttaaataaaaacaacagcagcaggctgtccctgagtagttttgctgccataggttaagtcctcatgtgtacagtgcaggccctgtggcccgcacttcagtaagttatcaactctcaccgctgtgaacctgccaatccgctgtaacaactctgctttaaaacaaaaccaaacaaaactttaaaaaaaaatgtgtgatccagctttctcttgccatcctatgtgcatgccgtaagatcagttggatattaaaccatcaataaagtttcacaagatttgaaaacaaa

SEQ ID NO: 26990 - DNA, 1530 bp, Homo sapiens
  source 1..1530: mol_type = unassigned DNA
accttccattttggtagcttcaactttgcagctgctgtgtctcttcgtcgtctgggaagaaaactttcacattaagagttgctgatgcggattttctttctttcctctcccggcgttgatgagtgcttggctcctgacagaagggatttggctcccagctttgtagttcggaagaagttgggtctatagatttccccctaactctccattgatgtgttgagcttcagagggaataataactctacgtaaagcatgctggcgtctcaaggagttctcctgcatccttatggcgtgcctatgattgtaccggcagctccttaccttcctggactgattcagggtaatcaggaagcagccgctgcccctgacacaatggctcagccttacgcttcggcccagtttgctcccccgcagaacggtatccccgcggaatacacggcccctcatccccaccccgcgccagagtacacaggccagaccacggttcccgagcacacattaaacctgtaccctcccgcccagacgcactccgagcagagcccggcggacacgagcgctcagaccgtctctggcaccgccacacagacagatgacgcagcaccgacggatggccagccccagacacaaccttctgaaaacacggaaaacaagtctcagcccaagcggctgcatgtctccaatatccccttcaggttccgggatccggacctcagacaaatgtttggtcaatttggtaaaatcttagatgttgaaattatttttaatgagcgaggctcaaagggatttggtttcgtaactttcgaaaatagtgccgatgcggacagggcgagggagaaattacacggcaccgtggtagagggccgtaaaatcgaggtaaataatgccacagcacgtgtaatgacaaataaaaagaccgtcaacccttatacaaatggctggaaattgaatccagttgtgggtgcagtctacagtcccgaattctatgcaggcacggtcctgttgtgccaggccaaccaggagggatcttccatgtacagtgcccccagttcacttgtatatacttctgcaatgccaggcttcccgtatccagcagccaccgccgcggccgcctaccgaggggcgcacctgcgaggccgcggtcgcaccgtgtacaacaccttcagggccgcggcgcccccgcccccgatcccggcctacggcggagtagtgtatcaagagcctgtgtatggcaataaattgctgcagggtggttatgctgcataccgctacgcccagcctacccctgccactgccgctgcctacagtgacagttacggacgagtttatgctgccgacccctaccaccacgcacttgctccagcccccacctacggcgttggtgccatggctagtatataccgagggggatacaaccgttttgctccatactaaatgacaaaaccataaaaaccttccaatgtggggagaaaggaagctttccgaggcctgagtattgcaatacatgcagtagtacatcattttagcaactct

SEQ ID NO: 26991 - DNA, 1513 bp, Homo sapiens
  source 1..1513: mol_type = unassigned DNA
gtgcatttgtgttgtgggggcatggggtgcatttgtgtgtatatatgtgtggatgtagggtgcgtttgtctgtgtgtatttgtgtgggcatggagtgcatttgcgttgcgggggtgtggagtgtgtttgtgtgtgtgcacacgcacatggttctcatggtcctcccgttttcaactgaacctgtaattagctcctcagagaccaggtttcaagacaacagatgaattgtgaaagagagcagctaaggggtaatcaggaagcagccgctgcccctgacacaatggctcagccttacgcttcggcccagtttgctcccccgcagaacggtatccccgcggaatacacggcccctcatccccaccccgcgccagagtacacaggccagaccacggttcccgagcacacattaaacctgtaccctcccgcccagacgcactccgagcagagcccggcggacacgagcgctcagaccgtctctggcaccgccacacagacagatgacgcagcaccgacggatggccagccccagacacaaccttctgaaaacacggaaaacaagtctcagcccaagcggctgcatgtctccaatatccccttcaggttccgggatccggacctcagacaaatgtttggtcaatttggtaaaatcttagatgttgaaattatttttaatgagcgaggctcaaagggatttggtttcgtaactttcgaaaatagtgccgatgcggacagggcgagggagaaattacacggcaccgtggtagagggccgtaaaatcgaggtaaataatgccacagcacgtgtaatgacaaataaaaagaccgtcaacccttatacaaatggctggaaattgaatccagttgtgggtgcagtctacagtcccgaattctatgcaggcacggtcctgttgtgccaggccaaccaggagggatcttccatgtacagtgcccccagttcacttgtatatacttctgcaatgccaggcttcccgtatccagcagccaccgccgcggccgcctaccgaggggcgcacctgcgaggccgcggtcgcaccgtgtacaacaccttcagggccgcggcgcccccgcccccgatcccggcctacggcggtgttgtttaccaggatggattttatggtgcagacatttatggtggttatgctgcataccgctacgcccagcctacccctgccactgccgctgcctacagtgacagttacggacgagtttatgctgccgacccctaccaccacgcacttgctccagcccccacctacggcgttggtgccatgaatgcttttgcacctttgactgatgccaagactaggagccatgctgatgatgtgggtctcgttctttcttcattgcaggctagtatataccgagggggatacaaccgttttgctccatactaaatgacaaaaccataaaaaccttccaatgtggggagaaaggaagctttccgaggcctgagtattgcaatacatgcagtagtacatcattttagcaactct

SEQ ID NO: 26992 - DNA, 3524 bp, Homo sapiens
  source 1..3524: mol_type = unassigned DNA
aagaaggaaggagtgagccgagccgagcaccccacatctggaggggacagccagccgtgggccccgccccggcgtccggagcaggagaactccgagcttcttgcccaggcagagagagcaggagcggaccgcgcgcccgggattgagagtccttgcgctccagacccccacccagtggccgccagggtccccgcctgtccggaccctcgccgcgcccaggcaggcgcgccagggcggggctgacctgcccgcgaagttgcggacagtgcgtgagaaaccagcacccccttccgccgcctccagcttatggaaactggtcaaagaactcatgcaagtggaacttacagcttccttgatcggactcagcattcagatatcaaagcagactgcaatacctgcgtggaaatagaagacagaaaggtttcaagacaacagatgaattgtgaaagagagcagctaaggggtaatcaggaagcagccgctgcccctgacacaatggctcagccttacgcttcggcccagtttgctcccccgcagaacggtatccccgcggaatacacggcccctcatccccaccccgcgccagagtacacaggccagaccacggttcccgagcacacattaaacctgtaccctcccgcccagacgcactccgagcagagcccggcggacacgagcgctcagaccgtctctggcaccgccacacagacagatgacgcagcaccgacggatggccagccccagacacaaccttctgaaaacacggaaaacaagtctcagcccaagcggctgcatgtctccaatatccccttcaggttccgggatccggacctcagacaaatgtttggtcaatttggtaaaatcttagatgttgaaattatttttaatgagcgaggctcaaagggatttggtttcgtaactttcgaaaatagtgccgatgcggacagggcgagggagaaattacacggcaccgtggtagagggccgtaaaatcgaggtaaataatgccacagcacgtgtaatgacaaataaaaagaccgtcaacccttatacaaatggctggaaattgaatccagttgtgggtgcagtctacagtcccgaattctatgcaggcacggtcctgttgtgccaggccaaccaggagggatcttccatgtacagtgcccccagttcacttgtatatacttctgcaatgccaggcttcccgtatccagcagccaccgccgcggccgcctaccgaggggcgcacctgcgaggccgcggtcgcaccgtgtacaacaccttcagggccgcggcgcccccgcccccgatcccggcctacggcggtgttgtttaccaggatggattttatggtgcagacatttatggtggttatgctgcataccgctacgcccagcctacccctgccactgccgctgcctacagtgacagaaatcagttcgtcttcgttgcagcagatgaaatttcttgtaacacctctgcagttacggacgagtttatgctgccgacccctaccaccacgcacttgctccagcccccacctacggcgttggtgccatgccccaaggttccagccccagcacagacttcagaggagctaagctgcacacttccaggcctctgctgtcaggcagctgagaatctgactgcctctcctcccctattacaattcatgtttaaagtcatagtcgcccaggaaagaaaatagagaggggcacactttgtgtgtgtacctagtacataagaaagtagaaggaatcagctgggtttgggggttgccttttgttttggggcaggtctgggtttttgttttgggagggggtggggggagggtaaaaaatgggaggtaagggtggggtgaacttgcctgtacttgttcaaacttctatgcactgaaactcttgagtacagtaagacgtgcccatcacgtgagagcatatgcaatcattacaaagctttggcatgcagttttctgcttggatcaagaatatcagtccttaccctaaaaatgaatccccataggcattcatttgaattgccaatacttttagaaaaaggaaatcgttaagtgccaccttgtagccattaaaaccatggccggacagttcactgaagctcagtcatagaaattcagccatgatttggaagcattgttttgcacaagcttaattacatcaagcaattcatctgtacaactccacaactcccttctcaagatcagattccatacagcttacagagccaagttaagtaagaagtaggttgagattttcatcccaattctgcattcaacaactctgcttcaacacctagtccacatgaggaatgtgttggagagttgaattacattcaacaactggtccaaattcaacctcaagtgcagattattctgttataaaaaaatgagacagtgaaaatccttccattgtccagcttataatagagtccttttagctaagaggactggctgacagaatttggttttgcagggaatttctttaggaggagctattggggaaggtcaggaatggccctatctttagttctccaagaatgacctgggatgggtagggggtgcctccatttcggttggttttgagtgtctatttttcacattagtctttttgatgatccacatgttgcaaaaggaaaatgtaaaaaacacacccctcaaattgctttgtttcagaatgcttttgcacctttgactgatgccaagactaggagccatgctgatgatgtgggtctcgttctttcttcattgcaggctagtatataccgagggggatacaaccgttttgctccatactaaatgacaaaaccataaaaaccttccaatgtggggagaaaggaagctttccgaggcctgagtattgcaatacatgcagtagtacatcattttagcaactctaaaaaaaaaaaaaatacaaataaaaaggaaaaaaaattacattttttatcttatacctcagatattttgttctgtgtattttaatattgtgggtctttaatttctgaaggttccgtagtttggttgctggctgtaggagtttttgtggttgatctagacagatgctagataatgaataaaaactggtttagggccatatccagagtgctatattatgtaaatgaattatatatgctgaatattaagctactggggttatcagctatttgggaagagtgtaagtgactacagtagtcatttttttctgcacctgcattattttattttgcgaaaggggaggttgggaggggcttaggggattggaactggggtttggctgaaagaaaaaaaaaaaaatgtaactgatgaatctaaacgacccactgcaccaacaatcatttatcaatggttctaagttactcattgccagttcaagccaaaggtcatgttgttaagggggtgcttctagtagcacttgtgcatctgagttgaatgaagctgtgcaaacccaccctttaaaccattccacccggcagtattcagcttcttaaccagtcgctatttaggaaaaaaaa

SEQ ID NO: 26993 - DNA, 2277 bp, Homo sapiens
  source 1..2277: mol_type = unassigned DNA
tccggctctcctttgtttattttctaatctatatttttactggaagatttcctctttattctctcccgccctcctacaagcgctcttgctggccgtctgggtgcacacaccgctccctcgatcaccccagcccccttcctggtctcccgagcgcggggtttgaaggtcacctcctttccagtccccgtgcgagccgcgctgccgccgcctcctccagccagagtcggtgggactggctgcgctgccctgaagtggttctccaagcagcgcggagggtggcggacggcggacggagcccaggggccgcgtcgggtggggaaacccgaactcgcggaggggaatccctccccctccgccccagccccccagcagcacccgcggtggggcgggggcgctctgccagccccgggaacagcagaggcggcggcactggctggacccacgcgcgcgcctccggggctgaagaaggaaggagtgagccgagccgagcaccccacatctggaggggacagccagccgtgggccccgccccggcgtccggagcaggagaactccgagcttcttgcccaggcagagagagcaggagcggaccgcgcgcccgggattgagagtccttgcgctccagacccccacccagtggccgccagggtccccgcctgtccggaccctcgccgcgcccaggcaggcgcgccagggcggggctgacctgcccgcgaagttgcggacagtgcgtgagaaaccagcacccccttccgccgcctccagcttatggtgagtgtggctgggggtgcagagagcgcacgggaattcgggggtctggggccgagaacgtgaccgcagccgggctcgccgggagttctaggaaactggtcaaagaactcatgcaagtggaacttacagcttccttgatcggactcagcattcagatatcaaagcagactgcaatacctgcgtggaaatagaagacagaaaggtttcaagacaacagatgaattgtgaaagagagcagctaaggggtaatcaggaagcagccgctgcccctgacacaatggctcagccttacgcttcggcccagtttgctcccccgcagaacggtatccccgcggaatacacggcccctcatccccaccccgcgccagagtacacaggccagaccacggttcccgagcacacattaaacctgtaccctcccgcccagacgcactccgagcagagcccggcggacacgagcgctcagaccgtctctggcaccgccacacagacagatgacgcagcaccgacggatggccagccccagacacaaccttctgaaaacacggaaaacaagtctcagcccaagcggctgcatgtctccaatatccccttcaggttccgggatccggacctcagacaaatgtttggtcaatttggtaaaatcttagatgttgaaattatttttaatgagcgaggctcaaagggatttggtttcgtaactttcgaaaatagtgccgatgcggacagggcgagggagaaattacacggcaccgtggtagagggccgtaaaatcgaggtaaataatgccacagcacgtgtaatgacaaataaaaagaccgtcaacccttatacaaatggctggaaattgaatccagttgtgggtgcagtctacagtcccgaattctatgcaggcacggtcctgttgtgccaggccaaccaggagggatcttccatgtacagtgcccccagttcacttgtatatacttctgcaatgccaggcttcccgtatccagcagccaccgccgcggccgcctaccgaggggcgcacctgcgaggccgcggtcgcaccgtgtacaacaccttcagggccgcggcgcccccgcccccgatcccggcctacggcggtgttgtttaccaggatggattttatggtgcagacatttatggtggttatgctgcataccgctacgcccagcctacccctgccactgccgctgcctacagtgacagttacggacgagtttatgctgccgacccctaccaccacgcacttgctccagcccccacctacggcgttggtgccatgaatgcttttgcacctttgactgatgccaagactaggagccatgctgatgatgtgggtctcgttctttcttcattgcaggctagtatataccgagggggatacaaccgttttgctccatactaaatgacaaaaccataaaaaccttccaatgtggggagaaaggaagctttccgaggcctgagtattgcaatacatgcagtagtacatcattttagcaa

SEQ ID NO: 26994 - DNA, 974 bp, Homo sapiens
  source 1..974: mol_type = unassigned DNA
gcggcgtgtgcgcctccggggctgctgattagaataggggacttggccgtggatggaatccgggaaacccaaaccggagatggaaggatgaggctgcgtttgcagcgcgtgaatgggacgcggatatcaaagcagactgcaatacctgcgtggaaatagaagacagaaaggtttcaagacaacagatgaattgtgaaagagagcagctaaggggtaatcaggaagcagccgctgcccctgacacaatggctcagccttacgcttcggcccagtttgctcccccgcagaacggtatccccgcggaatacacggcccctcatccccaccccgcgccagagtacacaggccagaccacggttcccgagcacacattaaacctgtaccctcccgcccagacgcactccgagcagagcccggcggacacgagcgctcagaccgtctctggcaccgccacacagacagatgacgcagcaccgacggatggccagccccagacacaaccttctgaaaacacggaaaacaagtctcagcccaagcggctgcatgtctccaatatccccttcaggttccgggatccggacctcagacaaatgtttggtcaatttggtaaaatcttagatgttgaaattatttttaatgagcgaggctcaaagggatttggtttcgtaactttcgaaaatagtgccgatgcggacagggcgagggagaaattacacggcaccgtggtagagggccgtaaaatcgaggtaaataatgccacagcacgtgtaatgacaaataaaaagaccgtcaacccttatacaaatggctggaaattgaatccagttgtgggtgcagtctacagtcccgaattctatgcaggcacggtcctgttgtgccaggccaaccaggagggatcttccatgtacagtgcccccagttcacttgtatatacttctgcaatgccaggcttcccgtatccagcagccaccgcc

SEQ ID NO: 26995 - DNA, 2196 bp, Homo sapiens
  source 1..2196: mol_type = unassigned DNA
tccggctctcctttgtttattttctaatctatatttttactggaagatttcctctttattctctcccgccctcctacaagcgctcttgctggccgtctgggtgcacacaccgctccctcgatcaccccagcccccttcctggtctcccgagcgcggggtttgaaggtcacctcctttccagtccccgtgcgagccgcgctgccgccgcctcctccagccagagtcggtgggactggctgcgctgccctgaagtggttctccaagcagcgcggagggtggcggacggcggacggagcccaggggccgcgtcgggtggggaaacccgaactcgcggaggggaatccctccccctccgccccagccccccagcagcacccgcggtggggcgggggcgctctgccagccccgggaacagcagaggcggcggcactggctggacccacgcgcgcgcctccggggctgaagaaggaaggagtgagccgagccgagcaccccacatctggaggggacagccagccgtgggccccgccccggcgtccggagcaggagaactccgagcttcttgcccaggcagagagagcaggagcggaccgcgcgcccgggattgagagtccttgcgctccagacccccacccagtggccgccagggtccccgcctgtccggaccctcgccgcgcccaggcaggcgcgccagggcggggctgacctgcccgcgaagttgcggacagtgcgtgagaaaccagcacccccttccgccgcctccagcttatggtgagtgtggctgggggtgcagagagcgcacgggaattcgggggtctggggccgagaacgtgaccgcagccgggctcgccgggagttctaggaaactggtcaaagaactcatgcaagtggaacttacagcttccttgatcggactcagcattcagatatcaaagcagactgcaatacctgcgtggaaatagaagacagaaaggtttcaagacaacagatgaattgtgaaagagagcagctaaggggtaatcaggaagcagccgctgcccctgacacaatggctcagccttacgcttcggcccagtttgctcccccgcagaacggtatccccgcggaatacacggcccctcatccccaccccgcgccagagtacacaggccagaccacggttcccgagcacacattaaacctgtaccctcccgcccagacgcactccgagcagagcccggcggacacgagcgctcagaccgtctctggcaccgccacacagacagatgacgcagcaccgacggatggccagccccagacacaaccttctgaaaacacggaaaacaagtctcagcccaagcggctgcatgtctccaatatccccttcaggttccgggatccggacctcagacaaatgtttggtcaatttggtaaaatcttagatgttgaaattatttttaatgagcgaggctcaaagggatttggtttcgtaactttcgaaaatagtgccgatgcggacagggcgagggagaaattacacggcaccgtggtagagggccgtaaaatcgaggtaaataatgccacagcacgtgtaatgacaaataaaaagaccgtcaacccttatacaaatggctggaaattgaatccagttgtgggtgcagtctacagtcccgaattctatgcagtgccaggcttcccgtatccagcagccaccgccgcggccgcctaccgaggggcgcacctgcgaggccgcggtcgcaccgtgtacaacaccttcagggccgcggcgcccccgcccccgatcccggcctacggcggtgttgtttaccaggatggattttatggtgcagacatttatggtggttatgctgcataccgctacgcccagcctacccctgccactgccgctgcctacagtgacagttacggacgagtttatgctgccgacccctaccaccacgcacttgctccagcccccacctacggcgttggtgccatgaatgcttttgcacctttgactgatgccaagactaggagccatgctgatgatgtgggtctcgttctttcttcattgcaggctagtatataccgagggggatacaaccgttttgctccatactaaatgacaaaaccataaaaaccttccaatgtggggagaaaggaagctttccgaggcctgagtattgcaatacatgcagtagtacatcattttagcaa

SEQ ID NO: 26996 - DNA, 4394 bp, Homo sapiens
  source 1..4394: mol_type = unassigned DNA
gaagttgcggtgcattgtgggttctcctggagctgtggagttgatcctgaatgaaagtggcgcgccgcccctgacgttacccggatcggagaggttggaattcagattacggctgcgattcgggtgtctcggaccccggtgtgcaccggaccacggggaggcggctccaaaggcgcggtgaacgttggtgagggagggcagctctgcgcagccccaagacatggctcacaacaagatcccgccgcggtggctgaactgtccccggcgcggccagccggtggcaggaagattcttacctctgaagacaatgttaggaccaagatatgatagtcaagttgctgaagaaaatcggttccatcccagcatgctctcaaattacctaaagagcctaaaggttaaaatgggcttgttggtggacctgacaaatacttcaaggttctatgaccgaaatgacatagaaaaagaaggaatcaaatatataaaacttcagtgtaaaggacatggtgagtgccctaccactgagaatactgagacctttattcgtctgtgtgagcggtttaatgaaagaaatccacctgaacttataggtgttcattgtactcatggcttcaatcgcactggtttcctcatatgtgcctttttggtggagaaaatggattggagtatcgaagcagcagttgctacttttgcccaagccagaccaccaggaatctacaagggtgattatttgaaggaactttttcgtcggtatggtgacatagaggaagcaccacccccacctctattgccagattggtgttttgaggatgatgaagacgaagatgaggatgaggatggaaagaaggaatcagaacccgggtcaagtgcttcttttggcaaaaggagaaaagaacggttaaaactgggcgctattttcttggaaggtgttactgttaaaggtgtaactcaagtaacaacacaaccaaagttaggagaggtacagcagaagtgtcatcaattctgtggctgggaagggtctggattccctggagcacagcctgtttccatggacaagcaaaatattaaacttttagacctgaagccatacaaagtaagctggaaagcagatggtactcggtacatgatgttgattgatggcacaaatgaagtttttatgattgatagagacaattcagtatttcatgtttcaaatctggaatttccatttcgtaaagatcttcgtatgcatttatcaaatactctcttggatggcgagatgattattgacagagtaaatggacaggctgttcctagatatttgatatatgacataattaaattcaattcacagcccgttggagattgtgattttaatgttcgtctgcagtgtatagaacgagaaattataagtcctcgacacgaaaaaatgaagactgggctcattgacaaaacacaggaaccatttagcgtcagaaataagccgttttttgacatctgtacttcaagaaagaaatacaaacctggtcgatgtgatgatattttgaaatggaagcctcccagtctgaattctgtggattttcgtctaaaaataacaagaatgggaggagaagggttacttcctcagaatgttggcctcctgtatgttggaggttatgaaagaccctttgcacaaatcaaggtgacaaaagagctgaaacagtatgacaacaaaattatagaatgcaaatttgagaacaacagctgggtcttcatgagacagagaacagacaaaagttttcctaatgcctacaacactgccatggctgtgtgtaacagcatctcaaaccctgtcaccaaggagatgctgtttgagttcatcgacagatgtactgcagcttctcaaggacagaagcgaaaacatcatctggaccctgacacggagctcatgccaccaccacctcccaaaagaccacgccctttaacctaagacctgcctgtgacttgagggttaagaagaaagaggaatgaggaaaaaacgctgttgcccatttttgtagccagagaaattgaaaaacgactgtggcttgatgttgatacacatttgaattttttttaaaaaaagaaagttatcgtagccagcctgtaaatacttgatgcattcgtttcctcagtgctgcaatacatcgtggacttaaacatcttatttatctgataaactcagccttaccttgtggaatctgaagattgaaatatccaaaggtttaaacaagatggaaatcaatgaaaaagaggccttgtttatatatgggtagcttcacatttaatttataaagttaacaatctggaaactgtgagcccataaaacagtattttttagaagttgtgttacaactgtagcaaattttccttttaaaaaatccaggcaatggcattaaacattcttgctatcatttaccatggatttcctacatttctgagatccctgtattcaaaaacaaatgacagggttgttaagttgtactatattaaacaacttggtctggtttatatcattttaacaagttttttggaaatgtaaaagaaaaaagtaaagctccatttttgtgaattgcattgtttctaaaggaagtattttgagtattttcatctgtttgtattgtttcgactatgatatcagatatccagtgtgtccattctggcagtggttttgagttacttcatggaacttggacatacaccaccaggtcctttatgtgttgttctcctgggagacttctttttttaaatgccagggctacttctgctttacctcagtggtatcagcacattgtaaattacgttaaaacacacaactcactgtgatctatgggagtgatatcaaatacaaacgatgttgtgttccttctctcgaacaaaacagcaaagggaatgccagctaacttctttgattagaaggtaatgtcatggaatagaatgctgtcaccagaaaatgctctcccactgctagataaatgcagaggcaaagtgtagacatctgtaggaactaaatatcaaggaaatcaagacatttattttcaaagcgagaattctatctacattctattctgcggatgttatttctgttatacatctgaattttaaaatgtttactgatagataatggatttaaagggcggctaattgattgtctgccattgttgataaactgttctaattggtttgtgaaagaactctgagaattagctaaatggaggctagtgtatttatttttagaggtacatgttttaagtaaatgtatttaaaacaaattttcatggtctgaattgtatatgtaaatgcatatctgtgtaagtatatgcaagtgtatattcttctactgattcagtcagacacgaaatccaactgaattacccggtagactgaatatctgacgggatttctatatggacatagcacagatgaaccaaaaatgtatttatattcacctgagttttaatgtttttaaacaaagttttctcctgcagtgcttttctatatgaaatagttgagtcaagcttgggcttttttcttcgttgttcccaagtcatgtaatgtatagtgaatttatccaaaacgccattgtaacgttttttactagagtgtttttgcacatttgggcgctaaagggattaaaacaactgatgccacaatgactattgaaggagggaaaattctcaaggttccatagtatcttttacaaaatggattaaaaaaaaaatgcctatgcaacttcaaatagtctgatgcctgcttccccaggacgagtgactcttccacggtgtgctgctttccctccgagcctgtggaaaggcagagcccttttgcagatacgaaagcaagcttttgccaatgatctttaatggagttaaaatgtttatggtaattgtaacctttcaaatgagttacgtgaaaagagcatctcacttttaatacacccagatattttcttcaagtctttgtgcattttagcaggacttaattttcttaatttattctttcctttcaattatagtgacatagagtagttggccttataagtagatcccatttagcccctgaacataataccatctgcagtattataaaagtcatttagaaggtcagggggataatctagaggcaggattttggacattgtgaaggaaatgtgctccttctcagctcacttcaataactattttctgagactgaagttttttagacaagaataagaaaactttgctttcttcagttatcacatgtgaaagcttttgctttttgttaggaaaaggtgtggatgactctactgcgtggatggttacatttgctttccgtgaaatgctcagaaaatgtcaggacattccttttccaattgtgtgtcagtgcgtattgtaataaaactactgatttaaattagc

SEQ ID NO: 26997 - DNA, 2017 bp, Homo sapiens
  source 1..2017: mol_type = unassigned DNA
ccctgacgttacccggatcggagaggttggaattcagattacggctgcgattcgggtgtctcggaccccggtgtgcaccggaccacggggaggcggctccaaaggcgcggtgaacgttggtgagggagggcagctctgcgcagccccaagacatggctcacaacaagatcccgccgcggtggctgaactgtccccggcgcggccagccggtggcaggaagattcttacctctgaagacaatgttaggaccaagatatgatagtcaagttgctgaagaaaatcggttccatcccagcatgctctcaaattacctaaagagcctaaaggttaaaatgggcttgttggtggacctgacaaatacttcaaggttctatgaccgaaatgacatagaaaaagaaggaatcaaatatataaaacttcagtgtaaaggacatggtgagtgccctaccactgagaatactgagacctttattcgtctgtgtgagcggtttaatgaaagaaatccacctgaacttataggtgttcattgtactcatggcttcaatcgcactggtttcctcatatgtgcctttttggtggagaaaatggattggagtatcgaagcagcagttgctacttttgcccaagccagaccaccaggaatctacaagggtgattatttgaaggaactttttcgtcggtatggtgacatagaggaagcaccacccccacctctattgccagattggtgttttgaggatgatgaagacgaagatgaggatgaggatggaaagaaggaatcagaacccgggtcaagtgcttcttttggcaaaaggagaaaagaacggttaaaactgggcgctattttcttggaaggtgttactgttaaaggtgtaactcaagtaacaacacaaccaaagttaggagaggtacagcagaagtgtcatcaattctgtggctgggaagggtctggattccctggagcacagcctgtttccatggacaagcaaaatattaaacttttagacctgaagccatacaaagtaagctggaaagcagatggtactcggtacatgatgttgattgatggcacaaatgaagtttttatgattgatagagacaattcagtatttcatgtttcaaatctggaatttccatttcgtaaagatcttcgtatgcatttatcaaatactctcttggatggcgagatgattattgacagagtaaatggacaggctgttcctagatatttgatatatgacataattaaattcaattcacagcccgttggagattgtgattttaatgttcgtctgcagtgtatagaacgagaaattataagtcctcgacacgaaaaaatgaagactgggctcattgacaaaacacaggaaccatttagcgtcagaaataagccgttttttgacatctgtacttcaagaaagctacttgaaggaaattttgccaaagaagtgagccatgaaatggatggacttatttttcagcctactggaaaatacaaacctggtcgatgtgatgatattttgaaatggaagcctcccagtctgaattctgtggattttcgtctaaaaataacaagaatgggaggagaagggttacttcctcagaatgttggcctcctgtatgttggaggttatgaaagaccctttgcacaaatcaaggtatgtttgttcattttcagtgtacttttcctggatgttctcttatctagaatccatcaaaaccttgctaataataatcaacatataaaaatatcgtgttccagcactttgggaggctaagacaggtggatcacttgagcccaggaggttgagaccatgctgggaaccctgtctctacaaaaagaaaaattttttgtcattagccaagttcagtggcatgtgcctatagtcccagctactctggaggctgaggtgggaagatcacttaagccccatgagtttgaggctgcagtgagccgtgatcacaccactgtactccagcctgggtgacagagtgagaccctgtctcaaaaaaaaaa

SEQ ID NO: 26998 - DNA, 4434 bp, Homo sapiens
  source 1..4434: mol_type = unassigned DNA
tgtggagttgatcctgaatgaaagtggcgcgccgcccctgacgttacccggatcggagaggttggaattcagattacggctgcgattcgggtgtctcggaccccggtgtgcaccggaccacggggaggcggctccaaaggcgcggtgaacgttggtgagggagggcagctctgcgcagccccaagacatggctcacaacaagatcccgccgcggtggctgaactgtccccggcgcggccagccggtggcaggaagattcttacctctgaagacaatgttaggaccaagatatgatagtcaagttgctgaagaaaatcggttccatcccagcatgctctcaaattacctaaagagcctaaaggttaaaatgggcttgttggtggacctgacaaatacttcaaggttctatgaccgaaatgacatagaaaaagaaggaatcaaatatataaaacttcagtgtaaaggacatggtgagtgccctaccactgagaatactgagacctttattcgtctgtgtgagcggtttaatgaaagaaatccacctgaacttataggtgttcattgtactcatggcttcaatcgcactggtttcctcatatgtgcctttttggtggagaaaatggattggagtatcgaagcagcagttgctacttttgcccaagccagaccaccaggaatctacaagggtgattatttgaaggaactttttcgtcggtatggtgacatagaggaagcaccacccccacctctattgccagattggtgttttgaggatgatgaagacgaagatgaggatgaggatggaaagaaggaatcagaacccgggtcaagtgcttcttttggcaaaaggagaaaagaacggttaaaactgggcgctattttcttggaaggtgttactgttaaaggtgtaactcaagtaacaacacaaccaaagttaggagaggtacagcagaagtgtcatcaattctgtggctgggaagggtctggattccctggagcacagcctgtttccatggacaagcaaaatattaaacttttagacctgaagccatacaaagtaagctggaaagcagatggtactcggtacatgatgttgattgatggcacaaatgaagtttttatgattgatagagacaattcagtatttcatgtttcaaatctggaatttccatttcgtaaagatcttcgtatgcatttatcaaatactctcttggatggcgagatgattattgacagagtaaatggacaggctgttcctagatatttgatatatgacataattaaattcaattcacagcccgttggagattgtgattttaatgttcgtctgcagtgtatagaacgagaaattataagtcctcgacacgaaaaaatgaagactgggctcattgacaaaacacaggaaccatttagcgtcagaaataagccgttttttgacatctgtacttcaagaaagctacttgaaggaaattttgccaaagaagtgagccatgaaatggatggacttatttttcagcctactggaaaatacaaacctggtcgatgtgatgatattttgaaatggaagcctcccagtctgaattctgtggattttcgtctaaaaataacaagaatgggaggagaagggttacttcctcagaatgttggcctcctgtatgttggaggttatgaaagaccctttgcacaaatcaaggtgacaaaagagctgaaacagtatgacaacaaaattatagaatgcaaatttgagaacaacagctgggtcttcatgagacagagaacagacaaaagttttcctaatgcctacaacactgccatggctgtgtgtaacagcatctcaaaccctgtcaccaaggagatgctgtttgagttcatcgacagatgtactgcagcttctcaaggacagaagcgaaaacatcatctggaccctgacacggagctcatgccaccaccacctcccaaaagaccacgccctttaacctaagacctgcctgtgacttgagggttaagaagaaagaggaatgaggaaaaaacgctgttgcccatttttgtagccagagaaattgaaaaacgactgtggcttgatgttgatacacatttgaattttttttaaaaaaagaaagttatcgtagccagcctgtaaatacttgatgcattcgtttcctcagtgctgcaatacatcgtggacttaaacatcttatttatctgataaactcagccttaccttgtggaatctgaagattgaaatatccaaaggtttaaacaagatggaaatcaatgaaaaagaggccttgtttatatatgggtagcttcacatttaatttataaagttaacaatctggaaactgtgagcccataaaacagtattttttagaagttgtgttacaactgtagcaaattttccttttaaaaaatccaggcaatggcattaaacattcttgctatcatttaccatggatttcctacatttctgagatccctgtattcaaaaacaaatgacagggttgttaagttgtactatattaaacaacttggtctggtttatatcattttaacaagttttttggaaatgtaaaagaaaaaagtaaagctccatttttgtgaattgcattgtttctaaaggaagtattttgagtattttcatctgtttgtattgtttcgactatgatatcagatatccagtgtgtccattctggcagtggttttgagttacttcatggaacttggacatacaccaccaggtcctttatgtgttgttctcctgggagacttctttttttaaatgccagggctacttctgctttacctcagtggtatcagcacattgtaaattacgttaaaacacacaactcactgtgatctatgggagtgatatcaaatacaaacgatgttgtgttccttctctcgaacaaaacagcaaagggaatgccagctaacttctttgattagaaggtaatgtcatggaatagaatgctgtcaccagaaaatgctctcccactgctagataaatgcagaggcaaagtgtagacatctgtaggaactaaatatcaaggaaatcaagacatttattttcaaagcgagaattctatctacattctattctgcggatgttatttctgttatacatctgaattttaaaatgtttactgatagataatggatttaaagggcggctaattgattgtctgccattgttgataaactgttctaattggtttgtgaaagaactctgagaattagctaaatggaggctagtgtatttatttttagaggtacatgttttaagtaaatgtatttaaaacaaattttcatggtctgaattgtatatgtaaatgcatatctgtgtaagtatatgcaagtgtatattcttctactgattcagtcagacacgaaatccaactgaattacccggtagactgaatatctgacgggatttctatatggacatagcacagatgaaccaaaaatgtatttatattcacctgagttttaatgtttttaaacaaagttttctcctgcagtgcttttctatatgaaatagttgagtcaagcttgggcttttttcttcgttgttcccaagtcatgtaatgtatagtgaatttatccaaaacgccattgtaacgttttttactagagtgtttttgcacatttgggcgctaaagggattaaaacaactgatgccacaatgactattgaaggagggaaaattctcaaggttccatagtatcttttacaaaatggattaaaaaaaaaatgcctatgcaacttcaaatagtctgatgcctgcttccccaggacgagtgactcttccacggtgtgctgctttccctccgagcctgtggaaaggcagagcccttttgcagatacgaaagcaagcttttgccaatgatctttaatggagttaaaatgtttatggtaattgtaacctttcaaatgagttacgtgaaaagagcatctcacttttaatacacccagatattttcttcaagtctttgtgcattttagcaggacttaattttcttaatttattctttcctttcaattatagtgacatagagtagttggccttataagtagatcccatttagcccctgaacataataccatctgcagtattataaaagtcatttagaaggtcagggggataatctagaggcaggattttggacattgtgaaggaaatgtgctccttctcagctcacttcaataactattttctgagactgaagttttttagacaagaataagaaaactttgctttcttcagttatcacatgtgaaagcttttgctttttgttaggaaaaggtgtggatgactctactgcgtggatggttacatttgctttccgtgaaatgctcagaaaatgtcaggacattccttttccaattgtgtgtcagtgcgtattgtaataaaactactgatttaaattagcataa

SEQ ID NO: 26999 - DNA, 2082 bp, Homo sapiens
  source 1..2082: mol_type = unassigned DNA
agctgtggagttgatcctgaatgaaagtggcgcgccgcccctgacgttacccggatcggagaggttggaattcagattacggctgcgattcgggtgtctcggaccccggtgtgcaccggaccacggggaggcggctccaaaggcgcggccagccggtggcaggaagattcttacctctgaagacaatgttaggaccaagatatgatagtcaagttgctgaagaaaatcggttccatcccagcatgctctcaaattacctaaagagcctaaaggttaaaatgggcttgttggtggacctgacaaatacttcaaggttctatgaccgaaatgacatagaaaaagaaggaatcaaatatataaaacttcagtgtaaaggacatggtgagtgccctaccactgagaatactgagacctttattcgtctgtgtgagcggtttaatgaaagaaatccacctgaacttataggtgttcattgtactcatggcttcaatcgcactggtttcctcatatgtgcctttttggtggagaaaatggattggagtatcgaagcagcagttgctacttttgcccaagccagaccaccaggaatctacaagggtgattatttgaaggaactttttcgtcggtatggtgacatagaggaagcaccacccccacctctattgccagattggtgttttgaggatgatgaagacgaagatgaggatgaggatggaaagaaggaatcagaacccgggtcaagtgcttcttttggcaaaaggagaaaagaacggttaaaactgggcgctattttcttggaaggtgttactgttaaaggtgtaactcaagtaacaacacaaccaaagttaggagaggtacagcagaagtgtcatcaattctgtggctgggaagggtctggattccctggagcacagcctgtttccatggacaagcaaaatattaaacttttagacctgaagccatacaaagtaagctggaaagcagatggtactcggtacatgatgttgattgatggcacaaatgaagtttttatgattgatagagacaattcagtatttcatgtttcaaatctggaatttccatttcgtaaagatcttcgtatgcatttatcaaatactctcttggatggcgagatgattattgacagagtaaatggacaggctgttcctagatatttgatatatgacataattaaattcaattcacagcccgttggagattgtgattttaatgttcgtctgcagtgtatagaacgagaaattataagtcctcgacacgaaaaaatgaagactgggctcattgacaaaacacaggaaccatttagcgtcagaaataagccgttttttgacatctgtacttcaagaaagctacttgaaggaaattttgccaaagaagtgagccatgaaatggatggacttatttttcagcctactggaaaatacaaacctggtcgatgtgatgatattttgaaatggaagcctcccagtctgaattctgtggattttcgtctaaaaataacaagaatgggaggagaagggttacttcctcagaatgttggcctcctgtatgttggaggttatgaaagaccctttgcacaaatcaaggtgacaaaagagctgaaacagtatgacaacaaaattatagaatgcaaatttgagaacaacagctgggtcttcatgagacagagaacagacaaaagttttcctaatgcctacaacactgccatggctgtgtgtaacagcatctcaaaccctgtcaccaaggagatgctgtttgagttcatcgacagatgtactgcagcttctcaaggacagaagcgaaaacatcatctggaccctgacacggagctcatgccaccaccacctcccaaaagaccacgccctttaacctaagacctgcctgtgacttgagggttaagaagaaagaggaatgaggaaaaaacgctgttgcccatttttgtagccagagaaattgaaaaacgactgtggcttgatgttgatacacatttgaattttttttaaaaaaagaaagttatcgtagccagcctgtaaatacttgatgcattcgtttcctcagtgctgc

SEQ ID NO: 27000 - DNA, 2180 bp, Homo sapiens
  source 1..2180: mol_type = unassigned DNA
gcattgtgggttctcctggagctgtggagttgatcctgaatgaaagtggcgcgccgcccctgacgttacccggatcggagaggttggaattcagattacggctgcgattcgggtgtctcggaccccggtgtgcaccggaccacggggaggcggctccaaaggcgcggtgaacgttggtgagggagggcagctctgcgcagccccaagacatggctcacaacaagatcccgccgcggtggctgaactgtccccggcgcggccagccggtggcaggttaaaatgggcttgttggtggacctgacaaatacttcaaggttctatgaccgaaatgacatagaaaaagaaggaatcaaatatataaaacttcagtgtaaaggacatggtgagtgccctaccactgagaatactgagacctttattcgtctgtgtgagcggtttaatgaaagaaatccacctgaacttataggtgttcattgtactcatggcttcaatcgcactggtttcctcatatgtgcctttttggtggagaaaatggattggagtatcgaagcagcagttgctacttttgcccaagccagaccaccaggaatctacaagggtgattatttgaaggaactttttcgtcggtatggtgacatagaggaagcaccacccccacctctattgccagattggtgttttgaggatgatgaagacgaagatgaggatgaggatggaaagaaggaatcagaacccgggtcaagtgcttcttttggcaaaaggagaaaagaacggttaaaactgggcgctattttcttggaaggtgttactgttaaaggtgtaactcaagtaacaacacaaccaaagttaggagaggtacagcagaagtgtcatcaattctgtggctgggaagggtctggattccctggagcacagcctgtttccatggacaagcaaaatattaaacttttagacctgaagccatacaaagtaagctggaaagcagatggtactcggtacatgatgttgattgatggcacaaatgaagtttttatgattgatagagacaattcagtatttcatgtttcaaatctggaatttccatttcgtaaagatcttcgtatgcatttatcaaatactctcttggatggcgagatgattattgacagagtaaatggacaggctgttcctagatatttgatatatgacataattaaattcaattcacagcccgttggagattgtgattttaatgttcgtctgcagtgtatagaacgagaaattataagtcctcgacacgaaaaaatgaagactgggctcattgacaaaacacaggaaccatttagcgtcagaaataagccgttttttgacatctgtacttcaagaaagaaatacaaacctggtcgatgtgatgatattttgaaatggaagcctcccagtctgaattctgtggattttcgtctaaaaataacaagaatgggaggagaagggttacttcctcagaatgttggcctcctgtatgttggaggttatgaaagaccctttgcacaaatcaaggtgacaaaagagctgaaacagtatgacaacaaaattatagaatgcaaatttgagaacaacagctgggtcttcatgagacagagaacagacaaaagttttcctaatgcctacaacactgccatggctgtgtgtaacagcatctcaaaccctgtcaccaaggagatgctgtttgagttcatcgacagatgtactgcagcttctcaaggacagaagcgaaaacatcatctggaccctgacacggagctcatgccaccaccacctcccaaaagaccacgccctttaacctaagacctgcctgtgacttgagggttaagaagaaagaggaatgaggaaaaaacgctgttgcccatttttgtagccagagaaattgaaaaacgactgtggcttgatgttgatacacatttgaattttttttaaaaaaagaaagttatcgtagccagcctgtaaatacttgatgcattcgtttcctcagtgctgcaatacatcgtggacttaaacatcttatttatctgataaactcagccttaccttgtggaatctgaagattgaaatatccaaaggtttaaacaagatggaaatcaatgaaaaagaggccttgtttatatatgggtagcttcacatttaatttataaagttaacaatct

SEQ ID NO: 27001 - DNA, 1809 bp, Homo sapiens
  source 1..1809: mol_type = unassigned DNA
gccgtcacgcgcaccgtacagcccagtccacgaagggcgccacgggccgtgacgtcactagccgccgacggcgcgctttcgtgacgcagcccgggtctcagggaacatggcggcgctggtgagacccgcgaggtttgtcgtgcgaccgttgctgcaggtggtccaggcttgggaccttgacgcgaggcgctgggtccgggcgctgcggcggagcccagtgaaagtggtgtttccttccggagaggtggtggaacagaagcgcgctcctgggaagcagccccgcaaggcaccatctgaggccagtgcccaggagcaacgagagaaacaaccgctcgaggagtccgcatcccgcgctcccagcacctgggaagagtctgggcttcgctacgataaagcttatcccggggacaggaggctgagcagtgtaatgacaatagtaaagtccaggccatttcgggaaaaacaagggaagatcctgctggaaggtcgcaggctcatttcagacgctctcaaggctggagctgtgccaaaaatgttcttctttagccgtctagaatacctaaaggagttgccagtcgataagctgaaaggtgtcagcctcattaaggtgaaatttgaggatatcaaggattggtccgacctcgtaacgccacaaggaataatggggatttttgccaagcctgaccatgttaagatgacatatccaaagactcagcttcagcattcactgcctttattattgatttgtgacaatctccgtgaccctgggaacctggggacaattctgagatctgcagctggggcaggctgcagcaaagtgttactcaccaaaggctgtgtggatgcctgggagcccaaagtgctccgggcgggtatgggcgcacatttccggatgcccattatcaataatctggaatgggaaaccgtgcccaattacctgccccctgacactcgggtctatgtggctgacaactgtggcctttatgcccaggctgagatgtctaataaagctagtgaccatggctgggtgtgtgatcaacgagtgatgaagtttcacaagtatgaggaagaggaagatgtagaaaccggagccagtcaagattggctgcctcatgttgaggttcagagttacgactcggactggacagaggcgccggcagctgtggtgattggcggggagacctacggcgtgagcctggagtccctgcagctggccgagagcactggtggcaagaggctgctgatccccgttgtgcctggtgtggacagcctcaactcggccatggcggcaagcatcctgcttttcgaagggaaaagacagctgcgggggagggcggaggacttgagcagggacaggagttaccactgaggacgcagaagtgacttctgcttgaggacgtctgcagctcctcctacaccagcacactggtgggaggctggcggagtcagtgactatggcccccacgttcaggaggaaggtgtgatgccgtcatacagttacaggaaaaataagaacttcctcagaaagaacaggtccgaattcttcctgtcgcgtcactgattttgaggttcttttttctcttggtgacaataggtgacccacgtggctctgtgtgtttttaaaaattgtccaccaagaagcactttgtgcccagaaagttcctgaagcatcatcctggcagggaggcgcctgctccaccagctggtgggtgtttgtaatcgccaagcaccagctataggtcacagccacatcactcacagctgatcactggttggtggaaaataaactatgagcagcagattacgtta

SEQ ID NO: 27002 - DNA, 4672 bp, Homo sapiens
  source 1..4672: mol_type = unassigned DNA
gcgatctctgcggggcaagatggcggcgcccagacaggcctggagcacggatgaataagagggaacccccacacggagacactgctggagagagtcgtactggggaggcagctggagcagcaagatgctgtcgagaccgaagccaggggagtccgaggtggacctgctgcacttccagagtcagtttctcgcagctggtgcagccccagcagtgcagttggtgaagaaaggaaataggggcggtggtgatgccaactcagaccggcctccgctccaggaccatcgggatgtggtgatgttggacaatctcccagatttgcccccagctttggtcccttctcctccaaagagagccaggcccagccctggccactgcctgcctgaggatgaggacccagaagagaggctgaggaggcatgatcagcacatcactgctgtcttgactaagattattgaacgagatacaagttcagtggccgtgaatctgcctgtgcccagtggtgttgctttccctgctgtgttccttcgctcgcgggacacacaggggaaatcagcaacatctggtaagagaagcatctttgcccaggaaattgcggcaaggaggatagctgaagccaagggcccatcagttggggaagttgtgcccaacgtgggcccaccagagggtgccgtgacctgtgagacacccactcctaggaaccagggctgccagcttcctgggagcagccacagctttcagggacccaatctggtcacagggaaggggctcagggatcaagaagctgagcaggaagcccagactatccatgaagagaacatagcaagactgcaggccatggctcctgaggagatcctgcaggaacagcagcggttgctggcccagcttgaccccagcttggttgctttcttgagatctcacagccacacgcaagagcaaacaggagagacagcctctgaggagcagaggccaggaggaccctctgctaatgtcaccaaggaggaacccctcatgtcagcttttgccagtgagcccaggaagagagacaagctggagccagaagccccagctctggcattgcccgtgacccctcagaaagaatggctgcacatggacactgtcgagctggagaagctccactggacccaggacttgccccctgtccggcggcagcagacacaggagaggatgcaggctcgattcagtcttcagggagaactactggcccctgacgtggacctgcccacccacctgggtctgcaccaccatggagaggaggcagagagagcggggtattccctacaggagctgttccacctgacccgcagccaggtttcccagcagagagcactggcactgcatgtgttagcccaggtcatcagcagggcccaggctggtgagtttggggaccggctagcaggcagtgtcttaagcctccttttggatgctggtttcctcttcctactgcgcttctccttggatgacagagtggatggggtcattgcaaccgccatccgtgctcttcgggctctgctggtggctcctggagatgaggagctcctcgacagcaccttctcttggtaccatggagctttgacgttccctctgatgcccagccaggaggacaaggaggatgaggacgaggatgaagaatgcccagcaggaaaagcaaaaaggaaaagccctgaagaagaaagccggcctccacctgacctggcccgacatgatgtcatcaaggggctcctggctaccagcctgctgcctcggctgcgctacgtgctggaggtgacatacccaggacctgcggtggtccttgacatcctggctgtgctcatccgcctggcccggcattccctggaatcagccacaagggtcctggagtgccctcggctgatagagactatagttcgagagttcttgcccaccagttggtctcctgtgggggcagggcctacccctagtctatacaaagtaccctgtgctactgccatgaaactacttcgtgtcctggcctcagctgggaggaatattgctgcccggctgttgagcagctttgatctccggagccgcctgtgccgcatcatagctgaggctccccaagaactggccttgcccccagaggaagctgagatgctgagcaccgaggccctccgtctgtgggctgtggctgcctcctatggccagggcggttacctttacagggagctctacccagtgctgatgcgggccttgcaggtggtgccgcgggagctcagcacccacccacctcaacccctgtccatgcagcggatagcctcactgctcactctcctcacccagctaaccctggcagccggcagtacccctgctgaaaccatcagtgattctgctgaggccagcctctcggccaccccttccttagtcacttggacacaggtgtctgggctccagcctcttgttgagccgtgtctaaggcagaccttgaagttgctgtccagacctgagatgtggagagccgtgggcccagtgcccgttgcctgcctgttgttcctgggagcctactaccaggcctggagccagcaaccaagctcatgcccggaggattggctccaggacatgcagcgcctgtcagaggagctgctgctgccactgctgagtcagcccacactgggcagcctgtgggattcccttaggcactgctcccttctctgcaacccgctgtcctgtgtgccagcccttgaagctccccccagcctcgtgtcactgggctgctcgggaggctgcccccgtctcagtctggctggctcagcctcacccttcccattcctcactgccctcctctctcttcttaataccctggcccagatccacaaggggctgtgtggccagctggctgccatattggctgccccgggactccagaattacttcctccagtgtgtggctcctggggctgccccacacctcacacctttctctgcatgggccctgcgccatgagtaccacctgcagtacctggcactcgctctggcccagaaagcggcagcgctgcagccactgccagccacccatgctgccctctatcatggtatggccttggccctgctgagccggctgctgcccggaagtgagtacctcacccatgagctgctgctgagctgtgtattccggctggagttcctcccggaaagaacatcagggggtccagaggcagccgacttctctgaccagctgtcgttaggaagcagcagggtccctcggtgtgggcaagggactctgctggctcaggcctgccaggacctccccagcatccgcaactgctacctgactcattgctcgccagcccgagccagtctgctggcctcccaggctctgcaccgaggggagctacagcgagtcccaaccctgctactgcccatgcctacggagccgctgctgcccaccgactggcccttcctgccactgattcgcctctaccaccgggcttcagacaccccctcgggactctctcccacagacaccatgggcacagccatgcgggtcctgcagtgggtgctagttttggagagctggcgcccccaggctctctgggctgtgccccctgctgcccgcctggcacggctcatgtgtgtgttcctggtggacagtgagctgttccgggagtccccagtacagcatctggtggcagccctcctcgcccagctctgtcagcctcaagtcttgccaaacctcaacctggactgccgactccctggcctgacgtctttccctgacctctatgccaacttcctggatcattttgaggctgtctcttttggggaccacctctttggggccctggtcctcctgcccctgcagcgtcggttcagtgtcaccttgcgccttgccctctttggggaacacgtgggagccttgcgagctctgagcctgcctctgacccagttgcctgtgtccctggagtgttacacagtgcctcctgaagacaacctggccctccttcagctctacttccggaccctggttactggtgcgctccgcccacgttggtgccccgtgctctatgctgtggctgtggctcatgtcaatagcttcatcttctctcaggacccacagagctcagatgaggtcaaagctgcccgcaggagtatgctgcagaaaacatggctgctggcagatgagggtctccggcagcacctcctgcactataagcttcccaattccacgctcccagagggctttgagctctattctcagttgccccctctgcgtcagcactacctccagagactgacttcaacagtgctccaaaatggggtatcagagacctaggatagttgatatagatggaaagatgggtacgttgtcctgtatccagcctttcaacagatgtctggccagacgaagaacattgtgtcctaatggtaggcaggagaccaaggagcagaaggcttgccttcctgggagcaggttgtttgagctgttttagagcagtgagccctaccattacatcctgatatctggggcttctgaaggtctgtactgggagtgaagagtggcttagctatttacccgctctttggggacagggcaaactaaatgcatcccttcttacctaactcccaacccctgccctgggctgaggcatatgaatgctatagttgtgcattaaaataaatgttttttatctcctggaaa

SEQ ID NO: 27003 - DNA, 3110 bp, Homo sapiens
  source 1..3110: mol_type = unassigned DNA
ccggcgtcttagcccgctcttctggccccgccccgcgctacgcgtagggaggcggggcctcggggcgagacgccggagcgtgtccccgtccggcagactactctcccccatggcggacttcgctgggccgtcttctgccggccgcaaggccggggctccccgctgctctcgaaaagccgcaggtactaaacagacaagtactttgaaacaagaagatgcttctaaaaggaaagctgaactagaagcagctgtgagaaagaagattgaatttgagagaaaagctctacatattgttgaacagcttttagaggagaatattacagaagagttcctaatggagtgtgggaggttcattacacctgctcactacagtgatgtcgtggatgaacgttctattgtcaaactctgtggttatcctttatgtcagaagaagctgggaattgtaccaaaacagaaatataaaatttctaccaaaaccaataaagtctatgatattactgaaagaaagtctttttgcagcaatttttgttatcaagcatctaagttttttgaagcacaaattcccaaaactccagtatgggttcgagaagaagagaggcatcctgattttcaactgctaaaggaagaacaaagtggccattctggagaagaagtacagttatgcagtaaagccattaaaacatcagatatcgacaatcctagccactttgaaaagcaatatgaatctagttcttctagcactcacagtgatagtagcagtgacaatgagcaagactttgtttcctccattctaccaggaaacagaccaaattcaacaaatattagaccacagctgcaccaaaaaagcataatgaaaaagaaagctggtcacaaagctaactccaaacacaaagacaaagaacagacagtagtagatgtcactgagcagttaggcgattgcaaattagatagtcaggagaaagatgctacatgtgaacttcctttacagaaagtaaatactcagagttcttcaaatagcactttgcctgaaagattaaaagcgtcagaaaattctgaaagtgaatacagtaggtcagaaataactctagtaggcataagtaagaaaagtgcagagcattttaagagaaaatttgccaaatcaaaccaagtgtctaggtcagtgtctagttcagtgcaggtgtgtcctgaagttggaaagagaaacttacttaaagttttgaaggagactttgattgagtggaagacagaagaaacattgaggtttttgtatggccagaattatgcttctgtgtgtctgaaacccgaagcctctctggttaaagaagaacttgatgaagatgacataatctcagatccagatagtcatttccctgcctggagggaatctcagaacagcttggatgagtctttaccttttaggggctcaggtacagccattaaaccactgccaagttacgagaatttgaaaaaagaaactgaaaagttaaatctgaggatcagggagttttacagaggacggtatgttttgggtgaagaaaccaccaaatcacaagactcagaagagcatgattccacctttccactgatagactcaagttcccagaaccagattagaaaacgcatcgtacttgaaaagttgagtaaagtgttgcctgggcttctggttcctcttcagattacattgggagatatttacacacaacttaaaaatcttgttcgaactttcaggttaacaaatagaaatattatacacaaacctgcggaatggactttaattgctatggtgttgctgtcattactgaccccaattcttggcattcagaaacattctcaggaaggtatggtgtttacacggtttctagacaccctccttgaagaattacatctaaaaaatgaagaccttgaaagtctaaccatcatatttagaaccagctgtttaccagagtgatatattccatgaagacaaaatagaagatgaacttctattcaccgtttctggaattctagccgccatgatggtctggtggtgactgataactagttttattccaagacatacctttacctctttaagtttcaatctcccatctcccagtccttcagtccccaactgcagaggatgacctccccagatagaggagaatcattactccaacaagaataaccaagtctttgtatccctagtacaagacatagtatttttattcgaaaatgaatgtttaagtattaaattgaaacttgaatgaatattcaagaaaatataatgatctctactttttctggatgatttccagccatcatatcagtttgccaaaaaaattgagaaagttatgattttgacctcccaacctaaactctaaattctaaagatcagtaaacaattaggtcaataaatacatacaatttaagatgaagccctttggaagtctagtccaaaacaggaaaatctcagaactttctggactcaaggaaatgctttaaatggaatctgtagtttgtttgcaggagagacaatttctagaatttagattgcttttcaaaatgtttatcaggtaggcaagttagcagttgaggcggaacacagacaacttggggagctttactggaaggccaagaaaatactcttggacactggaggaaatgacagctactaaagcccaatcatggaaaaggaccagaaagcagcccactggaatggggagcttagtgggcaaggaggtagggatataatttctcttcttggctccaccagtaattagctctgtggcccagtcacctaaactttctggacttcagttcaggttgtatggcagtaggccatagaattggctactgccatacaatctctatgggaaaggactgcaaaaactaaattttatctctgtatgggcaaaggctactgtcatcctgttgttggtctggggccactctgacaattttttttaacctcatttgattgtgtaagggtctaaccacaacaaaaaatcatagtgtaatagaattaatcaagttcagcaaggtcacaggctagatcaatatacagaaaatcaattgtatttttctgttcagaaaactccaaaaatgaaataaagaaaattgtgttcacaata

SEQ ID NO: 27004 - DNA, 1778 bp, Homo sapiens
  source 1..1778: mol_type = unassigned DNA
ccccgtccggcagactactctcccccatggcggacttcgctgggccgtcttctgccggccgcaaggccggggctccccgctgctctcgaaaagccgcaggtactaaacagacaagtactttgaaacaagaagatgcttctaaaaggaaagctgaactagaagcagctgtgagaaagaagattgaatttgagagaaaagctctacatattgttgaacagcttttagaggagaatattacagaagagttcctaatggagtgtgggaggttcattacacctgctcactacagtgatgtcgtggatgaacgttctattgtcaaactctgtggttatcctttatgtcagaagaagctgggaattgtaccaaaacagaaatataaaatttctaccaaaaccaataaagtctatgatattactgaaagaaagtctttttgcagcaatttttgttatcaagcatctaagttttttgaagcacaaattcccaaaactccagtatgggttcgagaagaagagaggcatcctgattttcaactgctaaaggaagaacaaagtggccattctggagaagaagtacagttatgcagtaaagccattaaaacatcagatatcgacaatcctagccactttgaaaagcaatatgaatctagttcttctagcactcacagtgatagtagcagtgacaatgagcaagactttgtttcctccattctaccaggaaacagaccaaattcaacaaatattagaccacagctgcaccaaaaaagcataatgaaaaagaaagctggtcacaaagctaactccaaacacaaagacaaagaacagacagtagtagatgtcactgagcagttaggcgattgcaaattagatagtcaggagaaagatgctacatgtgaacttcctttacagaaagtaaatactcagagttcttcaaatagcactttgcctgaaagattaaaagcgtcagaaaattctgaaagtgaatacagtaggtcagaaataactctagtaggcataagtaagaaaagtgcagagcattttaagagaaaatttgccaaatcaaaccaagtgtctaggtcagtgtctagttcagtgcaggtgtgtcctgaagttggaaagagaaacttacttaaagttttgaaggagactttgattgagtggaagacagaagaaacattgaggtttttgtatggccagaattatgcttctgtgtgtctgaaacccgaagcctctctggttaaagaagaacttgatgaagatgacataatctcagatccagatagtcatttccctgcctggagggaatctcagaacagcttggatgagtctttaccttttaggggctcaggtacagccattaaaccactgccaagttacgagaatttgaaaaaagaaactgaaaagttaaatctgaggatcagggagttttacagaggacggtatgttttgggtgaagaaaccaccaaatcacaagactcagaagagcatgattccacctttccactgatagactcaagttcccagaaccagattagaaaacgcatcgtacttgaaaagttgagtaaagtgttgcctgggcttctggttcctcttcagattacattgggagatatttacacacaacttaaaaatcttgttcgaactttcaggttaacaaatagaaatattatacacaaacctgcggaatggactttaattgctatggtgttgctgtcattcctactcaatgtgaagacaaggataaagacctttatgatgatctacttccacttaatgaatagt

SEQ ID NO: 27005 - DNA, 2332 bp, Homo sapiens
  source 1..2332: mol_type = unassigned DNA
gcttgtggggaagcgcaggaggcggggctttgcgtgagtcactgccgggctcggcgtgagtcgctgcggggctgacggggtggcagtgcggcgggttacggcctggtcagaccataatgacttcagcaaataaagcaatcgaattacaactacaagtgaaacaaaatgcagaagaattacaagactttatgcgggatttagaaaactgggaaaaagacattaaacaaaaggatatggaactaagaagacagaatggtgttcctgaagagaatttacctcctattcgaaatgggaattttaggaaaaagaagaaaggcaaagctaaagagtcttccaaaaaaaccagagaggaaaacacaaaaaacaggataaaatcttatgattatgaggcatgggcaaaacttgatgtggaccgtatccttgatgagcttgacaaagacgatagtacccatgagtctctgtctcaagaatcagagtcggaagaagatgggattcatgtagattcacaaaaggctcttgttttaaaagaaaagggcaataaatacttcaaacaaggaaaatatgatgaagcaattgactgctacacaaaaggcatggatgccgatccatataatcccgtgttgccaacgaacagagcgtcagcatattttagactgaaaaaatttgctgttgctgagtctgattgtaatttagcagttgccttgaatagaagttatacaaaggcttattccagacgaggtgctgctcgatttgctttgcaaaaattagaagaggccaaaaaagattatgaaagagtattagaactagaaccaaataactttgaagcaacaaatgaactcaggaaaatcagtcaggctttagcatccaaagaaaactcatatccaaaggaagctgacatagtgattaagtcaacagaaggagagcgaaagcaaattgaagcacaacagaataagcagcaggccatttcagagaaagatcgggggaatggatttttcaaagaggggaaatatgaaagagcaattgaatgctatactcgagggatagcagcagatggtgctaatgcccttcttccagctaacagagctatggcctatctgaagattcagaaatatgaagaagctgaaaaagactgcacacaagccattttattagatggctcatattctaaagcttttgccagaagaggaactgcaagaacatttttgggaaagctaaatgaggcaaaacaagattttgaaactgttttacttctggaacctggaaataagcaagcagtaactgaactctccaaaattaaaaaggaattaattgagaaaggacactgggatgatgtctttcttgattccacacaaagacaaaatgtggtaaaacccattgataatccaccgcatcctggatcaactaaaccactcaagaaggttattattgaagaaactggtaatttgatacagactattgatgtgccagatagcactactgctgctgctccagagaataatcctattaatctagcaaatgtaatagcagccacaggcaccacaagtaagaagaattcaagccaagatgacctttttcccacaagtgatactccaagagcaaaagtattgaaaatagaagaagtcagtgatacttcatccctgcaacctcaagccagtttgaagcaggatgtatgtcagtcttacagcgagaaaatgcccatagagatagaacaaaaacctgctcagtttgccacaactgttcttcctccaattcctgcaaactcgttccagctcgaatctgatttcagacaattgaaaagttctccagatatgttgtatcagtatttaaagcaaattgaaccatctttgtatcctaagttgtttcagaaaaatctggatccagatgtattcaaccagatcgttaaaattctgcatgacttttacattgagaaagaaaagccattactcatctttgaaatcttacaaagactttctgaactaaaaaggtttgatatggcagtgatgtttatgtcagaaacagagaaaaagattgcacgtgcattatttaatcacatagacaagtcaggattgaaggatagttctgtcgaagaactcaagaaaagatacggtggttgatttccatttttgctgaaataattgtttttgactttcatatgtaaattttttctactgaaagtgttttgctttttaagaaaatgaaattatatagcaggaaaggactatctttgaacataagttaattaactataaggtgaattgtgatttaactagtgagaattgtattcaagtgaactctgtttttctgaaaataaaaatataaacaatgagataca

SEQ ID NO: 27006 - DNA, 2149 bp, Homo sapiens
  source 1..2149: mol_type = unassigned DNA
cggggtggcagtgcggcgggttacggcctggtcagaccataatgacttcagcaaataaagcaatcgaattacaactacaagtgaaacaaaatgcagaagaattacaagactttatgcgggatttagaaaactgggaaaaagacattaaacaaaaggatatggaactaagaagacagaatggtgttcctgaagagaatttacctcctattcgaaatgggaattttaggaaaaagaagaaaggcaaagctaaagagtcttccaaaaaaaccagagaggaaaacacaaaaaacaggataaaatcttatgattatgaggcatgggcaaaacttgatgtggaccgtatccttgatgagcttgacaaagacgatagtacccatgagtctctgtctcaagaatcagagtcggaagaagatgggattcatgtagattcacaaaaggctcttgttttaaaagaaaagggcaataaatacttcaaacaaggaaaatatgatgaagcaattgactgctacacaaaaggcatggatgccgatccatataatcccgtgttgccaacgaacagagcgtcagcatattttagactgaaaaaatttgctgttgctgagtctgattgtaatttagcagttgccttgaatagaagttatacaaaggcttattccagacgaggtgctgctcgatttgctttgcaaaaattagaagaggccaaaaaagattatgaaagagtattagaactagaaccaaataactttgaagcaacaaatgaactcaggaaaatcagtcaggctttagcatccaaagaaaactcatatccaaaggaagctgacatagtgattaagtcaacagaaggagagcgaaagcaaattgaagcacaacagaataagcagcaggccatttcagagaaagatcgggggaatggatttttcaaagaggggaaatatgaaagagcaattgaatgctatactcgagggatagcagcagatggtgctaatgcccttcttccagctaacagagctatggcctatctgaagattcagaaatatgaagaagctgaaaaagactgcacacaagccattttattagatggctcatattctaaagcttttgccagaagaggaactgcaagaacatttttgggaaagctaaatgaggcaaaacaagattttgaaactgttttacttctggaacctggaaataagcaagcagtaactgaactctccaaaattaaaaagaaaccactcaagaaggttattattgaagaaactggtaatttgatacagactattgatgtgccagatagcactactgctgctgctccagagaataatcctattaatctagcaaatgtaatagcagccacaggcaccacaagtaagaagaattcaagccaagatgacctttttcccacaagtgatactccaagagcaaaagtattgaaaatagaagaagtcagtgatacttcatccctgcaacctcaagccagtttgaagcaggatgtatgtcagtcttacagcgagaaaatgcccatagagatagaacaaaaacctgctcagtttgccacaactgttcttcctccaattcctgcaaactcgttccagctcgaatctgatttcagacaattgaaaagttctccagatatgttgtatcagtatttaaagcaaattgaaccatctttgtatcctaagttgtttcagaaaaatctggatccagatgtattcaaccagatcgttaaaattctgcatgacttttacattgagaaagaaaagccattactcatctttgaaatcttacaaagactttctgaactaaaaaggtttgatatggcagtgatgtttatgtcagaaacagagaaaaagattgcacgtgcattatttaatcacatagacaagtcaggattgaaggatagttctgtcgaagaactcaagaaaagatacggtggttgatttccatttttgctgaaataattgtttttgactttcatatgtaaattttttctactgaaagtgttttgctttttaagaaaatgaaattatatagcaggaaaggactatctttgaacataagttaattaactataaggtgaattgtgatttaactagtgagaattgtattcaagtgaactctgtttttctgaaaataaaaatataaacaatga

SEQ ID NO: 27007 - DNA, 2133 bp, Homo sapiens
  source 1..2133: mol_type = unassigned DNA
gagtcactgccgggctcggcgtgagtcgctgcggggctgacggggtggcagtgcggcgggttacggcctggtcagaatttacctcctattcgaaatgggaattttaggaaaaagaagaaaggcaaagctaaagagtcttccaaaaaaaccagagaggaaaacacaaaaaacaggataaaatcttatgattatgaggcatgggcaaaacttgatgtggaccgtatccttgatgagcttgacaaagacgatagtacccatgagtctctgtctcaagaatcagagtcggaagaagatgggattcatgtagattcacaaaaggctcttgttttaaaagaaaagggcaataaatacttcaaacaaggaaaatatgatgaagcaattgactgctacacaaaaggcatggatgccgatccatataatcccgtgttgccaacgaacagagcgtcagcatattttagactgaaaaaatttgctgttgctgagtctgattgtaatttagcagttgccttgaatagaagttatacaaaggcttattccagacgaggtgctgctcgatttgctttgcaaaaattagaagaggccaaaaaagattatgaaagagtattagaactagaaccaaataactttgaagcaacaaatgaactcaggaaaatcagtcaggctttagcatccaaagaaaactcatatccaaaggaagctgacatagtgattaagtcaacagaaggagagcgaaagcaaattgaagcacaacagaataagcagcaggccatttcagagaaagatcgggggaatggatttttcaaagaggggaaatatgaaagagcaattgaatgctatactcgagggatagcagcagatggtgctaatgcccttcttccagctaacagagctatggcctatctgaagattcagaaatatgaagaagctgaaaaagactgcacacaagccattttattagatggctcatattctaaagcttttgccagaagaggaactgcaagaacatttttgggaaagctaaatgaggcaaaacaagattttgaaactgttttacttctggaacctggaaataagcaagcagtaactgaactctccaaaattaaaaaggaattaattgagaaaggacactgggatgatgtctttcttgattccacacaaagacaaaatgtggtaaaacccattgataatccaccgcatcctggatcaactaaaccactcaagaaggttattattgaagaaactggtaatttgatacagactattgatgtgccagatagcactactgctgctgctccagagaataatcctattaatctagcaaatgtaatagcagccacaggcaccacaagtaagaagaattcaagccaagatgacctttttcccacaagtgatactccaagagcaaaagtattgaaaatagaagaagtcagtgatacttcatccctgcaacctcaagccagtttgaagcaggatgtatgtcagtcttacagcgagaaaatgcccatagagatagaacaaaaacctgctcagtttgccacaactgttcttcctccaattcctgcaaactcgttccagctcgaatctgatttcagacaattgaaaagttctccagatatgttgtatcagtatttaaagcaaattgaaccatctttgtatcctaagttgtttcagaaaaatctggatccagatgtattcaaccagatcgttaaaattctgcatgacttttacattgagaaagaaaagccattactcatctttgaaatcttacaaagactttctgaactaaaaaggtttgatatggcagtgatgtttatgtcagaaacagagaaaaagattgcacgtgcattatttaatcacatagacaagtcaggattgaaggatagttctgtcgaagaactcaagaaaagatacggtggttgatttccatttttgctgaaataattgtttttgactttcatatgtaaattttttctactgaaagtgttttgctttttaagaaaatgaaattatatagcaggaaaggactatctttgaacataagttaattaactataaggtgaattgtgatttaactagtgagaattgtattcaagtgaactctgtttttctgaaaataaaaatataaacaatgag

SEQ ID NO: 27008 - DNA, 7492 bp, Homo sapiens
  source 1..7492: mol_type = unassigned DNA
aattgagctggagaggaggcagcgtgagagcagaaacttcagacgccgctgatccgggaggagctggggtgagccgcggcggccgtctctcccacccgcagcagcatcctctctgcccttctctgccaccccggggagagccgggagctgcctctttacagcttccacgagccaggggtgcaggcagctgcccccaggaagtttgggcttctgcgtagtttaggggtgcctgcgagcgccccagagggcgaggggccgagggcgatgttgggcgccgcgcggggctgggggcgcccagaagacgtgcgagtgtccgcggtcctgctgctgtctccagtaccctccgcatcccccaagtgatgggaacaagggcccgcccaggcagccgctgtcgccgcaccgccccctcgctcgctctctgcgcgcggagtcacccagtcacactcccggcaccccgagcccttcctccggagctgctgcttctactttggctgctatcgccgccgccgcgggtggcccgctgctgactgggctcgccgggagacggagaagcactttttggccctccctcagcagctctcacaccccaactttgccgccgccgccgcgcctgccctcgcagcggcgctcggccgcacattgtgggggcgcacgccgggaggctccgcaagaccgtggaggcaggaaacggcactactgcgcttctgcctcggctctttgttgttcgctttggatggttcttgaaagtgtctgagcctcctcggaaatcctggggccggagaagacaaaccttggaattcttcctctgcaaaagtctctgagatactgacaagcgtccggaaaggtcgacgagtaattgccctgaaaactcttggctaattgacccacgttgcttatattaagcctttgtgtgtggtgtgtggcttcatacatttggggaccctatttccactccctcctcttggcatgagactgtatacaggatccacccgaggacaatgattgcggagcccgctcacttttacctgtttggattaatatgtctctgttcaggctcccgtcttcgtcaggaagattttccacctcgcattgttgaacacccttcagacctgattgtctcaaaaggagaacctgcaactttgaactgcaaagctgaaggccgccccacacccactattgaatggtacaaagggggagagagagtggagacagacaaagatgaccctcgctcacaccgaatgttgctgccgagtggatctttatttttcttacgtatagtacatggacggaaaagtagacctgatgaaggagtctatgtctgtgtagcaaggaattaccttggagaggctgtgagccacaatgcatcgctggaagtagccatacttcgggatgacttcagacaaaacccttcggatgtcatggttgcagtaggagagcctgcagtaatggaatgccaacctccacgaggccatcctgagcccaccatttcatggaagaaagatggctctccactggatgataaagatgaaagaataactatacgaggaggaaagctcatgatcacttacacccgtaaaagtgacgctggcaaatatgtttgtgttggtaccaatatggttggggaacgtgagagtgaagtagccgagctgactgtcttagagagaccatcatttgtgaagagacccagtaacttggcagtaactgtggatgacagtgcagaatttaaatgtgaggcccgaggtgaccctgtacctacagtacgatggaggaaagatgatggagagctgcccaaatccagatatgaaatccgagatgatcataccttgaaaattaggaaggtgacagctggtgacatgggttcatacacttgtgttgcagaaaatatggtgggcaaagctgaagcatctgctactctgactgttcaagctccttcagaacctccacattttgttgtgaaaccccgtgaccaggttgttgctttgggacggactgtaacttttcagtgtgaagcaaccggaaatcctcaaccagctattttctggaggagagaagggagtcagaatctacttttctcatatcaaccaccacagtcatccagccgattttcagtctcccagactggcgacctcacaattactaatgtccagcgatctgatgttggttattacatctgccagactttaaatgttgctggaagcatcatcacaaaggcatatttggaagttacagatgtgattgcagatcggcctcccccagttattcgacaaggtcctgtgaatcagactgtagccgtggatggcactttcgtcctcagctgtgtggccacaggcagtccagtgcccaccattctgtggagaaaggatggagtcctcgtttcaacccaagactctcgaatcaaacagttggagaatggagtactgcagatccgatatgctaagctgggtgatactggtcggtacacctgcattgcatcaacccccagtggtgaagcaacatggagtgcttacattgaagttcaagaatttggagttccagttcagcctccaagacctactgacccaaatttaatccctagtgccccatcaaaacctgaagtgacagatgtcagcagaaatacagtcacattatcgtggcaaccaaatttgaattcaggagcaactccaacatcttatattatagaagccttcagccatgcatctggtagcagctggcagaccgtagcagagaatgtgaaaacagaaacatctgccattaaaggactcaaacctaatgcaatttaccttttccttgtgagggcagctaatgcatatggaattagtgatccaagccaaatatcagatccagtgaaaacacaagatgtcctaccaacaagtcagggggtggaccacaagcaggtccagagagagctgggaaatgctgttctgcacctccacaaccccaccgtcctttcttcctcttccatcgaagtgcactggacagtagatcaacagtctcagtatatacaaggatataaaattctctatcggccatctggagccaaccacggagaatcagactggttagtttttgaagtgaggacgccagccaaaaacagtgtggtaatccctgatctcagaaagggagtcaactatgaaattaaggctcgccctttttttaatgaatttcaaggagcagatagtgaaatcaagtttgccaaaaccctggaagaagcacccagtgccccaccccaaggtgtaactgtatccaagaatgatggaaacggaactgcaattctagttagttggcagccacctccagaagacactcaaaatggaatggtccaagagtataaggtttggtgtctgggcaatgaaactcgataccacatcaacaaaacagtggatggttccaccttttccgtggtcattccctttcttgttcctggaatccgatacagtgtggaagtggcagccagcactggggctgggtctggggtaaagagtgagcctcagttcatccagctggatgcccatggaaaccctgtgtcacctgaggaccaagtcagcctcgctcagcagatttcagatgtggtgaagcagccggccttcatagcaggtattggagcagcctgttggatcatcctcatggtcttcagcatctggctttatcgacaccgcaagaagagaaacggacttactagtacctacgcgggtatcagaaaagtaacttaccagagaggaggcgaagctgtcagcagtggagggaggcctggacttctcaacatcagtgaacctgccgcgcagccatggctggcagacacgtggcctaatactggcaacaaccacaatgactgctccatcagctgctgcacggcaggcaatggaaacagcgacagcaacctcactacctacagtcgcccagctgattgtatagcaaattataacaaccaactggataacaaacaaacaaatctgatgctccctgagtcaactgtttatggtgatgtggaccttagtaacaaaatcaatgagatgaaaaccttcaatagcccaaatctgaaggatgggcgttttgtcaatccatcagggcagcctactccttacgccaccactcagctcatccagtcaaacctcagcaacaacatgaacaatggcagcggggactctggcgagaagcactggaaaccactgggacagcagaaacaagaagtggcaccagttcagtacaacatcgtggagcaaaacaagctgaacaaagattatcgagcaaatgacacagttcctccaactatcccatacaaccaatcatacgaccagaacacaggaggatcctacaacagctcagaccggggcagtagtacatctgggagtcaggggcacaagaaaggggcaagaacacccaaggtaccaaaacagggtggcatgaactgggcagacctgcttcctcctcccccagcacatcctcctccacacagcaatagcgaagagtacaacatttctgtagatgaaagctatgaccaagaaatgccatgtcccgtgccaccagcaaggatgtatttgcaacaagatgaattagaagaggaggaagatgaacgaggccccactccccctgttcggggagcagcttcttctccagctgccgtgtcctatagccatcagtccactgccactctgactccctccccacaggaagaactccagcccatgttacaggattgtccagaggagactggccacatgcagcaccagcccgacaggagacggcagcctgtgagtcctcctccaccaccacggccgatctcccctccacatacctatggctacatttcaggacccctggtctcagatatggatacggatgcgccagaagaggaagaagacgaagccgacatggaggtagccaagatgcaaaccagaaggcttttgttacgtgggcttgagcagacacctgcctccagtgttggggacctggagagctctgtcacggggtccatgatcaacggctggggctcagcctcagaggaggacaacatttccagcggacgctccagtgttagttcttcggacggctcctttttcactgatgctgactttgcccaggcagtcgcagcagcggcagagtatgctggtctgaaagtagcacgacggcaaatgcaggatgctgctggccgtcgacattttcatgcgtctcagtgccctaggcccacaagtcccgtgtctacagacagcaacatgagtgccgccgtaatgcagaaaaccagaccagccaagaaactgaaacaccagccaggacatctgcgcagagaaacctacacagatgatcttccaccacctcctgtgccgccacctgctataaagtcacctactgcccaatccaagacacagctggaagtacgacctgtagtggtgccaaaactcccttctatggatgcaagaacagacagatcatcagacagaaaaggaagcagttacaaggggagagaagtgttggatggaagacaggttgttgacatgcgaacaaatccaggtgatcccagagaagcacaggaacagcaaaatgacgggaaaggacgtggaaacaaggcagcaaaacgagaccttccaccagcaaagactcatctcatccaagaggatattctaccttattgtagacctacttttccaacatcaaataatcccagagatcccagttcctcaagctcaatgtcatcaagaggatcaggaagcagacaaagagaacaagcaaatgtaggtcgaagaaatattgcagaaatgcaggtacttggaggatatgaaagaggagaagataataatgaagaattagaggaaactgaaagctgaagacaaccaagaggcttatgagatctaatgtgaaaatcatcactcaagatgcctcctgtcagatgacacatgacgccagataaaatgttcagtgcaatcagagtgtacaaattgtcgtttttattcctcttattgggatatcattttaaaaactttattgggtttttattgttgttgtttgatccctaaccctacaaagagccttcctattcccctcgctgttggagcaaaccattataccttacttccagcaagcaaagtgctttgacttcttgcttcagtcatcagccagcaagagggaacaaaactgttcttttgcattttgccgctgagatatggcattgcactgcttatatgccaagctaatttatagcaagatattgatcaaatatagaaagttgatattcaacctcacaagggctctcaaagtataatctttctatagccaactgctaatgcaaattaaaacatatttcattttaacatgatttcaaaatcagtttttcatactaccctttgctggaagaaactaaaaatatagcaaatgcagaaccacaaacaattcgaatggggtagaaacattgtaaatatttactctttgcaaaccctggtggtattttattttggcttcatttcaatcattgaagtatattcttattggaaatgtacttttggataagtagggctaagccagttggatctctggttgtctagtcattgtcataagtaaacctagtaaaaccttgttctatttttcaatcatcaaaaagtaattataaatacgtattacaaacaagtggatgtttttaatgaccaattgagtaagaacatccctgtcttaactggcctaaatttcttctggtagtgtcagttcaactttcagaagtgccacttaaggaagtttgatttttgtttttgtaatgcactgtttttaatctctctctctttttttttttttttttggttttaaaagcacaatcactaaactttatttgtaaaccattgtaactattaaccttttttgtcttattgaaaaaaaaaatgttgagaagcgtttttaacctgttttgttaatgctctatgtttgtatttggaatatttgaataatgacagatggtgaagtaacatgcatactttattgtgggccatgaaccaaatggttcttacttttcctggacttaaagaaaaaaagaggtttaagtttgttgtggccaatgtcgaaacctacaagatttccttaaaatctctaatagaggcattacttgctttcaattgacaaatgatgccctctgactagtagatttctatgatccttttttgtcattttatgaatatcattgattttataattggtgctatttgaagaaaaaaatgtacatttattcatagatagataagtatcaggtctgaccccagtggaaaacaaagccaaacaaaactgaaccacaaaaaaaaaggctggtgttcaccaaaaccaaacttgttcatttagataatttgaaaaagttccatagaaaaggcgtgcagtactaagggaacaatccatgtgattaatgttttcattatgttcatgtaagaagccccttatttttagccataattttgcatactgaaaatccaataatcagaaaagtaattttgtcacattatttattaaaaatgttctcaaatac

SEQ ID NO: 27009 - DNA, 4965 bp, Homo sapiens
  source 1..4965: mol_type = unassigned DNA
atgaaatggaaacatgttccttttttggtcatgatatcactcctcagcttatccccaaatcacctgtttctggcccagcttattccagaccctgaagatgtagagagggggaacgaccacgggacgccaatccccacctctgataacgatgacaattcgctgggctatacaggctcccgtcttcgtcaggaagattttccacctcgcattgttgaacacccttcagacctgattgtctcaaaaggagaacctgcaactttgaactgcaaagctgaaggccgccccacacccactattgaatggtacaaagggggagagagagtggagacagacaaagatgaccctcgctcacaccgaatgttgctgccgagtggatctttatttttcttacgtatagtacatggacggaaaagtagacctgatgaaggagtctatgtctgtgtagcaaggaattaccttggagaggctgtgagccacaatgcatcgctggaagtagccatacttcgggatgacttcagacaaaacccttcggatgtcatggttgcagtaggagagcctgcagtaatggaatgccaacctccacgaggccatcctgagcccaccatttcatggaagaaagatggctctccactggatgataaagatgaaagaataactatacgaggaggaaagctcatgatcacttacacccgtaaaagtgacgctggcaaatatgtttgtgttggtaccaatatggttggggaacgtgagagtgaagtagccgagctgactgtcttagagagaccatcatttgtgaagagacccagtaacttggcagtaactgtggatgacagtgcagaatttaaatgtgaggcccgaggtgaccctgtacctacagtacgatggaggaaagatgatggagagctgcccaaatccagatatgaaatccgagatgatcataccttgaaaattaggaaggtgacagctggtgacatgggttcatacacttgtgttgcagaaaatatggtgggcaaagctgaagcatctgctactctgactgttcaagaacctccacattttgttgtgaaaccccgtgaccaggttgttgctttgggacggactgtaacttttcagtgtgaagcaaccggaaatcctcaaccagctattttctggaggagagaagggagtcagaatctacttttctcatatcaaccaccacagtcatccagccgattttcagtctcccagactggcgacctcacaattactaatgtccagcgatctgatgttggttattacatctgccagactttaaatgttgctggaagcatcatcacaaaggcatatttggaagttacagatgtgattgcagatcggcctcccccagttattcgacaaggtcctgtgaatcagactgtagccgtggatggcactttcgtcctcagctgtgtggccacaggcagtccagtgcccaccattctgtggagaaaggatggagtcctcgtttcaacccaagactctcgaatcaaacagttggagaatggagtactgcagatccgatatgctaagctgggtgatactggtcggtacacctgcattgcatcaacccccagtggtgaagcaacatggagtgcttacattgaagttcaaggtaaagtaaatgaatttggagttccagttcagcctccaagacctactgacccaaatttaatccctagtgccccatcaaaacctgaagtgacagatgtcagcagaaatacagtcacattatcgtggcaaccaaatttgaattcaggagcaactccaacatcttatattatagaagccttcagccatgcatctggtagcagctggcagaccgtagcagagaatgtgaaaacagaaacatctgccattaaaggactcaaacctaatgcaatttaccttttccttgtgagggcagctaatgcatatggaattagtgatccaagccaaatatcagatccagtgaaaacacaagatgtcctaccaacaagtcagggggtggaccacaagcaggtccagagagagctgggaaatgctgttctgcacctccacaaccccaccgtcctttcttcctcttccatcgaagtgcactggacagtagatcaacagtctcagtatatacaaggatataaaattctctatcggccatctggagccaaccacggagaatcagactggttagtttttgaagtgaggacgccagccaaaaacagtgtggtaatccctgatctcagaaagggagtcaactatgaaattaaggctcgccctttttttaatgaatttcaaggagcagatagtgaaatcaagtttgccaaaaccctggaagaagcacccagtgccccaccccaaggtgtaactgtatccaagaatgatggaaacggaactgcaattctagttagttggcagccacctccagaagacactcaaaatggaatggtccaagagtataaggtttggtgtctgggcaatgaaactcgataccacatcaacaaaacagtggatggttccaccttttccgtggtcattccctttcttgttcctggaatccgatacagtgtggaagtggcagccagcactggggctgggtctggggtaaagagtgagcctcagttcatccagctggatgcccatggaaaccctgtgtcacctgaggaccaagtcagcctcgctcagcagatttcagatgtggtgaagcagccggccttcatagcaggtattggagcagcctgttggatcatcctcatggtcttcagcatctggctttatcgacaccgcaagaagagaaacggacttactagtacctacgcgggtatcagaaaagtcccgtcttttaccttcacaccaacagtaacttaccagagaggaggcgaagctgtcagcagtggagggaggcctggacttctcaacatcagtgaacctgccgcgcagccatggctggcagacacgtggcctaatactggcaacaaccacaatgactgctccatcagctgctgcacggcaggcaatggaaacagcgacagcaacctcactacctacagtcgcccagctgattgtatagcaaattataacaaccaactggataacaaacaaacaaatctgatgctccctgagtcaactgtttatggtgatgtggaccttagtaacaaaatcaatgagatgaaaaccttcaatagcccaaatctgaaggatgggcgttttgtcaatccatcagggcagcctactccttacgccaccactcagctcatccagtcaaacctcagcaacaacatgaacaatggcagcggggactctggcgagaagcactggaaaccactgggacagcagaaacaagaagtggcaccagttcagtacaacatcgtggagcaaaacaagctgaacaaagattatcgagcaaatgacacagttcctccaactatcccatacaaccaatcatacgaccagaacacaggaggatcctacaacagctcagaccggggcagtagtacatctgggagtcaggggcacaagaaaggggcaagaacacccaaggtaccaaaacagggtggcatgaactgggcagacctgcttcctcctcccccagcacatcctcctccacacagcaatagcgaagagtacaacatttctgtagatgaaagctatgaccaagaaatgccatgtcccgtgccaccagcaaggatgtatttgcaacaagatgaattagaagaggaggaagatgaacgaggccccactccccctgttcggggagcagcttcttctccagctgccgtgtcctatagccatcagtccactgccactctgactccctccccacaggaagaactccagcccatgttacaggattgtccagaggagactggccacatgcagcaccagcccgacaggagacggcagcctgtgagtcctcctccaccaccacggccgatctcccctccacatacctatggctacatttcaggacccctggtctcagatatggatacggatgcgccagaagaggaagaagacgaagccgacatggaggtagccaagatgcaaaccagaaggcttttgttacgtgggcttgagcagacacctgcctccagtgttggggacctggagagctctgtcacggggtccatgatcaacggctggggctcagcctcagaggaggacaacatttccagcggacgctccagtgttagttcttcggacggctcctttttcactgatgctgactttgcccaggcagtcgcagcagcggcagagtatgctggtctgaaagtagcacgacggcaaatgcaggatgctgctggccgtcgacattttcatgcgtctcagtgccctaggcccacaagtcccgtgtctacagacagcaacatgagtgccgccgtaatgcagaaaaccagaccagccaagaaactgaaacaccagccaggacatctgcgcagagaaacctacacagatgatcttccaccacctcctgtgccgccacctgctataaagtcacctactgcccaatccaagacacagctggaagtacgacctgtagtggtgccaaaactcccttctatggatgcaagaacagacagatcatcagacagaaaaggaagcagttacaaggggagagaagtgttggatggaagacaggttgttgacatgcgaacaaatccaggtgatcccagagaagcacaggaacagcaaaatgacgggaaaggacgtggaaacaaggcagcaaaacgagaccttccaccagcaaagactcatctcatccaagaggatattctaccttattgtagacctacttttccaacatcaaataatcccagagatcccagttcctcaagctcaatgtcatcaagaggatcaggaagcagacaaagagaacaagcaaatgtaggtcgaagaaatattgcagaaatgcaggtacttggaggatatgaaagaggagaagataataatgaagaattagaggaaccttcatca

SEQ ID NO: 27010 - DNA, 7510 bp, Homo sapiens
  source 1..7510: mol_type = unassigned DNA
aattgagctggagaggaggcagcgtgagagcagaaacttcagacgccgctgatccgggaggagctggggtgagccgcggcggccgtctctcccacccgcagcagcatcctctctgcccttctctgccaccccggggagagccgggagctgcctctttacagcttccacgagccaggggtgcaggcagctgcccccaggaagtttgggcttctgcgtagtttaggggtgcctgcgagcgccccagagggcgaggggccgagggcgatgttgggcgccgcgcggggctgggggcgcccagaagacgtgcgagtgtccgcggtcctgctgctgtctccagtaccctccgcatcccccaagtgatgggaacaagggcccgcccaggcagccgctgtcgccgcaccgccccctcgctcgctctctgcgcgcggagtcacccagtcacactcccggcaccccgagcccttcctccggagctgctgcttctactttggctgctatcgccgccgccgcgggtggcccgctgctgactgggctcgccgggagacggagaagcactttttggccctccctcagcagctctcacaccccaactttgccgccgccgccgcgcctgccctcgcagcggcgctcggccgcacattgtgggggcgcacgccgggaggctccgcaagaccgtggaggcaggaaacggcactactgcgcttctgcctcggctctttgttgttcgctttggatggttcttgaaagtgtctgagcctcctcggaaatcctggggccggagaagacaaaccttggaattcttcctctgcaaaagtctctgagatactgacaagcgtccggaaaggtcgacgagtaattgccctgaaaactcttggctaattgacccacgttgcttatattaagcctttgtgtgtggtgtgtggcttcatacatttggggaccctatttccactccctcctcttggcatgagactgtatacaggatccacccgaggacaatgattgcggagcccgctcacttttacctgtttggattaatatgtctctgttcaggctcccgtcttcgtcaggaagattttccacctcgcattgttgaacacccttcagacctgattgtctcaaaaggagaacctgcaactttgaactgcaaagctgaaggccgccccacacccactattgaatggtacaaagggggagagagagtggagacagacaaagatgaccctcgctcacaccgaatgttgctgccgagtggatctttatttttcttacgtatagtacatggacggaaaagtagacctgatgaaggagtctatgtctgtgtagcaaggaattaccttggagaggctgtgagccacaatgcatcgctggaagtagccatacttcgggatgacttcagacaaaacccttcggatgtcatggttgcagtaggagagcctgcagtaatggaatgccaacctccacgaggccatcctgagcccaccatttcatggaagaaagatggctctccactggatgataaagatgaaagaataactatacgaggaggaaagctcatgatcacttacacccgtaaaagtgacgctggcaaatatgtttgtgttggtaccaatatggttggggaacgtgagagtgaagtagccgagctgactgtcttagagagaccatcatttgtgaagagacccagtaacttggcagtaactgtggatgacagtgcagaatttaaatgtgaggcccgaggtgaccctgtacctacagtacgatggaggaaagatgatggagagctgcccaaatccagatatgaaatccgagatgatcataccttgaaaattaggaaggtgacagctggtgacatgggttcatacacttgtgttgcagaaaatatggtgggcaaagctgaagcatctgctactctgactgttcaagaacctccacattttgttgtgaaaccccgtgaccaggttgttgctttgggacggactgtaacttttcagtgtgaagcaaccggaaatcctcaaccagctattttctggaggagagaagggagtcagaatctacttttctcatatcaaccaccacagtcatccagccgattttcagtctcccagactggcgacctcacaattactaatgtccagcgatctgatgttggttattacatctgccagactttaaatgttgctggaagcatcatcacaaaggcatatttggaagttacagatgtgattgcagatcggcctcccccagttattcgacaaggtcctgtgaatcagactgtagccgtggatggcactttcgtcctcagctgtgtggccacaggcagtccagtgcccaccattctgtggagaaaggatggagtcctcgtttcaacccaagactctcgaatcaaacagttggagaatggagtactgcagatccgatatgctaagctgggtgatactggtcggtacacctgcattgcatcaacccccagtggtgaagcaacatggagtgcttacattgaagttcaagaatttggagttccagttcagcctccaagacctactgacccaaatttaatccctagtgccccatcaaaacctgaagtgacagatgtcagcagaaatacagtcacattatcgtggcaaccaaatttgaattcaggagcaactccaacatcttatattatagaagccttcagccatgcatctggtagcagctggcagaccgtagcagagaatgtgaaaacagaaacatctgccattaaaggactcaaacctaatgcaatttaccttttccttgtgagggcagctaatgcatatggaattagtgatccaagccaaatatcagatccagtgaaaacacaagatgtcctaccaacaagtcagggggtggaccacaagcaggtccagagagagctgggaaatgctgttctgcacctccacaaccccaccgtcctttcttcctcttccatcgaagtgcactggacagtagatcaacagtctcagtatatacaaggatataaaattctctatcggccatctggagccaaccacggagaatcagactggttagtttttgaagtgaggacgccagccaaaaacagtgtggtaatccctgatctcagaaagggagtcaactatgaaattaaggctcgccctttttttaatgaatttcaaggagcagatagtgaaatcaagtttgccaaaaccctggaagaagcacccagtgccccaccccaaggtgtaactgtatccaagaatgatggaaacggaactgcaattctagttagttggcagccacctccagaagacactcaaaatggaatggtccaagagtataaggtttggtgtctgggcaatgaaactcgataccacatcaacaaaacagtggatggttccaccttttccgtggtcattccctttcttgttcctggaatccgatacagtgtggaagtggcagccagcactggggctgggtctggggtaaagagtgagcctcagttcatccagctggatgcccatggaaaccctgtgtcacctgaggaccaagtcagcctcgctcagcagatttcagatgtggtgaagcagccggccttcatagcaggtattggagcagcctgttggatcatcctcatggtcttcagcatctggctttatcgacaccgcaagaagagaaacggacttactagtacctacgcgggtatcagaaaagtcccgtcttttaccttcacaccaacagtaacttaccagagaggaggcgaagctgtcagcagtggagggaggcctggacttctcaacatcagtgaacctgccgcgcagccatggctggcagacacgtggcctaatactggcaacaaccacaatgactgctccatcagctgctgcacggcaggcaatggaaacagcgacagcaacctcactacctacagtcgcccagctgattgtatagcaaattataacaaccaactggataacaaacaaacaaatctgatgctccctgagtcaactgtttatggtgatgtggaccttagtaacaaaatcaatgagatgaaaaccttcaatagcccaaatctgaaggatgggcgttttgtcaatccatcagggcagcctactccttacgccaccactcagctcatccagtcaaacctcagcaacaacatgaacaatggcagcggggactctggcgagaagcactggaaaccactgggacagcagaaacaagaagtggcaccagttcagtacaacatcgtggagcaaaacaagctgaacaaagattatcgagcaaatgacacagttcctccaactatcccatacaaccaatcatacgaccagaacacaggaggatcctacaacagctcagaccggggcagtagtacatctgggagtcaggggcacaagaaaggggcaagaacacccaaggtaccaaaacagggtggcatgaactgggcagacctgcttcctcctcccccagcacatcctcctccacacagcaatagcgaagagtacaacatttctgtagatgaaagctatgaccaagaaatgccatgtcccgtgccaccagcaaggatgtatttgcaacaagatgaattagaagaggaggaagatgaacgaggccccactccccctgttcggggagcagcttcttctccagctgccgtgtcctatagccatcagtccactgccactctgactccctccccacaggaagaactccagcccatgttacaggattgtccagaggagactggccacatgcagcaccagcccgacaggagacggcagcctgtgagtcctcctccaccaccacggccgatctcccctccacatacctatggctacatttcaggacccctggtctcagatatggatacggatgcgccagaagaggaagaagacgaagccgacatggaggtagccaagatgcaaaccagaaggcttttgttacgtgggcttgagcagacacctgcctccagtgttggggacctggagagctctgtcacggggtccatgatcaacggctggggctcagcctcagaggaggacaacatttccagcggacgctccagtgttagttcttcggacggctcctttttcactgatgctgactttgcccaggcagtcgcagcagcggcagagtatgctggtctgaaagtagcacgacggcaaatgcaggatgctgctggccgtcgacattttcatgcgtctcagtgccctaggcccacaagtcccgtgtctacagacagcaacatgagtgccgccgtaatgcagaaaaccagaccagccaagaaactgaaacaccagccaggacatctgcgcagagaaacctacacagatgatcttccaccacctcctgtgccgccacctgctataaagtcacctactgcccaatccaagacacagctggaagtacgacctgtagtggtgccaaaactcccttctatggatgcaagaacagacagatcatcagacagaaaaggaagcagttacaaggggagagaagtgttggatggaagacaggttgttgacatgcgaacaaatccaggtgatcccagagaagcacaggaacagcaaaatgacgggaaaggacgtggaaacaaggcagcaaaacgagaccttccaccagcaaagactcatctcatccaagaggatattctaccttattgtagacctacttttccaacatcaaataatcccagagatcccagttcctcaagctcaatgtcatcaagaggatcaggaagcagacaaagagaacaagcaaatgtaggtcgaagaaatattgcagaaatgcaggtacttggaggatatgaaagaggagaagataataatgaagaattagaggaaactgaaagctgaagacaaccaagaggcttatgagatctaatgtgaaaatcatcactcaagatgcctcctgtcagatgacacatgacgccagataaaatgttcagtgcaatcagagtgtacaaattgtcgtttttattcctcttattgggatatcattttaaaaactttattgggtttttattgttgttgtttgatccctaaccctacaaagagccttcctattcccctcgctgttggagcaaaccattataccttacttccagcaagcaaagtgctttgacttcttgcttcagtcatcagccagcaagagggaacaaaactgttcttttgcattttgccgctgagatatggcattgcactgcttatatgccaagctaatttatagcaagatattgatcaaatatagaaagttgatattcaacctcacaagggctctcaaagtataatctttctatagccaactgctaatgcaaattaaaacatatttcattttaacatgatttcaaaatcagtttttcatactaccctttgctggaagaaactaaaaatatagcaaatgcagaaccacaaacaattcgaatggggtagaaacattgtaaatatttactctttgcaaaccctggtggtattttattttggcttcatttcaatcattgaagtatattcttattggaaatgtacttttggataagtagggctaagccagttggatctctggttgtctagtcattgtcataagtaaacctagtaaaaccttgttctatttttcaatcatcaaaaagtaattataaatacgtattacaaacaagtggatgtttttaatgaccaattgagtaagaacatccctgtcttaactggcctaaatttcttctggtagtgtcagttcaactttcagaagtgccacttaaggaagtttgatttttgtttttgtaatgcactgtttttaatctctctctctttttttttttttttttggttttaaaagcacaatcactaaactttatttgtaaaccattgtaactattaaccttttttgtcttattgaaaaaaaaaatgttgagaagcgtttttaacctgttttgttaatgctctatgtttgtatttggaatatttgaataatgacagatggtgaagtaacatgcatactttattgtgggccatgaaccaaatggttcttacttttcctggacttaaagaaaaaaagaggtttaagtttgttgtggccaatgtcgaaacctacaagatttccttaaaatctctaatagaggcattacttgctttcaattgacaaatgatgccctctgactagtagatttctatgatccttttttgtcattttatgaatatcattgattttataattggtgctatttgaagaaaaaaatgtacatttattcatagatagataagtatcaggtctgaccccagtggaaaacaaagccaaacaaaactgaaccacaaaaaaaaaggctggtgttcaccaaaaccaaacttgttcatttagataatttgaaaaagttccatagaaaaggcgtgcagtactaagggaacaatccatgtgattaatgttttcattatgttcatgtaagaagccccttatttttagccataattttgcatactgaaaatccaataatcagaaaagtaattttgtcacattatttattaaaaatgttctcaaatac

SEQ ID NO: 27011 - DNA, 6742 bp, Homo sapiens
  source 1..6742: mol_type = unassigned DNA
aaagttgcagggctgcgtctgcactacggagcctctagattgctgaaaacagtcttatggaaggataacacattgtctgtcactggctggttgtaatgcaaggaagggacaaagatgaaatggaaacatgttccttttttggtcatgatatcactcctcagcttatccccaaatcacctgtttctggcccagcttattccagaccctgaagatgtagagagggggaacgaccacgggacgccaatccccacctctgataacgatgacaattcgctgggctatacaggctcccgtcttcgtcaggaagattttccacctcgcattgttgaacacccttcagacctgattgtctcaaaaggagaacctgcaactttgaactgcaaagctgaaggccgccccacacccactattgaatggtacaaagggggagagagagtggagacagacaaagatgaccctcgctcacaccgaatgttgctgccgagtggatctttatttttcttacgtatagtacatggacggaaaagtagacctgatgaaggagtctatgtctgtgtagcaaggaattaccttggagaggctgtgagccacaatgcatcgctggaagtagccatacttcgggatgacttcagacaaaacccttcggatgtcatggttgcagtaggagagcctgcagtaatggaatgccaacctccacgaggccatcctgagcccaccatttcatggaagaaagatggctctccactggatgataaagatgaaagaataactatacgaggaggaaagctcatgatcacttacacccgtaaaagtgacgctggcaaatatgtttgtgttggtaccaatatggttggggaacgtgagagtgaagtagccgagctgactgtcttagagagaccatcatttgtgaagagacccagtaacttggcagtaactgtggatgacagtgcagaatttaaatgtgaggcccgaggtgaccctgtacctacagtacgatggaggaaagatgatggagagctgcccaaatccagatatgaaatccgagatgatcataccttgaaaattaggaaggtgacagctggtgacatgggttcatacacttgtgttgcagaaaatatggtgggcaaagctgaagcatctgctactctgactgttcaagaacctccacattttgttgtgaaaccccgtgaccaggttgttgctttgggacggactgtaacttttcagtgtgaagcaaccggaaatcctcaaccagctattttctggaggagagaagggagtcagaatctacttttctcatatcaaccaccacagtcatccagccgattttcagtctcccagactggcgacctcacaattactaatgtccagcgatctgatgttggttattacatctgccagactttaaatgttgctggaagcatcatcacaaaggcatatttggaagttacagatgtgattgcagatcggcctcccccagttattcgacaaggtcctgtgaatcagactgtagccgtggatggcactttcgtcctcagctgtgtggccacaggcagtccagtgcccaccattctgtggagaaaggatggagtcctcgtttcaacccaagactctcgaatcaaacagttggagaatggagtactgcagatccgatatgctaagctgggtgatactggtcggtacacctgcattgcatcaacccccagtggtgaagcaacatggagtgcttacattgaagttcaagaatttggagttccagttcagcctccaagacctactgacccaaatttaatccctagtgccccatcaaaacctgaagtgacagatgtcagcagaaatacagtcacattatcgtggcaaccaaatttgaattcaggagcaactccaacatcttatattatagaagccttcagccatgcatctggtagcagctggcagaccgtagcagagaatgtgaaaacagaaacatctgccattaaaggactcaaacctaatgcaatttaccttttccttgtgagggcagctaatgcatatggaattagtgatccaagccaaatatcagatccagtgaaaacacaagatgtcctaccaacaagtcagggggtggaccacaagcaggtccagagagagctgggaaatgctgttctgcacctccacaaccccaccgtcctttcttcctcttccatcgaagtgcactggacagtagatcaacagtctcagtatatacaaggatataaaattctctatcggccatctggagccaaccacggagaatcagactggttagtttttgaagtgaggacgccagccaaaaacagtgtggtaatccctgatctcagaaagggagtcaactatgaaattaaggctcgccctttttttaatgaatttcaaggagcagatagtgaaatcaagtttgccaaaaccctggaagaagcacccagtgccccaccccaaggtgtaactgtatccaagaatgatggaaacggaactgcaattctagttagttggcagccacctccagaagacactcaaaatggaatggtccaagagtataaggtttggtgtctgggcaatgaaactcgataccacatcaacaaaacagtggatggttccaccttttccgtggtcattccctttcttgttcctggaatccgatacagtgtggaagtggcagccagcactggggctgggtctggggtaaagagtgagcctcagttcatccagctggatgcccatggaaaccctgtgtcacctgaggaccaagtcagcctcgctcagcagatttcagatgtggtgaagcagccggccttcatagcaggtattggagcagcctgttggatcatcctcatggtcttcagcatctggctttatcgacaccgcaagaagagaaacggacttactagtacctacgcgggtatcagaaaagtcccgtcttttaccttcacaccaacagtaacttaccagagaggaggcgaagctgtcagcagtggagggaggcctggacttctcaacatcagtgaacctgccgcgcagccatggctggcagacacgtggcctaatactggcaacaaccacaatgactgctccatcagctgctgcacggcaggcaatggaaacagcgacagcaacctcactacctacagtcgcccagctgattgtatagcaaattataacaaccaactggataacaaacaaacaaatctgatgctccctgagtcaactgtttatggtgatgtggaccttagtaacaaaatcaatgagatgaaaaccttcaatagcccaaatctgaaggatgggcgttttgtcaatccatcagggcagcctactccttacgccaccactcagctcatccagtcaaacctcagcaacaacatgaacaatggcagcggggactctggcgagaagcactggaaaccactgggacagcagaaacaagaagtggcaccagttcagtacaacatcgtggagcaaaacaagctgaacaaagattatcgagcaaatgacacagttcctccaactatcccatacaaccaatcatacgaccagaacacaggaggatcctacaacagctcagaccggggcagtagtacatctgggagtcaggggcacaagaaaggggcaagaacacccaaggtaccaaaacagggtggcatgaactgggcagacctgcttcctcctcccccagcacatcctcctccacacagcaatagcgaagagtacaacatttctgtagatgaaagctatgaccaagaaatgccatgtcccgtgccaccagcaaggatgtatttgcaacaagatgaattagaagaggaggaagatgaacgaggccccactccccctgttcggggagcagcttcttctccagctgccgtgtcctatagccatcagtccactgccactctgactccctccccacaggaagaactccagcccatgttacaggattgtccagaggagactggccacatgcagcaccagcccgacaggagacggcagcctgtgagtcctcctccaccaccacggccgatctcccctccacatacctatggctacatttcaggacccctggtctcagatatggatacggatgcgccagaagaggaagaagacgaagccgacatggaggtagccaagatgcaaaccagaaggcttttgttacgtgggcttgagcagacacctgcctccagtgttggggacctggagagctctgtcacggggtccatgatcaacggctggggctcagcctcagaggaggacaacatttccagcggacgctccagtgttagttcttcggacggctcctttttcactgatgctgactttgcccaggcagtcgcagcagcggcagagtatgctggtctgaaagtagcacgacggcaaatgcaggatgctgctggccgtcgacattttcatgcgtctcagtgccctaggcccacaagtcccgtgtctacagacagcaacatgagtgccgccgtaatgcagaaaaccagaccagccaagaaactgaaacaccagccaggacatctgcgcagagaaacctacacagatgatcttccaccacctcctgtgccgccacctgctataaagtcacctactgcccaatccaagacacagctggaagtacgacctgtagtggtgccaaaactcccttctatggatgcaagaacagacagatcatcagacagaaaaggaagcagttacaaggggagagaagtgttggatggaagacaggttgttgacatgcgaacaaatccaggtgatcccagagaagcacaggaacagcaaaatgacgggaaaggacgtggaaacaaggcagcaaaacgagaccttccaccagcaaagactcatctcatccaagaggatattctaccttattgtagacctacttttccaacatcaaataatcccagagatcccagttcctcaagctcaatgtcatcaagaggatcaggaagcagacaaagagaacaagcaaatgtaggtcgaagaaatattgcagaaatgcaggtacttggaggatatgaaagaggagaagataataatgaagaattagaggaaactgaaagctgaagacaaccaagaggcttatgagatctaatgtgaaaatcatcactcaagatgcctcctgtcagatgacacatgacgccagataaaatgttcagtgcaatcagagtgtacaaattgtcgtttttattcctcttattgggatatcattttaaaaactttattgggtttttattgttgttgtttgatccctaaccctacaaagagccttcctattcccctcgctgttggagcaaaccattataccttacttccagcaagcaaagtgctttgacttcttgcttcagtcatcagccagcaagagggaacaaaactgttcttttgcattttgccgctgagatatggcattgcactgcttatatgccaagctaatttatagcaagatattgatcaaatatagaaagttgatattcaacctcacaagggctctcaaagtataatctttctatagccaactgctaatgcaaattaaaacatatttcattttaacatgatttcaaaatcagtttttcatactaccctttgctggaagaaactaaaaatatagcaaatgcagaaccacaaacaattcgaatggggtagaaacattgtaaatatttactctttgcaaaccctggtggtattttattttggcttcatttcaatcattgaagtatattcttattggaaatgtacttttggataagtagggctaagccagttggatctctggttgtctagtcattgtcataagtaaacctagtaaaaccttgttctatttttcaatcatcaaaaagtaattataaatacgtattacaaacaagtggatgtttttaatgaccaattgagtaagaacatccctgtcttaactggcctaaatttcttctggtagtgtcagttcaactttcagaagtgccacttaaggaagtttgatttttgtttttgtaatgcactgtttttaatctctctctctttttttttttttttttggttttaaaagcacaatcactaaactttatttgtaaaccattgtaactattaaccttttttgtcttattgaaaaaaaaaatgttgagaagcgtttttaacctgttttgttaatgctctatgtttgtatttggaatatttgaataatgacagatggtgaagtaacatgcatactttattgtgggccatgaaccaaatggttcttacttttcctggacttaaagaaaaaaagaggtttaagtttgttgtggccaatgtcgaaacctacaagatttccttaaaatctctaatagaggcattacttgctttcaattgacaaatgatgccctctgactagtagatttctatgatccttttttgtcattttatgaatatcattgattttataattggtgctatttgaagaaaaaaatgtacatttattcatagatagataagtatcaggtctgaccccagtggaaaacaaagccaaacaaaactgaaccacaaaaaaaaaggctggtgttcaccaaaaccaaacttgttcatttagataatttgaaaaagttccatagaaaaggcgtgcagtactaagggaacaatccatgtgattaatgttttcattatgttcatgtaagaagccccttatttttagccataattttgcatactgaaaatccaataatcagaaaagtaattttgtcacattatttattaaaaatgttctcaaata

SEQ ID NO: 27012 - DNA, 4841 bp, Homo sapiens
  source 1..4841: mol_type = unassigned DNA
gtgtgtggcttcatacatttggggaccctatttccactccctcctcttggcatgagactgtatacaggatccacccgaggacaatgattgcggagcccgctcacttttacctgtttggattaatatgtctctgttcaggctcccgtcttcgtcaggaagattttccacctcgcattgttgaacacccttcagacctgattgtctcaaaaggagaacctgcaactttgaactgcaaagctgaaggccgccccacacccactattgaatggtacaaagggggagagagagtggagacagacaaagatgaccctcgctcacaccgaatgttgctgccgagtggatctttatttttcttacgtatagtacatggacggaaaagtagacctgatgaaggagtctatgtctgtgtagcaaggaattaccttggagaggctgtgagccacaatgcatcgctggaagtagccatacttcgggatgacttcagacaaaacccttcggatgtcatggttgcagtaggagagcctgcagtaatggaatgccaacctccacgaggccatcctgagcccaccatttcatggaagaaagatggctctccactggatgataaagatgaaagaataactatacgaggaggaaagctcatgatcacttacacccgtaaaagtgacgctggcaaatatgtttgtgttggtaccaatatggttggggaacgtgagagtgaagtagccgagctgactgtcttagagagaccatcatttgtgaagagacccagtaacttggcagtaactgtggatgacagtgcagaatttaaatgtgaggcccgaggtgaccctgtacctacagtacgatggaggaaagatgatggagagctgcccaaatccagatatgaaatccgagatgatcataccttgaaaattaggaaggtgacagctggtgacatgggttcatacacttgtgttgcagaaaatatggtgggcaaagctgaagcatctgctactctgactgttcaagttgggtctgaacctccacattttgttgtgaaaccccgtgaccaggttgttgctttgggacggactgtaacttttcagtgtgaagcaaccggaaatcctcaaccagctattttctggaggagagaagggagtcagaatctacttttctcatatcaaccaccacagtcatccagccgattttcagtctcccagactggcgacctcacaattactaatgtccagcgatctgatgttggttattacatctgccagactttaaatgttgctggaagcatcatcacaaaggcatatttggaagttacagatgtgattgcagatcggcctcccccagttattcgacaaggtcctgtgaatcagactgtagccgtggatggcactttcgtcctcagctgtgtggccacaggcagtccagtgcccaccattctgtggagaaaggatggagtcctcgtttcaacccaagactctcgaatcaaacagttggagaatggagtactgcagatccgatatgctaagctgggtgatactggtcggtacacctgcattgcatcaacccccagtggtgaagcaacatggagtgcttacattgaagttcaagaatttggagttccagttcagcctccaagacctactgacccaaatttaatccctagtgccccatcaaaacctgaagtgacagatgtcagcagaaatacagtcacattatcgtggcaaccaaatttgaattcaggagcaactccaacatcttatattatagaagccttcagccatgcatctggtagcagctggcagaccgtagcagagaatgtgaaaacagaaacatctgccattaaaggactcaaacctaatgcaatttaccttttccttgtgagggcagctaatgcatatggaattagtgatccaagccaaatatcagatccagtgaaaacacaagatgtcctaccaacaagtcagggggtggaccacaagcaggtccagagagagctgggaaatgctgttctgcacctccacaaccccaccgtcctttcttcctcttccatcgaagtgcactggacagtagatcaacagtctcagtatatacaaggatataaaattctctatcggccatctggagccaaccacggagaatcagactggttagtttttgaagtgaggacgccagccaaaaacagtgtggtaatccctgatctcagaaagggagtcaactatgaaattaaggctcgccctttttttaatgaatttcaaggagcagatagtgaaatcaagtttgccaaaaccctggaagaagcacccagtgccccaccccaaggtgtaactgtatccaagaatgatggaaacggaactgcaattctagttagttggcagccacctccagaagacactcaaaatggaatggtccaagagtataaggtttggtgtctgggcaatgaaactcgataccacatcaacaaaacagtggatggttccaccttttccgtggtcattccctttcttgttcctggaatccgatacagtgtggaagtggcagccagcactggggctgggtctggggtaaagagtgagcctcagttcatccagctggatgcccatggaaaccctgtgtcacctgaggaccaagtcagcctcgctcagcagatttcagatgtggtgaagcagccggccttcatagcaggtattggagcagcctgttggatcatcctcatggtcttcagcatctggctttatcgacaccgcaagaagagaaacggacttactagtacctacgcgggtatcagaaaagtaacttaccagagaggaggcgaagctgtcagcagtggagggaggcctggacttctcaacatcagtgaacctgccgcgcagccatggctggcagacacgtggcctaatactggcaacaaccacaatgactgctccatcagctgctgcacggcaggcaatggaaacagcgacagcaacctcactacctacagtcgcccagggcagcctactccttacgccaccactcagctcatccagtcaaacctcagcaacaacatgaacaatggcagcggggactctggcgagaagcactggaaaccactgggacagcagaaacaagaagtggcaccagttcagtacaacatcgtggagcaaaacaagctgaacaaagattatcgagcaaatgacacagttcctccaactatcccatacaaccaatcatacgaccagaacacaggaggatcctacaacagctcagaccggggcagtagtacatctgggagtcaggggcacaagaaaggggcaagaacacccaaggtaccaaaacagggtggcatgaactgggcagacctgcttcctcctcccccagcacatcctcctccacacagcaatagcgaagagtacaacatttctgtagatgaaagctatgaccaagaaatgccatgtcccgtgccaccagcaaggatgtatttgcaacaagatgaattagaagaggaggaagatgaacgaggccccactccccctgttcggggagcagcttcttctccagctgccgtgtcctatagccatcagtccactgccactctgactccctccccacaggaagaactccagcccatgttacaggattgtccagaggagactggccacatgcagcaccagcccgacaggagacggcagcctgtgagtcctcctccaccaccacggccgatctcccctccacatacctatggctacatttcaggacccctggtctcagatatggatacggatgcgccagaagaggaagaagacgaagccgacatggaggtagccaagatgcaaaccagaaggcttttgttacgtgggcttgagcagacacctgcctccagtgttggggacctggagagctctgtcacggggtccatgatcaacggctggggctcagcctcagaggaggacaacatttccagcggacgctccagtgttagttcttcggacggctcctttttcactgatgctgactttgcccaggcagtcgcagcagcggcagagtatgctggtctgaaagtagcacgacggcaaatgcaggatgctgctggccgtcgacattttcatgcgtctcagtgccctaggcccacaagtcccgtgtctacagacagcaacatgagtgccgccgtaatgcagaaaaccagaccagccaagaaactgaaacaccagccaggacatctgcgcagagaaacctacacagatgatcttccaccacctcctgtgccgccacctgctataaagtcacctactgcccaatccaagacacagctggaagtacgacctgtagtggtgccaaaactcccttctatggatgcaagaacagacagatcatcagacagaaaaggaagcagttacaaggggagagaagtgttggatggaagacaggttgttgacatgcgaacaaatccaggtgatcccagagaagcacaggaacagcaaaatgacgggaaaggacgtggaaacaaggcagcaaaacgagaccttccaccagcaaagactcatctcatccaagaggatattctaccttattgtagacctacttttccaacatcaaataatcccagagatcccagttcctcaagctcaatgtcatcaagaggatcaggaagcagacaaagagaacaagcaaatgtaggtcgaagaaatattgcagaaatgcaggtacttggaggatatgaaagaggagaagataataatgaagaattagaggaaactgaaagctgaagacaaccaagaggcttatgagatctaatgtgaaaatcatcactcaagatgcctcctgtcagatgacacatgacgccagataaaatgttcagtgcaatcaga

SEQ ID NO: 27013 - DNA, 5600 bp, Homo sapiens
  source 1..5600: mol_type = unassigned DNA
tcccggcaccccgagcccttcctccggagctgctgcttctactttggctgctatcgccgccgccgcgggtggcccgctgctgactgggctcgccgggagacggagaagcactttttggccctccctcagcagctctcacaccccaactttgccgccgccgccgcgcctgccctcgcagcggcgctcggccgcacattgtgggggcgcacgccgggaggctccgcaagaccgtggaggcaggaaacggcactactgcgcttctgcctcggctctttgttgttcgctttggatggttcttgaaagtgtctgagcctcctcggaaatcctggggccggagaagacaaaccttggaattcttcctctgcaaaagtctctgagatactgacaagcgtccggaaaggtcgacgagtaattgccctgaaaactcttggctaattgacccacgttgcttatattaagcctttgtgtgtggtgtgtggcttcatacatttggggaccctatttccactccctcctcttggcatgagactgtatacaggatccacccgaggacaatgattgcggagcccgctcacttttacctgtttggattaatatgtctctgttcaggctcccgtcttcgtcaggaagattttccacctcgcattgttgaacacccttcagacctgattgtctcaaaaggagaacctgcaactttgaactgcaaagctgaaggccgccccacacccactattgaatggtacaaagggggagagagagtggagacagacaaagatgaccctcgctcacaccgaatgttgctgccgagtggatctttatttttcttacgtatagtacatggacggaaaagtagacctgatgaaggagtctatgtctgtgtagcaaggaattaccttggagaggctgtgagccacaatgcatcgctggaagtagccatacttcgggatgacttcagacaaaacccttcggatgtcatggttgcagtaggagagcctgcagtaatggaatgccaacctccacgaggccatcctgagcccaccatttcatggaagaaagatggctctccactggatgataaagatgaaagaataactatacgaggaggaaagctcatgatcacttacacccgtaaaagtgacgctggcaaatatgtttgtgttggtaccaatatggttggggaacgtgagagtgaagtagccgagctgactgtcttagagagaccatcatttgtgaagagacccagtaacttggcagtaactgtggatgacagtgcagaatttaaatgtgaggcccgaggtgaccctgtacctacagtacgatggaggaaagatgatggagagctgcccaaatccagatatgaaatccgagatgatcataccttgaaaattaggaaggtgacagctggtgacatgggttcatacacttgtgttgcagaaaatatggtgggcaaagctgaagcatctgctactctgactgttcaagttgggtctgaacctccacattttgttgtgaaaccccgtgaccaggttgttgctttgggacggactgtaacttttcagtgtgaagcaaccggaaatcctcaaccagctattttctggaggagagaagggagtcagaatctacttttctcatatcaaccaccacagtcatccagccgattttcagtctcccagactggcgacctcacaattactaatgtccagcgatctgatgttggttattacatctgccagactttaaatgttgctggaagcatcatcacaaaggcatatttggaagttacagatgtgattgcagatcggcctcccccagttattcgacaaggtcctgtgaatcagactgtagccgtggatggcactttcgtcctcagctgtgtggccacaggcagtccagtgcccaccattctgtggagaaaggatggagtcctcgtttcaacccaagactctcgaatcaaacagttggagaatggagtactgcagatccgatatgctaagctgggtgatactggtcggtacacctgcattgcatcaacccccagtggtgaagcaacatggagtgcttacattgaagttcaagaatttggagttccagttcagcctccaagacctactgacccaaatttaatccctagtgccccatcaaaacctgaagtgacagatgtcagcagaaatacagtcacattatcgtggcaaccaaatttgaattcaggagcaactccaacatcttatattatagaagccttcagccatgcatctggtagcagctggcagaccgtagcagagaatgtgaaaacagaaacatctgccattaaaggactcaaacctaatgcaatttaccttttccttgtgagggcagctaatgcatatggaattagtgatccaagccaaatatcagatccagtgaaaacacaagatgtcctaccaacaagtcagggggtggaccacaagcaggtccagagagagctgggaaatgctgttctgcacctccacaaccccaccgtcctttcttcctcttccatcgaagtgcactggacagtagatcaacagtctcagtatatacaaggatataaaattctctatcggccatctggagccaaccacggagaatcagactggttagtttttgaagtgaggacgccagccaaaaacagtgtggtaatccctgatctcagaaagggagtcaactatgaaattaaggctcgccctttttttaatgaatttcaaggagcagatagtgaaatcaagtttgccaaaaccctggaagaagcacccagtgccccaccccaaggtgtaactgtatccaagaatgatggaaacggaactgcaattctagttagttggcagccacctccagaagacactcaaaatggaatggtccaagagtataaggtttggtgtctgggcaatgaaactcgataccacatcaacaaaacagtggatggttccaccttttccgtggtcattccctttcttgttcctggaatccgatacagtgtggaagtggcagccagcactggggctgggtctggggtaaagagtgagcctcagttcatccagctggatgcccatggaaaccctgtgtcacctgaggaccaagtcagcctcgctcagcagatttcagatgtggtgaagcagccggccttcatagcaggtattggagcagcctgttggatcatcctcatggtcttcagcatctggctttatcgacaccgcaagaagagaaacggacttactagtacctacgcgggtatcagaaaagtaacttaccagagaggaggcgaagctgtcagcagtggagggaggcctggacttctcaacatcagtgaacctgccgcgcagccatggctggcagacacgtggcctaatactggcaacaaccacaatgactgctccatcagctgctgcacggcaggcaatggaaacagcgacagcaacctcactacctacagtcgcccagctgattgtatagcaaattataacaaccaactggataacaaacaaacaaatctgatgctccctgagtcaactgtttatggtgatgtggaccttagtaacaaaatcaatgagatgaaaaccttcaatagcccaaatctgaaggatgggcgttttgtcaatccatcagggcagcctactccttacgccaccactcagctcatccagtcaaacctcagcaacaacatgaacaatggcagcggggactctggcgagaagcactggaaaccactgggacagcagaaacaagaagtggcaccagttcagtacaacatcgtggagcaaaacaagctgaacaaagattatcgagcaaatgacacagttcctccaactatcccatacaaccaatcatacgaccagaacacaggaggatcctacaacagctcagaccggggcagtagtacatctgggagtcaggggcacaagaaaggggcaagaacacccaaggtaccaaaacagggtggcatgaactgggcagacctgcttcctcctcccccagcacatcctcctccacacagcaatagcgaagagtacaacatttctgtagatgaaagctatgaccaagaaatgccatgtcccgtgccaccagcaaggatgtatttgcaacaagatgaattagaagaggaggaagatgaacgaggccccactccccctgttcggggagcagcttcttctccagctgccgtgtcctatagccatcagtccactgccactctgactccctccccacaggaagaactccagcccatgttacaggattgtccagaggagactggccacatgcagcaccagcccgacaggagacggcagcctgtgagtcctcctccaccaccacggccgatctcccctccacatacctatggctacatttcaggacccctggtctcagatatggatacggatgcgccagaagaggaagaagacgaagccgacatggaggtagccaagatgcaaaccagaaggcttttgttacgtgggcttgagcagacacctgcctccagtgttggggacctggagagctctgtcacggggtccatgatcaacggctggggctcagcctcagaggaggacaacatttccagcggacgctccagtgttagttcttcggacggctcctttttcactgatgctgactttgcccaggcagtcgcagcagcggcagagtatgctggtctgaaagtagcacgacggcaaatgcaggatgctgctggccgtcgacattttcatgcgtctcagtgccctaggcccacaagtcccgtgtctacagacagcaacatgagtgccgccgtaatgcagaaaaccagaccagccaagaaactgaaacaccagccaggacatctgcgcagagaaacctacacagatgatcttccaccacctcctgtgccgccacctgctataaagtcacctactgcccaatccaagacacagctggaagtacgacctgtagtggtgccaaaactcccttctatggatgcaagaacagacagatcatcagacagaaaaggaagcagttacaaggggagagaagtgttggatggaagacaggttgttgacatgcgaacaaatccaggtgatcccagagaagcacaggaacagcaaaatgacgggaaaggacgtggaaacaaggcagcaaaacgagaccttccaccagcaaagactcatctcatccaagaggatattctaccttattgtagacctacttttccaacatcaaataatcccagagatcccagttcctcaagctcaatgtcatcaagaggatcaggaagcagacaaagagaacaagcaaatgtaggtcgaagaaatattgcagaaatgcaggtacttggaggatatgaaagaggagaagataataatgaagaattagaggaaactgaaagctgaagacaaccaagaggcttatgagatctaatgtgaaaatcatcactcaagatgcctcctgtcagatgacacatgacgccagataaaatgttcagtgcaatcagagtgtacaaattgtcgtttttattcctcttattgggatatcattttaaaaactttattgggtttttattgttgttgtttgatccctaaccctacaaagagccttcctattcccctcgctgttgg

SEQ ID NO: 27014 - DNA, 3210 bp, Homo sapiens
  source 1..3210: mol_type = unassigned DNA
atggccagaagacatgaacgtgtcactagaaggatgtggacatgggctccgggactgttgatgatgactgtggtgttttggggtcatcaggggaatggacaaggccaaggatcgcgtcttcgccaggaggactttcccccgcggattgtggagcatccttccgatgtcatcgtctctaagggcgagcccacgactctgaactgcaaggcggagggccggccaacgcccaccattgagtggtacaaagatggggagcgagtggagactgacaaggacgatccccggtcccacaggatgcttctgcccagcggatccttattcttcttgcgcatcgtgcacgggcgcaggagtaaacctgatgaaggaagctacgtttgtgttgcgaggaactatcttggtgaagcagtgagtcgaaatgcgtctctggaagtggcattgttacgagatgacttccgacaaaaccccacagatgttgtagtggcagctggagagcctgcaatcctggagtgccagcctccccggggacacccagaacccaccatctactggaaaaaagacaaagttcgaattgatgacaaggaagaaagaataagtatccgtggtggaaaactgatgatctccaataccaggaaaagtgatgcagggatgtatacttgtgttggtaccaatatggtgggagaaagggacagtgacccagcagagctgactgtctttgaacgacccacatttctcaggaggccaattaaccaggtggtactggaggaagaagctgtagaatttcgttgtcaagtccaaggagatcctcaaccaactgtgaggtggaaaaaggatgatgcagacttgccaagaggaaggtatgacatcaaagacgattacacactaagaattaaaaagaccatgagtacagatgaaggcacctatatgtgtattgctgagaatcgggttggaaaaatggaagcctctgctacactcaccgtccgaggtggagttatagctcccccacagtttgtggttcggccaagagatcagattgttgctcaaggtcgaacagtgacatttccctgtgaaactaaaggaaacccacagccagctgttttttggcagaaagaaggcagccagaacctacttttcccaaaccaaccccagcagcccaacagtagatgctcagtgtcaccaactggagacctcacaatcaccaacattcaacgttccgacgcgggttactacatctgccaggctttaactgtggcaggaagcattttagcaaaagctcaactggaggttactgatgttttgacagatagacctccacctataattctacaaggcccagccaaccaaacgctggcagtggatggtacagcgttactgaaatgtaaagccactggtgatcctcttcctgtaattagctggttaaaggagggatttacttttccgggtagagatccaagagcaacaattcaagagcaaggcacactgcagattaagaatttacggatttctgatactggcacttatacttgtgtggctacaagttcaagtggagagacttcctggagtgcagtgctggatgtgacagagtctggagcaacaatcagtaaaaactatgatttaagtgacctgccagggccaccatccaaaccgcaggtcactgatgttactaagaacagtgtcaccttgtcctggcagccaggtacccctggaacccttccagcaagtgcatatatcattgaggctttcagccaatcagtgagcaacagctggcagaccgtggcaaaccatgtaaagaccaccctctatactgtaagaggactgcggcccaatacaatctacttattcatggtcagagcgatcaacccccaaggtctcagtgacccaagtcccatgtcagatcctgtgcgcacacaagatatcagcccaccagcacaaggagtggaccacaggcaagtgcagaaagagctaggagatgtccttgtccgtcttcataatccagttgtgctgactcccaccacggttcaggtcacatggacggttgatcgccaaccccagtttatccaaggctaccgagtgatgtatcgtcagacttcaggtctgcaggcgacatcttcgtggcagaatttagatgccaaagtcccgactgaacgaagtgctgtcttagtcaacctgaaaaagggggtgacttatgaaattaaagtacggccatattttaatgagttccaaggaatggatagtgaatctaaaacggttcgtactactgaagaagccccaagtgccccaccacagtctgtcactgtactgacagttggaagctacaatagcacaagtattagtgtttcctgggatcctcctcctccagatcaccagaatggaattatccaagaatacaagatctggtgtctaggaaatgaaacgcgattccatatcaacaaaactgtggatgcagccattcggtccgtaataattggtggattattcccaggtattcaataccgggtagaggttgcagctagtaccagtgcaggggttggagtaaagagtgagccacagccaataataatcgggagacgcaatgaagttgtcattactgaaaacaataacagcataactgagcaaatcactgatgtggtgaagcaaccagcctttatagctggtattggtggtgcctgctgggtaattctgatgggttttagcatatggttgtattggcgaagaaagaagaggaagggactcagtaattatgctgttacgtttcaaagaggagatggaggactaatgagcaatggaagccgtccaggtcttctcaatgctggtgatcccagctatccatggcttgctgattcttggccagccacgagcttgccagtaaataatagcaacagtggcccaaatgagattggaaattttggccgtggagatgtgctgccaccagttccaggccaaggggataaaacagcaacgatgctctcagatggagccatttatagtagcattgacttcactaccaaaaccagttacaacagttccagccaaataacacaggctaccccatatgccacgacacagatcttgcattccaacagcatacatgaattggctgtcgatctgcctgatccacaatggaaaagctcaattcagcaaaaaacagatctgatgggatttggttattctctacctgatcagaacaaaggtaacaatggtgagtcaggttct

SEQ ID NO: 27015 - DNA, 1722 bp, Homo sapiens
  source 1..1722: mol_type = unassigned DNA
aaaaagaccatgagtacagatgaaggcacctatatgtgtattgctgagaatcgggttggaaaaatggaagcctctgctacactcaccgtccgaggtggagttatagctcccccacagtttgtggttcggccaagagatcagattgttgctcaaggtcgaacagtgacatttccctgtgaaactaaaggaaacccacagccagctgttttttggcagaaagaaggcagccagaacctacttttcccaaaccaaccccagcagcccaacagtagatgctcagtgtcaccaactggagacctcacaatcaccaacattcaacgttccgacgcgggttactacatctgccaggctttaactgtggcaggaagcattttagcaaaagctcaactggaggttactgatgttttgacagatagacctccacctataattctacaaggcccagccaaccaaacgctggcagtggatggtacagcgttactgaaatgtaaagccactggtgatcctcttcctgtaattagctggttaaaggagggatttacttttccgggtagagatccaagagcaacaattcaagagcaaggcacactgcagattaagaatttacggatttctgatactggcacttatacttgtgtggctacaagttcaagtggagagacttcctggagtgcagtgctggatgtgacagagtctggagcaacaatcagtaaaaactatgatttaagtgacctgccagggccaccatccaaaccgcaggtcactgatgttactaagaacagtgtcaccttgtcctggcagccaggtacccctggaacccttccagcaagtgcatatatcattgaggctttcagccaatcagtgagcaacagctggcagaccgtggcaaaccatgtaaagaccaccctctatactgtaagaggactgcggcccaatacaatctacttattcatggtcagagcgatcaacccccaaggtctcagtgacccaagtcccatgtcagatcctgtgcgcacacaagatatcagcccaccagcacaaggagtggaccacaggcaagtgcagaaagagctaggagatgtccttgtccgtcttcataatccagttgtgctgactcccaccacggttcaggtcacatggacggttgatcgccaaccccagtttatccaaggctaccgagtgatgtatcgtcagacttcaggtctgcaggcgacatcttcgtggcagaatttagatgccaaagtcccgactgaacgaagtgctgtcttagtcaacctgaaaaagggggtgacttatgaaattaaagtacggccatattttaatgagttccaaggaatggatagtgaatctaaaacggttcgtactactgaagaagccccaagtgccccaccacagtctgtcactgtactgacagttggaagctacaatagcacaagtattagtgtttcctgggatcctcctcctccagatcaccagaatggaattatccaagaatacaagatctggtgtctaggaaatgaaacgcgattccatatcaacaaaactgtggatgcagccattcggtccgtaataattggtggattattcccaggtattcaataccgggtagaggttgcagctagtaccagtgcaggggttggagtaaagagtgagccacagccaaataacacaggctaccccatatgccacgacacagatcttgcattccaacagcatacatga

SEQ ID NO: 27016 - DNA, 4182 bp, Homo sapiens
  source 1..4182: mol_type = unassigned DNA
atggccagaagacatgaacgtgtcactagaaggatgtggacatgggctccgggactgttgatgatgactgtggtgttttggggtcatcaggggaatggacaaggccaaggatcgcgtcttcgccaggaggactttcccccgcggattgtggagcatccttccgatgtcatcgtctctaagggcgagcccacgactctgaactgcaaggcggagggccggccaacgcccaccattgagtggtacaaagatggggagcgagtggagactgacaaggacgatccccggtcccacaggatgcttctgcccagcggatccttattcttcttgcgcatcgtgcacgggcgcaggagtaaacctgatgaaggaagctacgtttgtgttgcgaggaactatcttggtgaagcagtgagtcgaaatgcgtctctggaagtggcattgttacgagatgacttccgacaaaaccccacagatgttgtagtggcagctggagagcctgcaatcctggagtgccagcctccccggggacacccagaacccaccatctactggaaaaaagacaaagttcgaattgatgacaaggaagaaagaataagtatccgtggtggaaaactgatgatctccaataccaggaaaagtgatgcagggatgtatacttgtgttggtaccaatatggtgggagaaagggacagtgacccagcagagctgactgtctttgaacgacccacatttctcaggaggccaattaaccaggtggtactggaggaagaagctgtagaatttcgttgtcaagtccaaggagatcctcaaccaactgtgaggtggaaaaaggatgatgcagacttgccaagaggaaggtatgacatcaaagacgattacacactaagaattaaaaagaccatgagtacagatgaaggcacctatatgtgtattgctgagaatcgggttggaaaaatggaagcctctgctacactcaccgtccgagctcccccacagtttgtggttcggccaagagatcagattgttgctcaaggtcgaacagtgacatttccctgtgaaactaaaggaaacccacagccagctgttttttggcagaaagaaggcagccagaacctacttttcccaaaccaaccccagcagcccaacagtagatgctcagtgtcaccaactggagacctcacaatcaccaacattcaacgttccgacgcgggttactacatctgccaggctttaactgtggcaggaagcattttagcaaaagctcaactggaggttactgatgttttgacagatagacctccacctataattctacaaggcccagccaaccaaacgctggcagtggatggtacagcgttactgaaatgtaaagccactggtgatcctcttcctgtaattagctggttaaaggagggatttacttttccgggtagagatccaagagcaacaattcaagagcaaggcacactgcagattaagaatttacggatttctgatactggcacttatacttgtgtggctacaagttcaagtggagagacttcctggagtgcagtgctggatgtgacagagtctggagcaacaatcagtaaaaactatgatttaagtgacctgccagggccaccatccaaaccgcaggtcactgatgttactaagaacagtgtcaccttgtcctggcagccaggtacccctggaacccttccagcaagtgcatatatcattgaggctttcagccaatcagtgagcaacagctggcagaccgtggcaaaccatgtaaagaccaccctctatactgtaagaggactgcggcccaatacaatctacttattcatggtcagagcgatcaacccccaaggtctcagtgacccaagtcccatgtcagatcctgtgcgcacacaagatatcagcccaccagcacaaggagtggaccacaggcaagtgcagaaagagctaggagatgtccttgtccgtcttcataatccagttgtgctgactcccaccacggttcaggtcacatggacggttgatcgccaaccccagtttatccaaggctaccgagtgatgtatcgtcagacttcaggtctgcaggcgacatcttcgtggcagaatttagatgccaaagtcccgactgaacgaagtgctgtcttagtcaacctgaaaaagggggtgacttatgaaattaaagtacggccatattttaatgagttccaaggaatggatagtgaatctaaaacggttcgtactactgaagaagccccaagtgccccaccacagtctgtcactgtactgacagttggaagctacaatagcacaagtattagtgtttcctgggatcctcctcctccagatcaccagaatggaattatccaagaatacaagatctggtgtctaggaaatgaaacgcgattccatatcaacaaaactgtggatgcagccattcggtccgtaataattggtggattattcccaggtattcaataccgggtagaggttgcagctagtaccagtgcaggggttggagtaaagagtgagccacagccaataataatcgggagacgcaatgaagttgtcattactgaaaacaataacagcataactgagcaaatcactgatgtggtgaagcaaccagcctttatagctggtattggtggtgcctgctgggtaattctgatgggttttagcatatggttgtattggcgaagaaagaagaggaagggactcagtaattatgctgttacgtttcaaagaggagatggaggactaatgagcaatggaagccgtccaggtcttctcaatgctggtgatcccagctatccatggcttgctgattcttggccagccacgagcttgccagtaaataatagcaacagtggcccaaatgagattggaaattttggccgtggagatgtgctgccaccagttccaggccaaggggataaaacagcaacgatgctctcagatggagccatttatagtagcattgacttcactaccaaaaccagttacaacagttccagccaaataacacaggctaccccatatgccacgacacagatcttgcattccaacagcatacatgaattggctgtcgatctgcctgatccacaatggaaaagctcaattcagcaaaaaacagatctgatgggatttggttattctctacctgatcagaacaaaggtaacaatggtgggaaaggtggaaaaaagaagaaaaataaaaactcttctaaaccacagaaaaacaatggatccacttgggccaatgtccctctacctccccccccagtccagccccttcctggcacggagctggaacactatgcagtggaacaacaagaaaatggctatgacagtgatagctggtgcccaccattgccagtacaaacttacttacaccaaggtctggaagatgaactggaagaagatgatgatagggtcccaacacctcctgttcgaggcgtggcttcttctcctgctatctcctttggacagcagtccactgcaactcttactccatccccacgggaagagatgcaacccatgctgcaggctcacctggatgagttgacaagagcctatcagtttgatatagcaaaacaaacatggcacattcaaagcaataatcaacctccacagcctccagttccaccgttaggttatgtgtctggagccttgatttctgatttggaaacggatgttgcagatgatgatgccgacgacgaagaggaagctttagaaatccccaggcccctgagagcactggaccagactcctggatccagcatggacaatctagacagctctgtgacaggaaaagcctttacctcctctcaaagacctcgacctaccagcccattttctactgacagtaacaccagtgcagccctgagtcaaagtcagaggcctcggcccactaaaaaacacaagggagggcggatggaccaacaaccagcattgcctcatcgaagggaaggaatgacagatgaggaggccttggtgccctatagcaagcccagtttcccatctccaggtggccacagctcatcaggaacagcttcttctaagggatccactggacctaggaaaaccgaggtgttgagagcaggccaccagcgcaatgccagcgaccttcttgacataggatatatgggctccaacagtcaaggacagtttacaggtgaatta

SEQ ID NO: 27017 - DNA, 8946 bp, Homo sapiens
  source 1..8946: mol_type = unassigned DNA
ggcgaggggcctcagcgcgcctggcgctggactgagcgctccctttctccgccgcgcccgggctgggctctcacgcccgtctctgctcgcgcccgcagccgcctggtgcactatcctcagaggcggcaccgcgggggtgtctgcagcctcggcctccgcccggcccctccctccctccctccctccctcgctccttccctgcctccctcaccacgtaggagttcggattctccacccgaatcgtcctgatttcccttctcctctcttttggaaaccggagaggtggagggagggcaacaccgctgcaaaggagaggcccgccaagtctgcccgcctgcaaagtgttgctttgacacattcttattatggaagttaagtaaaaatatagacatattaaaaaataactccggacgtggagctgctacggagaaggaaaccgggggaaagaaaaccagtaggcaggccaatggtttttcggcagcgcgctggcaagtttgtggaacactttctaggaattaggtcttttcctcccccttcatcatcttgacttctgaaggaagaacttggctttggattgcagtggagcctaaggagagagggttagacacactcgaataatccctctggctgggctgaatttgtgggaatttaggaagccagagtgctggaaatacagcagcctttgaagtaccctctgttaatttggatggatctcagtgtgccccgttcgagacctctccaccaaccccttctgatcttgcgatttgctcttcttgactttaattagtatctaggaaagtctaaactttggacctacctctttttttgatactcatttttgtacttttgctctctgggattggtttcttaaagaatctggatcctttttaatatgtcaaaatgagtctgctgatgtttacacaactactgctctgtggatttttatatgttcgggttgatggatcgcgtcttcgccaggaggactttcccccgcggattgtggagcatccttccgatgtcatcgtctctaagggcgagcccacgactctgaactgcaaggcggagggccggccaacgcccaccattgagtggtacaaagatggggagcgagtggagactgacaaggacgatccccggtcccacaggatgcttctgcccagcggatccttattcttcttgcgcatcgtgcacgggcgcaggagtaaacctgatgaaggaagctacgtttgtgttgcgaggaactatcttggtgaagcagtgagtcgaaatgcgtctctggaagtggcattgttacgagatgacttccgacaaaaccccacagatgttgtagtggcagctggagagcctgcaatcctggagtgccagcctccccggggacacccagaacccaccatctactggaaaaaagacaaagttcgaattgatgacaaggaagaaagaataagtatccgtggtggaaaactgatgatctccaataccaggaaaagtgatgcagggatgtatacttgtgttggtaccaatatggtgggagaaagggacagtgacccagcagagctgactgtctttgaacgacccacatttctcaggaggccaattaaccaggtggtactggaggaagaagctgtagaatttcgttgtcaagtccaaggagatcctcaaccaactgtgaggtggaaaaaggatgatgcagacttgccaagaggaaggtatgacatcaaagacgattacacactaagaattaaaaagaccatgagtacagatgaaggcacctatatgtgtattgctgagaatcgggttggaaaaatggaagcctctgctacactcaccgtccgagctcccccacagtttgtggttcggccaagagatcagattgttgctcaaggtcgaacagtgacatttccctgtgaaactaaaggaaacccacagccagctgttttttggcagaaagaaggcagccagaacctacttttcccaaaccaaccccagcagcccaacagtagatgctcagtgtcaccaactggagacctcacaatcaccaacattcaacgttccgacgcgggttactacatctgccaggctttaactgtggcaggaagcattttagcaaaagctcaactggaggttactgatgttttgacagatagacctccacctataattctacaaggcccagccaaccaaacgctggcagtggatggtacagcgttactgaaatgtaaagccactggtgatcctcttcctgtaattagctggttaaaggagggatttacttttccgggtagagatccaagagcaacaattcaagagcaaggcacactgcagattaagaatttacggatttctgatactggcacttatacttgtgtggctacaagttcaagtggagagacttcctggagtgcagtgctggatgtgacagagtctggagcaacaatcagtaaaaactatgatttaagtgacctgccagggccaccatccaaaccgcaggtcactgatgttactaagaacagtgtcaccttgtcctggcagccaggtacccctggaacccttccagcaagtgcatatatcattgaggctttcagccaatcagtgagcaacagctggcagaccgtggcaaaccatgtaaagaccaccctctatactgtaagaggactgcggcccaatacaatctacttattcatggtcagagcgatcaacccccaaggtctcagtgacccaagtcccatgtcagatcctgtgcgcacacaagatatcagcccaccagcacaaggagtggaccacaggcaagtgcagaaagagctaggagatgtccttgtccgtcttcataatccagttgtgctgactcccaccacggttcaggtcacatggacggttgatcgccaaccccagtttatccaaggctaccgagtgatgtatcgtcagacttcaggtctgcaggcgacatcttcgtggcagaatttagatgccaaagtcccgactgaacgaagtgctgtcttagtcaacctgaaaaagggggtgacttatgaaattaaagtacggccatattttaatgagttccaaggaatggatagtgaatctaaaacggttcgtactactgaagaagccccaagtgccccaccacagtctgtcactgtactgacagttggaagctacaatagcacaagtattagtgtttcctgggatcctcctcctccagatcaccagaatggaattatccaagaatacaagatctggtgtctaggaaatgaaacgcgattccatatcaacaaaactgtggatgcagccattcggtccgtaataattggtggattattcccaggtattcaataccgggtagaggttgcagctagtaccagtgcaggggttggagtaaagagtgagccacagccaataataatcgggagacgcaatgaagttgtcattactgaaaacaataacagcataactgagcaaatcactgatgtggtgaagcaaccagcctttatagctggtattggtggtgcctgctgggtaattctgatgggttttagcatatggttgtattggcgaagaaagaagaggaagggactcagtaattatgctgttacgtttcaaagaggagatggaggactaatgagcaatggaagccgtccaggtcttctcaatgctggtgatcccagctatccatggcttgctgattcttggccagccacgagcttgccagtaaataatagcaacagtggcccaaatgagattggaaattttggccgtggagatgtgctgccaccagttccaggccaaggggataaaacagcaacgatgctctcagatggagccatttatagtagcattgacttcactaccaaaaccagttacaacagttccagccaaataacacaggctaccccatatgccacgacacagatcttgcattccaacagcatacatgaattggctgtcgatctgcctgatccacaatggaaaagctcaattcagcaaaaaacagatctgatgggatttggttattctctacctgatcagaacaaaggtaacaatggtgggaaaggtggaaaaaagaagaaaaataaaaactcttctaaaccacagaaaaacaatggatccacttgggccaatgtccctctacctccccccccagtccagccccttcctggcacggagctggaacactatgcagtggaacaacaagaaaatggctatgacagtgatagctggtgcccaccattgccagtacaaacttacttacaccaaggtctggaagatgaactggaagaagatgatgatagggtcccaacacctcctgttcgaggcgtggcttcttctcctgctatctcctttggacagcagtccactgcaactcttactccatccccacgggaagagatgcaacccatgctgcaggctcacctggatgagttgacaagagcctatcagtttgatatagcaaaacaaacatggcacattcaaagcaataatcaacctccacagcctccagttccaccgttaggttatgtgtctggagccttgatttctgatttggaaacggatgttgcagatgatgatgccgacgacgaagaggaagctttagaaatccccaggcccctgagagcactggaccagactcctggatccagcatggacaatctagacagctctgtgacaggaaaagcctttacctcctctcaaagacctcgacctaccagcccattttctactgacagtaacaccagtgcagccctgagtcaaagtcagaggcctcggcccactaaaaaacacaagggagggcggatggaccaacaaccagcattgcctcatcgaagggaaggaatgacagatgaggaggccttggtgccctatagcaagcccagtttcccatctccaggtggccacagctcatcaggaacagcttcttctaagggatccactggacctaggaaaaccgaggtgttgagagcaggccaccagcgcaatgccagcgaccttcttgacataggatatatgggctccaacagtcaaggacagtttacaggtgaattatagtaaatgagaggagacatacaaagctgctctgaaggaccatcaggtccggactcatggaagtgatgactctaaacagtgcaatgaacaatttatttatgtactattaaaagaactgtaaatgcaatgtaaagacacacagccacacatatcccacagatattttcattgtgttcttctcttaagtacaccacccaccttaactctttcttgtcaggagtatataaaaaagaaagaaaacaaaactcgccctacaggaagaaaaggattctcctctgtatataatttcttttgtgcattgctatgcaagctcactctttttagctctgctcatattattgtctgttcttattggtctgttgtactatatgtgaattaataggctgtggtgccatatattaacttttaattgtgtaacttttatgtttaaattttgcactgcaattttatttggtgataagcacaaatctctactcctcatgacatgaagaaaaagactgaatgtgaagggagtttctgtactgtaagctagattggataatgatggctgtaacaaatcatgttagatggttttcagttggggtgtagaaataggaagatgcaaaggaacaatggtgttggcaaagtcttctttgaatatcagggactgagtcaataaaaaaaatagtagaaaggtggcttttactattgacaaaagccggggtcaaaaaaagtagtttaagtcttaagactgaatatgcattaaagtatgcaggtagcaaagatgtaataaatttgcttaaaaaaagaaattaaagttttatttagaatcaattttacctgtcattgtaattgacccatctgagaattacaataagcaagaggaaattaaggtgttttgcaagagctgtatttatattacagttttttaaaaacattttctgaattatcgtaattaagctctccaactcgttaagtcagaatataatatgaagttccccaaggaaacgaacaaaatgaactctagaatatctagcaaatagttaaagaagcaatttattattagggcatactcgggctgtttccaaatataaactctattgcaatatcttatttcatctttctaatacatgtacagtgcacactagaggatagagctgcatcacttaaattcatgacttaaaaaataatacagtttatatacaacttgttttttatttgattaagaagtgaagtttacgccacccaatgtatagccaaattgtacgtgcttaaaaaacagtgccgagagtatgttcagttcgcagtaagtagatttattggaataaatattctatggtacattctcagaaattggcttccaactaaaatacgtttgacccattttgaataaggaaattgaaaagaaaaatttaaaaggagaaaaaaatgcatgtttataaactttttaaataaaaccagaccttgtaagtggacattaataattgtcctgcctcatttgttttcacgactttgacaacaagaagttcctgaacattagtcatgtatgctcagaataaatgtgactttgaaatatatgttagctactgtacatgtatagtcagtcaagtagaagaggaccttcctgaaattcccacttgtgacattttcccatgggtttcctacacaatcttaaattttatttctgtctatactttctcaaatttttcctatgataagttcagttgttggtactcttctaaaaatattcaacgtgattaggatcagttctaaaatacgggacccctttgagtgacaattcgcactccatgcattattggctcagtagccaatttttgtcacgtcgttataacaaggagatgacataattaaacatttccatcctttctattccctgagactgcatcagcacaggcaagtatagaatgtaatgttcttcatgggccccaccagctttttggtgccatgtaatttatttcttcgctgaagagaaaaagaattctgagacacagttattaaaccctttatcaactttctaccatcagtgcctgaattctaatgcagtgtgatttctctgggacaaagagactgaggaagatgaaaagtttcttcaaagagtgaatacatacttattcacaactctaggatgtgaggactttaaatatctctttatgaagttccctgcctaacctctttctatttaaaggcaaacaaatttcgaagaggttttgtgttccctctttatgtttctctatgacccagtttagtctaaaaccttagttcattacatatacaacacatagcctttgatccctggtaactggcaggtgttggtgattaataaaccaaggcttcaaagtgaagtatgtgtgtgcagatgacttttggaataacgtgggcatagcatcataccttcctgattgtcttcagcatataaaaattaactgttgtagttaaaattatgtcagtgcagagcttgtggttacttggaatgttctttcagaatagtccatgttgcctattaaacctagttttaaacacattgggcagtcaatttatgcacccaaaatatcaccctcaggtagattgagggcaagataaaatgctgtatgtagctatacaaaggaattcagaaacattactggaaagcaaagcctttgtcagcttgctactgacaaagtagtaaaaagctactaatcagtgttgagtcagatgtcaacagaaaaatacaaatacctatgagagccacagcagtttctcgtttcatagccgattcaatgaatatgattagaaattcactgagctcactcttgcaggtttaaatggaggcctgcataaggactgcaagaggaaatctgggtgggagagaatgtaatctgatcttgcactcataggcaatgctgcaatgcaatcatgtccaatacaagcacagcttcattcataacaggaaacgtcttctttgggaaaatagctctattggtgcccaaactcaggtatgccagtgtatgcaggtggagtcgccctacccctcttccaaacatgtcctgtgagatttttaaaataagatgggatagtacaggggcatgaaaagaattgattccttcacaggatttgaatccagttcaagggagaatgtagaaaattcaaaaccaacatataaggtatcacacaaccaagaaaagtaaaaccattgcaagtttacttgcgttgagtacaaaacagatttaatggtgttctatgtcatagtttaatgctctgggtatttaaatatgttttcaacaggatttgagttgaaagtttgtaatgtgctttgatggaacacctctcaatttctattcaataaacttatgtaattgtccattgacaatataatgataacagtaccattgaactctaaactgtggtttatcttcactactgggaagcaactgtgcatcagtattaaagatatgcagaaacataatattcactaatttgttcatctgcttctgtatattgtttatggaattacatggcaagaactgttctaaagcaacatgtctttccacattattttagaggtgaaattacttttgttttgcttctctataatgtgtacttcaaatgaaacaccatacttttttctaaaaaaagatgttcaatttactaatttttttaaatctcataatttaaaaagcatttgttgtgattttaaagtgttgcaagaaaagggattttgtggccgtgggtagactttttatactttgttttatagatggattttttttaactgtagtttgtttaagtcaccaagcagcatccaaaatcttaatgtgtttcatttgatgttgttagatcagagaagaaattggcataaaatcggttaatagtattgtcaaagaattgtgtattgtgtactcactgggaaaaaataaaatatattcacatttcaaa

SEQ ID NO: 27018 - DNA, 8372 bp, Homo sapiens
  source 1..8372: mol_type = unassigned DNA
cgctggaggagggaggcggaaggacagcgctgcgccaccacccggaggagggagcgcggtagctgcaggcaggggagggagaggaaagaaaaggaaggacggctcccagacagagagtgggagaaaccggggagcagcgggagcagcaggtccggggggagctgttccgctgcgctgccctcgttattcacacggacgctgcggagcttcccagggctgcttccctgtccccctgggtggaggctgccgtctaaacctgactccagagtttaagatgcaatggccagaagacatgaacgtgtcactagaaggatgtggacatgggctccgggactgttgatgatgactgtggtgttttggggtcatcaggggaatggacaaggccaaggatcgcgtcttcgccaggaggactttcccccgcggattgtggagcatccttccgatgtcatcgtctctaagggcgagcccacgactctgaactgcaaggcggagggccggccaacgcccaccattgagtggtacaaagatggggagcgagtggagactgacaaggacgatccccggtcccacaggatgcttctgcccagcggatccttattcttcttgcgcatcgtgcacgggcgcaggagtaaacctgatgaaggaagctacgtttgtgttgcgaggaactatcttggtgaagcagtgagtcgaaatgcgtctctggaagtggcattgttacgagatgacttccgacaaaaccccacagatgttgtagtggcagctggagagcctgcaatcctggagtgccagcctccccggggacacccagaacccaccatctactggaaaaaagacaaagttcgaattgatgacaaggaagaaagaataagtatccgtggtggaaaactgatgatctccaataccaggaaaagtgatgcagggatgtatacttgtgttggtaccaatatggtgggagaaagggacagtgacccagcagagctgactgtctttgaacgacccacatttctcaggaggccaattaaccaggtggtactggaggaagaagctgtagaatttcgttgtcaagtccaaggagatcctcaaccaactgtgaggtggaaaaaggatgatgcagacttgccaagaggaaggtatgacatcaaagacgattacacactaagaattaaaaagaccatgagtacagatgaaggcacctatatgtgtattgctgagaatcgggttggaaaaatggaagcctctgctacactcaccgtccgagctcccccacagtttgtggttcggccaagagatcagattgttgctcaaggtcgaacagtgacatttccctgtgaaactaaaggaaacccacagccagctgttttttggcagaaagaaggcagccagaacctacttttcccaaaccaaccccagcagcccaacagtagatgctcagtgtcaccaactggagacctcacaatcaccaacattcaacgttccgacgcgggttactacatctgccaggctttaactgtggcaggaagcattttagcaaaagctcaactggaggttactgatgttttgacagatagacctccacctataattctacaaggcccagccaaccaaacgctggcagtggatggtacagcgttactgaaatgtaaagccactggtgatcctcttcctgtaattagctggttaaaggagggatttacttttccgggtagagatccaagagcaacaattcaagagcaaggcacactgcagattaagaatttacggatttctgatactggcacttatacttgtgtggctacaagttcaagtggagagacttcctggagtgcagtgctggatgtgacagagtctggagcaacaatcagtaaaaactatgatttaagtgacctgccagggccaccatccaaaccgcaggtcactgatgttactaagaacagtgtcaccttgtcctggcagccaggtacccctggaacccttccagcaagtgcatatatcattgaggctttcagccaatcagtgagcaacagctggcagaccgtggcaaaccatgtaaagaccaccctctatactgtaagaggactgcggcccaatacaatctacttattcatggtcagagcgatcaacccccaaggtctcagtgacccaagtcccatgtcagatcctgtgcgcacacaagatatcagcccaccagcacaaggagtggaccacaggcaagtgcagaaagagctaggagatgtccttgtccgtcttcataatccagttgtgctgactcccaccacggttcaggtcacatggacggttgatcgccaaccccagtttatccaaggctaccgagtgatgtatcgtcagacttcaggtctgcaggcgacatcttcgtggcagaatttagatgccaaagtcccgactgaacgaagtgctgtcttagtcaacctgaaaaagggggtgacttatgaaattaaagtacggccatattttaatgagttccaaggaatggatagtgaatctaaaacggttcgtactactgaagaagccccaagtgccccaccacagtctgtcactgtactgacagttggaagctacaatagcacaagtattagtgtttcctgggatcctcctcctccagatcaccagaatggaattatccaagaatacaagatctggtgtctaggaaatgaaacgcgattccatatcaacaaaactgtggatgcagccattcggtccgtaataattggtggattattcccaggtattcaataccgggtagaggttgcagctagtaccagtgcaggggttggagtaaagagtgagccacagccaataataatcgggagacgcaatgaagttgtcattactgaaaacaataacagcataactgagcaaatcactgatgtggtgaagcaaccagcctttatagctggtattggtggtgcctgctgggtaattctgatgggttttagcatatggttgtattggcgaagaaagaagaggaagggactcagtaattatgctgttacgtttcaaagaggagatggaggactaatgagcaatggaagccgtccaggtcttctcaatgctggtgatcccagctatccatggcttgctgattcttggccagccacgagcttgccagtaaataatagcaacagtggcccaaatgagattggaaattttggccgtggagatgtgctgccaccagttccaggccaaggggataaaacagcaacgatgctctcagatggagccatttatagtagcattgacttcactaccaaaaccagttacaacagttccagccaaataacacaggctaccccatatgccacgacacagatcttgcattccaacagcatacatgaattggctgtcgatctgcctgatccacaatggaaaagctcaattcagcaaaaaacagatctgatgggatttggttattctctacctgatcagaacaaaggtaacaatggtgggaaaggtggaaaaaagaagaaaaataaaaactcttctaaaccacagaaaaacaatggatccacttgggccaatgtccctctacctccccccccagtccagccccttcctggcacggagctggaacactatgcagtggaacaacaagaaaatggctatgacagtgatagctggtgcccaccattgccagtacaaacttacttacaccaaggtctggaagatgaactggaagaagatgatgatagggtcccaacacctcctgttcgaggcgtggcttcttctcctgctatctcctttggacagcagtccactgcaactcttactccatccccacgggaagagatgcaacccatgctgcaggctcacctggatgagttgacaagagcctatcagtttgatatagcaaaacaaacatggcacattcaaagcaataatcaacctccacagcctccagttccaccgttaggttatgtgtctggagccttgatttctgatttggaaacggatgttgcagatgatgatgccgacgacgaagaggaagctttagaaatccccaggcccctgagagcactggaccagactcctggatccagcatggacaatctagacagctctgtgacaggaaaagcctttacctcctctcaaagacctcgacctaccagcccattttctactgacagtaacaccagtgcagccctgagtcaaagtcagaggcctcggcccactaaaaaacacaagggagggcggatggaccaacaaccagcattgcctcatcgaagggaaggaatgacagatgaggaggccttggtgccctatagcaagcccagtttcccatctccaggtggccacagctcatcaggaacagcttcttctaagggatccactggacctaggaaaaccgaggtgttgagagcaggccaccagcgcaatgccagcgaccttcttgacataggatatatgggctccaacagtcaaggacagtttacaggtgaattatagtaaatgagaggagacatacaaagctgctctgaaggaccatcaggtccggactcatggaagtgatgactctaaacagtgcaatgaacaatttatttatgtactattaaaagaactgtaaatgcaatgtaaagacacacagccacacatatcccacagatattttcattgtgttcttctcttaagtacaccacccaccttaactctttcttgtcaggagtatataaaaaagaaagaaaacaaaactcgccctacaggaagaaaaggattctcctctgtatataatttcttttgtgcattgctatgcaagctcactctttttagctctgctcatattattgtctgttcttattggtctgttgtactatatgtgaattaataggctgtggtgccatatattaacttttaattgtgtaacttttatgtttaaattttgcactgcaattttatttggtgataagcacaaatctctactcctcatgacatgaagaaaaagactgaatgtgaagggagtttctgtactgtaagctagattggataatgatggctgtaacaaatcatgttagatggttttcagttggggtgtagaaataggaagatgcaaaggaacaatggtgttggcaaagtcttctttgaatatcagggactgagtcaataaaaaaaatagtagaaaggtggcttttactattgacaaaagccggggtcaaaaaaagtagtttaagtcttaagactgaatatgcattaaagtatgcaggtagcaaagatgtaataaatttgcttaaaaaaagaaattaaagttttatttagaatcaattttacctgtcattgtaattgacccatctgagaattacaataagcaagaggaaattaaggtgttttgcaagagctgtatttatattacagttttttaaaaacattttctgaattatcgtaattaagctctccaactcgttaagtcagaatataatatgaagttccccaaggaaacgaacaaaatgaactctagaatatctagcaaatagttaaagaagcaatttattattagggcatactcgggctgtttccaaatataaactctattgcaatatcttatttcatctttctaatacatgtacagtgcacactagaggatagagctgcatcacttaaattcatgacttaaaaaataatacagtttatatacaacttgttttttatttgattaagaagtgaagtttacgccacccaatgtatagccaaattgtacgtgcttaaaaaacagtgccgagagtatgttcagttcgcagtaagtagatttattggaataaatattctatggtacattctcagaaattggcttccaactaaaatacgtttgacccattttgaataaggaaattgaaaagaaaaatttaaaaggagaaaaaaatgcatgtttataaactttttaaataaaaccagaccttgtaagtggacattaataattgtcctgcctcatttgttttcacgactttgacaacaagaagttcctgaacattagtcatgtatgctcagaataaatgtgactttgaaatatatgttagctactgtacatgtatagtcagtcaagtagaagaggaccttcctgaaattcccacttgtgacattttcccatgggtttcctacacaatcttaaattttatttctgtctatactttctcaaatttttcctatgataagttcagttgttggtactcttctaaaaatattcaacgtgattaggatcagttctaaaatacgggacccctttgagtgacaattcgcactccatgcattattggctcagtagccaatttttgtcacgtcgttataacaaggagatgacataattaaacatttccatcctttctattccctgagactgcatcagcacaggcaagtatagaatgtaatgttcttcatgggccccaccagctttttggtgccatgtaatttatttcttcgctgaagagaaaaagaattctgagacacagttattaaaccctttatcaactttctaccatcagtgcctgaattctaatgcagtgtgatttctctgggacaaagagactgaggaagatgaaaagtttcttcaaagagtgaatacatacttattcacaactctaggatgtgaggactttaaatatctctttatgaagttccctgcctaacctctttctatttaaaggcaaacaaatttcgaagaggttttgtgttccctctttatgtttctctatgacccagtttagtctaaaaccttagttcattacatatacaacacatagcctttgatccctggtaactggcaggtgttggtgattaataaaccaaggcttcaaagtgaagtatgtgtgtgcagatgacttttggaataacgtgggcatagcatcataccttcctgattgtcttcagcatataaaaattaactgttgtagttaaaattatgtcagtgcagagcttgtggttacttggaatgttctttcagaatagtccatgttgcctattaaacctagttttaaacacattgggcagtcaatttatgcacccaaaatatcaccctcaggtagattgagggcaagataaaatgctgtatgtagctatacaaaggaattcagaaacattactggaaagcaaagcctttgtcagcttgctactgacaaagtagtaaaaagctactaatcagtgttgagtcagatgtcaacagaaaaatacaaatacctatgagagccacagcagtttctcgtttcatagccgattcaatgaatatgattagaaattcactgagctcactcttgcaggtttaaatggaggcctgcataaggactgcaagaggaaatctgggtgggagagaatgtaatctgatcttgcactcataggcaatgctgcaatgcaatcatgtccaatacaagcacagcttcattcataacaggaaacgtcttctttgggaaaatagctctattggtgcccaaactcaggtatgccagtgtatgcaggtggagtcgccctacccctcttccaaacatgtcctgtgagatttttaaaataagatgggatagtacaggggcatgaaaagaattgattccttcacaggatttgaatccagttcaagggagaatgtagaaaattcaaaaccaacatataaggtatcacacaaccaagaaaagtaaaaccattgcaagtttacttgcgttgagtacaaaacagatttaatggtgttctatgtcatagtttaatgctctgggtatttaaatatgttttcaacaggatttgagttgaaagtttgtaatgtgctttgatggaacacctctcaatttctattcaataaacttatgtaattgtccattgacaatataatgataacagtaccattgaactctaaactgtggtttatcttcactactgggaagcaactgtgcatcagtattaaagatatgcagaaacataatattcactaatttgttcatctgcttctgtatattgtttatggaattacatggcaagaactgttctaaagcaacatgtctttccacattattttagaggtgaaattacttttgttttgcttctctataatgtgtacttcaaatgaaacaccatacttttttctaaaaaaagatgttcaatttactaatttttttaaatctcataatttaaaaagcatttgttgtgattttaaagtgttgcaagaaaagggattttgtggccgtgggtagactttttatactttgttttatagatggattttttttaactgtagtttgtttaagtcaccaagcagcatccaaaatcttaatgtgtttcatttgatgttgttagatcagagaagaaattggcataaaatcggttaatagtattgtcaaagaattgtgtattgtgtactcactgggaaaaaataaaatatattcacatttcaa

SEQ ID NO: 27019 - DNA, 4569 bp, Homo sapiens
  source 1..4569: mol_type = unassigned DNA
ggagagaaggacgagggaaggaggagggcacgaagaggcaccgaccgtacccaggcgcaccggcaggagagcggcaccgtggctgccgcagcgcgcagaggctgtggaggggcttacggctcccagcccacgggtctcagacccaggggctgggcccccagcccccagtcccgatcccagctgggtcgagccatgctgcgctacctgctgaaaacgctgctgcagatgaacttgttcgcggactctctggccggggacatctccaactccagcgagctgctcttgggcttcaactcctcgctggcggcgctcaaccacaccctgctgcctcccggcgatccctctctcaacgggtcaagggtaggaccggaggacgctatgccccgcatcgtggagcagccgccagatctgctggtctcccgaggcgagcccgccacgttgccctgccgcgctgaaggccgaccccgacccaacattgagtggtacaagaacggggcgcgtgtggccactgtgcgggaggatccgcgtgcgcaccgcctgctgctgcccagcggcgccctcttcttcccgcgcatcgtgcacgggcgccgcgcgcggccggacgaaggtgtctacacttgcgtggctcgcaactacctgggggcagcagcgagcagaaacgcctcgctggaagtggcagtcctccgtgatgatttccggcagtctcctggaaacgtggtggtggcagtgggggagccagcagtactggaatgcgtgcccccccgcggccacccggagccttccgtgtcctggaggaaggacggtgcaagactcaaggaagaggaaggaaggatcacgatccgtggagggaagctgatgatgtcacatacactcaagagcgatgcaggcatgtatgtgtgcgtagcctccaacatggcgggagaacgggagagtgcggcagctgaagtcatggtactggagcgtccctcattcctgcgcagaccagtgaatcaggtggtcctggctgatgcccctgtgactttcctatgtgaggtgaagggggatcccccacctcgtctacgctggcgcaaggaggatggggaactgcccacaggcaggtatgagatccggagtgaccacagcctttggattgggcatgtgagtgccgaagatgagggaacgtacacctgtgtggcggagaacagtgtgggccgcgctgaagcatctggctccctcagtgttcacgtcccaccccagttggtgacccagccccaggaccagatggcagctcctggagagagcgtggctttccagtgcgagaccaaaggaaaccccccacctgccatcttctggcagaaggaggggagtcaggtcctgcttttccccagtcagtcacttcagccgacggggcgcttctcagtgtctccaagaggccaacttaacatcaccgcggtgcagcgtggggatgctgggtactacgtgtgccaggctgtcagtgtggctggcagcatcctggccaaggccctgctggagataaaaggagcctctttggatgggctgcctcctgtcatcctccagggaccagccaatcagacgctggtgcttggctcctccgtgtggctgccctgcagagtgactgggaaccctcaacccagtgtccgatggaagaaggatgggcagtggctgcagggggatgacctccagttcaagacaatggccaacggtaccctgtacatcgccaatgtgcaggagatggacatgggcttctacagctgcgtggccaagagttccacaggggaagccacatggagcggctggcttaagatgcgggaagactggggagtatcaccagacccccctacagaacccagttcccctccgggggctccctctcagccagtggtcactgagatcaccaagaacagcattaccctgacctggaagcccaacccacaaactggggctgcagtcacgtcttatgtgatagaggccttcagcccagcagctggcaacacatggcgtactgtggcagatggcgtgcagctggagacacacacagtcagcggtctgcagcccaataccatctacctgtttctggttcgagcagtgggagcctggggcctcagtgagcccagccccgtctctgagcctgtccgtacacaggatagcagcccctctaggccagtggaggacccatggagaggccagcagggactggcggaagtggctgtgcgcctgcaggagcccatagtcctgggaccccggaccctgcaggtgtcctggactgtggatggcccagtccagctggtgcaaggtttccgggtgtcttggagggtagcaggccctgagggaggaagctggacaatgttggacctacagtccccaagccagcaaagtactgtgctaagaggactccctccagggacccaaatccagatcaaggtgcaagcccaaggccaggaggggctgggggctgaaagcctctctgtgaccaggagcattcctgaggaggcccccagtggccccccacagggagtggcggtggccttggggggtgatggcaacagcagtatcactgtgtcctgggaacctccactcccctcccagcaaaatggggtcatcacggaataccagatctggtgcctgggcaatgagagccgctttcacctcaatcgatctgcagcaggctgggcacgctccgcaatgctccgaggactggtgcccggtctcctctatcgaaccctggtcgcggcggccaccagcgcaggcgtgggcgtgcccagtgccccagtgctggtgcagctgccgtccccgccggacctggagcccgggctggaggtgggcgcggggctggcggtgcggctggcgagggtgctgcgggagcccgccttcctcgcgggcagcggcgcagcctgcggggcgctgcttctcgggctctgcgccgccctctactggcgccggaaacagcgcaaagagctcagccactacacggcctcttttgcctacacaccggcagtgtccttcccgcactcagagggcctctctggagccagttccaggccacccatgggccttggccccgccccctactcatggctggcagattcgtggccccacccatctcgaagcccctcggcccaggaacccaggggaagctgctgccctagcaatcctgacccggacgacagatattacaacgaagcgggaatctccctgtatctagctcagacggccaggggcacggccgcccctggcgagggtcctgtctatagcaccattgacccagcgggggaggagctgcagaccttccatgggggcttcccccaacatccctcaggagatctgggtccctggagccagtacgctcctccagagtggagccagggggacagtggagccaagggaggcaaagtgaagcttctggggaaacctgtgcagatgccctctctgaactggccagaagccctgcccccacctcctccttcttgtgaactgagctgcctagaagggccggaggaggagctggagggcagctcagagccagaggagtggtgcccgccaatgcctgagagaagtcacctgacggagcccagctccagtggagggtgcctggtcaccccatcccgaagggaaaccccctctcccacaccttcctatggacagcagtccacagccactcttacaccctcacctcctgaccctccccagcccccaactgacatgccccatctccatcagatgcccaggagggtgccccttgggccgagttcccctctcagtgtatcccagcccatgctgggcatccgtgaagcgaggcctgctggcttgggtgctggccctgcagcctcaccccacctcagccccagtcctgcccctagcacagccagcagtgccccaggcagaacctggcaggggaatggggagatgactcccccacttcaaggaccccgtgctcgattccggaagaaacccaaggctcttccctacaggagggagaacagtcctggggacttgcccccaccacccttgccaccgccagaggaagaggcgagctgggccctagagctgagggcagcaggcagcatgtcctccctggagcgggagcgcagtggggagaggaaagcggtccaggccgtgcccctggcagcccagcgggtgctccacccagatgaagaggcctggctcccatacagcagaccaagcttcctgtcccggggccagggcaccagcacatgttccacggccggcagcaactcttccaggggctccagcagctctaggggctcccggggccctggccggagccggagtcggagtcagagccggagccagagccaaaggccaggacagaaacgccgagaggaaccaagatgacccttgttggggcattgagaatatcatgagtgccacggggaaggggagtagggatgtcttttcccccccagcagtgatgagtggggctagctgaagcccattggtttccacgatttcaattggctgagaaggcagagagctagctcctccctttctttctttttccacctgagacttgtttataaaaaacaaaacaataaaaagagtctgatcaga

SEQ ID NO: 27020 - DNA, 4551 bp, Homo sapiens
  source 1..4551: mol_type = unassigned DNA
tcgccaagcgtggttcagccactcccgcttaaacttggcaggagaggagacggaggtctctaggtggtccagaaagccggcctagaagtttgtgtcccgatccctctactaaccggcctgtctgtaggcatcttcctttgagacgaggaacgcggaacgtctgccaataaggacatattggatcctgcagagggagagggtaggcaggtggggactgagctccgcagagaagcataggagatggaacgaccagaggattctctttccctctggagcctcaatctctccccacaatttccctgtctgaacgctctgcgccaccccctgtccccagggtcaagggtaggaccggaggacgctatgccccgcatcgtggagcagccgccagatctgctggtctcccgaggcgagcccgccacgttgccctgccgcgctgaaggccgaccccgacccaacattgagtggtacaagaacggggcgcgtgtggccactgtgcgggaggatccgcgtgcgcaccgcctgctgctgcccagcggcgccctcttcttcccgcgcatcgtgcacgggcgccgcgcgcggccggacgaaggtgtctacacttgcgtggctcgcaactacctgggggcagcagcgagcagaaacgcctcgctggaagtggcagtcctccgtgatgatttccggcagtctcctggaaacgtggtggtggcagtgggggagccagcagtactggaatgcgtgcccccccgcggccacccggagccttccgtgtcctggaggaaggacggtgcaagactcaaggaagaggaaggaaggatcacgatccgtggagggaagctgatgatgtcacatacactcaagagcgatgcaggcatgtatgtgtgcgtagcctccaacatggcgggagaacgggagagtgcggcagctgaagtcatggtactggagcgtccctcattcctgcgcagaccagtgaatcaggtggtcctggctgatgcccctgtgactttcctatgtgaggtgaagggggatcccccacctcgtctacgctggcgcaaggaggatggggaactgcccacaggcaggtatgagatccggagtgaccacagcctttggattgggcatgtgagtgccgaagatgagggaacgtacacctgtgtggcggagaacagtgtgggccgcgctgaagcatctggctccctcagtgttcacgtcccaccccagttggtgacccagccccaggaccagatggcagctcctggagagagcgtggctttccagtgcgagaccaaaggaaaccccccacctgccatcttctggcagaaggaggggagtcaggtcctgcttttccccagtcagtcacttcagccgacggggcgcttctcagtgtctccaagaggccaacttaacatcaccgcggtgcagcgtggggatgctgggtactacgtgtgccaggctgtcagtgtggctggcagcatcctggccaaggccctgctggagataaaaggagcctctttggatgggctgcctcctgtcatcctccagggaccagccaatcagacgctggtgcttggctcctccgtgtggctgccctgcagagtgactgggaaccctcaacccagtgtccgatggaagaaggatgggcagtggctgcagggggatgacctccagttcaagacaatggccaacggtaccctgtacatcgccaatgtgcaggagatggacatgggcttctacagctgcgtggccaagagttccacaggggaagccacatggagcggctggcttaagatgcgggaagactggggagtatcaccagacccccctacagaacccagttcccctccgggggctccctctcagccagtggtcactgagatcaccaagaacagcattaccctgacctggaagcccaacccacaaactggggctgcagtcacgtcttatgtgatagaggccttcagcccagcagctggcaacacatggcgtactgtggcagatggcgtgcagctggagacacacacagtcagcggtctgcagcccaataccatctacctgtttctggttcgagcagtgggagcctggggcctcagtgagcccagccccgtctctgagcctgtccgtacacaggatagcagcccctctaggccagtggaggacccatggagaggccagcagggactggcggaagtggctgtgcgcctgcaggagcccatagtcctgggaccccggaccctgcaggtgtcctggactgtggatggcccagtccagctggtgcaaggtttccgggtgtcttggagggtagcaggccctgagggaggaagctggacaatgttggacctacagtccccaagccagcaaagtactgtgctaagaggactccctccagggacccaaatccagatcaaggtgcaagcccaaggccaggaggggctgggggctgaaagcctctctgtgaccaggagcattcctgaggaggcccccagtggccccccacagggagtggcggtggccttggggggtgatggcaacagcagtatcactgtgtcctgggaacctccactcccctcccagcaaaatggggtcatcacggaataccagatctggtgcctgggcaatgagagccgctttcacctcaatcgatctgcagcaggctgggcacgctccgcaatgctccgaggactggtgcccggtctcctctatcgaaccctggtcgcggcggccaccagcgcaggcgtgggcgtgcccagtgccccagtgctggtgcagctgccgtccccgccggacctggagcccgggctggaggtgggcgcggggctggcggtgcggctggcgagggtgctgcgggagcccgccttcctcgcgggcagcggcgcagcctgcggggcgctgcttctcgggctctgcgccgccctctactggcgccggaaacagcgcaaagagctcagccactacacggcctcttttgcctacacaccggcagtgtccttcccgcactcagagggcctctctggagccagttccaggccacccatgggccttggccccgccccctactcatggctggcagattcgtggccccacccatctcgaagcccctcggcccaggaacccaggggaagctgctgccctagcaatcctgacccggacgacagatattacaacgaagcgggaatctccctgtatctagctcagacggccaggggcacggccgcccctggcgagggtcctgtctatagcaccattgacccagcgggggaggagctgcagaccttccatgggggcttcccccaacatccctcaggagatctgggtccctggagccagtacgctcctccagagtggagccagggggacagtggagccaagggaggcaaagtgaagcttctggggaaacctgtgcagatgccctctctgaactggccagaagccctgcccccacctcctccttcttgtgaactgagctgcctagaagggccggaggaggagctggagggcagctcagagccagaggagtggtgcccgccaatgcctgagagaagtcacctgacggagcccagctccagtggagggtgcctggtcaccccatcccgaagggaaaccccctctcccacaccttcctatggacagcagtccacagccactcttacaccctcacctcctgaccctccccagcccccaactgacatgccccatctccatcagatgcccaggagggtgccccttgggccgagttcccctctcagtgtatcccagcccatgctgggcatccgtgaagcgaggcctgctggcttgggtgctggccctgcagcctcaccccacctcagccccagtcctgcccctagcacagccagcagtgccccaggcagaacctggcaggggaatggggagatgactcccccacttcaaggaccccgtgctcgattccggaagaaacccaaggctcttccctacaggagggagaacagtcctggggacttgcccccaccacccttgccaccgccagaggaagaggcgagctgggccctagagctgagggcagcaggcagcatgtcctccctggagcgggagcgcagtggggagaggaaagcggtccaggccgtgcccctggcagcccagcgggtgctccacccagatgaagaggcctggctcccatacagcagaccaagcttcctgtcccggggccagggcaccagcacatgttccacggccggcagcaactcttccaggggctccagcagctctaggggctcccggggccctggccggagccggagtcggagtcagagccggagccagagccaaaggccaggacagaaacgccgagaggaaccaagatgacccttgttggggcattgagaatatcatgagtgccacggggaaggggagtagggatgtcttttcccccccagcagtgatgagtggggctagctgaagcccattggtttccacgatttcaattggctgagaaggcagagagctagctcctccctttctttctttttccacctgagacttgtttataaaaaacaaaacaataaaaagagtctgatcaga

SEQ ID NO: 27021 - DNA, 1520 bp, Homo sapiens
  source 1..1520: mol_type = unassigned DNA
ggagggagcatggccacctcccaccccaacaccaccgccactgtcctgaaactcccgaatatcgccacctccctttcctttgctggcctcttcaggctctccgtccccaacgctcacctgctctccctcaggccacccatgggccttggccccgccccctactcatggctggcagattcgtggccccacccatctcgaagcccctcggcccaggaacccaggggaagctgctgccctagcaatcctgacccggacgacagatattacaacgaagcgggaatctccctgtatctagctcagacggccaggggcacggccgcccctggcgagggtcctgtctatagcaccattgacccagcgggggaggagctgcagaccttccatgggggcttcccccaacatccctcaggagatctgggtccctggagccagtacgctcctccagagtggagccagggggacagtgctcagagccagaggagtggtgcccgccaatgcctgagagaagtcacctgacggagcccagctccagtggagggtgcctggtcaccccatcccgaagggaaaccccctctcccacaccttcctatggacagcagtccacagccactcttacaccctcacctcctgaccctccccagcccccaactgacatgccccatctccatcagatgcccaggagggtgccccttgggccgagttcccctctcagtgtatcccagcccatgctgggcatccgtgaagcgaggcctgctggcttgggtgctggccctgcagcctcaccccacctcagccccagtcctgcccctagcacagccagcagtgccccaggcagaacctggcaggggaatggggagatgactcccccacttcaaggaccccgtgctcgattccggaagaaacccaaggctcttccctacaggagggagaacagtcctggggacttgcccccaccacccttgccaccgccagaggaagaggcgagctgggccctagagctgagggcagcaggcagcatgtcctccctggagcgggagcgcagtggggagaggaaagcggtccaggccgtgcccctggcagcccagcgggtgctccacccagatgaagaggcctggctcccatacagcagaccaagcttcctgtcccggggccagggcaccagcacatgttccacggccggcagcaactcttccaggggctccagcagctctaggggctcccggggccctggccggagccggagtcggagtcagagccggagccagagccaaaggccaggacagaaacgccgagaggaaccaagatgacccttgttggggcattgagaatatcatgagtgccacggggaaggggagtagggatgtcttttcccccccagcagtgatgagtggggctagctgaagcccattggtttccacgatttcaattggctgagaaggcagagagctagctcctccctttctttctttttccacctgagacttgtttataaaaaacaaaacaataaaaagagtctgatc

SEQ ID NO: 27022 - DNA, 4710 bp, Homo sapiens
  source 1..4710: mol_type = unassigned DNA
acttcactcagcctccccagcctgcagccccactgccctctgtcttcagcttcttgctgtgtcctgagactcctggggttttcactcttctctagcaggtgtcaaagggataaggattgggatccagggataagatttaaatagaggattaaggctctgatcggagttttggttagtgtaaggataccctgtaagaaatccccgagtagatcatgagataaagcttagcgctgaagttagggtcgggggttatagctaaatggtcgaggtcagagagtttctcgcctctggtctcctcccagttctccaaggcactgagggccaggcaggaagcatcggtttcctcaaagccgcttccctcctggggcagagtctcggtcacaaacaaccaccaccggcccaccccgcccctccttccctcttcactgtgagctcagagcagcaggacaaagtgctcgggacaaggacatagggctgagagtagccatgggctctggaggagacagcctcctggggggcaggggttccctgcctctgctgctcctgctcatcatgggaggcatggctcaggactccccgccccagatcctagtccacccccaggaccagctgttccagggccctggccctgccaggatgagctgccaagcctcaggccagccacctcccaccatccgctggttgctgaatgggcagcccctgagcatggtgcccccagacccacaccacctcctgcctgatgggacccttctgctgctacagccccctgcccggggacatgcccacgatggccaggccctgtccacagacctgggtgtctacacatgtgaggccagcaaccggcttggcacggcagtcagcagaggcgctcggctgtctgtggctgtcctccgggaggatttccagatccagcctcgggacatggtggctgtggtgggtgagcagtttactctggaatgtgggccgccctggggccacccagagcccacagtctcatggtggaaagatgggaaacccctggccctccagcccggaaggcacacagtgtccggggggtccctgctgatggcaagagcagagaagagtgacgaagggacctacatgtgtgtggccaccaacagcgcaggacatagggagagccgcgcagcccgggtttccatccaggagccccaggactacacggagcctgtggagcttctggctgtgcgaattcagctggaaaatgtgacactgctgaacccggatcctgcagagggccccaagcctagaccggcggtgtggctcagctggaaggtcagtggccctgctgcgcctgcccaatcttacacggccttgttcaggacccagactgccccgggaggccagggagctccgtgggcagaggagctgctggccggctggcagagcgcagagcttggaggcctccactggggccaagactacgagttcaaagtgagaccatcctctggccgggctcgaggccctgacagcaacgtgctgctcctgaggctgccggaaaaagtgcccagtgccccacctcaggaagtgactctaaagcctggcaatggcactgtctttgtgagctgggtcccaccacctgctgaaaaccacaatggcatcatccgtggctaccaggtctggagcctgggcaacacatcactgccaccagccaactggactgtagttggtgagcagacccagctggaaatcgccacccatatgccaggctcctactgcgtgcaagtggctgcagtcactggtgctggagctggggagcccagtagacctgtctgcctccttttagagcaggccatggagcgagccacccaagaacccagtgagcatggtccctggaccctggagcagctgagggctaccttgaagcggcctgaggtcattgccacctgcggtgttgcactctggctgctgcttctgggcaccgccgtgtgtatccaccgccggcgccgagctagggtgcacctgggcccaggtctgtacagatataccagtgaggatgccatcctaaaacacaggatggatcacagtgactcccagtggttggcagacacttggcgttccacctctggctctcgggacctgagcagcagcagcagcctcagcagtcggctgggggcggatgcccgggacccactagactgtcgtcgctccttgctctcctgggactcccgaagccccggcgtgcccctgcttccagacaccagcactttttatggctccctcatcgctgagctgccctccagtaccccagccaggccaagtccccaggtcccagctgtcaggcgcctcccaccccagctggcccagctctccagcccctgttccagctcagacagcctctgcagccgcaggggactctcttctccccgcttgtctctggcccctgcagaggcttggaaggccaaaaagaagcaggagctgcagcatgccaacagttccccactgctccggggcagccactccttggagctccgggcctgtgagttaggaaatagaggttccaagaacctttcccaaagcccaggagctgtgccccaagctctggttgcctggcgggccctgggaccgaaactcctcagctcctcaaatgagctggttactcgtcatctccctccagcacccctctttcctcatgaaactcccccaactcagagtcaacagacccagcctccggtggcaccacaggctccctcctccatcctgctgccagcagcccccatccccatccttagcccctgcagtccccctagcccccaggcctcttccctctctggccccagcccagcttccagtcgcctgtccagctcctcactgtcatccctgggggaggatcaagacagcgtgctgacccctgaggaggtagccctgtgcttggaactcagtgagggtgaggagactcccaggaacagcgtctctcccatgccaagggctccttcaccccccaccacctatgggtacatcagcgtcccaacagcctcagagttcacggacatgggcaggactggaggaggggtggggcccaaggggggagtcttgctgtgcccacctcggccctgcctcacccccacccccagcgagggctccttagccaatggttggggctcagcctctgaggacaatgccgccagcgccagagccagccttgtcagctcctccgatggctccttcctcgctgatgctcactttgcccgggccctggcagtggctgtggatagctttggtttcggtctagagcccagggaggcagactgcgtcttcatagatgcctcatcacctccctccccacgggatgagatcttcctgacccccaacctctccctgcccctgtgggagtggaggccagactggttggaagacatggaggtcagccacacccagcggctgggaagggggatgcctccctggccccctgactctcagatctcttcccagagaagtcagctccactgtcgtatgcccaaggctggtgcttctcctgtagattactcctgaaccgtgtccctgagacttcccagacgggaatcagaaccacttctcctgtccacccacaagacctgggctgtggtgtgtgggtcttggcctgtgtttctctgcagctggggtccaccttcccaagcctccagagagttctccctccacgattgtgaaaacaaatgaaaacaaaattagagcaaagctgacctggagccctcagggagcaaaacatcatctccacctgactcctagccactgctttctcctctgtgccatccactcccaccaccaggttgttttggcctgaggagcagccctgcctgctgctcttcccccaccatttggatcacaggaagtggaggagccagaggtgcctttgtggaggacagcagtggctgctgggagagggctgtggaggaaggagcttctcggagccccctctcagccttacctgggcccctcctctagagaagagctcaactctctcccaacctcaccatggaaagaaaataattatgaatgccactgaggcactgaggccctacctcatgccaaacaaagggttcaaggctgggtctagcgaggatgctgaaggaagggaggtatgagaccgtaggtcaaaagcaccatcctcgtactgttgtcactatgagcttaagaaatttgataccataaaatggtaaagacttgagttctgtgagatcattccccggagcaccatttttaggggagcacctggagagatggcaagaatttcctgagttaggcagggatcaggcattcattgacactcagggagtgtcacacatttctgttctgcaattaaagggagaatgaggttcatccaccaaattttaagcagaatataggaagggcaggggtggggagtttcagggtctgctggtcctggcaacttatattaaatccacctcctcaagataagccttagggatatttatggctgagggaagtgggatggtctaaggcatggggaagggtgattggctgtggggaaaatgaagtaataggttcattctgcccaagtgtacttggggttcatggcatttcataaggacatttgtgtagaaaattgttttgctggctgggcacggtggctcacgcctgtaatcccagcactttgggaggcggaggtaggcagatcatgaggtcaggagatcgagaccatcctggctaacatggtgaaaccccgtctctact

SEQ ID NO: 27023 - DNA, 3932 bp, Homo sapiens
  source 1..3932: mol_type = unassigned DNA
aaagtgctcgggacaaggacatagggctgagagtagccatgggctctggaggagacagcctcctggggggcaggggttccctgcctctgctgctcctgctcatcatggtcctccgggaggatttccagatccagcctcgggacatggtggctgtggtgggtgagcagtttactctggaatgtgggccgccctggggccacccagagcccacagtctcatggtggaaagatgggaaacccctggccctccagcccggaaggcacacagtgtccggggggtccctgctgatggcaagagcagagaagagtgacgaagggacctacatgtgtgtggccaccaacagcgcaggacatagggagagccgcgcagcccgggtttccatccaggagccccaggactacacggagcctgtggagcttctggctgtgcgaattcagctggaaaatgtgacactgctgaacccggatcctgcagagggccccaagcctagaccggcggtgtggctcagctggaaggtcagtggccctgctgcgcctgcccaatcttacacggccttgttcaggacccagactgccccgggaggccagggagctccgtgggcagaggagctgctggccggctggcagagcgcagagcttggaggcctccactggggccaagactacgagttcaaagtgagaccatcctctggccgggctcgaggccctgacagcaacgtgctgctcctgaggctgccggaaaaagtgcccagtgccccacctcaggaagtgactctaaagcctggcaatggcactgtctttgtgagctgggtcccaccacctgctgaaaaccacaatggcatcatccgtggctaccaggtctggagcctgggcaacacatcactgccaccagccaactggactgtagttggtgagcagacccagctggaaatcgccacccatatgccaggctcctactgcgtgcaagtggctgcagtcactggtgctggagctggggagcccagtagacctgtctgcctccttttagagcaggccatggagcgagccacccaagaacccagtgagcatggtccctggaccctggagcagctgagggctaccttgaagcggcctgaggtcattgccacctgcggtgttgcactctggctgctgcttctgggcaccgccgtgtgtatccaccgccggcgccgagctagggtgcacctgggcccaggtctgtacagatataccagtgaggatgccatcctaaaacacaggatggatcacagtgactcccagtggttggcagacacttggcgttccacctctggctctcgggacctgagcagcagcagcagcctcagcagtcggctgggggcggatgcccgggacccactagactgtcgtcgctccttgctctcctgggactcccgaagccccggcgtgcccctgcttccagacaccagcactttttatggctccctcatcgctgagctgccctccagtaccccagccaggccaagtccccaggtcccagctgtcaggcgcctcccaccccagctggcccagctctccagcccctgttccagctcagacagcctctgcagccgcaggggactctcttctccccgcttgtctctggcccctgcagaggcttggaaggccaaaaagaagcaggagctgcagcatgccaacagttccccactgctccggggcagccactccttggagctccgggcctgtgagttaggaaatagaggttccaagaacctttcccaaagcccaggagctgtgccccaagctctggttgcctggcgggccctgggaccgaaactcctcagctcctcaaatgagctggttactcgtcatctccctccagcacccctctttcctcatgaaactcccccaactcagagtcaacagacccagcctccggtggcaccacaggctccctcctccatcctgctgccagcagcccccatccccatccttagcccctgcagtccccctagcccccaggcctcttccctctctggccccagcccagcttccagtcgcctgtccagctcctcactgtcatccctgggggaggatcaagacagcgtgctgacccctgaggaggtagccctgtgcttggaactcagtgagggtgaggagactcccaggaacagcgtctctcccatgccaagggctccttcaccccccaccacctatgggtacatcagcgtcccaacagcctcagagttcacggacatgggcaggactggaggaggggtggggcccaaggggggagtcttgctgtgcccacctcggccctgcctcacccccacccccagcgagggctccttagccaatggttggggctcagcctctgaggacaatgccgccagcgccagagccagccttgtcagctcctccgatggctccttcctcgctgatgctcactttgcccgggccctggcagtggctgtggatagctttggtttcggtctagagcccagggaggcagactgcgtcttcatagatgcctcatcacctccctccccacgggatgagatcttcctgacccccaacctctccctgcccctgtgggagtggaggccagactggttggaagacatggaggtcagccacacccagcggctgggaagggggatgcctccctggccccctgactctcagatctcttcccagagaagtcagctccactgtcgtatgcccaaggctggtgcttctcctgtagattactcctgaaccgtgtccctgagacttcccagacgggaatcagaaccacttctcctgtccacccacaagacctgggctgtggtgtgtgggtcttggcctgtgtttctctgcagctggggtccaccttcccaagcctccagagagttctccctccacgattgtgaaaacaaatgaaaacaaaattagagcaaagctgacctggagccctcagggagcaaaacatcatctccacctgactcctagccactgctttctcctctgtgccatccactcccaccaccaggttgttttggcctgaggagcagccctgcctgctgctcttcccccaccatttggatcacaggaagtggaggagccagaggtgcctttgtggaggacagcagtggctgctgggagagggctgtggaggaaggagcttctcggagccccctctcagccttacctgggcccctcctctagagaagagctcaactctctcccaacctcaccatggaaagaaaataattatgaatgccactgaggcactgaggccctacctcatgccaaacaaagggttcaaggctgggtctagcgaggatgctgaaggaagggaggtatgagaccgtaggtcaaaagcaccatcctcgtactgttgtcactatgagcttaagaaatttgataccataaaatggtaaagacttgagttctgtgagatcattccccggagcaccatttttaggggagcacctggagagatggcaagaatttcctgagttaggcagggatcaggcattcattgacactcagggagtgtcacacatttctgttctgcaattaaagggagaatgaggttcatccaccaaattttaagcagaatataggaagggcaggggtggggagtttcagggtctgctggtcctggcaacttatattaaatccacctcctcaagataagccttagggatatttatggctgagggaagtgggatggtctaaggcatggggaagggtgattggctgtggggaaaatgaagtaataggttcattctgcccaagtgtacttggggttcatggcatttcataaggacatttgtgtagaaaattgttttgctggctgggcacggtggctcacgcctgtaatcccagcactttgggaggcggaggtaggcagatcatgaggtcaggagatcgagaccatcctggctaacatggtgaaaccccgtctctact

SEQ ID NO: 27024 - DNA, 3071 bp, Homo sapiens
  source 1..3071: mol_type = unassigned DNA
cttccctcttcactgtgagctcagagcagcaggacaaagtgctcgggacaaggacatagggctgagagtagccatgggctctggaggagacagcctcctggggggcaggggttccctgcctctgctgctcctgctcatcatggccccctgcccggggacatgcccacgatggccaggccctgtccacagacctgggtgtctacacatgtgaggccagcaaccggcttggcacggcagtcagcagaggcgctcggctgtctgtggctgtcctccgggaggatttccagatccagcctcgggacatggtggctgtggtgggtgagcagtttactctggaatgtgggccgccctggggccacccagagcccacagtctcatggtggaaagatgggaaacccctggccctccagcccggaaggcacacagtgtccggggggtccctgctgatggcaagagcagagaagagtgacgaagggacctacatgtgtgtggccaccaacagcgcaggacatagggagagccgcgcagcccgggtttccatccaggagccccaggactacacggagcctgtggagcttctggctgtgcgaattcagctggaaaatgtgacactgctgaacccggatcctgcagagggccccaagcctagaccggcggtgtggctcagctggaaggtcagtggccctgctgcgcctgcccaatcttacacggccttgttcaggacccagactgccccgggaggccagggagctccgtgggcagaggagctgctggccggctggcagagcgcagagcttggaggcctccactggggccaagactacgagttcaaagtgagaccatcctctggccgggctcgaggccctgacagcaacgtgctgctcctgaggctgccggaaaaagtgcccagtgccccacctcaggaagtgactctaaagcctggcaatggcactgtctttgtgagctgggtcccaccacctgctgaaaaccacaatggcatcatccgtggctaccaggtctggagcctgggcaacacatcactgccaccagccaactggactgtagttggtgagcagacccagctggaaatcgccacccatatgccaggctcctactgcgtgcaagtggctgcagtcactggtgctggagctggggagcccagtagacctgtctgcctccttttagagcaggccatggagcgagccacccaagaacccagtgagcatggtccctggaccctggagcagctgagggctaccttgaagcggcctgaggtcattgccacctgcggtgttgcactctggctgctgcttctgggcaccgccgtgtgtatccaccgccggcgccgagctagggtgcacctgggcccaggtctgtacagatataccagtgaggatgccatcctaaaacacaggatggatcacagtgactcccagtggttggcagacacttggcgttccacctctggctctcgggacctgagcagcagcagcagcctcagcagtcggctgggggcggatgcccgggacccactagactgtcgtcgctccttgctctcctgggactcccgaagccccggcgtgcccctgcttccagacaccagcactttttatggctccctcatcgctgagctgccctccagtaccccagccaggccaagtccccaggtcccagctgtcaggcgcctcccaccccagctggcccagctctccagcccctgttccagctcagacagcctctgcagccgcaggggactctcttctccccgcttgtctctggcccctgcagaggcttggaaggccaaaaagaagcaggagctgcagcatgccaacagttccccactgctccggggcagccactccttggagctccgggcctgtgagttaggaaatagaggttccaagaacctttcccaaagcccaggagctgtgccccaagctctggttgcctggcgggccctgggaccgaaactcctcagctcctcaaatgagctggttactcgtcatctccctccagcacccctctttcctcatgaaactcccccaactcagagtcaacagacccagcctccggtggcaccacaggctccctcctccatcctgctgccagcagcccccatccccatccttagcccctgcagtccccctagcccccaggcctcttccctctctggccccagcccagcttccagtcgcctgtccagctcctcactgtcatccctgggggaggatcaagacagcgtgctgacccctgaggaggtagccctgtgcttggaactcagtgagggtgaggagactcccaggaacagcgtctctcccatgccaagggctccttcaccccccaccacctatgggtacatcagcgtcccaacagcctcagagttcacggacatgggcaggactggaggaggggtggggcccaaggggggagtcttgctgtgcccacctcggccctgcctcacccccacccccagcgagggctccttagccaatggttggggctcagcctctgaggacaatgccgccagcgccagagccagccttgtcagctcctccgatggctccttcctcgctgatgctcactttgcccgggccctggcagtggctgtggatagctttggtttcggtctagagcccagggaggcagactgcgtcttcatagatgcctcatcacctccctccccacgggatgagatcttcctgacccccaacctctccctgcccctgtgggagtggaggccagactggttggaagacatggaggtcagccacacccagcggctgggaagggggatgcctccctggccccctgactctcagatctcttcccagagaagtcagctccactgtcgtatgcccaaggctggtgcttctcctgtagattactcctgaaccgtgtccctgagacttcccagacgggaatcagaaccacttctcctgtccacccacaagacctgggctgtggtgtgtgggtcttggcctgtgtttctctgcagctggggtccaccttcccaagcctccagagagttctccctccacgattgtgaaaacaaatgaaaacaaaattagagc

SEQ ID NO: 27025 - DNA, 5936 bp, Homo sapiens
  source 1..5936: mol_type = unassigned DNA
gcccgccacgctgtcggcgctatagcaacggtagctagctgcagggccagtggcacgctaggccatgtctggtccaactgatgagactgcaggagacttgcctgtgaaagatacaggtctaaacctctttggaatgggagggttacaagaaacttcaacaacacggacaatgaagtctcgccaggcagtgtcacgtgtcagtcgtgaggaactggaagacagatttttgcgtttgcatgatgagaacattttacttaaacagcatgcccgcaagcaggaggataaaattaaaagaatggccaccaagttaatacggctagttaatgacaagaaaagatatgagcgggttggtggcggccccaagcggctgggacgagatgtggaaatggaagaaatgattgagcagctgcaagagaaagttcatgagcttgaaaaacaaaatgaaaccctcaaaaacagactgatttcagccaaacagcaacttcaaacccagggttacaggcaaactccatacaataatgtacaatctcgtattaacactgggcgtagaaaagcaaatgaaaatgctggtttacaggaatgccccaggaaaggtataaaattccaagatgcagatgtagcagaaactccacatcccatgtttacaaaatatggcaacagtttacttgaagaagccagaggagaaataagaaatttagaaaacgttattcagtcacaaagaggccagatagaggagttagagcacttggctgagatcctgaaaactcagttgaggagaaaagaaaatgaaattgagttatctcttcttcagcttcgagaacagcaagctacagatcaaaggtcaaatattcgggacaatgtagaaatgattaagcttcataaacagctagtagagaaaagcaatgctctttcagcaatggaaggaaaatttattcagcttcaagagaagcaaagaactctcagaatcagccacgatgctttgatggcaaatggggatgaattaaacatgcaacttaaagagcagcgtttaaaatgctgcagtcttgagaaacaattacattctatgaagttttctgaaagaagaatagaagagctgcaggatagaattaatgatttagaaaaggaacgggaacttttaaaggaaaactatgataaactttatgacagtgccttcagtgctgcccatgaagagcaatggaagttaaaggagcaacagctgaaagtgcagattgctcagctcgagactgccttgaagtctgacttaacagacaaaactgaaatccttgacagattaaaaactgaaagagatcaaaatgaaaaactcgttcaagagaatagagaactacagttacagtatctggaacaaaagcaacaacttgatgaacttaaaaaacgcataaaattgtacaaccaggagaatgatattaatgctgatgaattgagtgaagctctcctacttataaaggctcaaaaagaacaaaaaaatggagacctttcctttttagtgaaagtagatagtgaaattaataaagatctagaacgctctatgagagagctgcaagcaactcatgcagaaacggtgcaagagctggaaaagacaagaaacatgctaattatgcaacacaaaattaataaagattatcagatggaggttgaggcagtgacccgtaagatggaaaatttgcagcaagattatgaactcaaagtggaacagtatgttcatcttcttgatatcagggctgcacgtatccataaactagaagcccaattaaaggatattgcctatggcaccaagcagtacaaatttaaaccagaaatcatgccagatgactctgttgatgaatttgatgaaaccatccacttagaacgaggcgaaaatctatttgaaatccatatcaacaaagtaaccttttcttctgaagttttacaggcatctggagataaagagcctgtcactttctgtacctatgctttctatgattttgaactacagacaactcccgtagtgcgaggccttcatcccgaatataacttcacttctcaatatcttgttcatgttaatgacttatttttgcaatatattcagaagaatactatcacccttgaggtccaccaggcttatagcacagaatatgaaacaattgcagcatgtcaattaaaatttcacgaaattcttgaaaaaagcggccgaatattttgtacagcaagtttgattggaacaaaaggagacatcccaaattttggcacagtggaatactggttccgattaagagttcccatggatcaagcaattcgactttatcgagaaagggcaaaggctttggggtatataacatcaaattttaaggggccagagcatatgcagtcgttaagtcagcaagcacccaaaactgctcaactcagttctacagattccacagatggcaacttaaatgaacttcacattacaataagatgttgcaaccacctgcagtcccgagcaagccacctgcagccacacccatatgttgtgtacaagttttttgattttgcagaccatgatacagctatcattcccagtagcaatgatccacagtttgatgatcatatgtatttcccagtgccaatgaatatggacttggatcgataccttaagtcagagtctctgagtttttatgtttttgatgatagtgatacccaggagaatatttacataggaaaagtcaatgtgcctctgatttcgttggcacatgacaggtgtatctcaggaatatttgagttaacagaccatcaaaagcatcctgctggcaccatccatgttatattgaaatggaaatttgcttaccttccaccaagtggatcaataacaactgaagacttaggaaatttcattcgcagcgaagagccagaagttgttcaaagacttcctccagcatcctctgttagcacactagttttagcaccaagacctaaaccaagacaacgtttaacacctgtagataagaaggtatctttcgtggatatcatgccacatcagagtgatgtttcacaagaaggcagtgtagatgaggtaaaagagaatactgagaaaatgcagcaaggaaaagatgatgtgtctttactatctgaaggtcagcttgcagaacaaagcttggcatcttctgaagatgaaacagaaataacagaggacttggaaccagaagttgaagaggacatgtcagcttctgacagtgatgactgtattattccaggtcctatctccaagaatatcaaacagccatcagaaaaaattcggattgagatcatagctctaagccttaatgattctcaagtaaccatggatgacactatccaacggctgtttgttgagtgtcgattctacagtcttcctgctgaagagacacccgtgtcacttccaaaacccaagagtgggcagtgggtctactataactatagcaatgtgatctacgtggataaagaaaacaacaaagcaaagagagacatcttaaaagctatactacaaaaacaagagatgcctaatagaagccttcgcttcaccgtggtcagtgaccctccagaggacgagcaggacctggagtgtgaggacattggcgtggctcacgtcgaccttgccgacatgtttcaggaagggagggacctcattgagcaaaatatcgatgtttttgatgcacgagcagatggtgaaggtattggcaagctcagggtaacagtcgaagctctccatgccctccagtctgtctacaagcaatacagagatgacttggaggcttgaaagcaaatgctccagaggcatctcctactcctcagtaaatgctcacatgaaagttcctacatgagatttttgtaattactctggtgtatataatctataattcatgggaagctgggagcggggagacctgggtttgaagtgttgaagttttgtatactttttcatttgtttatttctctattccctccttctcataactgccacccctcaggacttaagttctccataatgggcagtaccttctcaataatttatacctacgtgatagcgtgagaaagtctatttgcattttcaacattttcttaggaagaaccgaaatgcaattcccatttttatttttaataagcaaaagcataaatcttagaaaacctatgaaaaagaaatacttttatgttatccctaatcgtcccactaaatggaatgcctatgattagcttcattaagagttttatactgtgaagattttattagaagcaatatatgaaaattacttggattaatgtgttaatcttcctctttaaaatgctaatatccattttatgcacattaaagctcagtatgcattttctttgatgcatgcagtttctatcaattaaatataaagaatgaaacttagcaccaacttattcaatgactgcaagttttttgtctttctttcttaaaagttcattctatttgtattattttcatacatttgtaatggtgacccagggatgtatatataaaaaggagatagttatatagatagatgtgaaatttacacgttgaaaacttagtatatgacacagaaagaaattatgaaaagtataactcaaattctgatatgcttagttagacgtgaaaggagtatctttttatcattttttaaatttacatcaagccagtacagtgccagggtgtatctgggtaaccagatcctcgaaaagcagctctgaaagttaattttctagcttttacccaatctcactgaaggatttaattgatatttttaatggagctgtgaatcaatgctgcaaaggaattgtctctagaggtctaggatataatgcatttcattttttaatttacttttttatttgtcattttcttcaaaggatttttataggctgtgggttttcactgtttgcaaacaggctatgttccttcttaagcatatgtaaagtattcagggagataagtaatttattaaaatctacctaatttgccgtgatatattaaatctctgcttcagtgatcacagaccatttcatttagagaattaggcattccctctttgtgtgattaaagctctggaaaatgagttctttgctcctatttgtgaacattcaaagcctgctaatggcaagaagatggaatagattatgagacaattcattacagttcaatagaaaaaaaaagcagctataatgcaaaaatgcaagtatgaatatctgcatatagtttgaaccatctgtgctctaatggcttcaataatgactctcgtctttagaaggctttgaaatgacatccgtacaatattaatttgttgatgtacattgtgggaccagtagagtatgatctgaccacagaaatctataaattctgtctataccactgggcctccctgtcctggggcctgccatctccgagaagaatcttgctctcatccaactctgcaaatcttcataacaactcgttcctctggaaccttctggagaccacaaacatctgcagactaaacctctccagtcctagtaaacaaccacatgtttgttgtcacttcggctggctctgagctcatttttttggcccctttttctagctttctttggctttatgcagttacagtgtcattaaggcccataatattccctgcagtaatttaaaacagccagattataccctgggattaactgagtggtttttgagacatttattgtggtattctcccaggaggtttgtattattgttgtaaaatgttacatcccaaactaaataacccttctgcagggagaagaaccagattgcactgacttcttaggatcattaagtggaaaggaaaagtttttcttagaaaacttatgggacccagtcacctgtatggaatgtatatctcagacaagatgagagaaacagccatgtttctgtcacattgtttactgtcatattaaagatatctagtttt

SEQ ID NO: 27026 - DNA, 6176 bp, Homo sapiens
  source 1..6176: mol_type = unassigned DNA
gcccgccacgctgtcggcgctatagcaacggtagctagctgcagggccagtggcacgctaggccatgtctggtccaactgatgagactgcaggagacttgcctgtgaaagatacaggtctaaacctctttggaatgggagggttacaagaaacttcaacaacacggacaatgaagtctcgccaggcagtgtcacgtgtcagtcgtgaggaactggaagacagatttttgcgtttgcatgatgagaacattttacttaaacagcatgcccgcaagcaggaggataaaattaaaagaatggccaccaagttaatacggctagttaatgacaagaaaagatatgagcgggttggtggcggccccaagcggctgggacgagatgtggaaatggaagaaatgattgagcagctgcaagagaaagttcatgagcttgaaaaacaaaatgaaaccctcaaaaacagactgatttcagccaaacagcaacttcaaacccagggttacaggcaaactccatacaataatgtacaatctcgtattaacactgggcgtagaaaagcaaatgaaaatgctggtttacaggaatgccccaggaaaggtataaaattccaagatgcagatgtagcagaaactccacatcccatgtttacaaaatatggcaacagtttacttgaagaagccagaggagaaataagaaatttagaaaacgttattcagtcacaaagaggccagatagaggagttagagcacttggctgagatcctgaaaactcagttgaggagaaaagaaaatgaaattgagttatctcttcttcagcttcgagaacagcaagctacagatcaaaggtcaaatattcgggacaatgtagaaatgattaagcttcataaacagctagtagagaaaagcaatgctctttcagcaatggaaggaaaatttattcagcttcaagagaagcaaagaactctcagaatcagccacgatgctttgatggcaaatggggatgaattaaacatgcaacttaaagagcagcgtttaaaatgctgcagtcttgagaaacaattacattctatgaagttttctgaaagaagaatagaagagctgcaggatagaattaatgatttagaaaaggaacgggaacttttaaaggaaaactatgataaactttatgacagtgccttcagtgctgcccatgaagagcaatggaagttaaaggagcaacagctgaaagtgcagattgctcagctcgagactgccttgaagtctgacttaacagacaaaactgaaatccttgacagattaaaaactgaaagagatcaaaatgaaaaactcgttcaagagaatagagaactacagttacagtatctggaacaaaagcaacaacttgatgaacttaaaaaacgcataaaattgtacaaccaggagaatgatattaatgctgatgaattgagtgaagctctcctacttataaaggctcaaaaagaacaaaaaaatggagacctttcctttttagtgaaagtagatagtgaaattaataaagatctagaacgctctatgagagagctgcaagcaactcatgcagaaacggtgcaagagctggaaaagacaagaaacatgctaattatgcaacacaaaattaataaagattatcagatggaggttgaggcagtgacccgtaagatggaaaatttgcagcaagattatgaactcaaagtggaacagtatgttcatcttcttgatatcagggctgcacgtatccataaactagaagcccaattaaaggatattgcctatggcaccaagcagtacaaatttaaaccagaaatcatgccagatgactctgttgatgaatttgatgaaaccatccacttagaacgaggcgaaaatctatttgaaatccatatcaacaaagtaaccttttcttctgaagttttacaggcatctggagataaagagcctgtcactttctgtacctatgctttctatgattttgaactacagacaactcccgtagtgcgaggccttcatcccgaatataacttcacttctcaatatcttgttcatgttaatgacttatttttgcaatatattcagaagaatactatcacccttgaggtccaccaggcttatagcacagaatatgaaacaattgcagcatgtcaattaaaatttcacgaaattcttgaaaaaagcggccgaatattttgtacagcaagtttgattggaacaaaaggagacatcccaaattttggcacagtggaatactggttccgattaagagttcccatggatcaagcaattcgactttatcgagaaagggcaaaggctttggggtatataacatcaaattttaaggggccagagcatatgcagtcgttaagtcagcaagcacccaaaactgctcaactcagttctacagattccacagatggcaacttaaatgaacttcacattacaataagatgttgcaaccacctgcagtcccgagcaagccacctgcagccacacccatatgttgtgtacaagttttttgattttgcagaccatgatacagctatcattcccagtagcaatgatccacagtttgatgatcatatgtatttcccagtgccaatgaatatggacttggatcgataccttaagtcagagtctctgagtttttatgtttttgatgatagtgatacccaggagaatatttacataggaaaagtcaatgtgcctctgatttcgttggcacatgacaggtgtatctcaggaatatttgagttaacagaccatcaaaagcatcctgctggcaccatccatgttatattgaaatggaaatttgcttaccttccaccaagtggatcaataacaactgaagacttaggaaatttcattcgcagcgaagagccagaagttgttcaaagacttcctccagcatcctctgttagcacactagttttagcaccaagacctaaaccaagacaacgtttaacacctgtagataagaaggtatctttcgtggatatcatgccacatcagagtgatgagacttctcctcctcctgaagataggaaggaaatttcaccagaggtagagcatataccagaaatagaaattaatatgctgactgttccacatgttcccaaggtttcacaagaaggcagtgtagatgaggtaaaagagaatactgagaaaatgcagcaaggaaaagatgatgtgtctttactatctgaaggtcagcttgcagaacaaagcttggcatcttctgaagatgaaacagaaataacagaggacttggaaccagaagttgaagaggacatgtcagcttctgacagtgatgactgtattattccaggtcctatctccaagaatatcaaacagagtctcgcattgtctcccgggctggggtgcagtagcgcgatctcagctcactgcaacttccgcctcccgggttccagcgattttcctgcctcagcctcccaagtagatgggattacaggtgcctgccaccacacccagccatcagaaaaaattcggattgagatcatagctctaagccttaatgattctcaagtaaccatggatgacactatccaacggctgtttgttgagtgtcgattctacagtcttcctgctgaagagacacccgtgtcacttccaaaacccaagagtgggcagtgggtctactataactatagcaatgtgatctacgtggataaagaaaacaacaaagcaaagagagacatcttaaaagctatactacaaaaacaagagatgcctaatagaagccttcgcttcaccgtggtcagtgaccctccagaggacgagcaggacctggagtgtgaggacattggcgtggctcacgtcgaccttgccgacatgtttcaggaagggagggacctcattgagcaaaatatcgatgtttttgatgcacgagcagatggtgaaggtattggcaagctcagggtaacagtcgaagctctccatgccctccagtctgtctacaagcaatacagagatgacttggaggcttgaaagcaaatgctccagaggcatctcctactcctcagtaaatgctcacatgaaagttcctacatgagatttttgtaattactctggtgtatataatctataattcatgggaagctgggagcggggagacctgggtttgaagtgttgaagttttgtatactttttcatttgtttatttctctattccctccttctcataactgccacccctcaggacttaagttctccataatgggcagtaccttctcaataatttatacctacgtgatagcgtgagaaagtctatttgcattttcaacattttcttaggaagaaccgaaatgcaattcccatttttatttttaataagcaaaagcataaatcttagaaaacctatgaaaaagaaatacttttatgttatccctaatcgtcccactaaatggaatgcctatgattagcttcattaagagttttatactgtgaagattttattagaagcaatatatgaaaattacttggattaatgtgttaatcttcctctttaaaatgctaatatccattttatgcacattaaagctcagtatgcattttctttgatgcatgcagtttctatcaattaaatataaagaatgaaacttagcaccaacttattcaatgactgcaagttttttgtctttctttcttaaaagttcattctatttgtattattttcatacatttgtaatggtgacccagggatgtatatataaaaaggagatagttatatagatagatgtgaaatttacacgttgaaaacttagtatatgacacagaaagaaattatgaaaagtataactcaaattctgatatgcttagttagacgtgaaaggagtatctttttatcattttttaaatttacatcaagccagtacagtgccagggtgtatctgggtaaccagatcctcgaaaagcagctctgaaagttaattttctagcttttacccaatctcactgaaggatttaattgatatttttaatggagctgtgaatcaatgctgcaaaggaattgtctctagaggtctaggatataatgcatttcattttttaatttacttttttatttgtcattttcttcaaaggatttttataggctgtgggttttcactgtttgcaaacaggctatgttccttcttaagcatatgtaaagtattcagggagataagtaatttattaaaatctacctaatttgccgtgatatattaaatctctgcttcagtgatcacagaccatttcatttagagaattaggcattccctctttgtgtgattaaagctctggaaaatgagttctttgctcctatttgtgaacattcaaagcctgctaatggcaagaagatggaatagattatgagacaattcattacagttcaatagaaaaaaaaagcagctataatgcaaaaatgcaagtatgaatatctgcatatagtttgaaccatctgtgctctaatggcttcaataatgactctcgtctttagaaggctttgaaatgacatccgtacaatattaatttgttgatgtacattgtgggaccagtagagtatgatctgaccacagaaatctataaattctgtctataccactgggcctccctgtcctggggcctgccatctccgagaagaatcttgctctcatccaactctgcaaatcttcataacaactcgttcctctggaaccttctggagaccacaaacatctgcagactaaacctctccagtcctagtaaacaaccacatgtttgttgtcacttcggctggctctgagctcatttttttggcccctttttctagctttctttggctttatgcagttacagtgtcattaaggcccataatattccctgcagtaatttaaaacagccagattataccctgggattaactgagtggtttttgagacatttattgtggtattctcccaggaggtttgtattattgttgtaaaatgttacatcccaaactaaataacccttctgcagggagaagaaccagattgcactgacttcttaggatcattaagtggaaaggaaaagtttttcttagaaaacttatgggacccagtcacctgtatggaatgtatatctcagacaagatgagagaaacagccatgtttctgtcacattgtttactgtcatattaaagatatctagtttt

SEQ ID NO: 27027 - DNA, 3759 bp, Homo sapiens
  source 1..3759: mol_type = unassigned DNA
cgcaacttccgggacagaggctgtggctggaaggagctgggcatccggcctgaggcgcagcggtcgcgttagttcggcccaatggcggcaccgctgcttcacacgcgtttgccgggagatgcggccgcttcgtcctctgcagttaagaagctgggcgcgtcgaggactgggatttcaaatatgcgtgcattagagaatgactttttcaattctcccccaagaaaaactgttcggtttggtggaactgtgacagaagtcttgctgaagtacaaaaagggtgaaacaaatgactttgagttgttgaagaaccagctgttagatccagacataaaggatgaccagatcatcaactggctgctagaattccgttcttctatcatgtacttgacaaaagactttgagcaacttatcagtattatattaagattgccttggttgaatagaagtcaaacagtagtggaagagtatttggcttttcttggtaatcttgtatcagcacagactgttttcctcagaccgtgtctcagcatgattgcttcccattttgtgcctccccgagtgatcattaaggaaggcgatgtagatgtttcagattctgatgatgaagatgataatcttcctgcaaattttgacacatgtcacagagccttgcaaataatagcaagatatgtaccatcgacaccgtggtttctcatgccaatactggtggaaaaatttccatttgttcgaaaatcagagagaacactggaatgttacgttcataacttactaaggattagtgtatattttccaaccttgaggcatgaaattctggagcttattattgaaaaactactcaagttggatgtgaatgcatcccggcagggtattgaagatgctgaagaaacagcaactcaaacttgtggtgggacagattccacggaaggattgtttaatatggatgaagatgaagaaactgaacatgaaacaaaggctggtcctgaacggctcgaccagatggtgcatcctgtagccgagcgcctggacatcctgatgtctttggttttgtcctacatgaaggatgtctgctatgtagatggtaaggttgataacggcaaaacaaaggatctatatcgcgacctgataaacatctttgacaaactcctgttgcccacccatgcctcctgccatgtacagtttttcatgttttacctctgtagtttcaaattgggattcgcagaggcatttttggaacatctctggaaaaaattgcaggacccaagtaatcctgccatcatcaggcaggctgctggaaattatattggaagctttttggcaagagctaaatttattcctcttattactgtaaaatcatgcctagatcttttggttaactggctgcacatataccttaataaccaggattcgggaacaaaggcattctgcgatgttgctctccatggaccattttactcagcctgccaagctgtgttctacacctttgtttttagacacaagcagcttttgagcggaaacctgaaagaaggtttgcagtatcttcagagtctgaattttgagcggatagtgatgagccagctaaatcccctgaagatttgcctgccctcagtggttaacttttttgctgcaatcacaaataagtaccagctcgtcttctgctacaccatcattgagaggaacaatcgccagatgctgccagtcattaggagtaccgctggaggagactcagtgcagatctgcacaaacccgctggacaccttcttcccctttgatccctgtgtgctgaagaggtcaaagaaattcattgatcctatttatcaggtgtgggaagacatgagtgctgaagagctacaggagttcaagaaacccatgaaaaaggacatagtggaagatgaagatgatgactttctgaaaggcgaagtgccccagaatgataccgtgattgggatcacaccaagctcctttgacacgcatttccgaagtccttcaagtagtgtgggctccccacccgtgttgtacatgcaacccagtcccctctgacggcagaaatttgtgactgagatgtgacatttgggattccccatcacttgtcatgccctcagcacccagcttgtgccattgggcattgatggcattgaactagagcgagtgcctgcctcggctgtggcacttccaggttcgactgaatcaagcatctgaagactgggtttttttgttgttgttgttccccttacagacaaaatgaagactatcatgtgcaatcttttacagtggggttgatgatacatttggaaggatttgcttgtttaatatgtacattttttgtgttaacagctttttgacacaattactgggtaatttctaatataggcagcagactgttttacgggttgctgttttaacatgggtttttgtcagatccatggtcttaggacttgactgatgagctttcagtgaagaatcctctaagataaaacttctatttaaagactttaactagaaagtgtttattttggctacattgttcaccttctgctgtattggtatttgtctgttgggatttcaagggagtgtagagaagacagaaggaaagctgagagctggcccgacatggtctgggacacagagttggagctggcactgaagatctccagggacttcagagaccaataaaagcccatagggaagagagagaggatatagggaaacagaatcagatgtgtaatatacttggcacagcgaaaaaatggatttaaaagacaaaaatggaggtccaggtagatgtaattcacacagactgaaagtgagttcgggcttgtgtaaaacacatgagattggatttgaccccttggctctcaagtgtccccttagatctagaactgctccttggtggccattagatcgagtcagttttgatctgcatcacttagttattgggaatttctttgttggaaacaggaaaatttttttagattatttggtgtacggttttgctcacaacaataggtggaagttgctagtgcagtcttggtctgatggctgtgtgcatcgcacattcggcttggtgaaatccttctctaaagcctctttttgtatttttataactaaacagaggaagtcttcagaagacctcgctttaaaacaaatttgtgcaaacactgctagagtcattttgaagctcaagcattttcactttgtttcttacatgtgtacttttttgtttacttgtgaaaatggccatctttaagcatatttattttctgccactttatttaaaggcaagcaatattttcttgatcataaatattttgtaatgaaatacttcctcttttccagggctttgtatgcacttgtataattacattgatggcaatgtagagtttgaatttcagtctgtaaatacttttttggaaaatagaaatttttattgctttaaagttttggatatgggtggttttcttttccgggtttggtggaaagtaatttgagaactttaaggttgtctttttaactgctggcaaaatgttgattttttaatattagataaaacgagtaaacgaaattccccagaaattagtagtaagtggggtctttgtgggttgggaagtagttttaatgtagaaagacatttacatataagtctgtttaatttcaaaggagtttgtgaaaaaaaatccatggtgaaaatgaaacaatgacatggttaatctggaacttacgttcttataccaataaaaggtacctcaatacatgttctttcaa

SEQ ID NO: 27028 - DNA, 2039 bp, Homo sapiens
  source 1..2039: mol_type = unassigned DNA
acagaaatgagctcattcctcctaactgggtaatagacatgggtggggcctggaaaagatttcaaatatgcgtgcattagagaatgactttttcaattctcccccaagaaaaactgttcggtttggtggaactgtgacagaagtcttgctgaagtacaaaaagggtgaaacaaatgactttgagttgttgaagaaccagctgttagatccagacataaaggatgaccagatcatcaactggctgctagaattccgttcttctatcatgtacttgacaaaagactttgagcaacttatcagtattatattaagattgccttggttgaatagaagtcaaacagtagtggaagagtatttggcttttcttggtaatcttgtatcagcacagactgttttcctcagaccgtgtctcagcatgattgcttcccattttgtgcctccccgagtgatcattaaggaaggcgatgtagatgtttcagattctgatgatgaagatgataatcttcctgcaaattttgacacatgtcacagagccttgcaaataatagcaagatatgtaccatcgacaccgtggtttctcatgccaatactggtggaaaaatttccatttgttcgaaaatcagagagaacactggaatgttacgttcataacttactaaggattagtgtatattttccaaccttgaggcatgaaattctggagcttattattgaaaaactactcaagttggatgtgaatgcatcccggcagggtattgaagatgctgaagaaacagcaactcaaacttgtggtgggacagattccacggaaggattgtttaatatggatgaagatgaagaaactgaacatgaaacaaaggctggtcctgaacggctcgaccagatggtgcatcctgtagccgagcgcctggacatcctgatgtctttggttttgtcctacatgaaggatgtctgctatgtagatggtaaggttgataacggcaaaacaaaggatctatatcgcgacctgataaacatctttgacaaactcctgttgcccacccatgcctcctgccatgtacagtttttcatgttttacctctgtagtttcaaattgggattcgcagaggcatttttggaacatctctggaaaaaattgcaggacccaagtaatcctgccatcatcaggcaggctgctggaaattatattggaagctttttggcaagagctaaatttattcctcttattactgtaaaatcatgcctagatcttttggttaactggctgcacatataccttaataaccaggattcgggaacaaaggcattctgcgatgttgctctccatggaccattttactcagcctgccaagctgtgttctacacctttgtttttagacacaagcagcttttgagcggaaacctgaaagaaggtttgcagtatcttcagagtctgaattttgagcggatagtgatgagccagctaaatcccctgaagatttgcctgccctcagtggttaacttttttgctgcaatcacaaataagtaccagctcgtcttctgctacaccatcattgagaggaacaatcgccagatgctgccagtcattaggagtaccgctggaggagactcagtgcagatctgcacaaacccgctggacaccttcttcccctttgatccctgtgtgctgaagaggtcaaagaaattcattgatcctatttatcaggtgtgggaagacatgagtgctgaagagctacaggagttcaagaaacccatgaaaaaggacatagtggaagatgaagatgatgactttctgaaaggcgaagtgccccagaatgataccgtgattgggatcacaccaagctcctttgacacgcatttccgaagtccttcaagtagtgtgggctccccacccgtgttgtacatgcaacccagtcccctctgacggcagaaatttgtgactgagatgtgacatttgggattccccatcacttgtcatgccctcagcacccagcttgtgccattgggcattgatggcattgaactagagcgagtgcctg

SEQ ID NO: 27029 - DNA, 2198 bp, Homo sapiens
  source 1..2198: mol_type = unassigned DNA
gcgttagttcggcccaatggcggcaccgctgcttcacacgcgtttgccgggagatgcggccgcttcgtcctctgcagttaagaagctgggcgcgtcgaggactgggatttcaaatatgcgtgcattagagaatgactttttcaattctcccccaagaaaaactgttcggtttggtggaactgtgacagaagtcttgctgaagtacaaaaagggtgaaacaaatgactttgagttgttgaagaaccagctgttagatccagacataaagagattgccttggttgaatagaagtcaaacagtagtggaagagtatttggcttttcttggtaatcttgtatcagcacagactgttttcctcagaccgtgtctcagcatgattgcttcccattttgtgcctccccgagtgatcattaaggaaggcgatgtagatgtttcagattctgatgatgaagatgataatcttcctgcaaattttgacacatgtcacagagccttgcaaataatagcaagatatgtaccatcgacaccgtggtttctcatgccaatactggtggaaaaatttccatttgttcgaaaatcagagagaacactggaatgttacgttcataacttactaaggattagtgtatattttccaaccttgaggcatgaaattctggagcttattattgaaaaactactcaagttggatgtgaatgcatcccggcagggtattgaagatgctgaagaaacagcaactcaaacttgtggtgggacagattccacggaaggattgtttaatatggatgaagatgaagaaactgaacatgaaacaaaggctggtcctgaacggctcgaccagatggtgcatcctgtagccgagcgcctggacatcctgatgtctttggttttgtcctacatgaaggatgtctgctatgtagatggtaaggttgataacggcaaaacaaaggatctatatcgcgacctgataaacatctttgacaaactcctgttgcccacccatgcctcctgccatgtacagtttttcatgttttacctctgtagtttcaaattgggattcgcagaggcatttttggaacatctctggaaaaaattgcaggacccaagtaatcctgccatcatcaggcaggctgctggaaattatattggaagctttttggcaagagctaaatttattcctcttattactgtaaaatcatgcctagatcttttggttaactggctgcacatataccttaataaccaggattcgggaacaaaggcattctgcgatgttgctctccatggaccattttactcagcctgccaagctgtgttctacacctttgtttttagacacaagcagcttttgagcggaaacctgaaagaaggtttgcagtatcttcagagtctgaattttgagcggatagtgatgagccagctaaatcccctgaagatttgcctgccctcagtggttaacttttttgctgcaatcacaaataagtaccagctcgtcttctgctacaccatcattgagaggaacaatcgccagatgctgccagtcattaggagtaccgctggaggagactcagtgcagatctgcacaaacccgctggacaccttcttcccctttgatccctgtgtgctgaagaggtcaaagaaattcattgatcctatttatcaggtgtgggaagacatgagtgctgaagagctacaggagttcaagaaacccatgaaaaaggacatagtggaagatgaagatgatgactttctgaaaggcgaagtgccccagaatgataccgtgattgggatcacaccaagctcctttgacacgcatttccgaagtccttcaagtagtgtgggctccccacccgtgttgtacatgcaacccagtcccctctgacggcagaaatttgtgactgagatgtgacatttgggattccccatcacttgtcatgccctcagcacccagcttgtgccattgggcattgatggcattgaactagagcgagtgcctgcctcggctgtggcacttccaggttcgactgaatcaagcatctgaagactgggtttttttgttgttgttgttccccttacagacaaaatgaagactatcatgtgcaatcttttacagtggggttgatgatacatttggaaggatttgcttgtttaatatgtacattttttgtgttaacagctttttgacacaattactgggt

SEQ ID NO: 27030 - DNA, 1557 bp, Homo sapiens
  source 1..1557: mol_type = unassigned DNA
acaaaagactttgagcaacttatcagtattatattaagattgccttggttgaatagaagtcaaacagtagtggaagagtatttggcttttcttggtaatcttgtatcagcacagactgttttcctcagaccgtgtctcagcatgattgcttcccattttgtgcctccccgagtgatcattaaggaaggcgatgtagatgtttcagattctgatgatgaagatgataatcttcctgcaaattttgacacatgtcacagagccttgcaaataatagcaagatatgtaccatcgacaccgtggtttctcatgccaatactggtggaaaaatttccatttgttcgaaaatcagagagaacactggtgaatgcatcccggcagggtattgaagatgctgaagaaacagcaactcaaacttgtggtgggacagattccacggaaggattgtttaatatggatgaagatgaagaaactgaacatgaaacaaaggctggtcctgaacggctcgaccagatggtgcatcctgtagccgagcgcctggacatcctgatgtctttggttttgtcctacatgaaggatgtctgctatgtagatggtaaggttgataacggcaaaacaaaggatctatatcgcgacctgataaacatctttgacaaactcctgttgcccacccatgcctcctgccatgtacagtttttcatgttttacctctgtagtttcaaattgggattcgcagaggcatttttggaacatctctggaaaaaattgcaggacccaagtaatcctgccatcatcaggcaggctgctggaaattatattggaagctttttggcaagagctaaatttattcctcttattactgtaaaatcatgcctagatcttttggttaactggctgcacatataccttaataaccaggattcgggaacaaaggcattctgcgatgttgctctccatggaccattttactcagcctgccaagctgtgttctacacctttgtttttagacacaagcagcttttgagcggaaacctgaaagaaggtttgcagtatcttcagagtctgaattttgagcggatagtgatgagccagctaaatcccctgaagatttgcctgccctcagtggttaacttttttgctgcaatcacaaataagtaccagctcgtcttctgctacaccatcattgagaggaacaatcgccagatgctgccagtcattaggagtaccgctggaggagactcagtgcagatctgcacaaacccgctggacaccttcttcccctttgatccctgtgtgctgaagaggtcaaagaaattcattgatcctatttatcaggtgtgggaagacatgagtgctgaagagctacaggagttcaagaaacccatgaaaaaggacatagtggaagatgaagatgatgactttctgaaaggcgaagtgccccagaatgataccgtgattgggatcacaccaagctcctttgacacgcatttccgaagtccttcaagtagtgtgggctccccacccgtgttgtacatgcaacccagtcccctctgacggcag

SEQ ID NO: 27031 - DNA, 2985 bp, Homo sapiens
  source 1..2985: mol_type = unassigned DNA
gcgaccggccagagtagggcatccgctcgggtgctgcggagaacgagggcagctccgagccgccccggaggaccgatgcgccgggtggggcgctggccccgagggcgtgagccgtccgcagattgagcaacttgggaacgggcgggcggagcgcaggcgagccgggcgcccaggacagtcccgcagcgggcgggtgagcgggccgcgccctcgcccctcccgggcctgcccccgtcgcgactggcagcacgaagctgagattgtggtttcctggtgattcaggtgggagtgggccagaagatcaccgctggcaaggactggtgtttgtcaactgtaaggactcatggaacagatctaccagggattctcagaccttagtttgagaaatgctgcaattaaaggcaaatcctatcactctgagtgatcgctttggtgtcgaggcaatcaaccataaagataaatgcaaatatggaaattgcataacagtactcagtattaaggttggtttttggagtagtccctgctgacgtgacaaaaagatctctcatatgatattccgaggtatctttgaggaagtctctctttgaggacctccctttgagctgatggagaactgggctccccacaccctctctgtccccagctgagattatggtggatttgggctacggcccaggcctgggcctcctgctgctgacccagccccagaggtgttagcaagagccgtgtgctatccaccctccccgagaccacccctccgaccaggggcctggagctggcgcgtgactatgcggcttgggctgtgtgtggtggccctggttctgagctggacgcacctcaccatcagcagccgggggatcaaggggaaaaggcagaggcggatcagtgccgaggggagccaggcctgtgccaaaggctgtgagctctgctctgaagtcaacggctgcctcaagtgctcacccaagctgttcatcctgctggagaggaacgacatccgccaggtgggcgtctgcttgccgtcctgcccacctggatacttcgacgcccgcaaccccgacatgaacaagtgcatcaaatgcaagatcgagcactgtgaggcctgcttcagccataacttctgcaccaagtgtaaggagggcttgtacctgcacaagggccgctgctatccagcttgtcccgagggctcctcagctgccaatggcaccatggagtgcagtagtcctgcgcaatgtgaaatgagcgagtggtctccgtgggggccctgctccaagaagcagcagctctgtggtttccggaggggctccgaggagcggacacgcagggtgctacatgcccctgtgggggaccatgctgcctgctctgacaccaaggagacccggaggtgcacagtgaggagagtgccgtgtcctgaggggcagaagaggaggaagggaggccagggccggcgggagaatgccaacaggaacctggccaggaaggagagcaaggaggcgggtgctggctctcgaagacgcaaggggcagcaacagcagcagcagcaagggacagtggggccactcacatctgcagggcctgcctagggacactgtccagcctccaggcccatgcagaaagagttcagtgctactctgcgtgattcaagctttcctgaactggaacgtcgggggcaaagcatacacacacactccaatccatccatgcatacatagacacaagacacacacgctcaaacccctgtccacatatacaaccatacatacttgcacatgtgtgttcatgtacacacgcagacacagacaccacacacacacatacacacacacacacacacacacctgaggccaccagaagacacttccatccctcgggcccagcagtacacacttggtttccagagctcccagtggacatgtcagagacaacacttcccagcatctgagaccaaactgcagaggggagccttctggagaagctgctgggatcggaccagccactgtggcagatgggagccaagcttgaggactgctggtgacctgggaagaaaccttcttcccatcctgttcagcactcccagctgtgtgactttatcgttggagagtattgttacccttccaggatacatatcagggttaacctgactttgaaaactgcttaaaggtttatttcaaattaaaacaaaaaaatcaacgacagcagtagacacaggcaccacattcctttgcagggtgtgagggtttggcgaggtatgcgtaggagcaagaagggacagggaatttcaagagaccccaaatagcctgctcagtagagggtcatgcagacaaggaagaaaacttaggggctgctctgacggtggtaaacaggctgtctatatccttgttactcagagcatggcccggcagcagtgttgtcacagggcagcttgttaggaatgagaatctcaggtctcattccagacctggtgagccagagtctaaattttaagattcctgatgattggcatgttacccaaatttgagaagtgctgctgtaattccccttaaaggacgggagaaagggccccggccatcttgcagcaggagggattctggtcagctataaaggaggactttccatctgggagaggcagaatctatatactgaagggctagtggcactgccaggggaagggagtgcgtaggcttccagtgatggttggggacaatcctgcccaaaggcagggcagtggatggaataactccttgtggcattctgaagtgtgtgccaggctctggactaggtgctaggtttccagggaggagccaaacacgggccttgctcttgtggagcttagaggttggtggggaagaaaataggcatgcaccaaggaattgtacaaacacatatataactacaaaaggatggtgccaagggcaggtgaccactggcatctatgcttagctatgaaagtgaataaagcagaataaaaataaaatactttctctcagg

SEQ ID NO: 27032 - DNA, 2320 bp, Homo sapiens
  source 1..2320: mol_type = unassigned DNA
cgcgccctcgcccctcccgggcctgcccccgtcgcgactggcagcacgaagctgagattgtggtttcctggtgattcaggtgggagtgggccagaagatcaccgctggcaaggactggtgtttgtcaactgtaaggactcatggaacagatctaccagggattctcagaccttagtttgagaaatgctgcaattaaaggcaaatcctatcactctgagtgatcgctttggtgtcgaggcaatcaaccataaagataaatgcaaatatggaaattgcataacagtactcagtattaaggttggtttttggagtagtccctgctgacgtgacaaaaagatctctcatatgatattccgaggtatctttgaggaagtctctctttgaggacctccctttgagctgatggagaactgggctccccacaccctctctgtccccagctgagattatggtggatttgggctacggcccaggcctgggcctcctgctgctgacccagccccagaggtgttagcaagagccgtgtgctatccaccctccccgagaccacccctccgaccaggggcctggagctggcgcgtgactatgcggcttgggctgtgtgtggtggccctggttctgagctggacgcacctcaccatcagcagccgggggatcaaggggaaaaggcagaggcggatcagtgccgaggggagccaggcctgtgccaaaggctgtgagctctgctctgaagtcaacggctgcctcaagtgctcacccaagctgttcatcctgctggagaggaacgacatccgccaggtgggcgtctgcttgccgtcctgcccacctggatacttcgacgcccgcaaccccgacatgaacaagtgcatcaaatgcaagatcgagcactgtgaggcctgcttcagccataacttctgcaccaagtgtaaggagggcttgtacctgcacaagggccgctgctatccagcttgtcccgagggctcctcagctgccaatggcaccatggagtgcagtagtcctgcgcaatgtgaaatgagcgagtggtctccgtgggggccctgctccaagaagcagcagctctgtggtttccggaggggctccgaggagcggacacgcagggtgctacatgcccctgtgggggaccatgctgcctgctctgacaccaaggagacccggaggtgcacagtgaggagagtgccgtgtcctgaggggcagaagaggaggaagggaggccagggccggcgggagaatgccaacaggaacctggccaggaaggagagcaaggaggcgggtgctggctctcgaagacgcaaggggcagcaacagcagcagcagcaagggacagtggggccactcacatctgcagggcctgcctagggacactgtccagcctccaggcccatgcagaaagagttcagtgctactctgcgtgattcaagctttcctgaactggaacgtcgggggcaaagcatacacacacactccaatccatccatgcatacatagacacaagacacacacgctcaaacccctgtccacatatacaaccatacatacttgcacatgtgtgttcatgtacacacgcagacacagacaccacacacacacatacacacacacacacacacacacctgaggccaccagaagacacttccatccctcgggcccagcagtacacacttggtttccagagctcccagtggacatgtcagagacaacacttcccagcatctgagaccaaactgcagaggggagccttctggagaagctgctgggatcggaccagccactgtggcagatgggagccaagcttgaggactgctggtgacctgggaagaaaccttcttcccatcctgttcagcactcccagctgtgtgactttatcgttggagagtattgttacccttccaggatacatatcagggttaacctgactttgaaaactgcttaaaggtttatttcaaattaaaacaaaaaaatcaacgacagcagtagacacaggcaccacattcctttgcagggtgtgagggtttggcgaggtatgcgtaggagcaagaagggacagggaatttcaagagaccccaaatagcctgctcagtagagggtcatgcagacaaggaagaaaacttaggggctgctctgacggtggtaaacaggctgtctatatccttgttactcagagcatggcccggcagcagtgttgtcacagggcagcttgttaggaatgagaatctcaggtctcattccagacctggtgagccagagtctaaattttaagattcctgatgattggcatgttacccaaatttgagaagtgct

SEQ ID NO: 27033 - DNA, 2692 bp, Homo sapiens
  source 1..2692: mol_type = unassigned DNA
attccctccctggtgctcgcagaggactggcccctctccgggctgggagctccggccgagcggaggcgcgacggagagcaccagcgcagggcagagagcccggagcgaccggccagagtagggcatccgctcgggtgctgcggagaacgagggcagctccgagccgccccggaggaccgatgcgccgggtggggcgctggccccgagggcgtgagccgtccgcagattgagcaacttgggaacgggcgggcggagcgcaggcgagccgggcgcccaggacagtcccgcagcgggcgggtgagcgggccgcgccctcgcccctcccgggcctgcccccgtcgcgactggcagcacgaagctgagattgtggtttcctggtgattcaggtgggagtgggccagaagatcaccgctggcaaggactgggttggtttttggagtagtccctgctgacgtgacaaaaagatctctcatatgatattccgaggtatctttgaggaagtctctctttgaggacctccctttgagctgatggagaactgggctccccacaccctctctgtccccagctgagattatggtggatttgggctacggcccaggcctgggcctcctgctgctgacccagccccagaggtgttagcaagagccgtgtgctatccaccctccccgagaccacccctccgaccaggggcctggagctggcgcgtgactatgcggcttgggctgtgtgtggtggccctggttctgagctggacgcacctcaccatcagcagccgggggatcaaggggaaaaggcagaggcggatcagtgccgaggggagccaggcctgtgccaaaggctgtgagctctgctctgaagtcaacggctgcctcaagtgctcacccaagctgttcatcctgctggagaggaacgacatccgccaggtgggcgtctgcttgccgtcctgcccacctggatacttcgacgcccgcaaccccgacatgaacaagtgcatcaaatgcaagatcgagcactgtgaggcctgcttcagccataacttctgcaccaagtgtaaggagggcttgtacctgcacaagggccgctgctatccagcttgtcccgagggctcctcagctgccaatggcaccatggagtgcagtagtcctgcgcaatgtgaaatgagcgagtggtctccgtgggggccctgctccaagaagcagcagctctgtggtttccggaggggctccgaggagcggacacgcagggtgctacatgcccctgtgggggaccatgctgcctgctctgacaccaaggagacccggaggtgcacagtgaggagagtgccgtgtcctgaggggcagaagaggaggaagggaggccagggccggcgggagaatgccaacaggaacctggccaggaaggagagcaaggaggcgggtgctggctctcgaagacgcaaggggcagcaacagcagcagcagcaagggacagtggggccactcacatctgcagggcctgcctagggacactgtccagcctccaggcccatgcagaaagagttcagtgctactctgcgtgattcaagctttcctgaactggaacgtcgggggcaaagcatacacacacactccaatccatccatgcatacatagacacaagacacacacgctcaaacccctgtccacatatacaaccatacatacttgcacatgtgtgttcatgtacacacgcagacacagacaccacacacacacatacacacacacacacacacacacctgaggccaccagaagacacttccatccctcgggcccagcagtacacacttggtttccagagctcccagtggacatgtcagagacaacacttcccagcatctgagaccaaactgcagaggggagccttctggagaagctgctgggatcggaccagccactgtggcagatgggagccaagcttgaggactgctggtgacctgggaagaaaccttcttcccatcctgttcagcactcccagctgtgtgactttatcgttggagagtattgttacccttccaggatacatatcagggttaacctgactttgaaaactgcttaaaggtttatttcaaattaaaacaaaaaaatcaacgacagcagtagacacaggcaccacattcctttgcagggtgtgagggtttggcgaggtatgcgtaggagcaagaagggacagggaatttcaagagaccccaaatagcctgctcagtagagggtcatgcagacaaggaagaaaacttaggggctgctctgacggtggtaaacaggctgtctatatccttgttactcagagcatggcccggcagcagtgttgtcacagggcagcttgttaggaatgagaatctcaggtctcattccagacctggtgagccagagtctaaattttaagattcctgatgattggcatgttacccaaatttgagaagtgctgctgtaattccccttaaaggacgggagaaagggccccggccatcttgcagcaggagggattcttaggcgtacggccagggctattggttgaatgagtaggctgatggtttcgataataactagtatggggataaggtcagctataaaggaggactttccatctgggagaggcagaatctatatactgaagggctagtggcactgccaggggaagggagtgcgtaggcttccagtgatggttggg

SEQ ID NO: 27034 - DNA, 2462 bp, Homo sapiens
  source 1..2462: mol_type = unassigned DNA
aggcgagccgggcgcccaggacagtcccgcagcgggcgggtgagcgggccgcgccctcgcccctcccgggcctgcccccgtcgcgactggcagcacgaagctgagattgtggtttcctggtgattcaggtgggagtgggccagaagatcaccgctggcaaggactgggttggtttttggagtagtccctgctgacgtgacaaaaagatctctcatatgatattccgaggtatctttgaggaagtctctctttgaggacctccctttgagctgatggagaactgggctccccacaccctctctgtccccagctgagattatggtggatttgggctacggcccaggcctgggcctcctgctgctgacccagccccagaggtgttagcaagagccgtgtgctatccaccctccccgagaccacccctccgaccaggggcctggagctggcgcgtgactatgcggcttgggctgtgtgtggtggccctggttctgagctggacgcacctcaccatcagcagccgggggatcaaggggaaaaggcagaggcggatcagtgccgaggggagccaggcctgtgccaaaggctgtgagctctgctctgaagtcaacggctgcctcaagtgctcacccaagctgttcatcctgctggagaggaacgacatccgccaggtgggcgtctgcttgccgtcctgcccacctggatacttcgacgcccgcaaccccgacatgaacaagtgcatcaaatgcaagatcgagcactgtgaggcctgcttcagccataacttctgcaccaagtgtaaggagggcttgtacctgcacaagggccgctgctatccagcttgtcccgagggctcctcagctgccaatggcaccatggagtgcagtagtcctgggcagaagaggaggaagggaggccagggccggcgggagaatgccaacaggaacctggccaggaaggagagcaaggaggcgggtgctggctctcgaagacgcaaggggcagcaacagcagcagcagcaagggacagtggggccactcacatctgcagggcctgcctagggacactgtccagcctccaggcccatgcagaaagagttcagtgctactctgcgtgattcaagctttcctgaactggaacgtcgggggcaaagcatacacacacactccaatccatccatgcatacatagacacaagacacacacgctcaaacccctgtccacatatacaaccatacatacttgcacatgtgtgttcatgtacacacgcagacacagacaccacacacacacatacacacacacacacacacacacctgaggccaccagaagacacttccatccctcgggcccagcagtacacacttggtttccagagctcccagtggacatgtcagagacaacacttcccagcatctgagaccaaactgcagaggggagccttctggagaagctgctgggatcggaccagccactgtggcagatgggagccaagcttgaggactgctggtgacctgggaagaaaccttcttcccatcctgttcagcactcccagctgtgtgactttatcgttggagagtattgttacccttccaggatacatatcagggttaacctgactttgaaaactgcttaaaggtttatttcaaattaaaacaaaaaaatcaacgacagcagtagacacaggcaccacattcctttgcagggtgtgagggtttggcgaggtatgcgtaggagcaagaagggacagggaatttcaagagaccccaaatagcctgctcagtagagggtcatgcagacaaggaagaaaacttaggggctgctctgacggtggtaaacaggctgtctatatccttgttactcagagcatggcccggcagcagtgttgtcacagggcagcttgttaggaatgagaatctcaggtctcattccagacctggtgagccagagtctaaattttaagattcctgatgattggcatgttacccaaatttgagaagtgctgctgtaattccccttaaaggacgggagaaagggccccggccatcttgcagcaggagggataaggtcagctataaaggaggactttccatctgggagaggcagaatctatatactgaagggctagtggcactgccaggggaagggagtgcgtaggcttccagtgatggttggggacaatcctgcccaaaggcagggcagtggatggaataactccttgtggcattctgaagtgtgtgccaggctctggactaggtgctaggtttccagggaggagccaaacacgggccttgctcttgtggagcttagaggttggtggggaagaaaataggcatgcaccaaggaattgtacaaacacatatataactacaaaaggatggtgccaagggcaggtgaccactggcatctatgcttagctatgaaagtgaataaagcagaataaaaataaaatactttctctcagg

SEQ ID NO: 27035 - DNA, 2402 bp, Homo sapiens
  source 1..2402: mol_type = unassigned DNA
aggcgagccgggcgcccaggacagtcccgcagcgggcgggtgagcgggccgcgccctcgcccctcccgggcctgcccccgtcgcgactggcagcacgaagctgagattgtggtttcctggtgattcaggtgggagtgggccagaagatcaccgctggcaaggactgggttggtttttggagtagtccctgctgacgtgacaaaaagatctctcatatgatattccgagtcagtgccgaggggagccaggcctgtgccaaaggctgtgagctctgctctgaagtcaacggctgcctcaagtgctcacccaagctgttcatcctgctggagaggaacgacatccgccaggtgggcgtctgcttgccgtcctgcccacctggatacttcgacgcccgcaaccccgacatgaacaagtgcatcaaatgcaagatcgagcactgtgaggcctgcttcagccataacttctgcaccaagtgtaaggagggcttgtacctgcacaagggccgctgctatccagcttgtcccgagggctcctcagctgccaatggcaccatggagtgcagtagtcctgcgcaatgtgaaatgagcgagtggtctccgtgggggccctgctccaagaagcagcagctctgtggtttccggaggggctccgaggagcggacacgcagggtgctacatgcccctgtgggggaccatgctgcctgctctgacaccaaggagacccggaggtgcacagtgaggagagtgccgtgtcctgaggggcagaagaggaggaagggaggccagggccggcgggagaatgccaacaggaacctggccaggaaggagagcaaggaggcgggtgctggctctcgaagacgcaaggggcagcaacagcagcagcagcaagggacagtggggccactcacatctgcagggcctgcctagggacactgtccagcctccaggcccatgcagaaagagttcagtgctactctgcgtgattcaagctttcctgaactggaacgtcgggggcaaagcatacacacacactccaatccatccatgcatacatagacacaagacacacacgctcaaacccctgtccacatatacaaccatacatacttgcacatgtgtgttcatgtacacacgcagacacagacaccacacacacacatacacacacacacacacacacacctgaggccaccagaagacacttccatccctcgggcccagcagtacacacttggtttccagagctcccagtggacatgtcagagacaacacttcccagcatctgagaccaaactgcagaggggagccttctggagaagctgctgggatcggaccagccactgtggcagatgggagccaagcttgaggactgctggtgacctgggaagaaaccttcttcccatcctgttcagcactcccagctgtgtgactttatcgttggagagtattgttacccttccaggatacatatcagggttaacctgactttgaaaactgcttaaaggtttatttcaaattaaaacaaaaaaatcaacgacagcagtagacacaggcaccacattcctttgcagggtgtgagggtttggcgaggtatgcgtaggagcaagaagggacagggaatttcaagagaccccaaatagcctgctcagtagagggtcatgcagacaaggaagaaaacttaggggctgctctgacggtggtaaacaggctgtctatatccttgttactcagagcatggcccggcagcagtgttgtcacagggcagcttgttaggaatgagaatctcaggtctcattccagacctggtgagccagagtctaaattttaagattcctgatgattggcatgttacccaaatttgagaagtgctgctgtaattccccttaaaggacgggagaaagggccccggccatcttgcagcaggagggattcttaggcgtacggccagggctattggttgaatgagtaggctgatggtttcgataataactagtatggggataaggtcagctataaaggaggactttccatctgggagaggcagaatctatatactgaagggctagtggcactgccaggggaagggagtgcgtaggcttccagtgatggttggggacaatcctgcccaaaggcagggcagtggatggaataactccttgtggcattctgaagtgtgtgccaggctctggactaggtgctaggtttccagggaggagccaaacacgggccttgctcttgtggagcttagaggttggtggggaagaaaataggcatgcaccaaggaattgtacaaacacatatataactacaaaaggatggtgccaagggcaggtgaccactggcatctatgcttagctatgaaagtgaataaagcagaataaaaataaaatactttctctcagg

SEQ ID NO: 27036 - DNA, 3111 bp, Homo sapiens
  source 1..3111: mol_type = unassigned DNA
acttatagaagcatcccaagcctcagccggtctgcatctccatcggaaagtgcgcttgccacatcccttcggatcacttcgtcctcccgagagcgttctgccttctacagctcggaaagaaagaaatcttagctgtgaagtgaccgtggagaaagcgcaggaagcgacacaattggttagggaggcagagagtgtgagcgggcgcaccccttgcctggggaccgcgctcgcgggcggggacggagcatcccagtggctgcacccgccgctccgcgctcctgcctggcgtcgccaaccccgcggcggccgctggaattccagagctgccaggcgctcccagccggtctcggcaaacttttccccagcccacgtgctaaccaagcggctcgcttcccgagcccgggatggagcaccgcgcctagggaggccgcgccgcccgagacgtgcgcacggttcgtggcggagagatgctgatcgcgctgaactgaccggtgcggcccgggggtgagtggcgagtctccctctgagtcctccccagcagcgcggccggcgccggctctttgggcgaaccctccagttcctagactttgagaggcgtctctcccccgcccgaccgcccagatgcagtttcgccttttctcctttgccctcatcattctgaactgcatggattacagccactgccaaggcaaccgatggagacgcagtaagcgagctagttatgtatcaaatcccatttgcaagggttgtttgtcttgttcaaaggacaatgggtgtagccgatgtcaacagaagttgttcttcttccttcgaagagaagggatgcgccagtatggagagtgcctgcattcctgcccatccgggtactatggacaccgagccccagatatgaacagatgtgcaagatgcagaatagaaaactgtgattcttgctttagcaaagacttttgtaccaagtgcaaagtaggcttttatttgcatagaggccgttgctttgatgaatgtccagatggttttgcaccattagaagaaaccatggaatgtgtggaaggatgtgaagttggtcattggagcgaatggggaacttgtagcagaaataatcgcacatgtggatttaaatggggtctggaaaccagaacacggcaaattgttaaaaagccagtgaaagacacaatactgtgtccaaccattgctgaatccaggagatgcaagatgacaatgaggcattgtccaggagggaagagaacaccaaaggcgaaggagaagaggaacaagaaaaagaaaaggaagctgatagaaagggcccaggagcaacacagcgtcttcctagctacagacagagctaaccaataaaacaagagatccggtagatttttaggggtttttgtttttgcaaatgtgcacaaagctactctccactcctgcacactggtgtgcagcctttgtgctgctctgcccagtatctgttcccagtaacatggtgaaaggaagcaccaccagcatggcccctgtgttatttatgctttgatttgaatctggagactgtgaaggcaggagtaagtgcacagcccgtgacttggctcagtgtgtgctgagagaatccgtccccggcaccatggacatgctagaggtgtgaggctgcagaacaccgctggaggacggacttgtgcctatttatgtgaaagaagatgcttggcaggcaatgcgctactcactcgtgacctttatttctcacattgtgcattttcaaggatatgtttgtgtggatatctgcttagtgttaccacatggtattctcagcatgttaccttcacactgttgtgcgatgaaactgcttttagctgaggatatgctctggaaattcctgctcagtttcactgcagccctaatatgtacatatactgcaggagctacatataaagctcttatttactgtatatttatgctttcttgtgggtaacaagtcatacctgattaatatgatgccactttgtttctagtggttcctaacccattgtctgataaatgacttttctagtttggggaattgacacttgttttgttgcctcttgaaactttttttttttcccctcattgtgggcttatttctcattgtaagggtaggataaactagtttttgtatatagagtcaaatgaccagtgtcaaagagtttgcatattgggtagaccttctccactccacatgtcccacacatatagataaagcagcaggcggcatctggcaatcagaagcccaaactgcctttgagtctaagatgtgatgactttgatgaaacacaactgaaaacatgagggactatatccagtcacttgtagccagtttcacaggccagctacagaattgtccaaacaaacattatttctgactgcaatttttttcccccaaatttaaagcaatccctggctttaaatgacaaggcacctaccaatgttcttgggtcactgaagaagctactaccatgagcctgggcatagaattttaggagataaaaggatgaatttctgtgactgccagtcagatcttaacaggtttctgttgagccagaatctgtttcagatccaagatggagaggaacactatggaaacttcccaggtgactttcagagcagttgtttcaaacacatcattgtccttttaggggaaccagtttttagaaggttgtgaattggctttttcacaaagcatgattatcttcctggctgatccaggagaaaattagaacagaaaaataatggttgtggattttgaaacaaagcaaggtaaagccttttttttttcaccttgcattggcaaaactacctcttcagtgtttttaacttttgattcaaaagcatcttaccaataaggataaatatcatatacatcgttatgaaaatattgctatgagataataagccacatatgaatgttgtatacaactttagggtttacatttaatcctgaagtgttacctcctttcatgtctatttacactattttcccatttactaagtggggagggggtctccttatatagtgcttcatcgttaataagtcaatacctgttgttcctgggatgttcttttttgtgcattaaaaacttcaaaatt

SEQ ID NO: 27037 - DNA, 2957 bp, Homo sapiens
  source 1..2957: mol_type = unassigned DNA
agcctagacttagatgccttggaccacagcaccacctacttatagaagcatcccaagcctcagccggtctgcatctccatcggaaagtgcgcttgccacatcccttcggatcacttcgtcctcccgagagcgttctgccttctacagctcggaaagaaagaaatcttagctgtgaagtgaccgtggagaaagcgcaggaagcgacacaattggttagggaggcagagagtgtgagcgggcgcaccccttgcctggggaccgcgctcgcgggcggggacggagcatcccagtggctgcacccgccgctccgcgctcctgcctggcgtcgccaaccccgcggcggccgctggaattccagagctgccaggcgctcccagccggtctcggcaaacttttccccagcccacgtgctaaccaagcggctcgcttcccgagcccgggatggagcaccgcgcctagggaggccgcgccgcccgagacgtgcgcacggttcgtggcggagagatgctgatcgcgctgaactgaccggtgcggcccgggggtgagtggcgagtctccctctgagtcctccccagcagcgcggccggcgccggctctttgggcgaaccctccagttcctagactttgagaggcgtctctcccccgcccgaccgcccagatgcagtttcgccttttctcctttgccctcatcattctgaactgcatggattacagccactgccaaggcaaccgatggagacgcagtaagcgaggatgcagaatagaaaactgtgattcttgctttagcaaagacttttgtaccaagtgcaaagtaggcttttatttgcatagaggccgttgctttgatgaatgtccagatggttttgcaccattagaagaaaccatggaatgtgtgggatgtgaagttggtcattggagcgaatggggaacttgtagcagaaataatcgcacatgtggatttaaatggggtctggaaaccagaacacggcaaattgttaaaaagccagtgaaagacacaatactgtgtccaaccattgctgaatccaggagatgcaagatgacaatgaggcattgtccaggagggaagagaacaccaaaggcgaaggagaagaggaacaagaaaaagaaaaggaagctgatagaaagggcccaggagcaacacagcgtcttcctagctacagacagagctaaccaataaaacaagagatccggtagatttttaggggtttttgtttttgcaaatgtgcacaaagctactctccactcctgcacactggtgtgcagcctttgtgctgctctgcccagtatctgttcccagtaacatggtgaaaggaagcaccaccagcatggcccctgtgttatttatgctttgatttgaatctggagactgtgaaggcaggagtaagtgcacagcccgtgacttggctcagtgtgtgctgagagaatccgtccccggcaccatggacatgctagaggtgtgaggctgcagaacaccgctggaggacggacttgtgcctatttatgtgaaagaagatgcttggcaggcaatgcgctactcactcgtgacctttatttctcacattgtgcattttcaaggatatgtttgtgtggatatctgcttagtgttaccacatggtattctcagcatgttaccttcacactgttgtgcgatgaaactgcttttagctgaggatatgctctggaaattcctgctcagtttcactgcagccctaatatgtacatatactgcaggagctacatataaagctcttatttactgtatatttatgctttcttgtgggtaacaagtcatacctgattaatatgatgccactttgtttctagtggttcctaacccattgtctgataaatgacttttctagtttggggaattgacacttgttttgttgcctcttgaaactttttttttttcccctcattgtgggcttatttctcattgtaagggtaggataaactagtttttgtatatagagtcaaatgaccagtgtcaaagagtttgcatattgggtagaccttctccactccacatgtcccacacatatagataaagcagcaggcggcatctggcaatcagaagcccaaactgcctttgagtctaagatgtgatgactttgatgaaacacaactgaaaacatgagggactatatccagtcacttgtagccagtttcacaggccagctacagaattgtccaaacaaacattatttctgactgcaatttttttcccccaaatttaaagcaatccctggctttaaatgacaaggcacctaccaatgttcttgggtcactgaagaagctactaccatgagcctgggcatagaattttaggagataaaaggatgaatttctgtgactgccagtcagatcttaacaggtttctgttgagccagaatctgtttcagatccaagatggagaggaacactatggaaacttcccaggtgactttcagagcagttgtttcaaacacatcattgtccttttaggggaaccagtttttagaaggttgtgaattggctttttcacaaagcatgattatcttcctggctgatccaggagaaaattagaacagaaaaataatggttgtggattttgaaacaaagcaaggtaaagccttttttttttcaccttgcattggcaaaactacctcttcagtgtttttaacttttgattcaaaagcatcttaccaataaggataaatatcatatacatcgttatgaaaatattgctatgagataataagccacatatgaatgttgtatacaactttagggtttacatttaatcctgaagtgttacctcctttcatgtctatttacactattttcccatttactaagtggggagggggtctccttatatagtgcttcatcgttaataagtcaatacctgttgttcctgggatgttcttttttgtgcattaaaaacttcaaaatta

SEQ ID NO: 27038 - DNA, 2748 bp, Homo sapiens
  source 1..2748: mol_type = unassigned DNA
gcgcacggtaggcaacccacaccaaggcagccgcagctgcggcgcttgggtacaccgccgtggactccaaatggcctaagagcgttcttttagccctgcgctctcagtgcctttagagttctttcctttccccggagcgccggcacaacgcattatgccgctgggtcggagcttagggctcggcagaggttgctaattcactgattataatcaccttcctctccaactcgtccgcagctgcccgctctggattaagccgctccgcggctcgtgctaggcagttcgtggcggagagatgctgatcgcgctgaactgaccggtgcggcccgggggtgagtggcgagtctccctctgagtcctccccagcagcgcggccggcgccggctctttgggcgaaccctccagttcctagactttgagaggcgtctctcccccgcccgaccgcccagatgcagtttcgccttttctcctttgccctcatcattctgaactgcatggattacagccactgccaaggcaaccgatggagacgcagtaagcgaggatgcagaatagaaaactgtgattcttgctttagcaaagacttttgtaccaagtgcaaagtaggcttttatttgcatagaggccgttgctttgatgaatgtccagatggttttgcaccattagaagaaaccatggaatgtgtgggatgtgaagttggtcattggagcgaatggggaacttgtagcagaaataatcgcacatgtggatttaaatggggtctggaaaccagaacacggcaaattgttaaaaagccagtgaaagacacaatactgtgtccaaccattgctgaatccaggagatgcaagatgacaatgaggcattgtccaggagggaagagaacaccaaaggcgaaggagaagaggaacaagaaaaagaaaaggaagctgatagaaagggcccaggagcaacacagcgtcttcctagctacagacagagctaaccaataaaacaagagatccggtagatttttaggggtttttgtttttgcaaatgtgcacaaagctactctccactcctgcacactggtgtgcagcctttgtgctgctctgcccagtatctgttcccagtaacatggtgaaaggaagcaccaccagcatggcccctgtgttatttatgctttgatttgaatctggagactgtgaaggcaggagtaagtgcacagcccgtgacttggctcagtgtgtgctgagagaatccgtccccggcaccatggacatgctagaggtgtgaggctgcagaacaccgctggaggacggacttgtgcctatttatgtgaaagaagatgcttggcaggcaatgcgctactcactcgtgacctttatttctcacattgtgcattttcaaggatatgtttgtgtggatatctgcttagtgttaccacatggtattctcagcatgttaccttcacactgttgtgcgatgaaactgcttttagctgaggatatgctctggaaattcctgctcagtttcactgcagccctaatatgtacatatactgcaggagctacatataaagctcttatttactgtatatttatgctttcttgtgggtaacaagtcatacctgattaatatgatgccactttgtttctagtggttcctaacccattgtctgataaatgacttttctagtttggggaattgacacttgttttgttgcctcttgaaactttttttttttcccctcattgtgggcttatttctcattgtaagggtaggataaactagtttttgtatatagagtcaaatgaccagtgtcaaagagtttgcatattgggtagaccttctccactccacatgtcccacacatatagataaagcagcaggcggcatctggcaatcagaagcccaaactgcctttgagtctaagatgtgatgactttgatgaaacacaactgaaaacatgagggactatatccagtcacttgtagccagtttcacaggccagctacagaattgtccaaacaaacattatttctgactgcaatttttttcccccaaatttaaagcaatccctggctttaaatgacaaggcacctaccaatgttcttgggtcactgaagaagctactaccatgagcctgggcatagaattttaggagataaaaggatgaatttctgtgactgccagtcagatcttaacaggtttctgttgagccagaatctgtttcagatccaagatggagaggaacactatggaaacttcccaggtgactttcagagcagttgtttcaaacacatcattgtccttttaggggaaccagtttttagaaggttgtgaattggctttttcacaaagcatgattatcttcctggctgatccaggagaaaattagaacagaaaaataatggttgtggattttgaaacaaagcaaggtaaagccttttttttttcaccttgcattggcaaaactacctcttcagtgtttttaacttttgattcaaaagcatcttaccaataaggataaatatcatatacatcgttatgaaaatattgctatgagataataagccacatatgaatgttgtatacaactttagggtttacatttaatcctgaagtgttacctcctttcatgtctatttacactattttcccatttactaagtggggagggggtctccttatatagtgcttcatcgttaataagtcaatacctgttgttcctgggatgttcttttttgtgcattaaaaacttcaaaatta

SEQ ID NO: 27039 - DNA, 2487 bp, Homo sapiens
  source 1..2487: mol_type = unassigned DNA
cttttttctggaaactgcgacgagatgggaactttctgaattaagcagcaattcccgcgctggttttctggggagtcctcgcctccagagctagttatgtatcaaatcccatttgcaagggttgtttgtcttgttcaaaggacaatgggtgtagccgatgtcaacagaagttgttcttcttccttcgaagagaagggatgcgccagtatggagagtgcctgcattcctgcccatccgggtactatggacaccgagccccagatatgaacagatgtgcaagatgcagaatagaaaactgtgattcttgctttagcaaagacttttgtaccaagtgcaaagtaggcttttatttgcatagaggccgttgctttgatgaatgtccagatggttttgcaccattagaagaaaccatggaatgtgtggaaggatgtgaagttggtcattggagcgaatggggaacttgtagcagaaataatcgcacatgtggatttaaatggggtctggaaaccagaacacggcaaattgttaaaaagccagtgaaagacacaatactgtgtccaaccattgctgaatccaggagatgcaagatgacaatgaggcattgtccaggagggaagagaacaccaaaggcgaaggagaagaggaacaagaaaaagaaaaggaagctgatagaaagggcccaggagcaacacagcgtcttcctagctacagacagagctaaccaataaaacaagagatccggtagatttttaggggtttttgtttttgcaaatgtgcacaaagctactctccactcctgcacactggtgtgcagcctttgtgctgctctgcccagtatctgttcccagtaacatggtgaaaggaagcaccaccagcatggcccctgtgttatttatgctttgatttgaatctggagactgtgaaggcaggagtaagtgcacagcccgtgacttggctcagtgtgtgctgagagaatccgtccccggcaccatggacatgctagaggtgtgaggctgcagaacaccgctggaggacggacttgtgcctatttatgtgaaagaagatgcttggcaggcaatgcgctactcactcgtgacctttatttctcacattgtgcattttcaaggatatgtttgtgtggatatctgcttagtgttaccacatggtattctcagcatgttaccttcacactgttgtgcgatgaaactgcttttagctgaggatatgctctggaaattcctgctcagtttcactgcagccctaatatgtacatatactgcaggagctacatataaagctcttatttactgtatatttatgctttcttgtgggtaacaagtcatacctgattaatatgatgccactttgtttctagtggttcctaacccattgtctgataaatgacttttctagtttggggaattgacacttgttttgttgcctcttgaaactttttttttttcccctcattgtgggcttatttctcattgtaagggtaggataaactagtttttgtatatagagtcaaatgaccagtgtcaaagagtttgcatattgggtagaccttctccactccacatgtcccacacatatagataaagcagcaggcggcatctggcaatcagaagcccaaactgcctttgagtctaagatgtgatgactttgatgaaacacaactgaaaacatgagggactatatccagtcacttgtagccagtttcacaggccagctacagaattgtccaaacaaacattatttctgactgcaatttttttcccccaaatttaaagcaatccctggctttaaatgacaaggcacctaccaatgttcttgggtcactgaagaagctactaccatgagcctgggcatagaattttaggagataaaaggatgaatttctgtgactgccagtcagatcttaacaggtttctgttgagccagaatctgtttcagatccaagatggagaggaacactatggaaacttcccaggtgactttcagagcagttgtttcaaacacatcattgtccttttaggggaaccagtttttagaaggttgtgaattggctttttcacaaagcatgattatcttcctggctgatccaggagaaaattagaacagaaaaataatggttgtggattttgaaacaaagcaaggtaaagccttttttttttcaccttgcattggcaaaactacctcttcagtgtttttaacttttgattcaaaagcatcttaccaataaggataaatatcatatacatcgttatgaaaatattgctatgagataataagccacatatgaatgttgtatacaactttagggtttacatttaatcctgaagtgttacctcctttcatgtctatttacactattttcccatttactaagtggggagggggtctccttatatagtgcttcatcgttaataagtcaatacctgttgttcctgggatgttcttttttgtgcattaaaaacttcaaaatta

SEQ ID NO: 27040 - DNA, 674 bp, Homo sapiens
  source 1..674: mol_type = unassigned DNA
acctcactgttttagtatctgtgagacacagatgtgaaagctacagatttaattaacatgcagctagttatgtatcaaatcccatttgcaagggttgtttgtcttgttcaaaggacaatgggtgtagccgatgtcaacagaagttgttcttcttccttcgaagagaagggatgcgccagtatggagagtgcctgcattcctgcccatccgggtactatggacaccgagccccagatatgaacagatgtgcaagatgcagaatagaaaactgtgattcttgctttagcaaagacttttgtaccaagtgcaaagtaggcttttatttgcatagaggccgttgctttgatgaatgtccagatggttttgcaccattagaagaaaccatggaatgtgtggaaggatgtgaagttggtcattggagcgaatggggaacttgtagcagaaataatcgcacatgtggatttaaatggggtctggaaaccagaacacggcaaattgttaaaaagccagtgaaagacacaatactgtgtccaaccattgctgaatccaggagatgcaagatgacaatgaggcattgtccaggagggaagagaacaccaaaggcgaaggagaagaggaacaagaaaaagaaaaggaagctgatagaaagggcccaggagcaacacagcgtcttc

SEQ ID NO: 27041 - DNA, 579 bp, Homo sapiens
  source 1..579: mol_type = unassigned DNA
atttcttggcctgggttgaggaccttgccctaagttctacctctgtctggtctgacatccccatgagccattcagctttagcttctggcctcaactctgcctctgagtttcctctttgtttctaagtttggttgtgtattaacaactttttgggtggaggaggtagagggaagaaggggagggatattttatttagtatttctatctagttatgtatcaaatcccatttgcaagggttgtttgtcttgttcaaaggacaatgggtgtagccgatgtcaacagaagttgttcttcttccttcgaagagaagggatgcgccagtatggagagtgcctgcattcctgcccatccgggtactatggacaccgagccccagatatgaacagatgtgcaagatgcagaatagaaaactgtgattcttgctttagcaaagacttttgtaccaagtgcaaagtaggcttttatttgcatagaggccgttgctttgatgaatgtccagatggttttgcaccattagaagaaaccatggaatgtgtggaaggatgtgaagttggtcattggagcgaatggggaacttgt

SEQ ID NO: 27042 - DNA, 562 bp, Homo sapiens
  source 1..562: mol_type = unassigned DNA
acaccctgttttcgcttcttgtctctcaggttcgtggcggagagatgctgatcgcgctgaactgaccggtgcggcccgggggtgagtggcgagtctccctctgagtcctccccagcagcgcggccggcgccggctctttgggcgaaccctccagttcctagactttgagaggcgtctctcccccgcccgaccgcccagatgcagtttcgccttttctcctttgccctcatcattctgaactgcatggattacagccactgccaaggcaaccgatggagacgcagtaagcgagctagttatgtatcaaatcccatttgcaagggttgtttgtcttgttcaaaggacaatgggtgtagccgatgtcaacagaagttgttcttcttccttcgaagagaagggatgcgccagtatggagagtgcctgcattcctgcccatccgggtactatggacaccgagccccagatatgaacagatgtgcaagatgcagaatagaaaactgtgattcttgctttagcaaagacttttgtaccaagtgcaaagtaggcttttatttgcatagag

SEQ ID NO: 27043 - DNA, 568 bp, Homo sapiens
  source 1..568: mol_type = unassigned DNA
agaagcatcccaagcctcagccggtctgcatctccatcggaaagtgcgcttgccacatcccttcggatcacttcgtcctcccgagagcgttctgccttctacagctcggaaagaaagaaatcttagctgtgaagtgaccgtggagaaagcgcaggaagcgacacaattggttcgtggcggagagatgctgatcgcgctgaactgaccggtgcggcccgggggtgagtggcgagtctccctctgagtcctccccagcagcgcggccggcgccggctctttgggcgaaccctccagttcctagactttgagaggcgtctctcccccgcccgaccgcccagatgcagtttcgccttttctcctttgccctcatcattctgaactgcatggattacagccactgccaaggcaaccgatggagacgcagtaagcgagctagttatgtatcaaatcccatttgcaagggttgtttgtcttgttcaaaggacaatgggtgtagccgatgtcaacagaagttgttcttcttccttcgaagagaagggatgcgccagtatggagagtgcctgcattc

SEQ ID NO: 27044 - DNA, 2707 bp, Homo sapiens
  source 1..2707: mol_type = unassigned DNA
cacagcagcccccgcgcccgccgtgccgccgccgggacgtggggcccttgggccgtcgggccgcctggggagcgccagcccggatccggctgcccagatgcgggcgccactctgcctgctcctgctcgtcgcccacgccgtggacatgctcgccctgaaccgaaggaagaagcaagtgggcactggcctggggggcaactgcacaggctgtatcatctgctcagaggagaacggctgttccacctgccagcagaggctcttcctgttcatccgccgggaaggcatccgccagtacggcaagtgcctgcacgactgtccccctgggtacttcggcatccgcggccaggaggtcaacaggtgcaaaaaatgtggggccacttgtgagagctgcttcagccaggacttctgcatccggtgcaagaggcagttttacttgtacaaggggaagtgtctgcccacctgcccgccgggcactttggcccaccagaacacacgggagtgccagggggagtgtgaactgggtccctggggcggctggagcccctgcacacacaatggaaagacctgcggctcggcttggggcctggagagccgggtacgagaggctggccgggctgggcatgaggaggcagccacctgccaggtgctttctgagtcaaggaaatgtcccatccagaggccctgcccaggagagaggagccccggccagaagaagggcaggaaggaccggcgcccacgcaaggacaggaagctggaccgcaggctggacgtgaggccgcgccagcccggcctgcagccctgaccgccggctctcccgactctctggtcctagtcctcggcccctgcacacctcctcctgctccttctcctcctctcctcttactctttctcctctgtcttctccatttgtcctctctttctttccacccttctatcatttttctgtcagtctaccttccctttctttttcttttttatttcctttatttcttccacctccattctcctctcctttctccctccctccttcccttccttcctcttctttctcacttatcttttatctttccttttctttcttcctgtgtttcttcctgtccttcaccgcatccttctctctctccctcctcttgtctccctctcacacacactttaagagggaccatgagcctgtgccctcccctgcagctttctctatctacaacttaaagaaagcaaacatcttttcccaggcctttccctgaccccatctttgcagagaaagggtttccagagggcaaagctgggacacagcacaggtgaatcctgaaggccctgcttctgctctgggggaggctccaggaccctgagctgtgagcacctggttctctggacagtccccagaggccatttccacagccttcagccaccagccaccccgaggagctggctggacaaggctccagggcttccagaggcctggcttggacacctcccccagctggccgtggagggtcacaacctggcctctgggtgggcagccagccctggagggcatcctctgcaagctgcctgccaccctcatcggcactcccccacaggcctccctctcatgggttccatgcccctttttcccaagccggatcaggtgagctgtcactgctgggggatccacctgcccagcccagaagaggccactgaaacggaaaggaaagctgagattatccagcagctctgttccccacctcagcgcttcctgcccatgtggggaaacaggtctgagaaggaaggggcttgcccagggtcacacaggaagccttcaggctctgcttctgcctgatggctctgctcagcacattcacggtggagaggagaatttgggggtcacttgaggggggaaatgtagggaattgtgggtggggagcaagggaagatccgtgcactcgtccacacccaccaccacactcgctgacacccacccccacacgctgacacccacccccacacttgcccacacccatcaccgcactcgcccacacccaccaccacactgccccacacccaccaccacactcccccacacccaccaccacactcgcccacacccaccaccagtgacttgagcatctgtgcttcgctgtgacgcccctcgccctaggcaggaacgacgctgggaggagtctccaggtcagacccagcttggaagcaagtctgtcctcactgcctatccttctgccatcataacacccccttcctgctctgctccccggaatcctcagaaacgggatttgtatttgccgtgactggttggcctgaacacgtagggctccgtgactgggacaggaatgggcaggagaagcaagagtcggagctccaaggggcccaggggtggcctggggaaggaagatggtcagcaggctgggggagaggctctaggtgatgaaatattacattcccgaccccaagagagcacccaccctcagacctgccctccacctggcagctggggagccctggcctgaacccccccctcccagcaggcccaccctctctctgacttccctgctctcacctccccgagaacagctagagccccctcctccgcctggccaggccaccagcttctcttctgcaaacgtttgtgcctctgaaatgctccgttgttattgtttcaagaccctaacttttttttaaaactttcttaataaagggaaaagaaacttgtaaa

SEQ ID NO: 27045 - DNA, 722 bp, Homo sapiens
  source 1..722: mol_type = unassigned DNA
gcccacagcagcccccgcgcccgccgtgccgccgccgggacgtggggcccttgggccgtcgggccgcctggggagcgccagcccggatccggctgcccagatgcgggcgccactctgcctgctcctgctcgtcgcccacgccgtggacatgctcgccctgaaccgaaggaagaagcaagtgggcactggcctggggggcaactgcacaggctgtatcatctgctcagaggagaacggctgttccacctgccagcagaggctcttcctgttcatccgccgggaaggcatccgccagtacggcaagtgcctgcacgactgtccccctgggtacttcggcatccgcggccaggaggtcaacaggtgcaaaaaatgtggggccacttgtgagagctgcttcagccaggacttctgcatccggtgcaagaggcagttttacttgtacaaggggaagtgtctgcccacctgcccgccgggcactttggcccaccagaacacacgggagtgccaggagaggagccccggccagaagaagggcaggaaggaccggcgcccacgcaaggacaggaagctggaccgcaggctggacgtgaggccgcgccagcccggcctgcagccctgaccgccggctctcccgactctctggtcctagtcctcggcccctgcacacctcctcctgctccttctcctcctctcctcttactctttctcctctgtcttctcca

SEQ ID NO: 27046 - DNA, 5021 bp, Homo sapiens
  source 1..5021: mol_type = unassigned DNA
agcggagcgcgcatgcgcggtcgcctttgtgtgggtcgagcagcggcggcggcggcggcagtggcggtcccactggcaggcgggcaagaggggagtccgggcggcggccggcgtgggagccgggggaccaccatggtaaagaagcggaaaggccgcgtcgtgatcgactcggacacagaggacagcggcagcgacgagaacctggatcaggagctcttgtccctggcaaagcgaaagcgcagtgactctgaggagaaggagccgcctgtgagtcagcctgcagcctcgtcagactcggagacgtctgacagtgacgatgagtggacatttgggagcaataaaaataagaagaaaggaaaagccagaaaaatagagaagaaaggaaccatgaagaaacaggccaacaaaactgcctcctcaggcagttcagacaaagacagttcagctgagagctcagcccctgaggaaggtgaagtgtcagactctgacagcaacagctcctcttccagttcagattcagactcttcctcagaagatgaagagttccatgatggctatggagaagacctcatgggagatgaggaagacagggcccgtctggaacagatgacagagaaagagagagagcaagaactgttcaatcgcatagagaagagggaggtgttgaaaagaagatttgaaatcaagaaaaaactaaaaacagccaaaaagaaagaaaagaaagaaaagaagaaaaagcaagaagaggagcaagaaaagaaaaaactgacacagattcaagaatctcaggtaacatcccacaacaaggaacggcgttccaagcgggatgagaaactagacaagaaatctcaagccatggaggagctaaaagcagagcgagaaaaacgaaagaacagaacagctgagctccttgccaaaaaacagccattaaaaaccagtgaggtctactctgatgatgaagaggaggaagaggatgacaaatccagtgaaaagtcagaccgctcatcacgaacatcatcgtctgatgaagaagaggagaaagaagagatccctcccaaatcccaaccagtttccttacctgaagaattgaatcgggttcgattatcacggcataagctagaacgctggtgtcacatgcccttctttgctaaaactgtcacaggatgttttgtgcggattggcatcggaaaccacaacagcaaaccagtttaccgggtcgctgagattacgggtgttgtggaaactgccaaagtttaccaactaggtggcaccagaacaaacaaagggctgcaactacggcatggcaatgaccaacgcgtgttccgtttagagtttgtctcaaaccaagaattcaccgaaagtgagtttatgaagtggaaagaagcgatgttctctgctggcatgcagttgcccactctagatgaaatcaataaaaaggaattatctattaaagaagctcttaattataaattcaatgatcaggacattgaagagattgtaaaagagaaagaaaggttcagaaaagctccacccaactacgctatgaagaagactcagctactgaaggaaaaggccatggctgaggacctgggggatcaggacaaggccaaacaaatccaagatcaactgaatgagctggaggaacgggcagaggccctggaccgccagcggaccaagaacatatccgctatcagttacatcaaccagcggaaccgggagtggaacattgtagagtctgagaaggcccttgtggctgaaagtcacaacatgaaaaaccaacagatggatccctttactcggcggcagtgcaagcctaccatcgtttctaattccagagacccagctgttcaagctgccatcttggcccagctgaatgcaaaatacggttctggagtgttaccagatgctccaaaggaaatgagcaagggtcaaggcaaagataaagatttgaattctaagtcagccagtgacctctcagaagatctgttcaaagtacacgattttgatgtgaagattgacttacaagttcccagctcagagtcaaaggctttagccatcacctccaaggctccgccagccaaggatggggctccaaggagatctctgaacttggaagactacaaaaaacgacgagggcttatttgagcacacccagcctgctgcttctgaccctgcatgccccatcgcagcgtcccacctttcctcctttcctttgatttagcctctttgggctggagcagctgttgaactgggaagagactctaaactgccagtcatctgtaatataaaccatttgctgtatagacctcctttgtctgcacaccatctcccaccagcctcccctcccccagggccccacccagtgtgggcctgggctctcttgggctttatccatgtctttagatttgtgtttgccttttgtttttttaaccgcgcagttcattggccactctgcacgcattcagtattaccatggagctgggaatcttgctggagcccctggggcaatagcagcagcaccaggcggtctcctctacagactgccttggcccacccattgaacattcggcacgtgaccttgtggggggagcggggattgggcacctgcgatcctctttcctctcttcatctttctcttctgcccttctttttggaagaaggggtttcaaaaccagtttagtttccaaaaagtgtacatttgtggggggggggggtctaatttgagagcgagagtgtgtatgtgtgtgtgtgtaagtgtgtggatttttttatcatttttttaaaatgcagtactctttgtatcagtctgtcatgggtctatagctgtttcagatttttttcagctgtacttgagcatctgaaactgcaagaaagaaactcattaaatgtgattcttcttactaaacaggcctgactgctgtagctgtgtaacttccccattcccacctactcttcccatcctttcccaactttggagaaaactccccagtttagccccctgacctgcaggctgtgtcctggcaggtgtgggagggaagcccatggccaggtaccagggagggcagtgaatgtcttgctcttcccatgggtacagcccacagcttcttggctgaacgtagaacttctttttctcacccagtataccagcctcttcctggtgattctgttttgctgctttggcaagaactacattttgtttttaagagaaatttctgaatatgaatgtggagagcaaacacaaaaagatttaggttacgccgggtgcagtagctcacgcctgtaatcccagcactttgggaggcctaggcgggtggatcacctgaggtcaggagttcaagaccaatctgactaacacggtgaaaccccatctctactaaaactacaaaacttagccgggcatggtggtgcgtgcctgtaatcccagctactcggggggctgagacaggagaatcccttgaacctgggaggcggaggttgtggtgagccaagatcgtgccactgcactccagtctgggtgacagagtgagactccgcctcaaaaagatttaggttgcaaatgtttcaagcatgtgcagttttgtgtgtgtgtatacatatatatggtcagcatatatattgtgcagctagggcgaagccagcagaggtgtgtgtatgtctttatgaaatgtttgaaaagagataaactgactgcttgataatcactctcaggtgtaaagctccaagtgtaaataaaagtggcatttaacaaatctttcagaacaaagtacagctgactatatataccaagagctaagctaaaggaacagctgagagctccgatctccacgagagactaatctaaaagctctgctttgtacttcctcaccctgctttcgtacaaggaagggggacgatgggaaatcatggacttgtaagttgtatttaaacataaaaatgaacttggtaacttctgggtttagtagagcctcagtgtcgctttaacttagtttactttttttttatttttaaagcagcaatggatggttttaaaggagtattatgattgtaaaattgctaaatatgactgtaacacagctttgtggtagctgtgacacagttcacttgggcaaaggagtggtgatggactcgttaaaatcatatatacttgaatagtccattgaccgaaactctttatagactattgtgtaaatgtggaatcacagactgttaacattgcctggacttcagcagagtcctggagctgctgggacctctcctatcatgatgaacttggacttttttttttgatttctggttttaaaaaacataaaattatagaatccagataattcgctggagtcattctgatccaccatgtagatctgtatttagtatcatttggatttggagaagtgttgattacattatggctgtgtaataaaatttttattaaaactgcatcacactgtagccactttgccaccacctccccacatgtagccgctgaaacccccacgagatgccaatgcacacagcagggagaaaagccaaccaaagaagaccgaagggtatctttccacccgagtagcctctgtagtgattgggaccaagactaaggacttgtctccaatctcagctgaggcagtgcctctgaaccaagatcttggtcaggcattaagacactggctttgtcctaccaactaggatttcttggtggttcacactatttcttgtgctggggaattccctcattgggcccctcctccctccacagtgtggtttcagtgttgaagggtgcagcacccaaggttgtttttatgcattttttcagttccttccaagaagcaaaaaggccagtgtccatctgcctagttcataatgtttataggtctgtttgtctgtcttgcttctggcaggtgtagggaaagtctactgcctgccactcccttcaaaaagaatgtttttgcttttgtgaagtcctgacttgccactcaaactgtaccaatattgtaaataaatgttatgccattttaacaaaggga

SEQ ID NO: 27047 - DNA, 5199 bp, Homo sapiens
  source 1..5199: mol_type = unassigned DNA
gccgccgccgccggcgcggaaggacgaggctgaggcgagaaacgaggtgccaagctctcctgatgaaatgtgttctgccccactgggctccagggacagtgtctggtgctgttgaagcccttattcgaactttccagaatggatagtcccccaaagctgactggagagaccctcatcgttcatcacatccccctggtgcactgccaagtcccagacaggcagtgctgtggaggggcaggtggaggtggtgggagcacaagacctaatcccttctgcccacctgagctgggcatcacccagcccgatcaagacctaggacaagctgactccctgctattcagcagcctgcactctactccaggaggaactgcacggtctatagacagcaccaagagtaggagtcgggatggaagaggccctggagcccccaaacgacacaaccccttcttgctgcaggagggtgtgggtgagccaggacttggtgacctgtatgatgacagcattggtgacagtgccacccagcagtccttccacctgcatggcactggccagcccaactttcatctatcctctttccagctgccaccatctggccccagagtgggcaggccatgggggacaacacgcagtcgggctggagtggtggaagggcaggaacaggagccagtgatgaccttggatactcagcagtgcggcaccagccactgctgccggccagagctggaagcagagactatggagctggatgagtgtgggggacctggtgggagtggcagtgggggtggagccagcgatacctctggcttttcctttgaccaggaatggaagctcagttcagatgaatccccaaggaaccctggatgctccggctcaggggaccagcactgccgctgcagtagcacatccagtcagtccgaggcagctgaccagtccatgggctatgtgagcgactcctcctgcaacagttcagatggtgtgctggtcaccttcagcaccctctacaacaagatgcatggcaccccccgtgccaatctcaactctgccccacagtcctgcagcgactcttccttctgcagccactcagaccctggcgccttctatctggatctgcagccctccccatttgagtctaagatgtcttatgagtcccatcaccctgaaagtggaggaagggaagggggctatggttgccctcatgcctcttctcctgagcttgatgccaactgcaactcctaccgcccacactgtgagccgtgcccagcagtggctgacctcacagcctgcttccaaagccaggcccgtcttgttgtggccacacaaaattactataaacttgtcacctgtgacctatcttcccaatcatccccaagccctgctggctcttccatcactagctgctctgaggaacacaccaagataagtcccccaccaggccctggcccagacccaggccccagccagccctctgagtattacctattccagaagccagaagtccagccagaggaacaagaagcagtgagttcctccacccaagcagcagctgctgtgggccccactgtgcttgagggacaagtatacacgaatacttcaccccccaacctcagcactggacgtcagcgctcccgcagctatgatcgcagcctgcagcgcagccctcctgtccgcctgggctcgctggaacgtatgttgagttgcccagtgcgcttgagtgagggccctgcagccatggccgggcctggctccccacccaggagggtcacctcctttgccgagctggccaagggccggaagaaaactggaggctctggctcgcccccacttcgtgtgagtgttggggactcctcccaggagttctcacccatccaagaagcccagcaagatcggggggccccactggatgagggcacttgctgtagccatagcctgccacccatgcctttggggccaggcatggacctacttggcccagacccaagtccaccctggtccacccaggtctgtcagggaccccactccagtgagatgcctcctgctggcctcagagctactgggcaaggccccctggctcagctgatggatccagggcctgctctcccagggagcccagccaacagccatacccagagggatgcaagagctagagctgacgggggtggcaccgagagccgaccagtccttcgctacagcaaggaacagaggccaaccacactgcccatccagcccttcgtgttccagcaccacttccccaagcagctggccaaggcccgggccctccacagcctttcccagctctacagcctctcaggctgcagccgtacacagcagcctgccccactggctgcccctgctgctcaagtctcagtcccagctccctcaggggaaccgcaggcatccactccccgagccactggcagaggtgccaggaaagctgggtctgagccagagacctctcggccatcgcccctgggcagctactcccccatccggagtgttggcccctttgggcccagcactgactcttctgcctccacttcgtgctcccctcccccagagcagcccacagccacagaaagcctgcccccatggagccactcctgtccttctgctgtccggcctgccacctcccagcagccgcagaaggaggatcagaagatactgaccttgactgagtaccggctccatggaacaggaagcttgccgcctctgggctcctggcgatctggcctcagccgagcagagagcctggcccggggaggtggtgagggcagcatggccaccaggcccagtaatgccaaccacctatcccctcaagccctcaagtggcgggaatacaggaggaagaacccactagggccacctggtttgtcagggagcctagaccgaagatcacaagaagctcggctggcccgaagaaaccctatctttgagttccctggctccctcagtgctgccagccatctgaactgccggctgaatggccaagcagtgaagccgttaccactgacctgccctgacttccaggaccccttttccttgacggagaagcctccagctgagttttgtctgtccccagatggcagctcagaggccatttccattgacctgcttcagaaaaaagggctggtaaaagctgttaacatcgctgtggacctcattgtggctcattttggcacaagccgggatcccggggtgaaggcaaagctgggaaacagttctgtgagccccaatgtgggccacctggttctgaagtacttgtgccctgccgtccgcgccgtgctggaggatgggctcaaggcctttgtactggacgtcatcatcgggcagcgtaagaacatgccatggagtgtggttgaggcttccacacagctaggcccatccaccaaggtcctgcatggcctctacaacaaagtcagccaattcccagagctcaccagtcataccatgcgcttcaacgccttcatcctcggcctgctcaacatccggtccctggagttctggtttaatcacctctataaccacgaagacatcatccagacccactaccagccctggggcttcctgagtgcagctcataccgtgtgtcccggcctctttgaagagctgctgctgctgctacagcccctggccctgctgcccttcagcctcgacttgctgttccagcaccggctgctgcaaagtgggcagcagcagcggcagcacaaggaactgctgcgggtgtcccaggacctgctgctgtctgcccactccacgctgcagctggcccgggcccggggccaggagggccctggagacgtggacagggcagcccaaggggagcgggtgaagggtgtgggtgcctcagaaggtggagaagaggaagaggaagaagaggagacagaagaggtggcagaggcagccgggggctcagggcgtgccaggtgggcccgaggtgggcaggccggctggtggtaccagctcatgcagagctcccaggtctacatcgatggctccattgagggttccaggttccctcgtggtagcagcaacagcagcagcgagaaaaagaaaggggcaggaggtgggggacctccccaggctccaccaccccgagagggagtagtggagggggctgaggcctgccctgcctctgaggaggccctgggccgggaaaggggctggcccttctggatggggagcccccctgactctgtgctggccgagctgaggcgcagtcgggagagggaagggcccgctgcctcgccagcagaaaatgaggaaggggcctcagagccttcacctggaggcatcaagtggggacacctctttggctcccgaaaagcccagcgggaggcccggcccacaaataggctcccctcggactggctgagcctggacaagtccatgttccaactagtggcgcagacagtgggttcccgccgggagccagagcccaaggagagcctgcaggagccacactccccagccctgccctccagtcctccgtgtgaggtgcaggcactgtgccaccacctggccaccggccctggacagctgagcttccacaaaggagacatcctacgagtgctggggcgagctggaggagactggctgcgctgcagccgtggccccgactctggcctggtgcccctggcctacgtgacattgaccccaactccaagtccaacccctggaagcagccaaaactgaggccctgtgcatgctggtggcctcagggaccctcataacccccagactcagagcccgagagcccttcccaagccattggcttggctgcagagtagactgagagctggggccacgtatccctgtgctggcacctgctccctgtgctcagtattaattacgcccccttaactgtcccagtgaccttgtccagacctccacccaggagagggatgggacacagcactgggctgccaggattcccctggcccgtctgggccaacccttccatgggtgaagacaagcaagtccccctggaggcgggtggcccagaaagccatctacagggttccctaggccaggtggagatgaggatgggtaacagtattggggccagatccctaagccccccagctgtaaataggctgtggccagtgcctggtcatcagaagagggaggaggagcccaggcgtctgtttatgtatttatttatttatttattatacctattaataaaaaaggtgctcagcctcc

SEQ ID NO: 27048 - DNA, 5636 bp, Homo sapiens
  source 1..5636: mol_type = unassigned DNA
atcttccctgagatgcctaaggacaaaagaggagctagacacaactctccccatttttcctttgctgtcttaagagtgctccatcttccagcactgactgccctctgtggctggctcctttctctaccctcccccttccctaggctaaagggcccacaggggctggaagggagggaggctgagtggctgtgctgtgggcctgcctgctcctttcccttcccccttcccttagcagcaacgtcaccgcagcaccagcagccgcggcagcagcacggagactggggctgggattgcgcagcctccctgcattagcaacgatgccattgtattagcagaaatcagatcttaggaaatcggcccagttcccctgtgtgatcccgtggaacagtgtctcagctggaactgtcgcggtagagcttggtcggagtgcaaaagggacagacgcatcaggggtccagctcaaggctcctgacagaggtgccaagctctcctgatgaaatgtgttctgccccactgggctccagggacagtgtctggtgctgttgaagcccttattcgaactttccagaatggatagtcccccaaagctgactggagagaccctcatcgttcatcacatccccctggtgcactgccaagtcccagacaggcagtgctgtggaggggcaggtggaggtggtgggagcacaagacctaatcccttctgcccacctgagctgggcatcacccagcccgatcaagacctaggacaagctgactccctgctattcagcagcctgcactctactccaggaggaactgcacggtctatagacagcaccaagagtaggagtcgggatggaagaggccctggagcccccaaacgacacaaccccttcttgctgcaggagggtgtgggtgagccaggacttggtgacctgtatgatgacagcattggtgacagtgccacccagcagtccttccacctgcatggcactggccagcccaactttcatctatcctctttccagctgccaccatctggccccagagtgggcaggccatgggggacaacacgcagtcgggctggagtggtggaagggcaggaacaggagccagtgatgaccttggatactcagcagtgcggcaccagccactgctgccggccagagctggaagcagagactatggagctggatgagtgtgggggacctggtgggagtggcagtgggggtggagccagcgatacctctggcttttcctttgaccaggaatggaagctcagttcagatgaatccccaaggaaccctggatgctccggctcaggggaccagcactgccgctgcagtagcacatccagtcagtccgaggcagctgaccagtccatgggctatgtgagcgactcctcctgcaacagttcagatggtgtgctggtcaccttcagcaccctctacaacaagatgcatggcaccccccgtgccaatctcaactctgccccacagtcctgcagcgactcttccttctgcagccactcagaccctggcgccttctatctggatctgcagccctccccatttgagtctaagatgtcttatgagtcccatcaccctgaaagtggaggaagggaagggggctatggttgccctcatgcctcttctcctgagcttgatgccaactgcaactcctaccgcccacactgtgagccgtgcccagcagtggctgacctcacagcctgcttccaaagccaggcccgtcttgttgtggccacacaaaattactataaacttgtcacctgtgacctatcttcccaatcatccccaagccctgctggctcttccatcactagctgctctgaggaacacaccaagataagtcccccaccaggccctggcccagacccaggccccagccagccctctgagtattacctattccagaagccagaagtccagccagaggaacaagaagcagtgagttcctccacccaagcagcagctgctgtgggccccactgtgcttgagggacaagtatacacgaatacttcaccccccaacctcagcactggacgtcagcgctcccgcagctatgatcgcagcctgcagcgcagccctcctgtccgcctgggctcgctggaacgtatgttgagttgcccagtgcgcttgagtgagggccctgcagccatggccgggcctggctccccacccaggagggtcacctcctttgccgagctggccaagggccggaagaaaactggaggctctggctcgcccccacttcgtgtgagtgttggggactcctcccaggagttctcacccatccaagaagcccagcaagatcggggggccccactggatgagggcacttgctgtagccatagcctgccacccatgcctttggggccaggcatggacctacttggcccagacccaagtccaccctggtccacccaggtctgtcagggaccccactccagtgagatgcctcctgctggcctcagagctactgggcaaggccccctggctcagctgatggatccagggcctgctctcccagggagcccagccaacagccatacccagagggatgcaagagctagagctgacgggggtggcaccgagagccgaccagtccttcgctacagcaaggaacagaggccaaccacactgcccatccagcccttcgtgttccagcaccacttccccaagcagctggccaaggcccgggccctccacagcctttcccagctctacagcctctcaggctgcagccgtacacagcagcctgccccactggctgcccctgctgctcaagtctcagtcccagctccctcaggggaaccgcaggcatccactccccgagccactggcagaggtgccaggaaagctgggtctgagccagagacctctcggccatcgcccctgggcagctactcccccatccggagtgttggcccctttgggcccagcactgactcttctgcctccacttcgtgctcccctcccccagagcagcccacagccacagaaagcctgcccccatggagccactcctgtccttctgctgtccggcctgccacctcccagcagccgcagaaggaggatcagaagatactgaccttgactgagtaccggctccatggaacaggaagcttgccgcctctgggctcctggcgatctggcctcagccgagcagagagcctggcccggggaggtggtgagggcagcatggccaccaggcccagtaatgccaaccacctatcccctcaagccctcaagtggcgggaatacaggaggaagaacccactagggccacctggtttgtcagggagcctagaccgaagatcacaagaagctcggctggcccgaagaaaccctatctttgagttccctggctccctcagtgctgccagccatctgaactgccggctgaatggccaagcagtgaagccgttaccactgacctgccctgacttccaggaccccttttccttgacggagaagcctccagctgagttttgtctgtccccagatggcagctcagaggccatttccattgacctgcttcagaaaaaagggctggtaaaagctgttaacatcgctgtggacctcattgtggctcattttggcacaagccgggatcccggggtgaaggcaaagctgggaaacagttctgtgagccccaatgtgggccacctggttctgaagtacttgtgccctgccgtccgcgccgtgctggaggatgggctcaaggcctttgtactggacgtcatcatcgggcagcgtaagaacatgccatggagtgtggttgaggcttccacacagctaggcccatccaccaaggtcctgcatggcctctacaacaaagtcagccaattcccagagctcaccagtcataccatgcgcttcaacgccttcatcctcggcctgctcaacatccggtccctggagttctggtttaatcacctctataaccacgaagacatcatccagacccactaccagccctggggcttcctgagtgcagctcataccgtgtgtcccggcctctttgaagagctgctgctgctgctacagcccctggccctgctgcccttcagcctcgacttgctgttccagcaccggctgctgcaaagtgggcagcagcagcggcagcacaaggaactgctgcgggtgtcccaggacctgctgctgtctgcccactccacgctgcagctggcccgggcccggggccaggagggccctggagacgtggacagggcagcccaaggggagcgggtgaagggtgtgggtgcctcagaaggtggagaagaggaagaggaagaagaggagacagaagaggtggcagaggcagccgggggctcagggcgtgccaggtgggcccgaggtgggcaggccggctggtggtaccagctcatgcagagctcccaggtctacatcgatggctccattgagggttccaggttccctcgtggtagcagcaacagcagcagcgagaaaaagaaaggggcaggaggtgggggacctccccaggctccaccaccccgagagggagtagtggagggggctgaggcctgccctgcctctgaggaggccctgggccgggaaaggggctggcccttctggatggggagcccccctgactctgtgctggccgagctgaggcgcagtcgggagagggaagggcccgctgcctcgccagcagaaaatgaggaaggggcctcagagccttcacctggaggcatcaagtggggacacctctttggctcccgaaaagcccagcgggaggcccggcccacaaataggctcccctcggactggctgagcctggacaagtccatgttccaactagtggcgcagacagtgggttcccgccgggagccagagcccaaggagagcctgcaggagccacactccccagccctgccctccagtcctccgtgtgaggtgcaggcactgtgccaccacctggccaccggccctggacagctgagcttccacaaaggagacatcctacgagtgctggggcgagctggaggagactggctgcgctgcagccgtggccccgactctggcctggtgcccctggcctacgtgacattgaccccaactccaagtccaacccctggaagcagccaaaactgaggccctgtgcatgctggtggcctcagggaccctcataacccccagactcagagcccgagagcccttcccaagccattggcttggctgcagagtagactgagagctggggccacgtatccctgtgctggcacctgctccctgtgctcagtattaattacgcccccttaactgtcccagtgaccttgtccagacctccacccaggagagggatgggacacagcactgggctgccaggattcccctggcccgtctgggccaacccttccatgggtgaagacaagcaagtccccctggaggcgggtggcccagaaagccatctacagggttccctaggccaggtggagatgaggatgggtaacagtattggggccagatccctaagccccccagctgtaaataggctgtggccagtgcctggtcatcagaagagggaggaggagcccaggcgtctgtttatgtatttatttatttatttattatacctattaataaaaaaggtgctcagcctccaaacca

SEQ ID NO: 27049 - DNA, 3101 bp, Homo sapiens
  source 1..3101: mol_type = unassigned DNA
agcaacgatgccattgtattagcagaaatcagatcttaggaaatcggcccagttcccctgtgtgatcccgtggaacagtgtctcagctggaactgtcgcggtagagcttggtcggagtgcaaaagggacagacgcatcaggggtccagctcaaggctcctgacagaggtgccaagctctcctgatgaaatgtgttctgccccactgggctccagggacagtgtctggtgctgttgaagcccttattcgaactttccagaatggatagtcccccaaagctgactggagagaccctcatcgttcatcacatccccctggtgcactgccaagtcccagacaggcagtgctgtggaggggcaggtggaggtggtgggagcacaagacctaatcccttctgcccacctgagctgggcatcacccagcccgatcaagacctaggacaagctgactccctgctattcagcagcctgcactctactccaggaggaactgcacggtctatagacagcaccaagagtaggagtcgggatggaagaggccctggagcccccaaacgacacaaccccttcttgctgcaggagggtgtgggtgagccaggacttggtgacctgtatgatgacagcattggtgacagtgccacccagcagtccttccacctgcatggcactggccagcccaactttcatctatcctctttccagctgccaccatctggccccagagtgggcaggccatgggggacaacacgcagtcgggctggagtggtggaagggcaggaacaggagccagtgatgaccttggatactcagcagtgcggcaccagccactgctgccggccagagctggaagcagagactatggagctggatgagtgtgggggacctggtgggagtggcagtgggggtggagccagcgatacctctggcttttcctttgaccaggaatggaagctcagttcagatgaatccccaaggaaccctggatgctccggctcaggggaccagcactgccgctgcagtagcacatccagtcagtccgaggcagctgaccagtccatgggctatgtgagcgactcctcctgcaacagttcagatggtgtgctggtcaccttcagcaccctctacaacaagatgcatggcaccccccgtgccaatctcaactctgccccacagtcctgcagcgactcttccttctgcagccactcagaccctggcgccttctatctggatctgcagccctccccatttgagtctaagatgtcttatgagtcccatcaccctgaaagtggaggaagggaagggggctatggttgccctcatgcctcttctcctgagcttgatgccaactgcaactcctaccgcccacactgtgagccgtgcccagcagtggctgacctcacagcctgcttccaaagccaggcccgtcttgttgtggccacacaaaattactataaacttgtcacctgtgacctatcttcccaatcatccccaagccctgctggctcttccatcactagctgctctgaggaacacaccaagataagtcccccaccaggccctggcccagacccaggccccagccagccctctgagtattacctattccagaagccagaagtccagccagaggaacaagaagcagtgagttcctccacccaagcagcagctgctgtgggccccactgtgcttgagggacaagtatacacgaatacttcaccccccaacctcagcactggacgtcagcgctcccgcagctatgatcgcagcctgcagcgcagccctcctgtccgcctgggctcgctggaacgtatgttgagttgcccagtgcgcttgagtgagggccctgcagccatggccgggcctggctccccacccaggagggtcacctcctttgccgagctggccaagggccggaagaaaactggaggctctggctcgcccccacttcgtgtgagtgttggggactcctcccaggagttctcacccatccaagaagcccagcaagatcggggggccccactggatgagggcacttgctgtagccatagcctgccacccatgcctttggggccaggcatggacctacttggcccagacccaagtccaccctggtccacccaggtctgtcagggaccccactccagtgagatgcctcctgctggcctcagagctactgggcaaggccccctggctcagctgatggatccagggcctgctctcccagggagcccagccaacagccatacccagagggatgcaagagctagagctgacgggggtggcaccgagagccgaccagtccttcgctacagcaaggaacagaggccaaccacactgcccatccagcccttcgtgttccagcaccacttccccaagcagctggccaaggcccgggccctccacagcctttcccagctctacagcctctcaggctgcagccgtacacagcagcctgccccactggctgcccctgctgctcaagtctcagtcccagctccctcaggggaaccgcaggcatccactccccgagccactggcagaggtgccaggaaagctgggtctgagccagagacctctcggccatcgcccctgggcagctactcccccatccggagtgttggcccctttgggcccagcactgactcttctgcctccacttcgtgctcccctcccccagagcagcccacagccacagaaagcctgcccccatggagccactcctgtccttctgctgtccggcctgccacctcccagcagccgcagaaggaggatcagaagatactgaccttgactgagtaccggctccatggaacaggaagcttgccgcctctgggctcctggcgatctggcctcagccgagcagagagcctggcccggggaggtggtgagggcagcatggccaccaggcccagtaatgccaaccacctatcccctcaagccctcaagtggcgggaatacaggaggaagaacccactagggccacctggtttgtcagggagcctagaccgaagatcacaagaagctcggactggctgagcctggacaagtccatgttccaactagtggcgcagacagtgggttcccgccgggagccagagcccaa

SEQ ID NO: 27050 - DNA, 1821 bp, Homo sapiens
  source 1..1821: mol_type = unassigned DNA
acggggccccggctcagcacctcggagagctccctccccggccttgttttgctctggcatcgccgccgggggagggagcgagggggccgggcaccgggcgcaaaggcagggggatggccatggaagggttgaggggccccgtcggacagagggcccagccgtgatccagcgacgggtttggggctccgggaggggtgggggggcagcgggcggcggcagcagtggccgcacatctggatggaagcgagctttgtccagaccaccatggctctggggctgtcctccaagaaagcgtcctctcgcaacgtggctgtggagcgtaagaacctgatcaccgtgtgcaggttctctgtgaaaacgctgctggagaagtacacagcggagcccatcgatgactcatcggaggagtttgtcaattttgcagccattttagagcagatcctcagccaccgcttcaaagcctgtgccccagcaggtccagtgagctggttcagctcagacgggcagcggggcttttgggactatatccggctggcctgcagcaaagtgcccaacaactgtgtgagcagcatcgagaacatggagaacatcagcacagcccgggccaagggccgggcatggatccgggtggcactgatggagaagcgcatgtcagaatacatcaccacggctctgcgtgacacccggaccaccagacggttctatgactctggagccatcatgctgcgggatgaagccaccatcctcaccggaatgctgatcggactgagcgccatcgacttcagcttctgtctaaagggggaagtcctggacgggaagacccccgtggtcatcgattacacgccctacctaaagttcacgcagagctacgactacctgacggacgaggaggagcggcacagcgccgagagcagcacgagcgaggacaactcgcccgagcacccgtacctcccgctcgtcaccgatgaggacagctggtacagcaagtggcacaagatggagcagaagttccgcatcgtctacgcgcagaagggctacctggaggagctggtgcgtctgcgcgagtcgcagctgaaggacctggaggcggagaaccggcggcttcagctgcagctggaggaggcggcggcgcagaaccagcgcgagaaacgggagctggaaggcgtgatcctggagctgcaggagcagctgacaggtctgatccccagtgaccacgcccctctggcccagggttccaaggagctcactacacccctggtcaatcaatggccctcactgggaacgcttaatggggccgagggcgccagcaactccaagctctaccggagacacagcttcatgagcacggagccgctgtcagctgaagccagtctgagctcggactcccagcgcctgggagagggcacgcgggacgaggagccctggggtcccatcggaagctcagagccaaattagtggctcccttcgagcgaatgcccaggacttcaacgcatgcactttgtgttgacctcatccctggcttcaccttggtttttcccatcctagttctccctatgcctgaatatcctgtcttttcttttttataagcaaccacactgtattggatgaccctagatcttctttgagacaaggcaggctgtggccatgtagccccatcacactgtgtttgtgattgtctgtgtgtctgtctcccccaccagactgtgagctccatgagggcagggaccgtgtcttgtccgttctctgtatccccagtgcttggaacagagcgagtgctcactgtgtatttaataaatggacaaagagagaggatgaccctca

SEQ ID NO: 27051 - DNA, 2032 bp, Homo sapiens
  source 1..2032: mol_type = unassigned DNA
gggcggctggaggagggggtgacggggccccggctcagcacctcggagagctccctccccggccttgttttgctctggcatcgccgccgggggagggagcgagggggccgggcaccgggcgcaaaggcagggggatggccatggaagggttgaggggccccgtcggacagagggcccagccgtgatccagcgacgggtttggggctccgggaggggtgggggggcagcgggcggcggcagcagtggccgcacatctggatggaagcgagctttgtccagaccaccatggctctggggctgtcctccaagaaagcgtcctctcgcaacgtggctgtggagcgtaagaacctgatcaccgtgtgcaggttctctgtgaaaacgctgctggagaagtacacagcggagcccatcgatgactcatcggaggagtttgtcaattttgcagccattttagagcagatcctcagccaccgcttcaaagcctgtgccccagcaggtccagtgagctggttcagctcagacgggcagcggggcttttgggactatatccggctggcctgcagcaaagtgcccaacaactgtgtgagcagcatcgagaacatggagaacatcagcacagcccgggccaagggccgggcatggatccgggtggcactgatggagaagcgcatgtcagaatacatcaccacggctctgcgtgacacccggaccaccagacggttctatgactctggagccatcatgctgcgggatgaagccaccatcctcaccggaatgctgatcggactgagcgccatcgacttcagcttctgtctaaagggggaagtcctggacgggaagacccccgtggtcatcgattacacgccctacctaaagttcacgcagagctacgactacctgacggacgaggaggagcggcacagcgccgagagcagcacgagcgaggacaactcgcccgagcacccgtacctcccgctcgtcaccgatgaggacagctggtacagcaagtggcacaagatggagcagaagttccgcatcgtctacgcgcagaagggctacctggaggagctggtgcgtctgcgcgagtcgcagctgaaggacctggaggcggagaaccggcggcttcagctgcagctggaggaggcggcggcgcagaaccagcgcgagaaacgggagctggaaggcgtgatcctggagctgcaggagcagctgacaggtctgatccccagtgaccacgcccctctggcccagggttccaaggagctcactacacccctggtcaatcaatggccctcactgggaacgcttaatggggccgagggcgccagcaactccaagctctaccggagacacagcttcatgagcacggagccgctgtcagctgaagccagtctgagctcggactcccagcgcctgggagagggcacgcgggacgaggagccctggggtcccatcgggaaggaccccacgccctccatgctgggcctctgcggctccctggcctccattcccagctgcaagtccctggcgagcttcaaatccaacgagtgcctggtgagcgacagtcccgagggcagcccagcactgagccccagctgaggaacagcatgggcagtgccagccccacctgccaggggccatggacacctgccacctttcttcaacaagagtcccccaatccaggctacccttccagagaacgctacccacccagccagggttctctcggggaagatctcgtctgctcaccttagctttctgccttggcagcacgggctgcggaagaaagcacgctgggccaggaggcaggggtgcccaagccacagggagcccctggggaagcctgctccattcttctggtgaccttggcgctccttcactcatctcccctgccccctcaggaactggtggcccagcttccacacccccacctcccagtctctagcctctccatctgtctgtgtatggcctggagtcactccttcctcagcccccagggcaagagagctcaaataaaaaccagaggactgag

SEQ ID NO: 27052 - DNA, 1761 bp, Homo sapiens
  source 1..1761: mol_type = unassigned DNA
gcaaattgccctagtaacggccgcatggtaactcaggcgccgggcgcactgtcctagctgctggttttccacgctggttttagctcccggcgtctgcaaaatgaagattgaggaggtgaagagcactacgaagacgcagcgcatcgcctcccacagccacgtgaaagggctggggctggacgagagcggcttggccaagcaggcggcctcagggcttgtgggccaggagaacgcgcgagaggcatgtggcgtcatagtagaattaatcaaaagcaagaaaatggctggaagagctgtcttgttggcaggacctcctggaactggcaagacagctctggctctggctattgctcaggagctgggtagtaaggtccccttctgcccaatggtggggagtgaagtttactcaactgagatcaagaagacagaggtgctgatggagaacttccgcagggccattgggctgcgaataaaggagaccaaggaagtttatgaaggtgaagtcacagagctaactccgtgtgagacagagaatcccatgggaggatatggcaaaaccattagccatgtgatcataggactcaaaacagccaaaggaaccaaacagttgaaactggaccccagcatttttgaaagtttgcagaaagagcgagtagaagctggagatgtgatttacattgaagccaacagtggggccgtgaagaggcagggcaggtgtgatacctatgccacagaattcgaccttgaagctgaagagtatgtccccttgccaaaaggggatgtgcacaaaaagaaagaaatcatccaagatgtgaccttgcatgacttggatgtggctaatgcgcggccccaggggggacaagatatcctgtccatgatgggccagctaatgaagccaaagaagacagaaatcacagacaaacttcgaggggagattaataaggtggtgaacaagtacatcgaccagggcattgctgagctggtcccgggtgtgctgtttgttgatgaggtccacatgctggacattgagtgcttcacctacctgcaccgcgccctggagtcttctatcgctcccatcgtcatctttgcatccaaccgaggcaactgtgtcatcagaggcactgaggacatcacatcccctcacggcatccctcttgaccttctggaccgagtgatgataatccggaccatgctgtatactccacaggaaatgaaacagatcattaaaatccgtgcccagacggaaggaatcaacatcagtgaggaggcactgaaccacctgggggagattggcaccaagaccacactgaggtactcagtgcagctgctgaccccggccaacttgcttgctaaaatcaacgggaaggacagcattgagaaagagcatgtcgaagagatcagtgaacttttctatgatgccaagtcctccgccaaaatcctggctgaccagcaggataagtacatgaagtgagatggctgaggttttcagcagtaagagactccccaggtgtgcctggcctgggtccagcctgtgggcgcttgcccctgggcttggggctgccgtccccactcaggcgtggtctgcagcgctgtcagttcagtgtggaaagcatttctttttaagttatcgtaactgttcctgtggttgctttgaaagaacccttccttacctggtgtgttttctataaatcttcataggttattttgattctctctctctctctctctaagttttttaaaaataaacttttcagaacagtt

SEQ ID NO: 27053 - DNA, 1641 bp, Homo sapiens
  source 1..1641: mol_type = unassigned DNA
atggtaactcaggcgccgggcgcactgtcctagctgctggttttccacgctggttttagctcccggcgtctgcaaaatgaagattgaggaggtgaagagcactacgaagacgcagcgcatcgcctcccacagccacgtgaaagggctggggctggacgagagcggcttggccaagcaggcggcctcagggcttgtgggccaggagaacgcgcgagaggcatgtggcgtcatagtagaattaatcaaaagcaagaaaatggctggaagagctgtcttgttggcaggacctcctggaactggcaagacagctctggctctggctattgctcaggagctgggtagtaaggtccccttctgcccaatggtggggagtgaagtttactcaactgagatcaagaagacagaggtgctgatggagaacttccgcagggccattgggctgcgaataaaggagaccaaggaagtttatgaaggtgaagtcacagagctaactccgtgtgagacagagaatcccatgggaggatatggcaaaaccattagccatgtgatcataggactcaaaacagccaaaggaaccaaacagttgaaactggaccccagcatttttgaaagtttgcagaaagagcgagtagaagctggagatgtgatttacattgaagccaacagtggggccgtgaagaggcagggcaggtgtgatacctatgccacagaattcgaccttgaagctgaagagtatgtccccttgccaaaaggggatgtgcacaaaaagaaagaaatcatccaagatgtgaccttgcatgacttggatgtggctaatgcgcggccccaggggggacaagatatcctgtccatgatgggccagctaatgaagccaaagaagacagaaatcacagacaaacttcgaggggagattaataaggtggtgaacaagtacatcgaccagggcattgctgagctggtcccgggtgtgctgtttgttgatgaggtccacatgctggacattgagtgcttcacctacctgcaccgcgccctggagtcttctatcgctcccatcgtcatctttgcatccaaccgaggcaactgtgtcatcagaggcactgaggacatcacatcccctcacggcatccctcttgaccttctggaccgagtgatgataatccggaccatgctgtatactccacaggaaatgaaacaggtactcagtgcagctgctgaccccggccaacttgcttgctaaaatcaacgggaaggacagcattgagaaagagcatgtcgaagagatcagtgaacttttctatgatgccaagtcctccgccaaaatcctggctgaccagcaggataagtacatgaagtgagatggctgaggttttcagcagtaagagactccccaggtgtgcctggcctgggtccagcctgtgggcgcttgcccctgggcttggggctgccgtccccactcaggcgtggtctgcagcgctgtcagttcagtgtggaaagcatttctttttaagttatcgtaactgttcctgtggttgctttgaaagaacccttccttacctggtgtgttttctataaatcttcataggttattttgattctctctctctctctctctaagttttttaaaaataaacttttcagaac

SEQ ID NO: 27054 - DNA, 1488 bp, Homo sapiens
  source 1..1488: mol_type = unassigned DNA
gttggtgagcatcatggcaaccgttacagccacaaccaaagtcccggagatccgtgatgtaacaaggattgagcgaatcggtgcccactcccacatccggggactggggctggacgatgccttggagcctcggcaggcttcgcaaggcatggtgggtcagctggcggcacggcgggcggctggcgtggtgctggagatgatccgggaagggaagattgccggtcgggcagtccttattgctggccagccgggcacggggaagacggccatcgccatgggcatggcgcaggccctgggccctgacacgccattcacagccatcgccggcagtgaaatcttctccctggagatgagcaagaccgaggcgctgacgcaggccttccggcggtccatcggcgttcgcatcaaggaggagacggagatcatcgaaggggaggtggtggagatccagattgatcgaccagcaacagggacgggctccaaggtgggcaaactgaccctcaagaccacagagatggagaccatctacgacctgggcaccaagatgattgagtccctgaccaaggacaaggtccaggccggggacgtgatcaccatcgacaaggcgacgggcaagatctccaagctgggccgctccttcacacgcgcccgcgactacgacgctatgggctcccagaccaagttcgtgcagtgcccagatggggagctccagaaacgcaaggaggtggtgcacaccgtgtccctgcacgagatcgacgtcatcaactctcgcacccagggcttcctggcgctcttctcaggtgacacaggggagatcaagtcagaagtccgtgagcagatcaatgccaaggtggctgagtggcgcgaggagggcaaggcggagatcatccctggagtgctgttcatcgacgaggtccacatgctggacatcgagagcttctccttcctcaaccgggccctggagagtgacatggcgcctgtcctgatcatggccaccaaccgtggcatcacgcgaatccggggcaccagctaccagagccctcacggcatccccatagacctgctggaccggctgcttatcgtctccaccaccccctacagcgagaaagacacgaagcagatcctccgcatccggtgcgaggaagaagatgtggagatgagtgaggacgcctacacggtgctgacccgcatcgggctggagacgtcactgcgctacgccatccagctcatcacagctgccagcttggtgtgccggaaacgcaagggtacagaagtgcaggtggatgacatcaagcgggtctactcactcttcctggacgagtcccgctccacgcagtacatgaaggagtaccaggacgccttcctcttcaacgaactcaaaggcgagaccatggacacctcctgagttggatgtcatcccccgaccccaccctgttttccaccagagttctgacactgtgactctgtataaaatggttgggaagctgc

SEQ ID NO: 27055 - DNA, 2488 bp, Homo sapiens
  source 1..2488: mol_type = unassigned DNA
atcatggcaaccgttgtaagtgtgggtgcatggagggtgaggagcgagctagcagtctcgagtttgagagaggaggatgctggaggccctgactcctgggtctgagggaggggggatctgggggttcagactcctgggtctgaaagaggaggaagctcggccacccagatctgggggagaaggggacatgggggctggacttctggatctgaggcggggagggggctgggatcccagaatctcgggtctggccccatcatgctataggaactccaactttcaaaatcatcttggcgcaacggccggttccgcagtccttggcgccagtgtgtgatgaggagggttgtaggaccttgcgcttcgagccatttgggagccttggattgttagtggtgccaatggcacttgagttccaagctggaagcacaggcaggtacctgttcagtgtgtctgagagcgcgagggcgcctagtgagcctttagtgggaagaaattgtcgaggaacaagagagtcttagtggagaggactgaaggattagggacccagaaatcgggatcttgtcatgctaccgttttggccattttcatatttccagtatttcacacgggctacgtctcagtgtaaatgctcaataaattatcacttgaatatttgaatgaatgaatacatgtgaatgaaggagaggccaggaaacttggcctggcacctgctcaattacctgaataaagaagcgattttggcctggcgtggtggctcatgcctgtaatcccagcactttgggaggccgaggcgggcggatcacttcaggtcaggagttcgtggccaacattgcgaaaccccgtctctattaaaaatacaaaaattagccaggtgtggtggtgcaggcctgtaatcccagctactcagaaggctgaggcaggagaatcgcttgaacctgggaggcagaagttgcagtgagccaagatcgcgccactgcattccagcctgggcgacaaagcgagactctgtctccaaaaaaaaaaagacagccacaaccaaagtcccggagatccgtgatgtaacaaggattgagcgaatcggtgcccactcccacatccggggactggggctggacgatgccttggagcctcggcaggcttcgcaaggcatggtgggtcagctggcggcacggcgggcggctggcgtggtgctggagatgatccgggaagggaagattgccggtcgggcagtccttattgctggccagccgggcacggggaagacggccatcgccatgggcatggcgcaggccctgggccctgacacgccattcacagccatcgccggcagtgaaatcttctccctggagatgagcaagaccgaggcgctgacgcaggccttccggcggtccatcggcgttcgcatcaaggaggagacggagatcatcgaaggggaggtggtggagatccagattgatcgaccagcaacagggacgggctccaaggtgggcaaactgaccctcaagaccacagagatggagaccatctacgacctgggcaccaagatgattgagtccctgaccaaggacaaggtccaggccggggacgtgatcaccatcgacaaggcgacgggcaagatctccaagctgggccgctccttcacacgcgcccgcgactacgacgctatgggctcccagaccaagttcgtgcagtgcccagatggggagctccagaaacgcaaggaggtggtgcacaccgtgtccctgcacgagatcgacgtcatcaactctcgcacccagggcttcctggcgctcttctcaggtgacacaggggagatcaagtcagaagtccgtgagcagatcaatgccaaggtggctgagtggcgcgaggagggcaaggcggagatcatccctggagtgctgttcatcgacgaggtccacatgctggacatcgagagcttctccttcctcaaccgggccctggagagtgacatggcgcctgtcctgatcatggccaccaaccgtggcatcacgcgaatccggggcaccagctaccagagccctcacggcatccccatagacctgctggaccggctgcttatcgtctccaccaccccctacagcgagaaagacacgaagcagatcctccgcatccggtgcgaggaagaagatgtggagatgagtgaggacgcctacacggtgctgacccgcatcgggctggagacgtcactgcgctacgccatccagctcatcacagctgccagcttggtgtgccggaaacgcaagggtacagaagtgcaggtggatgacatcaagcgggtctactcactcttcctggacgagtcccgctccacgcagtacatgaaggagtaccaggacgccttcctcttcaacgaactcaaaggcgagaccatggacacctcctgagttggatgtcatcccccgaccccaccctgttttccaccagagttctgacactgtgactctgtataaaatggttgggaagctgc

SEQ ID NO: 27056 - DNA, 2009 bp, Homo sapiens
  source 1..2009: mol_type = unassigned DNA
gtgtcccggccccgcctcggccgtgagacctccagggggcggagcttgccgctgcgctttacggaaacgagtggccttcagctctgtcaatctggagctggaggcctcaaagtggggaggaggaggagggtgggataaagaggaaaggagcgtggaggacgtgtggttactcaaagaacagctaagaattttgcaatcggcctgagcggggcggtggtggggctgagcaaaaggaggaggagccaggagacattgggaatggacccaggagttccggacgcccgtcttccagcgcagcctcggtgggagggcggggcataaagtcccgccacgcccccacaatatttacatatttatgaggaaccatcgagatctttgaagaaccagctagcctagaggagccagaacatctcgctcctcgcgcgtttccgtttccgctaggactctggcagttggtgagcatcatggcaaccgttacagccacaaccaaagtcccggagatccgtgatgtaacaaggattgagcgaatcggtgcccactcccacatccggggactggggctggacgatgccttggagcctcggcaggcttcgcaaggcatggtgggtcagctggcggcacggcgggcggctggcgtggtgctggagatgatccgggaagggaagattgccggtcgggcagtccttattgctggccagccgggcacggggaagacggccatcgccatgggcatggcgcaggccctgggccctgacacgccattcacagccatcgccggcagtgaaatcttctccctggagatgagcaagaccgaggcgctgacgcaggccttccggcggtccatcggcgttcgcatcaaggaggagacggagatcatcgaaggggaggtggtggagatccagattgatcgaccagcaacagggacgggctccaaggtgggcaaactgaccctcaagaccacagagatggagaccatctacgacctgggcaccaagatgattgagtccctgaccaaggacaaggtccaggccggggacgtgatcaccatcgacaaggcgacgggcaagatctccaagctgggccgctccttcacacgcgcccgcgactacgacgctatgggctcccagaccaagttcgtgcagtgcccagatggggagctccagaaacgcaaggaggtggtgcacaccgtgtccctgcacgagatcgacgtcatcaactctcgcacccagggcttcctggcgctcttctcaggtgacacaggggagatcaagtcagaagtccgtgagcagatcaatgccaaggtggctgagtggcgcgaggagggcaaggcggagatcatccctggagtgctgttcatcgacgaggtccacatgctggacatcgagagcttctccttcctcaaccgggccctggagagtgacatggcgcctgtcctgatcatggccaccaaccgtggcatcacgcgaatccggggcaccagctaccagagccctcacggcatccccatagacctgctggaccggctgcttatcgtctccaccaccccctacagcgagaaagacacgaagcagatcctccgcatccggtgcgaggaagaagatgtggagatgagtgaggacgcctacacggtgctgacccgcatcgggctggagacgtcactgcgctacgccatccagctcatcacagctgccagcttggtgtgccggaaacgcaagggtacagaagtgcaggtggatgacatcaagcgggtctactcactcttcctggacgagtcccgctccacgcagtacatgaaggagtaccaggacgccttcctcttcaacgaactcaaaggcgagaccatggacacctcctgagttggatgtcatcccccgaccccaccctgttttccaccagagttctgacactgtgactctgtataaaatggttgggaagctgcacccaccctgtgtatgtgtggttgccctgagcccacagaaagacacctccagagtgcggattgagaagcc

SEQ ID NO: 27057 - DNA, 15376 bp, Homo sapiens
  source 1..15376: mol_type = unassigned DNA
tctacctcgcgggtgcctctggtgtctccagaggtctccgaccccagcccgcccccagccctcccgcccagcccgcagccccctccctctgttccccgacctcagaccctgggcttccgacctcgacatcatgggtgacgcagaaggcgaagacgaggtccagttcctgcggacggacgatgaggtggtcctgcagtgcagcgctaccgtgctcaaggagcagctcaagctctgcctggccgccgagggcttcggcaaccgcctgtgcttcctggagcccactagcaacgcgcagaatgtgccccccgatctggccatctgttgcttcgtcctggagcagtccctgtctgtgcgagccctgcaggagatgctggctaacacggtggaggctggcgtggagtcatcccagggcgggggacacaggacgctcctgtatggccatgccatcctgctccggcatgcacacagccgcatgtatctgagctgcctcaccacctcccgctccatgactgacaagctggccttcgatgtgggactgcaggaggacgcaacaggagaggcttgctggtggaccatgcacccagcctccaagcagaggtctgaaggagaaaaggtccgcgttggggatgacatcatccttgtcagtgtctcctccgagcgctacctgcacctgtcgaccgccagtggggagctccaggttgacgcttccttcatgcagacactatggaacatgaaccccatctgctcccgctgcgaagagggcttcgtgacgggaggtcacgtcctccgcctctttcatggacatatggatgagtgtctgaccatttcccctgctgacagtgatgaccagcgcagacttgtctactatgaggggggagctgtgtgcactcatgcccgctccctctggaggctggagccactgagaatcagctggagtgggagccacctgcgctggggccagccactccgagtccggcatgtcactaccgggcagtacctagcgctcaccgaggaccagggcctggtggtggttgacgccagcaaggctcacaccaaggctacctccttctgcttccgcatctccaaggagaagctggatgtggcccccaagcgggatgtggagggcatgggcccccctgagatcaagtacggggagtcactgtgcttcgtgcagcatgtggcctcaggactgtggctcacctatgctgctccagaccccaaggccctgcggctcggcgtgctcaagaagaaggccatgctgcaccaggagggccacatggacgacgcactgtcgctgacccgctgccagcaggaggagtcccaggccgcccgcatgatccacagcaccaatggcctatacaaccagttcatcaagagcctggacagcttcagcgggaagccacggggctcggggccacccgctggcacggcgctgcccatcgagggcgttatcctgagcctgcaggacctcatcatctacttcgagcctccctccgaggacttgcagcacgaggagaagcagagcaagctgcgaagcctgcgcaaccgccagagcctcttccaggaggaggggatgctctccatggtcctgaattgcatagaccgcctaaatgtctacaccactgctgcccactttgctgagtttgcaggggaggaggcagccgagtcctggaaagagattgtgaatcttctctatgaactcctagcttctctaatccgtggcaatcgtagcaactgtgccctcttctccacaaacttggactggctggtcagcaagctggatcggctggaggcctcgtctggcatcctggaggtcctgtactgtgtcctcattgagagtccagaggttctgaacatcatccaggagaatcacatcaagtccatcatctccctcctggacaagcatgggaggaaccacaaggtcctggacgtgctatgctccctgtgtgtgtgtaatggtgtggctgtacgctccaaccaagatcttattactgagaacttgctgcctggccgtgagcttctgctgcagacaaacctcatcaactatgtcaccagcatccgccccaacatctttgtgggccgagcggaaggcaccacgcagtacagcaaatggtactttgaggtgatggtggacgaggtgactccatttctgacagctcaggccacccacttgcgggtgggctgggccctcaccgagggctacaccccctaccctggggccggcgagggctggggcggcaacggggtcggcgatgacctctattcctacggctttgatggactgcatctctggacaggacacgtggcacgcccagtgacttccccagggcagcacctcctggcccctgaagacgtgatcagctgctgcctggacctcagcgtgccgtccatctccttccgcatcaacggctgccccgtgcagggtgtctttgagtccttcaacctggacgggctcttcttccctgttgtcagcttctcggctggtgtcaaggtgcggttcctccttggtggccgccatggtgaattcaagttcctgcccccacctggctatgctccatgccatgaggctgtgctccctcgagagcgactccatcttgaacccatcaaggagtatcgacgggaggggccccgggggcctcacctggtgggccccagtcgctgcctctcacacaccgacttcgtgccctgccctgtggacactgtccagattgtcctgccgccccatctggagcgcattcgggagaagctggcggagaacatccacgagctctgggcgctaacccgcatcgagcagggctggacctacggcccggttcgggatgacaacaagaggctgcacccgtgtcttgtggacttccacagccttccagagcctgagaggaactacaacctgcagatgtctggggagacgctcaagactctgctggctctgggctgccacgtgggcatggcggatgagaaggcggaggacaacctgaagaagacaaaactccccaagacgtatatgatgagcaatgggtacaagccggctccgctggacctgagccacgtgcggctgacgccggcgcagacgacactggtggaccgtctggcagaaaatgggcacaacgtgtgggcccgagaccgcgtgggccagggctggagctacagcgcagtgcaggacatcccagcgcgccgaaaccctcggctggtgccctaccgcctgctggatgaagccaccaagcgcagcaaccgggacagcctctgccaggccgtgcgcaccctcctgggctacggctacaacatcgagcctcctgaccaggagcccagtcaggtggagaaccagtctcgttgtgaccgggtgcgcatcttccgggcagagaaatcctatacagtgcagagcggccgctggtacttcgagtttgaagcagtcaccacaggcgagatgcgcgtgggctgggcgaggcccgagctgaggcctgatgtagagctgggagctgacgagctggcctatgtcttcaatgggcaccgcggccagcgctggcacttgggcagtgaaccatttgggcgcccctggcagccgggcgatgtcgttggctgtatgatcgacctcacagagaacaccattatcttcaccctcaatggcgaggtcctcatgtctgactcaggctccgaaacagccttccgggagattgagattggggacggcttcctgcccgtctgcagcttgggacctggccaggtgggtcatctgaacctgggccaggacgtgagctctctgaggttctttgccatctgtggcctccaggaaggcttcgagccatttgccatcaacatgcagcgcccagtcaccacctggttcagcaaaggcctgccccagtttgagccagtgccccttgaacaccctcactatgaggtatcccgagtggacggcactgtggacacgcccccctgcctgcgcctgacccaccgcacctggggctcccagaacagcctggtggagatgcttttcctgcggctgagcctcccagtccagttccaccagcacttccgctgcactgcaggggccaccccgctggcacctcctggcctgcagccccccgccgaggacgaggcccgggcggcggaacccgaccctgactacgaaaacctgcgccgctcagctgggggctggagcgaggcagagaacggcaaagaagggactgcgaaggagggcgcccccgggggcaccccgcaggcggggggagaggcgcagcccgccagggcggagaatgagaaggatgccaccaccgagaagaacaagaagagaggcttcttattcaaggccaagaaggtcgccatgatgacccagccaccggccacccccacgctgccccgactccctcacgacgtggtgcctgcagacaaccgcgatgaccccgagatcatcctcaacaccaccacgtactattactccgtgagggtctttgctggacaggagcccagctgcgtgtgggcgggctgggtcacccctgactaccatcagcacgacatgagcttcgacctcagcaaggtccgggtcgtgacggtgaccatgggggatgaacaaggcaacgtccacagcagcctcaagtgtagcaactgctacatggtgtggggcggagactttgtgagtcccgggcagcagggccggatcagccacacggaccttgtcattgggtgcctggtggacttggccactggcttaatgacctttacagccaatggcaaagagagcaacacctttttccaggtggaacccaacactaagctatttcctgccgtcttcgtcctgcccacccaccagaacgtcatccagtttgagctggggaagcagaagaacatcatgccgttgtcagccgccatgttccaaagcgagcgcaagaacccggccccgcagtgcccaccgcggctggagatgcagatgctgatgccagtgtcctggagccgcatgcccaaccacttcctgcaggtggagacgaggcgtgccggcgagcggctgggctgggccgtgcagtgccaggagccgctgaccatgatggcgctgcacatccccgaggagaaccggtgcatggacatcctggagctgtcggagcgcctggacctgcagcgcttccactcgcacaccctgcgcctctaccgcgctgtgtgcgccctgggcaacaatcgcgtggcgcacgctctgtgcagccacgtagaccaagctcagctgctgcacgccctggaggacgcgcacctgccaggcccactgcgcgcaggctactatgacctcctcatcagcatccacctcgaaagtgcctgccgcagccgccgctccatgctctctgaatacatcgtgcccctcacgcctgagacccgcgccatcacgctcttccctcctggaaggagcacagaaaatggtcacccccggcatggcctgccgggagttggagtcaccacttcgctgaggcccccgcatcatttctcgcccccctgtttcgtggccgctctgccagctgctggggcagcagaggccccggcccgcctcagccctgccatcccgctggaggccctgcgggacaaggcactgaggatgctgggggaggcggtgcgcgacggtgggcagcacgctcgcgaccccgtcgggggctccgtggagttccagtttgtgcctgtgctcaagctcgtgtccaccctgctggtgatgggcatctttggcgatgaggatgtgaaacagatcttgaagatgattgagcctgaggtcttcactgaggaagaagaggaggaggacgaggaggaagagggtgaagaggaagatgaggaggagaaggaggaggatgaggaggaaacagcacaggaaaaggaagatgaggaaaaagaggaagaggaggcagcagaaggggagaaagaagaaggcttggaggaagggctgctccagatgaagttgccagagtctgtgaagttacagatgtgccacctgctggagtatttctgtgaccaagagctgcagcaccgtgtggagtccctggcagcctttgcggagcgctatgtggacaagctccaggccaaccagcggagccgctatggcctcctcataaaagccttcagcatgaccgcagcagagactgcaagacgtacccgcgagttccgctccccaccccaggaacagatcaatatgctattgcaattcaaagatggtacagatgaggaagactgtcctctccctgaagagattcgacaggatttgcttgactttcatcaagacctgctggcacactgtggaattcagctagatggagaggaggaggaaccagaggaagagaccaccctgggcagccgcctcatgagcctgttggagaaagtgcggctggtgaagaagaaggaagagaaacctgaggaggagcggtcagcagaggagagcaaaccccggtccctgcaggagctggtgtcccacatggtggtgcgctgggcccaagaggacttcgtgcagagccccgagctggtgcgggccatgttcagcctcctgcaccggcagtacgacgggctgggtgagctgctgcgtgccctgccgcgggcgtacaccatctcaccgtcctccgtggaagacaccatgagcctgctcgagtgcctcggccagatccgctcgctgctcatcgtgcagatgggcccccaggaggagaacctcatgatccagagcatcgggaacatcatgaacaacaaagtcttctaccaacacccgaacctgatgagggcgctgggcatgcacgagacggtcatggaggtcatggtcaacgtcctcgggggcggcgagtccaaggagatccgcttccccaagatggtgacaagctgctgccgcttcctctgctatttctgccgaatcagccggcagaaccagcgctccatgtttgaccacctgagctacctgctggagaacagtggcatcggcctgggcatgcagggctccacgcccctggacgtggctgctgcctccgtcattgacaacaatgagctggccttggcattgcaggagcaggacctggaaaaggttgtgtcctacctggcaggctgtggcctccagagctgccccatgcttgtggccaaagggtacccagacattggctggaacccctgtggtggagagcgctacctggacttcctgcgctttgctgtcttcgtcaacggcgagagcgtggaggagaacgccaatgtggtggtgcggctgctcatccggaagcctgagtgcttcggacccgccctgcggggtgagggtggctcagggctgctggctgccatcgaagaggccatccgcatctccgaggaccctgcgagggatggcccaggcatccgcagggaccggcggcgcgagcactttggtgaggaaccgcctgaagaaaaccgggtgcacctgggacacgccatcatgtccttctatgccgccttgatcgacctgctcggacgctgtgcaccagagatgcatctaatccaagccggcaagggtgaggccctgcggatccgcgccatcctccgctcccttgtgcccttggaggaccttgtgggcatcatcagcctcccactgcagattcccaccctgggcaaagatggggctctggtgcagccaaagatgtcagcatccttcgtgccggaccacaaggcgtccatggtgctcttcctggaccgtgtgtatggcatcgagaaccaggacttcttgctgcacgtgctggacgtggggttcctgcccgacatgagggcagccgcctcgctggacacggccactttcagcaccaccgagatggcgctggcgctgaaccgctacctgtgcctggccgtgctgccgctcatcaccaagtgtgcgccgctctttgcgggcacagaacaccgcgccatcatggtggactctatgctgcataccgtgtaccgcctgtctcggggtcgttcgctcaccaaggcgcagcgtgacgtcatcgaggactgcctcatgtcgctctgcaggtacatccgcccgtcgatgctgcagcacctgttgcgccgcctggtgttcgacgtgcccatcctcaacgagttcgccaagatgccactcaagctcctcaccaaccactatgagcgctgttggaagtactactgcctacccacgggctgggccaacttcggggtcacctcagaggaggagctgcacctcacacggaaactcttctggggcatctttgactctctggcccataagaaatacgacccggagctgtaccgcatggccatgccttgtctgtgcgccattgccggggctctgccccccgactatgtggatgcctcatactcatctaaggcagagaaaaaggccacagtggatgctgaaggcaactttgatccccggcctgtggagaccctcaatgtgatcatcccggagaagctggactccttcattaacaagtttgcggagtacacacacgagaagtgggccttcgacaagatccagaacaactggtcctatggagagaacatagacgaggagctgaagacccaccccatgctgaggccctacaagaccttttcagagaaggacaaagagatttaccgctggcccatcaaggagtccctgaaggccatgattgcctgggaatggacgatagagaaggccagggagggtgaggaggagaagacggaaaagaaaaaaacgcggaagatatcacaaagtgcccagacctatgatcctcgagaaggctacaaccctcagccccccgaccttagtgctgttaccctgtcccgggagctgcaggccatggcagaacaactggcagaaaattaccacaacacgtggggacggaagaagaagcaggagctggaagccaaaggcggtgggacccaccccctgctggtcccctacgacacgctcacggccaaggagaaggcacgagatcgagagaaggcccaggagctactgaaattcctgcagatgaatggctacgcggttacaagaggccttaaggacatggaactggactcgtcttccattgaaaagcggtttgcctttggcttcctgcagcagctgctgcgctggatggacatttctcaggagttcattgcccacctggaggctgtggtcagcagtgggcgagtggaaaagtccccacatgaacaggagattaaattctttgccaagatcctgctccctttgatcaaccagtacttcaccaaccactgcctctatttcttgtccactccggctaaagtgctgggcagcggtggccacgcctctaacaaggagaaggaaatgatcaccagcctcttctgcaaacttgctgctctcgtccgccaccgagtctctctctttgggacagacgccccagctgtggtcaactgtcttcacatcctggcccgctccctggatgccaggacagtgatgaagtcaggccctgagatcgtgaaggctggcctccgctccttcttcgagagtgcctcggaggacatcgagaagatggtggagaacctgcggctgggcaaggtgtcgcaggcgcgcacccaggtgaaaggcgtgggccagaacctcacctacaccactgtggcactgctgccggtcctcaccaccctcttccagcacatcgcccagcaccagttcggagatgacgtcatcctggacgacgtccaggtctcttgctaccgaacgctgtgcagtatctactccctgggaaccaccaagaacacttatgtggaaaagcttcggccagccctcggggagtgcctggcccgtctggcagcagccatgccggtggcgttcctggagccgcagctgaacgagtacaacgcctgctccgtgtacaccaccaagtctccgcgggagcgggccatcctggggctccccaacagtgtggaggagatgtgtcccgacatcccggtgctggagcggctcatggcagacattggggggctggccgagtcaggtgcccgctacacagagatgccgcatgtcatcgagatcacgctgcccatgctatgcagctacctgccccgatggtgggagcgcgggcccgaggcacccccttccgccctgcccgccggcgcccccccaccctgcacagctgtcacctctgaccacctcaactccctgctggggaatatcctgagaatcatcgtcaacaacctgggcattgacgaggcctcctggatgaagcggctggctgtgttcgcacagcccattgtgagccgtgcacggccggagctcctgcagtcccacttcatcccaactatcgggcggctgcgcaagagggcagggaaggtggtgtccgaggaggagcagctgcgcctggaggccaaggcggaggcccaggagggcgagctgctggtgcgggacgagttctctgtgctctgccgggacctctacgccctgtatccgctgctcatccgctacgtggacaacaacagggcgcagtggctgacggagccgaatcccagcgcggaggagctgttcaggatggtgggcgagatcttcatctactggtccaagtcccacaacttcaagcgcgaggagcagaactttgtggtccagaatgagatcaacaacatgtccttcctgactgctgacaacaaaagcaaaatggctaagtccggtggctcggaccaggaacgcaccaagaagaagcgccggggggaccggtactctgtgcagacgtcactgatcgtggccacactgaagaagatgctgcccatcggcctgaatatgtgtgcgcccaccgaccaagacctcatcacgctggccaagacccgttacgccctgaaagacacagatgaggaggtccgggaatttctgcacaacaaccttcaccttcagggaaaggtcgaaggctccccgtctctgcgctggcagatggctctgtaccggggcgtcccgggtcgcgaggaggacgccgatgaccccgagaaaatcgtgcgcagagtccaggaagtgtcagccgtgctctactacctggaccagaccgagcacccttacaagtctaagaaggccgtgtggcacaagcttttgtccaaacagcgccggcgggcagtcgtggcctgtttccgtatgacgcccctgtacaacctgcccacgcaccgggcatgtaacatgttcctggagagctacaaggctgcatggatcctgactgaagaccacagttttgaggaccgcatgatagatgacctttcaaaagctggggagcaggaggaggaggaggaagaggtggaagagaagaagccagaccccctgcaccagttggtcctgcacttcagccgcactgccctgacggaaaagagcaaactggatgaggattacctgtacatggcctatgctgatatcatggcaaagagctgccacctggaggagggaggggagaacggtgaagctgaagaggaggttgaggtctcctttgaggagaaacagatggagaagcagaggctcttgtaccagcaagcacggctgcacacccggggggcggccgagatggtgctgcagatgatcagtgcctgcaaaggagagacaggtgccatggtgtcctccaccctgaagctgggcatctccatcctcaatggaggcaatgctgaggtccagcagaaaatgctggattatcttaaggacaagaaggaagttggcttcttccagagtatccaggcactgatgcaaacatgcagcgtcctggatctcaatgcctttgagagacagaacaaggccgaggggctgggcatggtgaatgaggatggcactgtcatcaatcgccagaacggagagaaggtcatggcggatgatgaattcacacaagacctgttccgattcctacaattgctctgtgaggggcacaataatgatttccagaactacctacggacacagacagggaacacgaccactattaacatcatcatttgcactgtggactacctcctgcggctgcaggaatccatcagcgacttctactggtactactcgggcaaggatgtcattgaagagcagggcaagaggaacttctccaaagccatgtcggtggctaagcaggtgttcaacagcctcactgagtacatccagggtccctgcaccgggaaccagcagagcctggcgcacagtcgcctatgggacgcagtggtgggattcctgcacgtgttcgcccacatgatgatgaagctcgctcaggactcaagccagatcgagctgctgaaggagctgctggatctgcagaaggacatggtggtgatgttgctgtcgctactagaagggaacgtggtgaacggcatgatcgcccggcagatggtggacatgctcgtggaatcctcatccaatgtggagatgatcctcaagttcttcgacatgttcctgaaactcaaggacattgtgggctctgaagccttccaggactacgtaacggatccccgtggcctcatctccaagaaggacttccagaaggccatggacagccagaagcagttcagcggtccagaaatccagttcctgctttcgtgctccgaagcggatgagaacgaaatgatcaactgcgaagagttcgccaaccgcttccaggagccagcacgcgacatcggcttcaacgtggcggtgctgctgaccaacctgtcggagcatgtgccgcatgaccctcgcctgcacaacttcctggagctggccgagagcatccttgagtacttccgcccctacctgggccgcatcgagatcatgggcgcgtcacgccgcatcgagcgcatctacttcgagatctcagagaccaaccgcgcccagtgggagatgccccaggtgaaggagtccaagcgccagttcatcttcgacgtggtgaacgagggcggcgaggctgagaagatggagctcttcgtgagtttctgcgaggacaccatcttcgagatgcagatcgccgcgcagatctcggagcccgagggcgagccggagaccgacgaggacgagggcgcgggcgcggcggaggcgggcgcggaaggcgcggaggagggcgcggcggggctcgagggcacggcggccacggcggcggcgggggcgacggcgcgggttgtggcggccgcaggccgggccctgcgaggcctcagctaccgcagcctgcggcggcgcgtgcggcggctgcggcggcttacggcccgcgaggcggccaccgcagtggcggcgctgctctgggcagcagtgacgcgcgctggggccgctggcgcgggggcggcggcgggcgcgctgggcctgctctggggctcgctgttcggcggcggcctggtggagggcgccaagaaggtgacggtgaccgagctcctggcaggcatgcccgaccccaccagcgacgaggtgcacggcgagcagccggccgggccgggcggagacgcagacggcgagggtgccagcgagggcgctggagacgccgcggagggcgctggagacgaggaggaggcggtgcacgaggccgggccgggcggtgccgacggggcggtggccgtgaccgatgggggccccttccggcccgaaggggctggcggtctcggggacatgggggacacgacgcctgcggaaccgcccacacccgagggctctcccatcctcaagaggaaattgggggtggatggagtggaggaggagctcccgccagagccagagcccgagccggaaccagagctggagccggagaaagccgatgccgagaatggggagaaggaagaagttcccgagcccacaccagagccccccaagaagcaagcacctccctcaccccctccaaagaaggaggaagctggaggcgaattctggggagaactggaggtgcagagggtgaagttcctgaactacctgtcccggaacttttacaccctgcggttccttgccctcttcttggcatttgccatcaacttcatcttgctgttttataaggtctcagactctccaccaggggaggacgacatggaaggctcagctgctggggatgtgtcaggtgcaggctctggtggcagctctggctggggcttgggggccggagaggaggcagagggcgatgaggatgagaacatggtgtactacttcctggaggaaagcacaggctacatggaacccgccctgcggtgtctgagcctcctgcatacactggtggcctttctctgcatcattggctataattgtctcaaggtgcccctggtaatctttaagcgggagaaggagctggcccggaagctggagtttgatggcctgtacatcacggagcagcctgaggacgatgacgtgaaggggcagtgggaccgactggtgctcaacacgccgtctttccctagcaactactgggacaagtttgtcaagcgcaaggtcctggacaaacatggggacatctacgggcgggagcggattgctgagctactgggcatggacctggccacactagagatcacagcccacaatgagcgcaagcccaacccgccgccagggctgctgacctggctcatgtccatcgatgtcaagtaccagatctggaagttcggggtcatcttcacagacaactccttcctgtacctgggctggtatatggtgatgtccctcttgggacactacaacaacttcttctttgctgcccatctcctggacatcgccatgggggtcaagacgctgcgcaccatcctgtcctctgtcacccacaatgggaaacagctggtgatgaccgtgggccttctggcggtggtcgtctacctgtacaccgtggtggccttcaacttcttccgcaagttctacaacaagagcgaggatgaggatgaacctgacatgaagtgtgatgacatgatgacgtgttacctgtttcacatgtacgtgggtgtccgggctggcggaggcattggggacgagatcgaggaccccgcgggtgacgaatacgagctctacagggtggtcttcgacatcaccttcttcttcttcgtcatcgtcatcctgttggccatcatccagggtctgatcatcgacgcttttggtgagctccgagaccaacaagagcaagtgaaggaggatatggagaccaagtgcttcatctgtggaatcggcagtgactactttgatacgacaccgcatggcttcgagactcacacgctggaggagcacaacctggccaattacatgtttttcctgatgtatttgataaacaaggatgagacagaacacacgggtcaggagtcttatgtctggaagatgtaccaagagagatgttgggatttcttcccagctggtgattgtttccgtaagcagtatgaggaccagcttagctgacacacccccagctggccctccacccccacctcaagtgccttattctcacagcaagccccttagtccccaagcccctccccctaaggcagctgggggagaggtgacctagtactggaaaataaatctgtgctacgccccccagca

SEQ ID NO: 27058 - DNA, 15391 bp, Homo sapiens
  source 1..15391: mol_type = unassigned DNA
tctacctcgcgggtgcctctggtgtctccagaggtctccgaccccagcccgcccccagccctcccgcccagcccgcagccccctccctctgttccccgacctcagaccctgggcttccgacctcgacatcatgggtgacgcagaaggcgaagacgaggtccagttcctgcggacggacgatgaggtggtcctgcagtgcagcgctaccgtgctcaaggagcagctcaagctctgcctggccgccgagggcttcggcaaccgcctgtgcttcctggagcccactagcaacgcgcagaatgtgccccccgatctggccatctgttgcttcgtcctggagcagtccctgtctgtgcgagccctgcaggagatgctggctaacacggtggaggctggcgtggagtcatcccagggcgggggacacaggacgctcctgtatggccatgccatcctgctccggcatgcacacagccgcatgtatctgagctgcctcaccacctcccgctccatgactgacaagctggccttcgatgtgggactgcaggaggacgcaacaggagaggcttgctggtggaccatgcacccagcctccaagcagaggtctgaaggagaaaaggtccgcgttggggatgacatcatccttgtcagtgtctcctccgagcgctacctgcacctgtcgaccgccagtggggagctccaggttgacgcttccttcatgcagacactatggaacatgaaccccatctgctcccgctgcgaagagggcttcgtgacgggaggtcacgtcctccgcctctttcatggacatatggatgagtgtctgaccatttcccctgctgacagtgatgaccagcgcagacttgtctactatgaggggggagctgtgtgcactcatgcccgctccctctggaggctggagccactgagaatcagctggagtgggagccacctgcgctggggccagccactccgagtccggcatgtcactaccgggcagtacctagcgctcaccgaggaccagggcctggtggtggttgacgccagcaaggctcacaccaaggctacctccttctgcttccgcatctccaaggagaagctggatgtggcccccaagcgggatgtggagggcatgggcccccctgagatcaagtacggggagtcactgtgcttcgtgcagcatgtggcctcaggactgtggctcacctatgctgctccagaccccaaggccctgcggctcggcgtgctcaagaagaaggccatgctgcaccaggagggccacatggacgacgcactgtcgctgacccgctgccagcaggaggagtcccaggccgcccgcatgatccacagcaccaatggcctatacaaccagttcatcaagagcctggacagcttcagcgggaagccacggggctcggggccacccgctggcacggcgctgcccatcgagggcgttatcctgagcctgcaggacctcatcatctacttcgagcctccctccgaggacttgcagcacgaggagaagcagagcaagctgcgaagcctgcgcaaccgccagagcctcttccaggaggaggggatgctctccatggtcctgaattgcatagaccgcctaaatgtctacaccactgctgcccactttgctgagtttgcaggggaggaggcagccgagtcctggaaagagattgtgaatcttctctatgaactcctagcttctctaatccgtggcaatcgtagcaactgtgccctcttctccacaaacttggactggctggtcagcaagctggatcggctggaggcctcgtctggcatcctggaggtcctgtactgtgtcctcattgagagtccagaggttctgaacatcatccaggagaatcacatcaagtccatcatctccctcctggacaagcatgggaggaaccacaaggtcctggacgtgctatgctccctgtgtgtgtgtaatggtgtggctgtacgctccaaccaagatcttattactgagaacttgctgcctggccgtgagcttctgctgcagacaaacctcatcaactatgtcaccagcatccgccccaacatctttgtgggccgagcggaaggcaccacgcagtacagcaaatggtactttgaggtgatggtggacgaggtgactccatttctgacagctcaggccacccacttgcgggtgggctgggccctcaccgagggctacaccccctaccctggggccggcgagggctggggcggcaacggggtcggcgatgacctctattcctacggctttgatggactgcatctctggacaggacacgtggcacgcccagtgacttccccagggcagcacctcctggcccctgaagacgtgatcagctgctgcctggacctcagcgtgccgtccatctccttccgcatcaacggctgccccgtgcagggtgtctttgagtccttcaacctggacgggctcttcttccctgttgtcagcttctcggctggtgtcaaggtgcggttcctccttggtggccgccatggtgaattcaagttcctgcccccacctggctatgctccatgccatgaggctgtgctccctcgagagcgactccatcttgaacccatcaaggagtatcgacgggaggggccccgggggcctcacctggtgggccccagtcgctgcctctcacacaccgacttcgtgccctgccctgtggacactgtccagattgtcctgccgccccatctggagcgcattcgggagaagctggcggagaacatccacgagctctgggcgctaacccgcatcgagcagggctggacctacggcccggttcgggatgacaacaagaggctgcacccgtgtcttgtggacttccacagccttccagagcctgagaggaactacaacctgcagatgtctggggagacgctcaagactctgctggctctgggctgccacgtgggcatggcggatgagaaggcggaggacaacctgaagaagacaaaactccccaagacgtatatgatgagcaatgggtacaagccggctccgctggacctgagccacgtgcggctgacgccggcgcagacgacactggtggaccgtctggcagaaaatgggcacaacgtgtgggcccgagaccgcgtgggccagggctggagctacagcgcagtgcaggacatcccagcgcgccgaaaccctcggctggtgccctaccgcctgctggatgaagccaccaagcgcagcaaccgggacagcctctgccaggccgtgcgcaccctcctgggctacggctacaacatcgagcctcctgaccaggagcccagtcaggtggagaaccagtctcgttgtgaccgggtgcgcatcttccgggcagagaaatcctatacagtgcagagcggccgctggtacttcgagtttgaagcagtcaccacaggcgagatgcgcgtgggctgggcgaggcccgagctgaggcctgatgtagagctgggagctgacgagctggcctatgtcttcaatgggcaccgcggccagcgctggcacttgggcagtgaaccatttgggcgcccctggcagccgggcgatgtcgttggctgtatgatcgacctcacagagaacaccattatcttcaccctcaatggcgaggtcctcatgtctgactcaggctccgaaacagccttccgggagattgagattggggacggcttcctgcccgtctgcagcttgggacctggccaggtgggtcatctgaacctgggccaggacgtgagctctctgaggttctttgccatctgtggcctccaggaaggcttcgagccatttgccatcaacatgcagcgcccagtcaccacctggttcagcaaaggcctgccccagtttgagccagtgccccttgaacaccctcactatgaggtatcccgagtggacggcactgtggacacgcccccctgcctgcgcctgacccaccgcacctggggctcccagaacagcctggtggagatgcttttcctgcggctgagcctcccagtccagttccaccagcacttccgctgcactgcaggggccaccccgctggcacctcctggcctgcagccccccgccgaggacgaggcccgggcggcggaacccgaccctgactacgaaaacctgcgccgctcagctgggggctggagcgaggcagagaacggcaaagaagggactgcgaaggagggcgcccccgggggcaccccgcaggcggggggagaggcgcagcccgccagggcggagaatgagaaggatgccaccaccgagaagaacaagaagagaggcttcttattcaaggccaagaaggtcgccatgatgacccagccaccggccacccccacgctgccccgactccctcacgacgtggtgcctgcagacaaccgcgatgaccccgagatcatcctcaacaccaccacgtactattactccgtgagggtctttgctggacaggagcccagctgcgtgtgggcgggctgggtcacccctgactaccatcagcacgacatgagcttcgacctcagcaaggtccgggtcgtgacggtgaccatgggggatgaacaaggcaacgtccacagcagcctcaagtgtagcaactgctacatggtgtggggcggagactttgtgagtcccgggcagcagggccggatcagccacacggaccttgtcattgggtgcctggtggacttggccactggcttaatgacctttacagccaatggcaaagagagcaacacctttttccaggtggaacccaacactaagctatttcctgccgtcttcgtcctgcccacccaccagaacgtcatccagtttgagctggggaagcagaagaacatcatgccgttgtcagccgccatgttccaaagcgagcgcaagaacccggccccgcagtgcccaccgcggctggagatgcagatgctgatgccagtgtcctggagccgcatgcccaaccacttcctgcaggtggagacgaggcgtgccggcgagcggctgggctgggccgtgcagtgccaggagccgctgaccatgatggcgctgcacatccccgaggagaaccggtgcatggacatcctggagctgtcggagcgcctggacctgcagcgcttccactcgcacaccctgcgcctctaccgcgctgtgtgcgccctgggcaacaatcgcgtggcgcacgctctgtgcagccacgtagaccaagctcagctgctgcacgccctggaggacgcgcacctgccaggcccactgcgcgcaggctactatgacctcctcatcagcatccacctcgaaagtgcctgccgcagccgccgctccatgctctctgaatacatcgtgcccctcacgcctgagacccgcgccatcacgctcttccctcctggaaggagcacagaaaatggtcacccccggcatggcctgccgggagttggagtcaccacttcgctgaggcccccgcatcatttctcgcccccctgtttcgtggccgctctgccagctgctggggcagcagaggccccggcccgcctcagccctgccatcccgctggaggccctgcgggacaaggcactgaggatgctgggggaggcggtgcgcgacggtgggcagcacgctcgcgaccccgtcgggggctccgtggagttccagtttgtgcctgtgctcaagctcgtgtccaccctgctggtgatgggcatctttggcgatgaggatgtgaaacagatcttgaagatgattgagcctgaggtcttcactgaggaagaagaggaggaggacgaggaggaagagggtgaagaggaagatgaggaggagaaggaggaggatgaggaggaaacagcacaggaaaaggaagatgaggaaaaagaggaagaggaggcagcagaaggggagaaagaagaaggcttggaggaagggctgctccagatgaagttgccagagtctgtgaagttacagatgtgccacctgctggagtatttctgtgaccaagagctgcagcaccgtgtggagtccctggcagcctttgcggagcgctatgtggacaagctccaggccaaccagcggagccgctatggcctcctcataaaagccttcagcatgaccgcagcagagactgcaagacgtacccgcgagttccgctccccaccccaggaacagatcaatatgctattgcaattcaaagatggtacagatgaggaagactgtcctctccctgaagagattcgacaggatttgcttgactttcatcaagacctgctggcacactgtggaattcagctagatggagaggaggaggaaccagaggaagagaccaccctgggcagccgcctcatgagcctgttggagaaagtgcggctggtgaagaagaaggaagagaaacctgaggaggagcggtcagcagaggagagcaaaccccggtccctgcaggagctggtgtcccacatggtggtgcgctgggcccaagaggacttcgtgcagagccccgagctggtgcgggccatgttcagcctcctgcaccggcagtacgacgggctgggtgagctgctgcgtgccctgccgcgggcgtacaccatctcaccgtcctccgtggaagacaccatgagcctgctcgagtgcctcggccagatccgctcgctgctcatcgtgcagatgggcccccaggaggagaacctcatgatccagagcatcgggaacatcatgaacaacaaagtcttctaccaacacccgaacctgatgagggcgctgggcatgcacgagacggtcatggaggtcatggtcaacgtcctcgggggcggcgagtccaaggagatccgcttccccaagatggtgacaagctgctgccgcttcctctgctatttctgccgaatcagccggcagaaccagcgctccatgtttgaccacctgagctacctgctggagaacagtggcatcggcctgggcatgcagggctccacgcccctggacgtggctgctgcctccgtcattgacaacaatgagctggccttggcattgcaggagcaggacctggaaaaggttgtgtcctacctggcaggctgtggcctccagagctgccccatgcttgtggccaaagggtacccagacattggctggaacccctgtggtggagagcgctacctggacttcctgcgctttgctgtcttcgtcaacggcgagagcgtggaggagaacgccaatgtggtggtgcggctgctcatccggaagcctgagtgcttcggacccgccctgcggggtgagggtggctcagggctgctggctgccatcgaagaggccatccgcatctccgaggaccctgcgagggatggcccaggcatccgcagggaccggcggcgcgagcactttggtgaggaaccgcctgaagaaaaccgggtgcacctgggacacgccatcatgtccttctatgccgccttgatcgacctgctcggacgctgtgcaccagagatgcatctaatccaagccggcaagggtgaggccctgcggatccgcgccatcctccgctcccttgtgcccttggaggaccttgtgggcatcatcagcctcccactgcagattcccaccctgggcaaagatggggctctggtgcagccaaagatgtcagcatccttcgtgccggaccacaaggcgtccatggtgctcttcctggaccgtgtgtatggcatcgagaaccaggacttcttgctgcacgtgctggacgtggggttcctgcccgacatgagggcagccgcctcgctggacacggccactttcagcaccaccgagatggcgctggcgctgaaccgctacctgtgcctggccgtgctgccgctcatcaccaagtgtgcgccgctctttgcgggcacagaacaccgcgccatcatggtggactctatgctgcataccgtgtaccgcctgtctcggggtcgttcgctcaccaaggcgcagcgtgacgtcatcgaggactgcctcatgtcgctctgcaggtacatccgcccgtcgatgctgcagcacctgttgcgccgcctggtgttcgacgtgcccatcctcaacgagttcgccaagatgccactcaagctcctcaccaaccactatgagcgctgttggaagtactactgcctacccacgggctgggccaacttcggggtcacctcagaggaggagctgcacctcacacggaaactcttctggggcatctttgactctctggcccataagaaatacgacccggagctgtaccgcatggccatgccttgtctgtgcgccattgccggggctctgccccccgactatgtggatgcctcatactcatctaaggcagagaaaaaggccacagtggatgctgaaggcaactttgatccccggcctgtggagaccctcaatgtgatcatcccggagaagctggactccttcattaacaagtttgcggagtacacacacgagaagtgggccttcgacaagatccagaacaactggtcctatggagagaacatagacgaggagctgaagacccaccccatgctgaggccctacaagaccttttcagagaaggacaaagagatttaccgctggcccatcaaggagtccctgaaggccatgattgcctgggaatggacgatagagaaggccagggagggtgaggaggagaagacggaaaagaaaaaaacgcggaagatatcacaaagtgcccagacctatgatcctcgagaaggctacaaccctcagccccccgaccttagtgctgttaccctgtcccgggagctgcaggccatggcagaacaactggcagaaaattaccacaacacgtggggacggaagaagaagcaggagctggaagccaaaggcggtgggacccaccccctgctggtcccctacgacacgctcacggccaaggagaaggcacgagatcgagagaaggcccaggagctactgaaattcctgcagatgaatggctacgcggttacaagaggccttaaggacatggaactggactcgtcttccattgaaaagcggtttgcctttggcttcctgcagcagctgctgcgctggatggacatttctcaggagttcattgcccacctggaggctgtggtcagcagtgggcgagtggaaaagtccccacatgaacaggagattaaattctttgccaagatcctgctccctttgatcaaccagtacttcaccaaccactgcctctatttcttgtccactccggctaaagtgctgggcagcggtggccacgcctctaacaaggagaaggaaatgatcaccagcctcttctgcaaacttgctgctctcgtccgccaccgagtctctctctttgggacagacgccccagctgtggtcaactgtcttcacatcctggcccgctccctggatgccaggacagtgatgaagtcaggccctgagatcgtgaaggctggcctccgctccttcttcgagagtgcctcggaggacatcgagaagatggtggagaacctgcggctgggcaaggtgtcgcaggcgcgcacccaggtgaaaggcgtgggccagaacctcacctacaccactgtggcactgctgccggtcctcaccaccctcttccagcacatcgcccagcaccagttcggagatgacgtcatcctggacgacgtccaggtctcttgctaccgaacgctgtgcagtatctactccctgggaaccaccaagaacacttatgtggaaaagcttcggccagccctcggggagtgcctggcccgtctggcagcagccatgccggtggcgttcctggagccgcagctgaacgagtacaacgcctgctccgtgtacaccaccaagtctccgcgggagcgggccatcctggggctccccaacagtgtggaggagatgtgtcccgacatcccggtgctggagcggctcatggcagacattggggggctggccgagtcaggtgcccgctacacagagatgccgcatgtcatcgagatcacgctgcccatgctatgcagctacctgccccgatggtgggagcgcgggcccgaggcacccccttccgccctgcccgccggcgcccccccaccctgcacagctgtcacctctgaccacctcaactccctgctggggaatatcctgagaatcatcgtcaacaacctgggcattgacgaggcctcctggatgaagcggctggctgtgttcgcacagcccattgtgagccgtgcacggccggagctcctgcagtcccacttcatcccaactatcgggcggctgcgcaagagggcagggaaggtggtgtccgaggaggagcagctgcgcctggaggccaaggcggaggcccaggagggcgagctgctggtgcgggacgagttctctgtgctctgccgggacctctacgccctgtatccgctgctcatccgctacgtggacaacaacagggcgcagtggctgacggagccgaatcccagcgcggaggagctgttcaggatggtgggcgagatcttcatctactggtccaagtcccacaacttcaagcgcgaggagcagaactttgtggtccagaatgagatcaacaacatgtccttcctgactgctgacaacaaaagcaaaatggctaaggcgggagatatacagtccggtggctcggaccaggaacgcaccaagaagaagcgccggggggaccggtactctgtgcagacgtcactgatcgtggccacactgaagaagatgctgcccatcggcctgaatatgtgtgcgcccaccgaccaagacctcatcacgctggccaagacccgttacgccctgaaagacacagatgaggaggtccgggaatttctgcacaacaaccttcaccttcagggaaaggtcgaaggctccccgtctctgcgctggcagatggctctgtaccggggcgtcccgggtcgcgaggaggacgccgatgaccccgagaaaatcgtgcgcagagtccaggaagtgtcagccgtgctctactacctggaccagaccgagcacccttacaagtctaagaaggccgtgtggcacaagcttttgtccaaacagcgccggcgggcagtcgtggcctgtttccgtatgacgcccctgtacaacctgcccacgcaccgggcatgtaacatgttcctggagagctacaaggctgcatggatcctgactgaagaccacagttttgaggaccgcatgatagatgacctttcaaaagctggggagcaggaggaggaggaggaagaggtggaagagaagaagccagaccccctgcaccagttggtcctgcacttcagccgcactgccctgacggaaaagagcaaactggatgaggattacctgtacatggcctatgctgatatcatggcaaagagctgccacctggaggagggaggggagaacggtgaagctgaagaggaggttgaggtctcctttgaggagaaacagatggagaagcagaggctcttgtaccagcaagcacggctgcacacccggggggcggccgagatggtgctgcagatgatcagtgcctgcaaaggagagacaggtgccatggtgtcctccaccctgaagctgggcatctccatcctcaatggaggcaatgctgaggtccagcagaaaatgctggattatcttaaggacaagaaggaagttggcttcttccagagtatccaggcactgatgcaaacatgcagcgtcctggatctcaatgcctttgagagacagaacaaggccgaggggctgggcatggtgaatgaggatggcactgtcatcaatcgccagaacggagagaaggtcatggcggatgatgaattcacacaagacctgttccgattcctacaattgctctgtgaggggcacaataatgatttccagaactacctacggacacagacagggaacacgaccactattaacatcatcatttgcactgtggactacctcctgcggctgcaggaatccatcagcgacttctactggtactactcgggcaaggatgtcattgaagagcagggcaagaggaacttctccaaagccatgtcggtggctaagcaggtgttcaacagcctcactgagtacatccagggtccctgcaccgggaaccagcagagcctggcgcacagtcgcctatgggacgcagtggtgggattcctgcacgtgttcgcccacatgatgatgaagctcgctcaggactcaagccagatcgagctgctgaaggagctgctggatctgcagaaggacatggtggtgatgttgctgtcgctactagaagggaacgtggtgaacggcatgatcgcccggcagatggtggacatgctcgtggaatcctcatccaatgtggagatgatcctcaagttcttcgacatgttcctgaaactcaaggacattgtgggctctgaagccttccaggactacgtaacggatccccgtggcctcatctccaagaaggacttccagaaggccatggacagccagaagcagttcagcggtccagaaatccagttcctgctttcgtgctccgaagcggatgagaacgaaatgatcaactgcgaagagttcgccaaccgcttccaggagccagcacgcgacatcggcttcaacgtggcggtgctgctgaccaacctgtcggagcatgtgccgcatgaccctcgcctgcacaacttcctggagctggccgagagcatccttgagtacttccgcccctacctgggccgcatcgagatcatgggcgcgtcacgccgcatcgagcgcatctacttcgagatctcagagaccaaccgcgcccagtgggagatgccccaggtgaaggagtccaagcgccagttcatcttcgacgtggtgaacgagggcggcgaggctgagaagatggagctcttcgtgagtttctgcgaggacaccatcttcgagatgcagatcgccgcgcagatctcggagcccgagggcgagccggagaccgacgaggacgagggcgcgggcgcggcggaggcgggcgcggaaggcgcggaggagggcgcggcggggctcgagggcacggcggccacggcggcggcgggggcgacggcgcgggttgtggcggccgcaggccgggccctgcgaggcctcagctaccgcagcctgcggcggcgcgtgcggcggctgcggcggcttacggcccgcgaggcggccaccgcagtggcggcgctgctctgggcagcagtgacgcgcgctggggccgctggcgcgggggcggcggcgggcgcgctgggcctgctctggggctcgctgttcggcggcggcctggtggagggcgccaagaaggtgacggtgaccgagctcctggcaggcatgcccgaccccaccagcgacgaggtgcacggcgagcagccggccgggccgggcggagacgcagacggcgagggtgccagcgagggcgctggagacgccgcggagggcgctggagacgaggaggaggcggtgcacgaggccgggccgggcggtgccgacggggcggtggccgtgaccgatgggggccccttccggcccgaaggggctggcggtctcggggacatgggggacacgacgcctgcggaaccgcccacacccgagggctctcccatcctcaagaggaaattgggggtggatggagtggaggaggagctcccgccagagccagagcccgagccggaaccagagctggagccggagaaagccgatgccgagaatggggagaaggaagaagttcccgagcccacaccagagccccccaagaagcaagcacctccctcaccccctccaaagaaggaggaagctggaggcgaattctggggagaactggaggtgcagagggtgaagttcctgaactacctgtcccggaacttttacaccctgcggttccttgccctcttcttggcatttgccatcaacttcatcttgctgttttataaggtctcagactctccaccaggggaggacgacatggaaggctcagctgctggggatgtgtcaggtgcaggctctggtggcagctctggctggggcttgggggccggagaggaggcagagggcgatgaggatgagaacatggtgtactacttcctggaggaaagcacaggctacatggaacccgccctgcggtgtctgagcctcctgcatacactggtggcctttctctgcatcattggctataattgtctcaaggtgcccctggtaatctttaagcgggagaaggagctggcccggaagctggagtttgatggcctgtacatcacggagcagcctgaggacgatgacgtgaaggggcagtgggaccgactggtgctcaacacgccgtctttccctagcaactactgggacaagtttgtcaagcgcaaggtcctggacaaacatggggacatctacgggcgggagcggattgctgagctactgggcatggacctggccacactagagatcacagcccacaatgagcgcaagcccaacccgccgccagggctgctgacctggctcatgtccatcgatgtcaagtaccagatctggaagttcggggtcatcttcacagacaactccttcctgtacctgggctggtatatggtgatgtccctcttgggacactacaacaacttcttctttgctgcccatctcctggacatcgccatgggggtcaagacgctgcgcaccatcctgtcctctgtcacccacaatgggaaacagctggtgatgaccgtgggccttctggcggtggtcgtctacctgtacaccgtggtggccttcaacttcttccgcaagttctacaacaagagcgaggatgaggatgaacctgacatgaagtgtgatgacatgatgacgtgttacctgtttcacatgtacgtgggtgtccgggctggcggaggcattggggacgagatcgaggaccccgcgggtgacgaatacgagctctacagggtggtcttcgacatcaccttcttcttcttcgtcatcgtcatcctgttggccatcatccagggtctgatcatcgacgcttttggtgagctccgagaccaacaagagcaagtgaaggaggatatggagaccaagtgcttcatctgtggaatcggcagtgactactttgatacgacaccgcatggcttcgagactcacacgctggaggagcacaacctggccaattacatgtttttcctgatgtatttgataaacaaggatgagacagaacacacgggtcaggagtcttatgtctggaagatgtaccaagagagatgttgggatttcttcccagctggtgattgtttccgtaagcagtatgaggaccagcttagctgacacacccccagctggccctccacccccacctcaagtgccttattctcacagcaagccccttagtccccaagcccctccccctaaggcagctgggggagaggtgacctagtactggaaaataaatctgtgctacgccccccagca

SEQ ID NO: 27059 - DNA, 15376 bp, Homo sapiens
  source 1..15376: mol_type = unassigned DNA
tctacctcgcgggtgcctctggtgtctccagaggtctccgaccccagcccgcccccagccctcccgcccagcccgcagccccctccctctgttccccgacctcagaccctgggcttccgacctcgacatcatgggtgacgcagaaggcgaagacgaggtccagttcctgcggacggacgatgaggtggtcctgcagtgcagcgctaccgtgctcaaggagcagctcaagctctgcctggccgccgagggcttcggcaaccgcctgtgcttcctggagcccactagcaacgcgcagaatgtgccccccgatctggccatctgttgcttcgtcctggagcagtccctgtctgtgcgagccctgcaggagatgctggctaacacggtggaggctggcgtggagtcatcccagggcgggggacacaggacgctcctgtatggccatgccatcctgctccggcatgcacacagccgcatgtatctgagctgcctcaccacctcccgctccatgactgacaagctggccttcgatgtgggactgcaggaggacgcaacaggagaggcttgctggtggaccatgcacccagcctccaagcagaggtctgaaggagaaaaggtccgcgttggggatgacatcatccttgtcagtgtctcctccgagcgctacctgcacctgtcgaccgccagtggggagctccaggttgacgcttccttcatgcagacactatggaacatgaaccccatctgctcccgctgcgaagagggcttcgtgacgggaggtcacgtcctccgcctctttcatggacatatggatgagtgtctgaccatttcccctgctgacagtgatgaccagcgcagacttgtctactatgaggggggagctgtgtgcactcatgcccgctccctctggaggctggagccactgagaatcagctggagtgggagccacctgcgctggggccagccactccgagtccggcatgtcactaccgggcagtacctagcgctcaccgaggaccagggcctggtggtggttgacgccagcaaggctcacaccaaggctacctccttctgcttccgcatctccaaggagaagctggatgtggcccccaagcgggatgtggagggcatgggcccccctgagatcaagtacggggagtcactgtgcttcgtgcagcatgtggcctcaggactgtggctcacctatgctgctccagaccccaaggccctgcggctcggcgtgctcaagaagaaggccatgctgcaccaggagggccacatggacgacgcactgtcgctgacccgctgccagcaggaggagtcccaggccgcccgcatgatccacagcaccaatggcctatacaaccagttcatcaagagcctggacagcttcagcgggaagccacggggctcggggccacccgctggcacggcgctgcccatcgagggcgttatcctgagcctgcaggacctcatcatctacttcgagcctccctccgaggacttgcagcacgaggagaagcagagcaagctgcgaagcctgcgcaaccgccagagcctcttccaggaggaggggatgctctccatggtcctgaattgcatagaccgcctaaatgtctacaccactgctgcccactttgctgagtttgcaggggaggaggcagccgagtcctggaaagagattgtgaatcttctctatgaactcctagcttctctaatccgtggcaatcgtagcaactgtgccctcttctccacaaacttggactggctggtcagcaagctggatcggctggaggcctcgtctggcatcctggaggtcctgtactgtgtcctcattgagagtccagaggttctgaacatcatccaggagaatcacatcaagtccatcatctccctcctggacaagcatgggaggaaccacaaggtcctggacgtgctatgctccctgtgtgtgtgtaatggtgtggctgtacgctccaaccaagatcttattactgagaacttgctgcctggccgtgagcttctgctgcagacaaacctcatcaactatgtcaccagcatccgccccaacatctttgtgggccgagcggaaggcaccacgcagtacagcaaatggtactttgaggtgatggtggacgaggtgactccatttctgacagctcaggccacccacttgcgggtgggctgggccctcaccgagggctacaccccctaccctggggccggcgagggctggggcggcaacggggtcggcgatgacctctattcctacggctttgatggactgcatctctggacaggacacgtggcacgcccagtgacttccccagggcagcacctcctggcccctgaagacgtgatcagctgctgcctggacctcagcgtgccgtccatctccttccgcatcaacggctgccccgtgcagggtgtctttgagtccttcaacctggacgggctcttcttccctgttgtcagcttctcggctggtgtcaaggtgcggttcctccttggtggccgccatggtgaattcaagttcctgcccccacctggctatgctccatgccatgaggctgtgctccctcgagagcgactccatcttgaacccatcaaggagtatcgacgggaggggccccgggggcctcacctggtgggccccagtcgctgcctctcacacaccgacttcgtgccctgccctgtggacactgtccagattgtcctgccgccccatctggagcgcattcgggagaagctggcggagaacatccacgagctctgggcgctaacccgcatcgagcagggctggacctacggcccggttcgggatgacaacaagaggctgcacccgtgtcttgtggacttccacagccttccagagcctgagaggaactacaacctgcagatgtctggggagacgctcaagactctgctggctctgggctgccacgtgggcatggcggatgagaaggcggaggacaacctgaagaagacaaaactccccaagacgtatatgatgagcaatgggtacaagccggctccgctggacctgagccacgtgcggctgacgccggcgcagacgacactggtggaccgtctggcagaaaatgggcacaacgtgtgggcccgagaccgcgtgggccagggctggagctacagcgcagtgcaggacatcccagcgcgccgaaaccctcggctggtgccctaccgcctgctggatgaagccaccaagcgcagcaaccgggacagcctctgccaggccgtgcgcaccctcctgggctacggctacaacatcgagcctcctgaccaggagcccagtcaggtggagaaccagtctcgttgtgaccgggtgcgcatcttccgggcagagaaatcctatacagtgcagagcggccgctggtacttcgagtttgaagcagtcaccacaggcgagatgcgcgtgggctgggcgaggcccgagctgaggcctgatgtagagctgggagctgacgagctggcctatgtcttcaatgggcaccgcggccagcgctggcacttgggcagtgaaccatttgggcgcccctggcagccgggcgatgtcgttggctgtatgatcgacctcacagagaacaccattatcttcaccctcaatggcgaggtcctcatgtctgactcaggctccgaaacagccttccgggagattgagattggggacggcttcctgcccgtctgcagcttgggacctggccaggtgggtcatctgaacctgggccaggacgtgagctctctgaggttctttgccatctgtggcctccaggaaggcttcgagccatttgccatcaacatgcagcgcccagtcaccacctggttcagcaaaggcctgccccagtttgagccagtgccccttgaacaccctcactatgaggtatcccgagtggacggcactgtggacacgcccccctgcctgcgcctgacccaccgcacctggggctcccagaacagcctggtggagatgcttttcctgcggctgagcctcccagtccagttccaccagcacttccgctgcactgcaggggccaccccgctggcacctcctggcctgcagccccccgccgaggacgaggcccgggcggcggaacccgaccctgactacgaaaacctgcgccgctcagctgggggctggagcgaggcagagaacggcaaagaagggactgcgaaggagggcgcccccgggggcaccccgcaggcggggggagaggcgcagcccgccagggcggagaatgagaaggatgccaccaccgagaagaacaagaagagaggcttcttattcaaggccaagaaggtcgccatgatgacccagccaccggccacccccacgctgccccgactccctcacgacgtggtgcctgcagacaaccgcgatgaccccgagatcatcctcaacaccaccacgtactattactccgtgagggtctttgctggacaggagcccagctgcgtgtgggcgggctgggtcacccctgactaccatcagcacgacatgagcttcgacctcagcaaggtccgggtcgtgacggtgaccatgggggatgaacaaggcaacgtccacagcagcctcaagtgtagcaactgctacatggtgtggggcggagactttgtgagtcccgggcagcagggccggatcagccacacggaccttgtcattgggtgcctggtggacttggccactggcttaatgacctttacagccaatggcaaagagagcaacacctttttccaggtggaacccaacactaagctatttcctgccgtcttcgtcctgcccacccaccagaacgtcatccagtttgagctggggaagcagaagaacatcatgccgttgtcagccgccatgttccaaagcgagcgcaagaacccggccccgcagtgcccaccgcggctggagatgcagatgctgatgccagtgtcctggagccgcatgcccaaccacttcctgcaggtggagacgaggcgtgccggcgagcggctgggctgggccgtgcagtgccaggagccgctgaccatgatggcgctgcacatccccgaggagaaccggtgcatggacatcctggagctgtcggagcgcctggacctgcagcgcttccactcgcacaccctgcgcctctaccgcgctgtgtgcgccctgggcaacaatcgcgtggcgcacgctctgtgcagccacgtagaccaagctcagctgctgcacgccctggaggacgcgcacctgccaggcccactgcgcgcaggctactatgacctcctcatcagcatccacctcgaaagtgcctgccgcagccgccgctccatgctctctgaatacatcgtgcccctcacgcctgagacccgcgccatcacgctcttccctcctggaaggagcacagaaaatggtcacccccggcatggcctgccgggagttggagtcaccacttcgctgaggcccccgcatcatttctcgcccccctgtttcgtggccgctctgccagctgctggggcagcagaggccccggcccgcctcagccctgccatcccgctggaggccctgcgggacaaggcactgaggatgctgggggaggcggtgcgcgacggtgggcagcacgctcgcgaccccgtcgggggctccgtggagttccagtttgtgcctgtgctcaagctcgtgtccaccctgctggtgatgggcatctttggcgatgaggatgtgaaacagatcttgaagatgattgagcctgaggtcttcactgaggaagaagaggaggaggacgaggaggaagagggtgaagaggaagatgaggaggagaaggaggaggatgaggaggaaacagcacaggaaaaggaagatgaggaaaaagaggaagaggaggcagcagaaggggagaaagaagaaggcttggaggaagggctgctccagatgaagttgccagagtctgtgaagttacagatgtgccacctgctggagtatttctgtgaccaagagctgcagcaccgtgtggagtccctggcagcctttgcggagcgctatgtggacaagctccaggccaaccagcggagccgctatggcctcctcataaaagccttcagcatgaccgcagcagagactgcaagacgtacccgcgagttccgctccccaccccaggaacagatcaatatgctattgcaattcaaagatggtacagatgaggaagactgtcctctccctgaagagattcgacaggatttgcttgactttcatcaagacctgctggcacactgtggaattcagctagatggagaggaggaggaaccagaggaagagaccaccctgggcagccgcctcatgagcctgttggagaaagtgcggctggtgaagaagaaggaagagaaacctgaggaggagcggtcagcagaggagagcaaaccccggtccctgcaggagctggtgtcccacatggtggtgcgctgggcccaagaggacttcgtgcagagccccgagctggtgcgggccatgttcagcctcctgcaccggcagtacgacgggctgggtgagctgctgcgtgccctgccgcgggcgtacaccatctcaccgtcctccgtggaagacaccatgagcctgctcgagtgcctcggccagatccgctcgctgctcatcgtgcagatgggcccccaggaggagaacctcatgatccagagcatcgggaacatcatgaacaacaaagtcttctaccaacacccgaacctgatgagggcgctgggcatgcacgagacggtcatggaggtcatggtcaacgtcctcgggggcggcgagtccaaggagatccgcttccccaagatggtgacaagctgctgccgcttcctctgctatttctgccgaatcagccggcagaaccagcgctccatgtttgaccacctgagctacctgctggagaacagtggcatcggcctgggcatgcagggctccacgcccctggacgtggctgctgcctccgtcattgacaacaatgagctggccttggcattgcaggagcaggacctggaaaaggttgtgtcctacctggcaggctgtggcctccagagctgccccatgcttgtggccaaagggtacccagacattggctggaacccctgtggtggagagcgctacctggacttcctgcgctttgctgtcttcgtcaacggcgagagcgtggaggagaacgccaatgtggtggtgcggctgctcatccggaagcctgagtgcttcggacccgccctgcggggtgagggtggctcagggctgctggctgccatcgaagaggccatccgcatctccgaggaccctgcgagggatggcccaggcatccgcagggaccggcggcgcgagcactttggtgaggaaccgcctgaagaaaaccgggtgcacctgggacacgccatcatgtccttctatgccgccttgatcgacctgctcggacgctgtgcaccagagatgcatctaatccaagccggcaagggtgaggccctgcggatccgcgccatcctccgctcccttgtgcccttggaggaccttgtgggcatcatcagcctcccactgcagattcccaccctgggcaaagatggggctctggtgcagccaaagatgtcagcatccttcgtgccggaccacaaggcgtccatggtgctcttcctggaccgtgtgtatggcatcgagaaccaggacttcttgctgcacgtgctggacgtggggttcctgcccgacatgagggcagccgcctcgctggacacggccactttcagcaccaccgagatggcgctggcgctgaaccgctacctgtgcctggccgtgctgccgctcatcaccaagtgtgcgccgctctttgcgggcacagaacaccgcgccatcatggtggactctatgctgcataccgtgtaccgcctgtctcggggtcgttcgctcaccaaggcgcagcgtgacgtcatcgaggactgcctcatgtcgctctgcaggtacatccgcccgtcgatgctgcagcacctgttgcgccgcctggtgttcgacgtgcccatcctcaacgagttcgccaagatgccactcaagctcctcaccaaccactatgagcgctgttggaagtactactgcctacccacgggctgggccaacttcggggtcacctcagaggaggagctgcacctcacacggaaactcttctggggcatctttgactctctggcccataagaaatacgacccggagctgtaccgcatggccatgccttgtctgtgcgccattgccggggctctgccccccgactatgtggatgcctcatactcatctaaggcagagaaaaaggccacagtggatgctgaaggcaactttgatccccggcctgtggagaccctcaatgtgatcatcccggagaagctggactccttcattaacaagtttgcggagtacacacacgagaagtgggccttcgacaagatccagaacaactggtcctatggagagaacatagacgaggagctgaagacccaccccatgctgaggccctacaagaccttttcagagaaggacaaagagatttaccgctggcccatcaaggagtccctgaaggccatgattgcctgggaatggacgatagagaaggccagggagggtgaggaggagaagacggaaaagaaaaaaacgcggaagatatcacaaagtgcccagacctatgatcctcgagaaggctacaaccctcagccccccgaccttagtgctgttaccctgtcccgggagctgcaggccatggcagaacaactggcagaaaattaccacaacacgtggggacggaagaagaagcaggagctggaagccaaaggcggtgggacccaccccctgctggtcccctacgacacgctcacggccaaggagaaggcacgagatcgagagaaggcccaggagctactgaaattcctgcagatgaatggctacgcggttacaagaggccttaaggacatggaactggactcgtcttccattgaaaagcggtttgcctttggcttcctgcagcagctgctgcgctggatggacatttctcaggagttcattgcccacctggaggctgtggtcagcagtgggcgagtggaaaagtccccacatgaacaggagattaaattctttgccaagatcctgctccctttgatcaaccagtacttcaccaaccactgcctctatttcttgtccactccggctaaagtgctgggcagcggtggccacgcctctaacaaggagaaggaaatgatcaccagcctcttctgcaaacttgctgctctcgtccgccaccgagtctctctctttgggacagacgccccagctgtggtcaactgtcttcacatcctggcccgctccctggatgccaggacagtgatgaagtcaggccctgagatcgtgaaggctggcctccgctccttcttcgagagtgcctcggaggacatcgagaagatggtggagaacctgcggctgggcaaggtgtcgcaggcgcgcacccaggtgaaaggcgtgggccagaacctcacctacaccactgtggcactgctgccggtcctcaccaccctcttccagcacatcgcccagcaccagttcggagatgacgtcatcctggacgacgtccaggtctcttgctaccgaacgctgtgcagtatctactccctgggaaccaccaagaacacttatgtggaaaagcttcggccagccctcggggagtgcctggcccgtctggcagcagccatgccggtggcgttcctggagccgcagctgaacgagtacaacgcctgctccgtgtacaccaccaagtctccgcgggagcgggccatcctggggctccccaacagtgtggaggagatgtgtcccgacatcccggtgctggagcggctcatggcagacattggggggctggccgagtcaggtgcccgctacacagagatgccgcatgtcatcgagatcacgctgcccatgctatgcagctacctgccccgatggtgggagcgcgggcccgaggcacccccttccgccctgcccgccggcgcccccccaccctgcacagctgtcacctctgaccacctcaactccctgctggggaatatcctgagaatcatcgtcaacaacctgggcattgacgaggcctcctggatgaagcggctggctgtgttcgcacagcccattgtgagccgtgcacggccggagctcctgcagtcccacttcatcccaactatcgggcggctgcgcaagagggcagggaaggtggtgtccgaggaggagcagctgcgcctggaggccaaggcggaggcccaggagggcgagctgctggtgcgggacgagttctctgtgctctgccgggacctctacgccctgtatccgctgctcatccgctacgtggacaacaacagggcgcagtggctgacggagccgaatcccagcgcggaggagctgttcaggatggtgggcgagatcttcatctactggtccaagtcccacaacttcaagcgcgaggagcagaactttgtggtccagaatgagatcaacaacatgtccttcctgactgctgacaacaaaagcaaaatggctaaggcgggagatatacagtccggtggctcggaccaggaacgcaccaagaagaagcgccggggggaccggtactctgtgcagacgtcactgatcgtggccacactgaagaagatgctgcccatcggcctgaatatgtgtgcgcccaccgaccaagacctcatcacgctggccaagacccgttacgccctgaaagacacagatgaggaggtccgggaatttctgcacaacaaccttcaccttcagggaaaggtcgaaggctccccgtctctgcgctggcagatggctctgtaccggggcgtcccgggtcgcgaggaggacgccgatgaccccgagaaaatcgtgcgcagagtccaggaagtgtcagccgtgctctactacctggaccagaccgagcacccttacaagtctaagaaggccgtgtggcacaagcttttgtccaaacagcgccggcgggcagtcgtggcctgtttccgtatgacgcccctgtacaacctgcccacgcaccgggcatgtaacatgttcctggagagctacaaggctgcatggatcctgactgaagaccacagttttgaggaccgcatgatagatgacctttcaaaagctggggagcaggaggaggaggaggaagaggtggaagagaagaagccagaccccctgcaccagttggtcctgcacttcagccgcactgccctgacggaaaagagcaaactggatgaggattacctgtacatggcctatgctgatatcatggcaaagagctgccacctggaggagggaggggagaacggtgaagctgaagaggaggttgaggtctcctttgaggagaaacagatggagaagcagaggctcttgtaccagcaagcacggctgcacacccggggggcggccgagatggtgctgcagatgatcagtgcctgcaaaggagagacaggtgccatggtgtcctccaccctgaagctgggcatctccatcctcaatggaggcaatgctgaggtccagcagaaaatgctggattatcttaaggacaagaaggaagttggcttcttccagagtatccaggcactgatgcaaacatgcagcgtcctggatctcaatgcctttgagagacagaacaaggccgaggggctgggcatggtgaatgaggatggcactgtaggagagaaggtcatggcggatgatgaattcacacaagacctgttccgattcctacaattgctctgtgaggggcacaataatgatttccagaactacctacggacacagacagggaacacgaccactattaacatcatcatttgcactgtggactacctcctgcggctgcaggaatccatcagcgacttctactggtactactcgggcaaggatgtcattgaagagcagggcaagaggaacttctccaaagccatgtcggtggctaagcaggtgttcaacagcctcactgagtacatccagggtccctgcaccgggaaccagcagagcctggcgcacagtcgcctatgggacgcagtggtgggattcctgcacgtgttcgcccacatgatgatgaagctcgctcaggactcaagccagatcgagctgctgaaggagctgctggatctgcagaaggacatggtggtgatgttgctgtcgctactagaagggaacgtggtgaacggcatgatcgcccggcagatggtggacatgctcgtggaatcctcatccaatgtggagatgatcctcaagttcttcgacatgttcctgaaactcaaggacattgtgggctctgaagccttccaggactacgtaacggatccccgtggcctcatctccaagaaggacttccagaaggccatggacagccagaagcagttcagcggtccagaaatccagttcctgctttcgtgctccgaagcggatgagaacgaaatgatcaactgcgaagagttcgccaaccgcttccaggagccagcacgcgacatcggcttcaacgtggcggtgctgctgaccaacctgtcggagcatgtgccgcatgaccctcgcctgcacaacttcctggagctggccgagagcatccttgagtacttccgcccctacctgggccgcatcgagatcatgggcgcgtcacgccgcatcgagcgcatctacttcgagatctcagagaccaaccgcgcccagtgggagatgccccaggtgaaggagtccaagcgccagttcatcttcgacgtggtgaacgagggcggcgaggctgagaagatggagctcttcgtgagtttctgcgaggacaccatcttcgagatgcagatcgccgcgcagatctcggagcccgagggcgagccggagaccgacgaggacgagggcgcgggcgcggcggaggcgggcgcggaaggcgcggaggagggcgcggcggggctcgagggcacggcggccacggcggcggcgggggcgacggcgcgggttgtggcggccgcaggccgggccctgcgaggcctcagctaccgcagcctgcggcggcgcgtgcggcggctgcggcggcttacggcccgcgaggcggccaccgcagtggcggcgctgctctgggcagcagtgacgcgcgctggggccgctggcgcgggggcggcggcgggcgcgctgggcctgctctggggctcgctgttcggcggcggcctggtggagggcgccaagaaggtgacggtgaccgagctcctggcaggcatgcccgaccccaccagcgacgaggtgcacggcgagcagccggccgggccgggcggagacgcagacggcgagggtgccagcgagggcgctggagacgccgcggagggcgctggagacgaggaggaggcggtgcacgaggccgggccgggcggtgccgacggggcggtggccgtgaccgatgggggccccttccggcccgaaggggctggcggtctcggggacatgggggacacgacgcctgcggaaccgcccacacccgagggctctcccatcctcaagaggaaattgggggtggatggagtggaggaggagctcccgccagagccagagcccgagccggaaccagagctggagccggagaaagccgatgccgagaatggggagaaggaagaagttcccgagcccacaccagagccccccaagaagcaagcacctccctcaccccctccaaagaaggaggaagctggaggcgaattctggggagaactggaggtgcagagggtgaagttcctgaactacctgtcccggaacttttacaccctgcggttccttgccctcttcttggcatttgccatcaacttcatcttgctgttttataaggtctcagactctccaccaggggaggacgacatggaaggctcagctgctggggatgtgtcaggtgcaggctctggtggcagctctggctggggcttgggggccggagaggaggcagagggcgatgaggatgagaacatggtgtactacttcctggaggaaagcacaggctacatggaacccgccctgcggtgtctgagcctcctgcatacactggtggcctttctctgcatcattggctataattgtctcaaggtgcccctggtaatctttaagcgggagaaggagctggcccggaagctggagtttgatggcctgtacatcacggagcagcctgaggacgatgacgtgaaggggcagtgggaccgactggtgctcaacacgccgtctttccctagcaactactgggacaagtttgtcaagcgcaaggtcctggacaaacatggggacatctacgggcgggagcggattgctgagctactgggcatggacctggccacactagagatcacagcccacaatgagcgcaagcccaacccgccgccagggctgctgacctggctcatgtccatcgatgtcaagtaccagatctggaagttcggggtcatcttcacagacaactccttcctgtacctgggctggtatatggtgatgtccctcttgggacactacaacaacttcttctttgctgcccatctcctggacatcgccatgggggtcaagacgctgcgcaccatcctgtcctctgtcacccacaatgggaaacagctggtgatgaccgtgggccttctggcggtggtcgtctacctgtacaccgtggtggccttcaacttcttccgcaagttctacaacaagagcgaggatgaggatgaacctgacatgaagtgtgatgacatgatgacgtgttacctgtttcacatgtacgtgggtgtccgggctggcggaggcattggggacgagatcgaggaccccgcgggtgacgaatacgagctctacagggtggtcttcgacatcaccttcttcttcttcgtcatcgtcatcctgttggccatcatccagggtctgatcatcgacgcttttggtgagctccgagaccaacaagagcaagtgaaggaggatatggagaccaagtgcttcatctgtggaatcggcagtgactactttgatacgacaccgcatggcttcgagactcacacgctggaggagcacaacctggccaattacatgtttttcctgatgtatttgataaacaaggatgagacagaacacacgggtcaggagtcttatgtctggaagatgtaccaagagagatgttgggatttcttcccagctggtgattgtttccgtaagcagtatgaggaccagcttagctgacacacccccagctggccctccacccccacctcaagtgccttattctcacagcaagccccttagtccccaagcccctccccctaaggcagctgggggagaggtgacctagtactggaaaataaatctgtgctacgccccccagca

SEQ ID NO: 27060 - DNA, 2200 bp, Homo sapiens
  source 1..2200: mol_type = unassigned DNA
aaacttgctgctctcgtccgccaccgagtctctctctttggacagtgatgaagtcaggccctgagatcgtgaaggctggcctccgctccttcttcgagagtgcctcggaggacatcgagaagatggtggagaacctgcggctgggcaaggtgtcgcaggcgcgcacccaggtgaaaggcgtgggccagaacctcacctacaccactgtggcactgctgccggtcctcaccaccctcttccagcacatcgcccagcaccagttcggagatgacgtcatcctggacgacgtccaggtctcttgctaccgaacgctgtgcagtatctactccctgggaaccaccaagaacacttatgtggaaaagcttcggccagccctcggggagtgcctggcccgtctggcagcagccatgccggtggcgttcctggagccgcagctgaacgagtacaacgcctgctccgtgtacaccaccaagtctccgcgggagcgggccatcctggggctccccaacagtgtggaggagatgtgtcccgacatcccggtgctggagcggctcatggcagacattggggggctggccgagtcaggtgcccgctacacagagatgccgcatgtcatcgagatcacgctgcccatgctatgcagctacctgccccgatggtgggagcgcgggcccgaggcacccccttccgccctgcccgccggcgcccccccaccctgcacagctgtcacctctgaccacctcaactccctgctggggaatatcctgagaatcatcgtcaacaacctgggcattgacgaggcctcctggatgaagcggctggctgtgttcgcacagcccattgtgagccgtgcacggccggagctcctgcagtcccacttcatcccaactatcgggcggctgcgcaagagggcagggaaggtggtgtccgaggaggagcagctgcgcctggaggccaaggcggaggcccaggagggcgagctgctggtgcgggacgagttctctgtgctctgccgggacctctacgccctgtatccgctgctcatccgctacgtggacaacaacagggcgcagtggctgacggagccgaatcccagcgcggaggagctgttcaggatggtgggcgagatcttcatctactggtccaagtcccacaacttcaagcgcgaggagcagaactttgtggtccagaatgagatcaacaacatgtccttcctgactgctgacaacaaaagcaaaatggctaaggcgggagatatacagtccggtggctcggaccaggaacgcaccaagaagaagcgccggggggaccggtactctgtgcagacgtcactgatcgtggccacactgaagaagatgctgcccatcggcctgaatatgtgtgcgcccaccgaccaagacctcatcacgctggccaagacccgttacgccctgaaagacacagatgaggaggtccgggaatttctgcacaacaaccttcaccttcagggaaaggtcgaaggctccccgtctctgcgctggcagatggctctgtaccggggcgtcccgggtcgcgaggaggacgccgatgaccccgagaaaatcgtgcgcagagtccaggaagtgtcagccgtgctctactacctggaccagaccgagcacccttacaagtctaagaaggccgtgtggcacaagcttttgtccaaacagcgccggcgggcagtcgtggcctgtttccgtatgacgcccctgtacaacctgcccacgcaccgggcatgtaacatgttcctggagagctacaaggctgcatggatcctgactgaagaccacagttttgaggaccgcatgatagatgacctttcaaaagctggggagcaggaggaggaggaggaagaggtggaagagaagaagccagaccccctgcaccagttggtcctgcacttcagccgcactgccctgacggaaaagagcaaactggatgaggattacctgtacatggcctatgctgatatcatggcaaagagctgccacctggaggagggaggggagaacggtgaagctgaagaggaggttgaggtctcctttgaggagaaacagatggagaagcagaggctcttgtaccagcaagcacggctgcacacccggggggcggccgagatggtgctgcagatgatcagtgcctgcaaaggagagacaggtgccatggtgtcctccaccctgaa

SEQ ID NO: 27061 - DNA, 15033 bp, Homo sapiens
  source 1..15033: mol_type = unassigned DNA
ctgggccctagatcctcatctaacaagctctcaaataaaaagatgatgaagtggttctgcagtgcaccgcaaccatccacaaagaacaacagaagctatgcttggcagcagaaggatttggcaacagactttgtttcttggagtccacttccaattccaagaatgtgcccccagacctctccatctgcacctttgtgctggagcagtccctctctgtccgggcgctgcaggagatgctggctaacaccgtggagaaatcagaaggggcaactagatatcattaaatggtcatttggtctaaagactgctcaaggtggtggtcatcgaacactcctctacggacatgccatattgctgcgccattcctatagtggcatgtatctgtgctgcctgtccacctcccggtcttcaactgataagctggcttttgatgttggcttgcaagaggacaccacaggggaggcttgttggtggaccatacaccctgcctctaagcagcgatcagaaggagaaaaagtacgagttggagatgacctcatcttagttagcgtgtcctctgaaaggtacttgcacttgtcttatggcaacggcagcttacacgtggatgccgctttccagcagactctctggagcgtggccccaatcagctcaggaagtgaggcagcccaagggtatctcattggtggtgatgtcctcaggttgctgcatggacacatggacgagtgtctcactgtcccttcaggagaacatggtgaagagcagcggagaactgttcattatgaaggtggcgctgtgtctgttcatgcacgttccctttggagactagagacgctaagagttgcgtggagtggaagccacataagatggggacagccattccgactacgccatgtcacaacaggaaaatacttgagtctcatggaagacaaaaaccttctactcatggacaaagagaaagctgatgtaaaatcaacagcatttaccttccggtcttccaaggaaaaattggatgtaggggtgagaaaagaagtagatggcatgggaacatctgaaataaaatacggtgactcagtatgctatatacaacatgtagacacaggcctatggcttacttaccagtctgtggacgtgaaatccgtgagaatgggatctatacaacgtaaggctattatgcatcatgaaggccacatggatgatggcataagtttgtcgagatcccagcatgaagaatcacgcacagcccgagttatccggagcacagtcttccttttcaatagatttataaggggccttgatgctctcagcaagaaagcgaaggcttccacagtcgatttgcctatagagtccgtaagcctaagtctgcaggatctcattggctacttccaccccccagatgagcatttagagcatgaagacaaacagaacagactacgagccctgaagaatcggcaaaatctcttccaggaagagggaatgatcaacctcgtgcttgagtgcatagaccgtttgcacgtctacagcagtgcagcacactttgctgatgttgctgggcgagaagcaggagagtcttggaaatccattctgaattctctgtatgagttgctggcggctctaattagaggaaatcgtaaaaactgtgctcaattttctggctccctcgactggttgatcagcagattggaaagactggaagcttcttcaggcattctggaagttttacactgtgttttagtagaaagtccagaagctctaaatattattaaagaaggacatattaaatctattatctcacttttagacaaacatggaagaaatcacaaggttctggatgtcttgtgctcactctgtgtttgccacggggttgcagtccgttctaaccagcatctcatctgtgacaatctcctaccaggaagagacttgttattgcagacacgtcttgtgaaccatgtcagcagcatgagacccaatatttttctgggcgtcagtgaaggttctgctcagtataagaaatggtactatgaattgatggtggaccacacagagccctttgtgacagctgaagcaactcacctgcgagtgggctgggcttccactgaaggatattctccctaccctggagggggcgaagagtggggtggaaatggtgttggagatgatctcttctcctatggatttgatggccttcatctctggtcaggttgtattgctcgtactgtaagctcaccaaaccaacatctgttaagaactgatgatgtcatcagttgctgtttagatctgagtgccccaagcatctcgttccgaattaatggacaacctgttcaaggaatgtttgagaatttcaacatcgatggcctcttctttccagtcgttagtttctctgcaggaataaaagtacgctttctgcttggagggcgacatggagaattcaaatttcttcctccacctgggtatgctccttgttatgaagctgttctgccaaaagaaaagttgaaagtggaacacagccgagagtacaagcaagaaagaacttacacacgcgacctgctgggccccacagtttccctgacgcaagctgccttcacacccatccctgtggataccagccagatcgtgttgcctcctcatctagaaagaataagagaaaaactggcagagaatatccatgaactctgggttatgaataaaattgagcttggctggcagtatggtccggttagagatgacaacaagagacaacacccatgcctggtggagttctccaagctgcctgaacaggagcgcaattacaacttacaaatgtcgcttgagaccctgaagactttgttggcattaggatgtcatgtgggtatatcagatgaacatgctgaagacaaggtgaaaaaaatgaagctacccaagaattaccagctgacaagtggatacaagcctgcccctatggacctgagctttatcaaactcaccccatcacaagaagcaatggtggacaagttggcagaaaatgcacataatgtgtgggcgcgggatcgaatccggcagggctggacttatggcatccaacaggacgtaaagaacagaagaaatcctcgccttgttccctacactcttctggatgaccgaaccaagaaatccaacaaggacagcctccgcgaggctgtgcgcacgctgctggggtacggctacaacttggaagcaccagatcaagatcatgcagccagagccgaagtgtgcagcggcaccggggaaaggttccgaatcttccgtgccgagaagacctatgcagtgaaggccggacggtggtattttgaatttgagacggtcactgctggagacatgagggttggttggagtcgtcctggttgtcaaccggatcaggagcttggctcagatgaacgtgcctttgcctttgatggcttcaaggcccagcggtggcatcagggcaatgaacactatgggcgctcttggcaagcaggcgatgtcgtggggtgtatggttgacatgaacgaacacaccatgatgttcacactgaatggtgaaatccttcttgatgattcaggctcagaactggctttcaaggactttgatgttggcgatggattcatacctgtgtgtagccttggagtggctcaagtgggtaggatgaactttggaaaggatgtcagcaccttgaaatatttcaccatctgtggcttacaagagggctatgaaccatttgccgttaatacaaacagggatattaccatgtggctgagcaagaggcttcctcagtttcttcaagttccatcaaaccatgaacatatagaggtgaccagaatagacggcaccatagacagttccccatgtttaaaggtcactcagaagtcttttggttctcagaacagcaacactgatatcatgttttatcgcctgagcatgccgatcgagtgcgcggaggtcttctccaagacggtggctggagggctccctggggctggcctttttgggcccaagaatgacttggaagattatgatgctgattctgactttgaggttctgatgaagacagctcatggccatctagtgcccgatcgtgttgacaaagacaaagaagctactaaaccagagtttaacaaccacaaagattatgcccaggaaaagccctctcgtctgaaacaaagatttttgcttagaagaacaaagccagattacagcacaagccattctgcaagactcaccgaagatgtccttgctgatgatcgggatgactatgatttcttgatgcaaacgtccacgtactattactcagtgagaatctttcctggacaagaacctgctaatgtctgggtgggctggattacatcagatttccatcagtatgacacaggctttgacttggacagagttcgcacagtaacagttactctaggagatgaaaaaggaaaagtgcatgaaagcatcaaacgcagcaactgctatatggtatgtgcgggtgagagcatgagccccgggcaaggacgcaacaataatggactggagattggctgtgtggtggatgctgccagcgggctgctcacattcattgccaatggcaaggaactgagcacatactatcaggtggaaccgagtacaaaattatttcctgcggtttttgcacaagctacaagtcccaatgttttccagtttgagttgggaagaataaagaatgtgatgcctctctcggcgggattattcaagagtgagcacaagaaccccgtgccgcagtgccccccgcgcctccacgtgcagttcctgtcacacgtcctgtggagcagaatgcccaaccagtttttgaaggtagatgtgtctcgaataagtgaacgccaaggctggttggtgcagtgtttggatcctctgcagttcatgtctcttcatatccctgaggaaaacagatctgttgacatcttagagttgacagagcaggaggaattgctgaaatttcactatcacactctccggctctactcagccgtctgtgctcttgggaaccaccgggtggcccatgccctgtgcagccatgtggatgaacctcagctcctctatgccattgagaacaagtacatgcctggtttgctgcgtgctggctactatgacctgctgattgacatccacctgagctcctatgccactgccaggctcatgatgaacaacgagtacattgtccccatgacggaggagacgaagagcatcaccctgttccctgatgagaacaaaaaacacggccttccagggatcggcctcagcacctccctcaggccacggatgcagttttcctcccccagttttgtaagcattagtaatgaatgttaccagtacagtccagagttcccactggacatcctcaagtccaaaaccatacagatgctgacagaagctgttaaagagggcagtcttcatgcccgggacccagttggagggactactgaattcctctttgtacctctcatcaagcttttctataccctgctgatcatgggcatctttcacaacgaggacttgaagcacatcttgcagttgattgagcccagtgtgtttaaagaagctgccactccggaggaggagagtgacacgctggagaaagagctcagtgtggacgatgcaaagctgcaaggagctggtgaggaagaagccaaggggggcaagcggcccaaggaaggcctgctccaaatgaaactgccagagccagttaaattgcagatgtgcctactgcttcagtacctctgtgactgccaggtccggcaccggatagaagccattgtagccttttcagatgattttgtggctaagctccaagacaatcaacgtttccgatacaacgaagtcatgcaagccttaaacatgtcagctgcactcacagccaggaagacaaaggaatttagatcaccacctcaagaacagatcaatatgcttctcaattttaaggatgacaaaagtgaatgtccatgtccagaagaaattcgtgaccaactattggatttccatgaagatttgatgacacattgtggaattgagctggatgaagatgggtctctggatggaaacagtgatttaacaattagagggcgtctgctatccctggtagaaaaggtgacatatctgaagaagaagcaagcagaaaaaccagttgagagtgactccaaaaagtcctccactctgcagcagctgatttctgagaccatggtccgatgggctcaggagtctgtcattgaagaccccgagctggtgagggccatgtttgtgttgctccatcggcagtatgacggcattgggggtcttgttcgggccctgccaaagacctacacgataaatggtgtgtccgtggaggacaccatcaacctgctggcatcccttggtcagattcggtccctgctgagtgtgagaatgggcaaagaagaagagaagctcatgattcgtggattaggggatattatgaataacaaagtgttttaccagcaccctaatctcatgagggcactggggatgcacgagactgtgatggaggtcatggtgaacgtccttggaggtggagagtccaaggaaatcacctttcccaagatggtggccaactgttgccgttttctctgttacttctgtcgtataagtaggcagaatcaaaaagctatgtttgatcatctcagttatttactggaaaacagcagtgttggtcttgcctccccagctatgagaggttcaacaccactggatgtggctgcagcttcggtgatggataataatgaactagcattagctctgcgtgagccggatctagaaaaggtagttcgttatttggctggttgtggactgcaaagttgccagatgctggtgtctaagggctatccagacattgggtggaacccagttgaaggagagagatatcttgactttcttagatttgctgtcttctgtaatggggagagtgtggaggaaaatgcaaatgtcgtggtgagattgctcattcggaggcctgagtgttttggtcctgctttgagaggagaaggtgggaatgggcttcttgcagcaatggaagaagccatcaaaatcgccgaggatccttcccgagatggtccctcaccaaatagcggatccagtaaaacacttgacacagaggaggaggaagatgacactatccacatggggaacgcgatcatgaccttctattcagctttgattgacctcttgggacgctgtgctcctgagatgcatttgattcatgccgggaagggagaagccatcagaattaggtccattttgagatccctcattcccctgggagatttggtgggcgttatcagcatcgcttttcagatgccaacaatagccaaagatgggaatgtggtggaacctgacatgtctgcggggttttgcccagatcacaaggcagccatggttttattccttgacagggtctatgggattgaggttcaagacttcctcctccatcttcttgaggttggctttctgccagatctccgggcggctgcttctttagatacggcagctttgagtgctacagacatggccttggccctcaatcggtacctttgcacagccgtcttgccattgttaacaagatgtgctcctctctttgctggcacagagcaccacgcttctctcattgactcattacttcatactgtgtatagactttctaagggctgttcacttaccaaagctcagcgggattccatagaagtttgtttactctctatttgtggacaactgagaccttctatgatgcagcacttactcagaagattagtatttgatgttccattattaaatgaacacgcaaagatgcctcttaaactgctgacaaatcattatgaaagatgctggaaatattactgcctgcctggagggtggggaaactttggtgctgcctcagaagaagaacttcatttatcaagaaagttgttctggggcatttttgatgccctgtctcaaaagaaatatgaacaagaacttttcaaactggcactgccttgcctgagtgcagttgcgggagctttgcctccagactacatggagtcaaattatgtcagtatgatggaaaaacagtcatcaatggattctgaagggaactttaacccacaacctgttgatacctcaaatattacaattcctgagaaattggaatacttcattaacaaatatgcagaacactcccatgacaaatggtcaatggacaagttggcaaatggatggatttatggagaaatatattcagactcttctaaggttcagccattaatgaagccatataagctattgtctgaaaaggaaaaagaaatttatcgctggccaatcaaagaatctttaaaaactatgctggcttggggctggagaattgaaagaactcgggagggagacagcatggccctttacaaccggactcgtcgtatttctcagacaagccaggtttctgtggacgctgcccatggttacagtccccgggccattgacatgagcaatgttacactatctagagacctgcatgctatggcagaaatgatggctgaaaactaccataatatatgggcaaagaaaaagaaaatggagttggagtccaaaggaggaggaaaccatcctctgctggtgccctatgatacactgacagccaaagagaaagccaaggatagagaaaaagcacaggacatcctcaagttcttgcagatcaatggatatgctgtatccagaggatttaaggacctggaactggacacgccttctattgagaaacgatttgcctatagtttcctccaacaactcattcgctatgtggatgaagcccatcagtatatcctggagtttgatggtggcagcagaggcaaaggagaacatttcccttatgaacaagaaatcaagttctttgcaaaagtcgttcttcctttaattgatcagtatttcaaaaaccatcgtttatacttcttatctgcagcaagcagacctctctgctctggaggacatgcttccaacaaagagaaagaaatggtgactagcctattctgcaaacttggagttcttgtcaggcataggatttcactatttggcaatgatgcaacatcaattgtcaactgtcttcatattttgggtcagactttggatgcaaggacagtgatgaagactggcctggagagtgttaaaagtgcactcagagcttttctggacaacgctgcagaggatctggagaagaccatggaaaacctcaagcagggccagttcactcacacccgaaaccagcccaaaggggttactcagattatcaattacaccacagtggccctgctgccaatgctgtcttcattatttgaacatattggccagcatcagttcggagaagacctaatattggaagatgtccaggtgtcttgttatagaattctgactagcttatatgctttgggaaccagcaagagtatttacgtggagaggcaacgttctgcattaggagaatgtctagctgcctttgctggtgcttttcctgtagcatttttggaaactcatctggacaaacataatatttactccatctacaataccaagtcttcacgagaaagagcagctctcagtttgccaactaatgtggaagatgtttgtccaaacataccgtctttggagaaactcatggaagaaatcgtggaattagccgagtccggcattcgctacactcaaatgccacatgtcatggaagtcatactgcccatgctttgcagctacatgtctcgttggtgggagcatggacctgagaacaatccagaacgggccgagatgtgctgcacagccctgaactcagagcacatgaacacacttctagggaacatattgaaaatcatatataataacttggggattgatgagggagcctggatgaagaggctagcagtgttttcccagcctataataaataaagtgaaacctcagctcttgaaaactcatttcttgccgttaatggagaaactcaagaaaaaggcagctacggtggtgtctgaggaagaccacctgaaagctgaggccaggggggacatgtcggaggcagaactcctcatcctagatgagttcaccacactggccagagatctctatgccttctaccctctcttgattagatttgtggactataacagggcaaagtggctaaaggagcctaacccagaagcagaggagctcttccgcatggtggctgaagtgtttatctactggtcgaagtcccataatttcaaaagagaagagcagaacttcgttgtacagaatgaaatcaacaatatgtctttccttattactgataccaagtcaaagatgtcaaaggcagctgtttctgatcaggaaaggaagaaaatgaagcgcaaaggagatcggtattccatgcagacctctctgattgtagcagctctgaagcggttactgcccattgggttgaacatctgtgcccctggggaccaggagctcattgctctggccaaaaatcgatttagcctgaaagataccgaggatgaagtacgagatataatccgcagcaatattcatttacaaggcaagttggaggatcctgctattagatggcaaatggctctttacaaagacttaccaaacaggactgatgatacctcagatccagagaagacggtagaaagagtattggatatagcaaatgtgctttttcatcttgaacagaagtctaaacgtgtgggtcggagacattactgtctggtggaacatcctcagagatctaaaaaggctgtatggcataaactactgtccaagcagaggaaaagggctgttgtagcctgcttccggatggcccccttatataatctgccaaggcatcgggctgtcaatctctttcttcagggatatgaaaagtcttggattgaaacagaagaacattactttgaagataaactgatagaagatttagcaaaacctggggctgaacctccagaagaagatgaaggcactaagagagttgatcctctacatcagctgatccttctgtttagtcggacagctttaacagagaaatgcaaactggaggaagattttttatatatggcctatgcagatattatggcaaagagttgtcatgatgaggaagatgacgatggtgaagaggaagtgaagagttttgaagtcacaggatcccaacgcagcaaggaaaaagaaatggaaaagcaaaagcttctataccagcaagcccgactccacgatcgtggcgcggctgagatggtgctacagacaatcagtgccagcaaaggtgaaactggaccaatggtagcagctactctgaaacttggaattgctattttaaatggtgggaactccacagtacagcagaaaatgcttgactacctcaaggagaaaaaggatgtgggcttctttcagagcctggccggcctgatgcagtcatgtagtgtccttgacctaaatgcatttgagcgacaaaacaaagctgaaggtcttgggatggtgacagaggaaggatcaggagaaaaggttctgcaggacgatgagttcacctgtgacctcttccgattcctgcaactactctgtgagggacacaactcagattttcagaattatctgagaactcagactggcaataatacaactgtcaacataattatctccactgtagactacctactgagagttcaggaatcaattagtgacttttattggtattactctgggaaagatgttattgatgaacaaggacaacggaatttctccaaagctatccaagtggcaaaacaagtctttaacactcttacagagtatattcagggtccttgcactgggaatcaacagagtttggcacacagcaggctgtgggatgctgtggtcggctttcttcatgtgtttgcccatatgcagatgaagctgtcgcaggattccagtcaaattgagctattaaaagaattaatggatctgcagaaggatatggtggtcatgttgctgtccatgttagaaggtaatgttgttaatggaacgattggcaaacagatggtggatatgcttgtggaatcttccaacaacgtggagatgattctcaaattttttgacatgttcttaaaactaaaggatttgacgtcgtctgatacttttaaagaatatgaccccgatggcaagggagtcatttccaagagggacttccacaaagcgatggagagccataagcactacacgcagtcagaaacggaatttcttttgtcttgtgcggagacggatgagaatgaaaccctcgactacgaagagttcgtcaaacgcttccacgaacctgcgaaggacatcggcttcaacgtcgccgtccttctgacaaacctctctgagcacatgcccaacgatacccgacttcagacttttctggaattagcagagagcgtcctgaattatttccagccctttctgggccgcatcgaaatcatgggaagcgccaaacgcatcgagagggtctattttgaaatcagtgagtccagccgaacccagtgggagaagccccaggtcaaggagtccaaaagacagttcatatttgacgtggtcaacgaaggcggagagaaagagaagatggaactctttgtgaacttctgcgaggacaccatctttgaaatgcagctggcggctcagatctcggagtcggacttgaacgagaggtcagcgaataaggaagaaagcgagaaggagaggccggaagagcaggggccgaggatggctttcttctccattctgacggtcaggtcggccctgtttgcgctcaggtacaatatcttgacccttatgcgaatgctcagtctgaagagcctgaagaagcagatgaaaaaagtaaaaaagatgaccgtgaaggacatggtcacggccttcttttcatcctactggagtattttcatgaccctcttgcacttcgtggccagcgttttcagaggctttttccgcatcatttgcagcctgctgcttgggggaagcctcgtcgaaggtgctaaaaagatcaaagttgcagaactgttagccaacatgccagaccccactcaggatgaggttagaggagatggggaggagggagagaggaaacccctggaagccgccctgccctccgaggatctgaccgacttaaaggagctgacagaggaaagtgaccttctttcggacatctttggcctggatctgaagagagaaggaggacagtacaaactgattcctcataatccaaatgctgggctcagtgacctcatgagcaacccagtccccatgcctgaggtgcaggaaaaatttcaggaacagaaggcaaaagaagaagaaaaggaagaaaaagaagaaaccaaatctgaacctgaaaaagccgagggagaagatggagaaaaagaagagaaagccaaggaagacaagggcaaacaaaagttgaggcagcttcacacacacagatacggagaaccagaagtgccagagtcagcattctggaagaaaatcatagcatatcaacagaaacttctaaactattttgctcgcaacttttacaacatgagaatgttagccttatttgtcgcatttgctatcaatttcatcttgctcttttataaggtctccacttcttctgtggttgaaggaaaggagctccccacgagaagttcaagtgaaaatgccaaagtgacaagcctggacagcagctcccatagaatcatcgcagttcactatgtactagaggagagcagcggctacatggagcccacgttgcgtatcttagctattctgcacacggtcatttctttcttctgcatcattggatactactgcttgaaagtcccattggttatttttaagcgagaaaaggaagtggcacggaaattggaatttgatgggctttatattacagaacagccttcagaagatgatattaaaggccagtgggatagactcgtaatcaacacacagtcatttcccaacaactactgggacaaatttgttaaaagaaaggttatggataaatatggagagttctacggccgagacagaatcagtgaattacttggcatggacaaggcagctctggacttcagtgatgccagagaaaagaagaagccaaagaaagacagctccttatcagctgtactgaactccattgatgtgaagtatcagatgtggaaactaggagtcgttttcactgacaactccttcctctacctagcctggtatatgactatgtctgttcttggacactataacaactttttttttgccgctcaccttctcgacattgctatgggattcaagacattaagaaccatcttgtcctcagtaactcacaatggcaaacagctcgtattaaccgttggcttattagctgttgttgtatacctatacactgtggtggcattcaattttttccgaaaattctacaataaaagtgaagatggtgatacaccagatatgaaatgtgacgatatgctaacatgctatatgttccacatgtatgttggagttcgtgctggaggagggatcggggatgaaatcgaagacccagcaggagatgaatatgagatctatcgaatcatctttgacatcactttcttcttctttgttattgtcattctcttggccataatacaaggtctaattattgatgcttttggagaactaagagaccaacaggaacaagtcaaagaagacatggagaccaaatgcttcatctgtgggataggcaatgattacttcgacacagtgccacatggctttgaaacccacactttacaggagcacaacttggctaattacttgttttttctgatgtatcttataaacaaagatgaaacagaacacacaggacaggaatcttatgtctggaagatgtatcaagaaaggtgttgggaatttttcccagcaggggattgcttccggaaacagtatgaagaccagctaaattaaactcagacccaatcacctctaaaaaccaaaaccctacccctctctctccctctctcaatttctctgctctcttggaaacattttgctgattttgtgaattgccagcgttgt

SEQ ID NO: 27062 - DNA, 16562 bp, Homo sapiens
  source 1..16562: mol_type = unassigned DNA
ccgagcggaccgccggctgcaggcagcgagcgcggctgggctgcggggctgcttccccgcgtcctccgggcccgggccgccctcctcccgcacagtgcggagcagggaggccccgcgcctcgaccacccgcgcccgagcgtccgcgcctcctcctccgctctgcaggcggggaccgcccggcgctcggcacccggcagcgcggccccctccagcccccggctcccggcagcagaagcagaaggcagcgccaggggccgccgccgccgccgagctccgcggggctcgggagccggccccggcgaggaggcgcggaaccatggccgatgggggcgagggcgaagacgagatccagttcctgcgaactgatgatgaagtggttctgcagtgcaccgcaaccatccacaaagaacaacagaagctatgcttggcagcagaaggatttggcaacagactttgtttcttggagtccacttccaattccaagaatgtgcccccagacctctccatctgcacctttgtgctggagcagtccctctctgtccgggcgctgcaggagatgctggctaacaccgtggagaaatcagaagggcaagttgatgtggaaaaatggaaattcatgatgaagactgctcaaggtggtggtcatcgaacactcctctacggacatgccatattgctgcgccattcctatagtggcatgtatctgtgctgcctgtccacctcccggtcttcaactgataagctggcttttgatgttggcttgcaagaggacaccacaggggaggcttgttggtggaccatacaccctgcctctaagcagcgatcagaaggagaaaaagtacgagttggagatgacctcatcttagttagcgtgtcctctgaaaggtacttgcacttgtcttatggcaacggcagcttacacgtggatgccgctttccagcagactctctggagcgtggccccaatcagctcaggaagtgaggcagcccaagggtatctcattggtggtgatgtcctcaggttgctgcatggacacatggacgagtgtctcactgtcccttcaggagaacatggtgaagagcagcggagaactgttcattatgaaggtggcgctgtgtctgttcatgcacgttccctttggagactagagacgctaagagttgcgtggagtggaagccacataagatggggacagccattccgactacgccatgtcacaacaggaaaatacttgagtctcatggaagacaaaaaccttctactcatggacaaagagaaagctgatgtaaaatcaacagcatttaccttccggtcttccaaggaaaaattggatgtaggggtgagaaaagaagtagatggcatgggaacatctgaaataaaatacggtgactcagtatgctatatacaacatgtagacacaggcctatggcttacttaccagtctgtggacgtgaaatccgtgagaatgggatctatacaacgtaaggctattatgcatcatgaaggccacatggatgatggcataagtttgtcgagatcccagcatgaagaatcacgcacagcccgagttatccggagcacagtcttccttttcaatagatttataaggggccttgatgctctcagcaagaaagcgaaggcttccacagtcgatttgcctatagagtccgtaagcctaagtctgcaggatctcattggctacttccaccccccagatgagcatttagagcatgaagacaaacagaacagactacgagccctgaagaatcggcaaaatctcttccaggaagagggaatgatcaacctcgtgcttgagtgcatagaccgtttgcacgtctacagcagtgcagcacactttgctgatgttgctgggcgagaagcaggagagtcttggaaatccattctgaattctctgtatgagttgctggcggctctaattagaggaaatcgtaaaaactgtgctcaattttctggctccctcgactggttgatcagcagattggaaagactggaagcttcttcaggcattctggaagttttacactgtgttttagtagaaagtccagaagctctaaatattattaaagaaggacatattaaatctattatctcacttttagacaaacatggaagaaatcacaaggttctggatgtcttgtgctcactctgtgtttgccacggggttgcagtccgttctaaccagcatctcatctgtgacaatctcctaccaggaagagacttgttattgcagacacgtcttgtgaaccatgtcagcagcatgagacccaatatttttctgggcgtcagtgaaggttctgctcagtataagaaatggtactatgaattgatggtggaccacacagagccctttgtgacagctgaagcaactcacctgcgagtgggctgggcttccactgaaggatattctccctaccctggagggggcgaagagtggggtggaaatggtgttggagatgatctcttctcctatggatttgatggccttcatctctggtcaggttgtattgctcgtactgtaagctcaccaaaccaacatctgttaagaactgatgatgtcatcagttgctgtttagatctgagtgccccaagcatctcgttccgaattaatggacaacctgttcaaggaatgtttgagaatttcaacatcgatggcctcttctttccagtcgttagtttctctgcaggaataaaagtacgctttctgcttggagggcgacatggagaattcaaatttcttcctccacctgggtatgctccttgttatgaagctgttctgccaaaagaaaagttgaaagtggaacacagccgagagtacaagcaagaaagaacttacacacgcgacctgctgggccccacagtttccctgacgcaagctgccttcacacccatccctgtggataccagccagatcgtgttgcctcctcatctagaaagaataagagaaaaactggcagagaatatccatgaactctgggttatgaataaaattgagcttggctggcagtatggtccggttagagatgacaacaagagacaacacccatgcctggtggagttctccaagctgcctgaacaggagcgcaattacaacttacaaatgtcgcttgagaccctgaagactttgttggcattaggatgtcatgtgggtatatcagatgaacatgctgaagacaaggtgaaaaaaatgaagctacccaagaattaccagctgacaagtggatacaagcctgcccctatggacctgagctttatcaaactcaccccatcacaagaagcaatggtggacaagttggcagaaaatgcacataatgtgtgggcgcgggatcgaatccggcagggctggacttatggcatccaacaggacgtaaagaacagaagaaatcctcgccttgttccctacactcttctggatgaccgaaccaagaaatccaacaaggacagcctccgcgaggctgtgcgcacgctgctggggtacggctacaacttggaagcaccagatcaagatcatgcagccagagccgaagtgtgcagcggcaccggggaaaggttccgaatcttccgtgccgagaagacctatgcagtgaaggccggacggtggtattttgaatttgagacggtcactgctggagacatgagggttggttggagtcgtcctggttgtcaaccggatcaggagcttggctcagatgaacgtgcctttgcctttgatggcttcaaggcccagcggtggcatcagggcaatgaacactatgggcgctcttggcaagcaggcgatgtcgtggggtgtatggttgacatgaacgaacacaccatgatgttcacactgaatggtgaaatccttcttgatgattcaggctcagaactggctttcaaggactttgatgttggcgatggattcatacctgtgtgtagccttggagtggctcaagtgggtaggatgaactttggaaaggatgtcagcaccttgaaatatttcaccatctgtggcttacaagagggctatgaaccatttgccgttaatacaaacagggatattaccatgtggctgagcaagaggcttcctcagtttcttcaagttccatcaaaccatgaacatatagaggtgaccagaatagacggcaccatagacagttccccatgtttaaaggtcactcagaagtcttttggttctcagaacagcaacactgatatcatgttttatcgcctgagcatgccgatcgagtgcgcggaggtcttctccaagacggtggctggagggctccctggggctggcctttttgggcccaagaatgacttggaagattatgatgctgattctgactttgaggttctgatgaagacagctcatggccatctagtgcccgatcgtgttgacaaagacaaagaagctactaaaccagagtttaacaaccacaaagattatgcccaggaaaagccctctcgtctgaaacaaagatttttgcttagaagaacaaagccagattacagcacaagccattctgcaagactcaccgaagatgtccttgctgatgatcgggatgactatgatttcttgatgcaaacgtccacgtactattactcagtgagaatctttcctggacaagaacctgctaatgtctgggtgggctggattacatcagatttccatcagtatgacacaggctttgacttggacagagttcgcacagtaacagttactctaggagatgaaaaaggaaaagtgcatgaaagcatcaaacgcagcaactgctatatggtatgtgcgggtgagagcatgagccccgggcaaggacgcaacaataatggactggagattggctgtgtggtggatgctgccagcgggctgctcacattcattgccaatggcaaggaactgagcacatactatcaggtggaaccgagtacaaaattatttcctgcggtttttgcacaagctacaagtcccaatgttttccagtttgagttgggaagaataaagaatgtgatgcctctctcggcgggattattcaagagtgagcacaagaaccccgtgccgcagtgccccccgcgcctccacgtgcagttcctgtcacacgtcctgtggagcagaatgcccaaccagtttttgaaggtagatgtgtctcgaataagtgaacgccaaggctggttggtgcagtgtttggatcctctgcagttcatgtctcttcatatccctgaggaaaacagatctgttgacatcttagagttgacagagcaggaggaattgctgaaatttcactatcacactctccggctctactcagccgtctgtgctcttgggaaccaccgggtggcccatgccctgtgcagccatgtggatgaacctcagctcctctatgccattgagaacaagtacatgcctggtttgctgcgtgctggctactatgacctgctgattgacatccacctgagctcctatgccactgccaggctcatgatgaacaacgagtacattgtccccatgacggaggagacgaagagcatcaccctgttccctgatgagaacaaaaaacacggccttccagggatcggcctcagcacctccctcaggccacggatgcagttttcctcccccagttttgtaagcattagtaatgaatgttaccagtacagtccagagttcccactggacatcctcaagtccaaaaccatacagatgctgacagaagctgttaaagagggcagtcttcatgcccgggacccagttggagggactactgaattcctctttgtacctctcatcaagcttttctataccctgctgatcatgggcatctttcacaacgaggacttgaagcacatcttgcagttgattgagcccagtgtgtttaaagaagctgccactccggaggaggagagtgacacgctggagaaagagctcagtgtggacgatgcaaagctgcaaggagctggtgaggaagaagccaaggggggcaagcggcccaaggaaggcctgctccaaatgaaactgccagagccagttaaattgcagatgtgcctactgcttcagtacctctgtgactgccaggtccggcaccggatagaagccattgtagccttttcagatgattttgtggctaagctccaagacaatcaacgtttccgatacaacgaagtcatgcaagccttaaacatgtcagctgcactcacagccaggaagacaaaggaatttagatcaccacctcaagaacagatcaatatgcttctcaattttaaggatgacaaaagtgaatgtccatgtccagaagaaattcgtgaccaactattggatttccatgaagatttgatgacacattgtggaattgagctggatgaagatgggtctctggatggaaacagtgatttaacaattagagggcgtctgctatccctggtagaaaaggtgacatatctgaagaagaagcaagcagaaaaaccagttgagagtgactccaaaaagtcctccactctgcagcagctgatttctgagaccatggtccgatgggctcaggagtctgtcattgaagaccccgagctggtgagggccatgtttgtgttgctccatcggcagtatgacggcattgggggtcttgttcgggccctgccaaagacctacacgataaatggtgtgtccgtggaggacaccatcaacctgctggcatcccttggtcagattcggtccctgctgagtgtgagaatgggcaaagaagaagagaagctcatgattcgtggattaggggatattatgaataacaaagtgttttaccagcaccctaatctcatgagggcactggggatgcacgagactgtgatggaggtcatggtgaacgtccttggaggtggagagtccaaggaaatcacctttcccaagatggtggccaactgttgccgttttctctgttacttctgtcgtataagtaggcagaatcaaaaagctatgtttgatcatctcagttatttactggaaaacagcagtgttggtcttgcctccccagctatgagaggttcaacaccactggatgtggctgcagcttcggtgatggataataatgaactagcattagctctgcgtgagccggatctagaaaaggtagttcgttatttggctggttgtggactgcaaagttgccagatgctggtgtctaagggctatccagacattgggtggaacccagttgaaggagagagatatcttgactttcttagatttgctgtcttctgtaatggggagagtgtggaggaaaatgcaaatgtcgtggtgagattgctcattcggaggcctgagtgttttggtcctgctttgagaggagaaggtgggaatgggcttcttgcagcaatggaagaagccatcaaaatcgccgaggatccttcccgagatggtccctcaccaaatagcggatccagtaaaacacttgacacagaggaggaggaagatgacactatccacatggggaacgcgatcatgaccttctattcagctttgattgacctcttgggacgctgtgctcctgagatgcatttgattcatgccgggaagggagaagccatcagaattaggtccattttgagatccctcattcccctgggagatttggtgggcgttatcagcatcgcttttcagatgccaacaatagccaaagatgggaatgtggtggaacctgacatgtctgcggggttttgcccagatcacaaggcagccatggttttattccttgacagggtctatgggattgaggttcaagacttcctcctccatcttcttgaggttggctttctgccagatctccgggcggctgcttctttagatacggcagctttgagtgctacagacatggccttggccctcaatcggtacctttgcacagccgtcttgccattgttaacaagatgtgctcctctctttgctggcacagagcaccacgcttctctcattgactcattacttcatactgtgtatagactttctaagggctgttcacttaccaaagctcagcgggattccatagaagtttgtttactctctatttgtggacaactgagaccttctatgatgcagcacttactcagaagattagtatttgatgttccattattaaatgaacacgcaaagatgcctcttaaactgctgacaaatcattatgaaagatgctggaaatattactgcctgcctggagggtggggaaactttggtgctgcctcagaagaagaacttcatttatcaagaaagttgttctggggcatttttgatgccctgtctcaaaagaaatatgaacaagaacttttcaaactggcactgccttgcctgagtgcagttgcgggagctttgcctccagactacatggagtcaaattatgtcagtatgatggaaaaacagtcatcaatggattctgaagggaactttaacccacaacctgttgatacctcaaatattacaattcctgagaaattggaatacttcattaacaaatatgcagaacactcccatgacaaatggtcaatggacaagttggcaaatggatggatttatggagaaatatattcagactcttctaaggttcagccattaatgaagccatataagctattgtctgaaaaggaaaaagaaatttatcgctggccaatcaaagaatctttaaaaactatgctggcttggggctggagaattgaaagaactcgggagggagacagcatggccctttacaaccggactcgtcgtatttctcagacaagccaggtttctgtggacgctgcccatggttacagtccccgggccattgacatgagcaatgttacactatctagagacctgcatgctatggcagaaatgatggctgaaaactaccataatatatgggcaaagaaaaagaaaatggagttggagtccaaaggaggaggaaaccatcctctgctggtgccctatgatacactgacagccaaagagaaagccaaggatagagaaaaagcacaggacatcctcaagttcttgcagatcaatggatatgctgtatccagaggatttaaggacctggaactggacacgccttctattgagaaacgatttgcctatagtttcctccaacaactcattcgctatgtggatgaagcccatcagtatatcctggagtttgatggtggcagcagaggcaaaggagaacatttcccttatgaacaagaaatcaagttctttgcaaaagtcgttcttcctttaattgatcagtatttcaaaaaccatcgtttatacttcttatctgcagcaagcagacctctctgctctggaggacatgcttccaacaaagagaaagaaatggtgactagcctattctgcaaacttggagttcttgtcaggcataggatttcactatttggcaatgatgcaacatcaattgtcaactgtcttcatattttgggtcagactttggatgcaaggacagtgatgaagactggcctggagagtgttaaaagtgcactcagagcttttctggacaacgctgcagaggatctggagaagaccatggaaaacctcaagcagggccagttcactcacacccgaaaccagcccaaaggggttactcagattatcaattacaccacagtggccctgctgccaatgctgtcttcattatttgaacatattggccagcatcagttcggagaagacctaatattggaagatgtccaggtgtcttgttatagaattctgactagcttatatgctttgggaaccagcaagagtatttacgtggagaggcaacgttctgcattaggagaatgtctagctgcctttgctggtgcttttcctgtagcatttttggaaactcatctggacaaacataatatttactccatctacaataccaagtcttcacgagaaagagcagctctcagtttgccaactaatgtggaagatgtttgtccaaacataccgtctttggagaaactcatggaagaaatcgtggaattagccgagtccggcattcgctacactcaaatgccacatgtcatggaagtcatactgcccatgctttgcagctacatgtctcgttggtgggagcatggacctgagaacaatccagaacgggccgagatgtgctgcacagccctgaactcagagcacatgaacacacttctagggaacatattgaaaatcatatataataacttggggattgatgagggagcctggatgaagaggctagcagtgttttcccagcctataataaataaagtgaaacctcagctcttgaaaactcatttcttgccgttaatggagaaactcaagaaaaaggcagctacggtggtgtctgaggaagaccacctgaaagctgaggccaggggggacatgtcggaggcagaactcctcatcctagatgagttcaccacactggccagagatctctatgccttctaccctctcttgattagatttgtggactataacagggcaaagtggctaaaggagcctaacccagaagcagaggagctcttccgcatggtggctgaagtgtttatctactggtcgaagtcccataatttcaaaagagaagagcagaacttcgttgtacagaatgaaatcaacaatatgtctttccttattactgataccaagtcaaagatgtcaaaggcagctgtttctgatcaggaaaggaagaaaatgaagcgcaaaggagatcggtattccatgcagacctctctgattgtagcagctctgaagcggttactgcccattgggttgaacatctgtgcccctggggaccaggagctcattgctctggccaaaaatcgatttagcctgaaagataccgaggatgaagtacgagatataatccgcagcaatattcatttacaaggcaagttggaggatcctgctattagatggcaaatggctctttacaaagacttaccaaacaggactgatgatacctcagatccagagaagacggtagaaagagtattggatatagcaaatgtgctttttcatcttgaacagaagtctaaacgtgtgggtcggagacattactgtctggtggaacatcctcagagatctaaaaaggctgtatggcataaactactgtccaagcagaggaaaagggctgttgtagcctgcttccggatggcccccttatataatctgccaaggcatcgggctgtcaatctctttcttcagggatatgaaaagtcttggattgaaacagaagaacattactttgaagataaactgatagaagatttagcaaaacctggggctgaacctccagaagaagatgaaggcactaagagagttgatcctctacatcagctgatccttctgtttagtcggacagctttaacagagaaatgcaaactggaggaagattttttatatatggcctatgcagatattatggcaaagagttgtcatgatgaggaagatgacgatggtgaagaggaagtgaagagttttgaagaaaaagaaatggaaaagcaaaagcttctataccagcaagcccgactccacgatcgtggcgcggctgagatggtgctacagacaatcagtgccagcaaaggtgaaactggaccaatggtagcagctactctgaaacttggaattgctattttaaatggtgggaactccacagtacagcagaaaatgcttgactacctcaaggagaaaaaggatgtgggcttctttcagagcctggccggcctgatgcagtcatgtagtgtccttgacctaaatgcatttgagcgacaaaacaaagctgaaggtcttgggatggtgacagaggaaggatcaggagaaaaggttctgcaggacgatgagttcacctgtgacctcttccgattcctgcaactactctgtgagggacacaactcagattttcagaattatctgagaactcagactggcaataatacaactgtcaacataattatctccactgtagactacctactgagagttcaggaatcaattagtgacttttattggtattactctgggaaagatgttattgatgaacaaggacaacggaatttctccaaagctatccaagtggcaaaacaagtctttaacactcttacagagtatattcagggtccttgcactgggaatcaacagagtttggcacacagcaggctgtgggatgctgtggtcggctttcttcatgtgtttgcccatatgcagatgaagctgtcgcaggattccagtcaaattgagctattaaaagaattaatggatctgcagaaggatatggtggtcatgttgctgtccatgttagaaggtaatgttgttaatggaacgattggcaaacagatggtggatatgcttgtggaatcttccaacaacgtggagatgattctcaaattttttgacatgttcttaaaactaaaggatttgacgtcgtctgatacttttaaagaatatgaccccgatggcaagggagtcatttccaagagggacttccacaaagcgatggagagccataagcactacacgcagtcagaaacggaatttcttttgtcttgtgcggagacggatgagaatgaaaccctcgactacgaagagttcgtcaaacgcttccacgaacctgcgaaggacatcggcttcaacgtcgccgtccttctgacaaacctctctgagcacatgcccaacgatacccgacttcagacttttctggaattagcagagagcgtcctgaattatttccagccctttctgggccgcatcgaaatcatgggaagcgccaaacgcatcgagagggtctattttgaaatcagtgagtccagccgaacccagtgggagaagccccaggtcaaggagtccaaaagacagttcatatttgacgtggtcaacgaaggcggagagaaagagaagatggaactctttgtgaacttctgcgaggacaccatctttgaaatgcagctggcggctcagatctcggagtcggacttgaacgagaggtcagcgaataaggaagaaagcgagaaggagaggccggaagagcaggggccgaggatggctttcttctccattctgacggtcaggtcggccctgtttgcgctcaggtacaatatcttgacccttatgcgaatgctcagtctgaagagcctgaagaagcagatgaaaaaagtaaaaaagatgaccgtgaaggacatggtcacggccttcttttcatcctactggagtattttcatgaccctcttgcacttcgtggccagcgttttcagaggctttttccgcatcatttgcagcctgctgcttgggggaagcctcgtcgaaggtgctaaaaagatcaaagttgcagaactgttagccaacatgccagaccccactcaggatgaggttagaggagatggggaggagggagagaggaaacccctggaagccgccctgccctccgaggatctgaccgacttaaaggagctgacagaggaaagtgaccttctttcggacatctttggcctggatctgaagagagaaggaggacagtacaaactgattcctcataatccaaatgctgggctcagtgacctcatgagcaacccagtccccatgcctgaggtgcaggaaaaatttcaggaacagaaggcaaaagaagaagaaaaggaagaaaaagaagaaaccaaatctgaacctgaaaaagccgagggagaagatggagaaaaagaagagaaagccaaggaagacaagggcaaacaaaagttgaggcagcttcacacacacagatacggagaaccagaagtgccagagtcagcattctggaagaaaatcatagcatatcaacagaaacttctaaactattttgctcgcaacttttacaacatgagaatgttagccttatttgtcgcatttgctatcaatttcatcttgctcttttataaggtctccacttcttctgtggttgaaggaaaggagctccccacgagaagttcaagtgaaaatgccaaagtgacaagcctggacagcagctcccatagaatcatcgcagttcactatgtactagaggagagcagcggctacatggagcccacgttgcgtatcttagctattctgcacacggtcatttctttcttctgcatcattggatactactgcttgaaagtcccattggttatttttaagcgagaaaaggaagtggcacggaaattggaatttgatgggctttatattacagaacagccttcagaagatgatattaaaggccagtgggatagactcgtaatcaacacacagtcatttcccaacaactactgggacaaatttgttaaaagaaaggttatggataaatatggagagttctacggccgagacagaatcagtgaattacttggcatggacaaggcagctctggacttcagtgatgccagagaaaagaagaagccaaagaaagacagctccttatcagctgtactgaactccattgatgtgaagtatcagatgtggaaactaggagtcgttttcactgacaactccttcctctacctagcctggtatatgactatgtctgttcttggacactataacaactttttttttgccgctcaccttctcgacattgctatgggattcaagacattaagaaccatcttgtcctcagtaactcacaatggcaaacagctcgtattaaccgttggcttattagctgttgttgtatacctatacactgtggtggcattcaattttttccgaaaattctacaataaaagtgaagatggtgatacaccagatatgaaatgtgacgatatgctaacatgctatatgttccacatgtatgttggagttcgtgctggaggagggatcggggatgaaatcgaagacccagcaggagatgaatatgagatctatcgaatcatctttgacatcactttcttcttctttgttattgtcattctcttggccataatacaaggtctaattattgatgcttttggagaactaagagaccaacaggaacaagtcaaagaagacatggagaccaaatgcttcatctgtgggataggcaatgattacttcgacacagtgccacatggctttgaaacccacactttacaggagcacaacttggctaattacttgttttttctgatgtatcttataaacaaagatgaaacagaacacacaggacaggaatcttatgtctggaagatgtatcaagaaaggtgttgggaatttttcccagcaggggattgcttccggaaacagtatgaagaccagctaaattaaactcagacccaatcacctctaaaaaccaaaaccctacccctctctctccctctctcaatttctctgctctcttggaaacattttgctgattttgtgaattgccagcgttgtgtgttttctgggagcatcgaagctctgtttcggaagagctgtttcctccccccaccttttgtatttactttgagactaaagactgaagaataatctaaattcatactcagacaaaaaaaggaattctggaaagaaaaccattctggacactgtcataacacacatagatagattttcttctgagactcccggagtcttctcgagctacgagaccttcacagagacacgtggcagccacactcacccagcctctttatttcaccatcctggaaggaaactgtctgtctaatggtcacagagcactgtagcacttaacagattgccatggacaccagttgcgaagggaaatagtgccttactatatgtgggttgagctatgcagaagatacgtgcatgaaaaaacatctttattttctttatgtcgacctttcttttcttagattgattttgtgaggttttttttttttcctttagtcttttctttagtgggggagggtaagaaaagcagtttgcacttaaaaagaaaaaaaaaaaacgggtggtgtgtctcaggacaaaaggaggctcttctcattcagctaaattcacatttgccccccccccccgcccccgcccccatatgctcctgctattattttggtaatgctctgatgcaacattgcaactttatgaaatctttgtatgaaaacaaaaagactgcaaaaaatacactttcaaaagaaaccattcattgcatgtttattatgcaagtttaaatgaacaaagaaaaccttcagaaacaagttgatcaacgtgagagaaatttcatgataattattcatagtaataaagtgtcgtgggcttaattgtatatctggagccagtgtcatccaccaacaatgtgatacaatatgaacttgacagtagttttgggttttgctcattctttcagccacctgtgatcagttttgttgattaaggacttcttgtcaggccattttttaatatcaaagctgaagcaatatccattcagggatttcatcagttgcatcacaaaacacggatgataatatacatcactccattttttccattttgagtccttttaaatgtaatgctaacctttacaattaaaaagtcagattcagaatggaaacaaggtcattttgcaaacattggagctcttttattacaagtctgcttgttaattttagaactgtaaaaccgctctgattaaactatttaactaac

SEQ ID NO: 27063 - DNA, 1425 bp, Homo sapiens
  source 1..1425: mol_type = unassigned DNA
agcttagccatctaattttttagcatgcattggaatcctcagaatttttggttgaataagaatgaattttaaaagtctccacttcttctgtggttgaaggaaaggagctccccacgagaagttcaagtgaaaatgccaaagtgacaagcctggacagcagctcccatagaatcatcgcagttcactatgtactagaggagagcagcggctacatggagcccacgttgcgtatcttagctattctgcacacggtcatttctttcttctgcatcattggatactactgcttgaaagtcccattggttatttttaagcgagaaaaggaagtggcacggaaattggaatttgatgggctttatattacagaacagccttcagaagatgatattaaaggccagtgggatagactcgtaatcaacacacagtcatttcccaacaactactgggacaaatttgttaaaagaaaggttatggataaatatggagagttctacggccgagacagaatcagtgaattacttggcatggacaaggcagctctggacttcagtgatgccagagaaaagaagaagccaaagaaagacagctccttatcagctgtactgaactccattgatgtgaagtatcagatgtggaaactaggagtcgttttcactgacaactccttcctctacctagcctggtatatgactatgtctgttcttggacactataacaactttttttttgccgctcaccttctcgacattgctatgggattcaagacattaagaaccatcttgtcctcagtaactcacaatggcaaacagctcgtattaaccgttggcttattagctgttgttgtatacctatacactgtggtggcattcaattttttccgaaaattctacaataaaagtgaagatggtgatacaccagatatgaaatgtgacgatatgctaacatgctatatgttccacatgtatgttggagttcgtgctggaggagggatcggggatgaaatcgaagacccagcaggagatgaatatgagatctatcgaatcatctttgacatcactttcttcttctttgttattgtcattctcttggccataatacaaggtctaattattgatgcttttggagaactaagagaccaacaggaacaagtcaaagaagacatggaggttttttctgatgtatcttataaacaaagatgaaacagaacacacaggacaggaatcttatgtctggaagatgtatcaagaaaggtgttgggaatttttcccagcaggggattgcttccggaaacagtatgaagaccagctaaattaaactcagacccaatcacctctaaaaaccaaaaccctacccctctctctccctctctcaatttctctgctctcttggaaacattttgctgattttgtgaattgccagcgttgt

SEQ ID NO: 27064 - DNA, 4343 bp, Homo sapiens
  source 1..4343: mol_type = unassigned DNA
agcctattctgcaaacttggagttcttgtcaggcataggatttcactatttggcaatgatgcaacatcaattgtcaactgtcttcatattttgggtcagactttggatgcaaggacagtgatgaagactggcctggagagtgttaaaagtgcactcagagcttttctggacaacgctgcagaggatctggagaagaccatggaaaacctcaagcagggccagttcactcacacccgaaaccagcccaaaggggttactcagattatcaattacaccacagtggccctgctgccaatgctgtcttcattatttgaacatattggccagcatcagttcggagaagacctaatattggaagatgtccaggtgtcttgttatagaattctgactagcttatatgctttgggaaccagcaagagtatttacgtggagaggcaacgttctgcattaggagaatgtctagctgcctttgctggtgcttttcctgtagcatttttggaaactcatctggacaaacataatatttactccatctacaataccaagtcttcacgagaaagagcagctctcagtttgccaactaatgtggaagatgtttgtccaaacataccgtctttggagaaactcatggaagaaatcgtggaattagccgagtccggcattcgctacactcaaatgccacatgtcatggaagtcatactgcccatgctttgcagctacatgtctcgttggtgggagcatggacctgagaacaatccagaacgggccgagatgtgctgcacagccctgaactcagagcacatgaacacacttctagggaacatattgaaaatcatatataataacttggggattgatgagggagcctggatgaagaggctagcagtgttttcccagcctataataaataaagtgaaacctcagctcttgaaaactcatttcttgccgttaatggagaaactcaagaaaaaggcagctacggtggtgtctgaggaagaccacctgaaagctgaggccaggggggacatgtcggaggcagaactcctcatcctagatgagttcaccacactggccagagatctctatgccttctaccctctcttgattagatttgtggactataacagggcaaagtggctaaaggagcctaacccagaagcagaggagctcttccgcatggtggctgaagtgtttatctactggtcgaagtcccataatttcaaaagagaagagcagaacttcgttgtacagaatgaaatcaacaatatgtctttccttattactgataccaagtcaaagatgtcaaaggcagctgtttctgatcaggaaaggaagaaaatgaagcgcaaaggagatcggtattccatgcagacctctctgattgtagcagctctgaagcggttactgcccattgggttgaacatctgtgcccctggggaccaggagctcattgctctggccaaaaatcgatttagcctgaaagataccgaggatgaagtacgagatataatccgcagcaatattcatttacaaggcaagttggaggatcctgctattagatggcaaatggctctttacaaagacttaccaaacaggactgatgatacctcagatccagagaagacggtagaaagagtattggatatagcaaatgtgctttttcatcttgaacagaagtctaaacgtgtgggtcggagacattactgtctggtggaacatcctcagagatctaaaaaggctgtatggcataaactactgtccaagcagaggaaaagggctgttgtagcctgcttccggatggcccccttatataatctgccaaggcatcgggctgtcaatctctttcttcagggatatgaaaagtcttggattgaaacagaagaacattactttgaagataaactgatagaagatttagcaaaacctggggctgaacctccagaagaagatgaaggcactaagagagttgatcctctacatcagctgatccttctgtttagtcggacagctttaacagagaaatgcaaactggaggaagattttttatatatggcctatgcagatattatggcaaagagttgtcatgatgaggaagatgacgatggtgaagaggaagtgaagagttttgaacacgatattatcaaagatttaagaaacaaatttgccagcctcggcgagaactctctggaaaaagaaatggaaaagcaaaagcttctataccagcaagcccgactccacgatcgtggcgcggctgagatggtgctacagacaatcagtgccagcaaaggtgaaactggaccaatggtagcagctactctgaaacttggaattgctattttaaatggtgggaactccacagtacagcagaaaatgcttgactacctcaaggagaaaaaggatgtgggcttctttcagagcctggccggcctgatgcagtcatgtagtgtccttgacctaaatgcatttgagcgacaaaacaaagctgaaggtcttgggatggtgacagaggaaggatcaggagaaaaggttctgcaggacgatgagttcacctgtgacctcttccgattcctgcaactactctgtgagggacacaactcagattttcagaattatctgagaactcagactggcaataatacaactgtcaacataattatctccactgtagactacctactgagagttcaggaatcaattagtgacttttattggtattactctgggaaagatgttattgatgaacaaggacaacggaatttctccaaagctatccaagtggcaaaacaagtctttaacactcttacagagtatattcagggtccttgcactgggaatcaacagagtttggcacacagcaggctgtgggatgctgtggtcggctttcttcatgtgtttgcccatatgcagatgaagctgtcgcaggattccagtcaaattgagctattaaaagaattaatggatctgcagaaggatatggtggtcatgttgctgtccatgttagaaggtaatgttgttaatggaacgattggcaaacagatggtggatatgcttgtggaatcttccaacaacgtggagatgattctcaaattttttgacatgttcttaaaactaaaggatttgacgtcgtctgatacttttaaagaatatgaccccgatggcaagggagtcatttccaagagggacttccacaaagcgatggagagccataagcactacacgcagtcagaaacggaatttcttttgtcttgtgcggagacggatgagaatgaaaccctcgactacgaagagttcgtcaaacgcttccacgaacctgcgaaggacatcggcttcaacgtcgccgtccttctgacaaacctctctgagcacatgcccaacgatacccgacttcagacttttctggaattagcagagagcgtcctgaattatttccagccctttctgggccgcatcgaaatcatgggaagcgccaaacgcatcgagagggtctattttgaaatcagtgagtccagccgaacccagtgggagaagccccaggtcaaggagtccaaaagacagttcatatttgacgtggtcaacgaaggcggagagaaagagaagatggaactctttgtgaacttctgcgaggacaccatctttgaaatgcagctggcggctcagatctcggagtcggacttgaacgagaggtcagcgaataaggaagaaagcgagaaggagaggccggaagagcaggggccgaggatggctttcttctccattctgacggtcaggtcggccctgtttgcgctcaggtacaatatcttgacccttatgcgaatgctcagtctgaagagcctgaagaagcagatgaaaaaagtaaaaaagatgaccgtgaaggacatggtcacggccttcttttcatcctactggagtattttcatgaccctcttgcacttcgtggccagcgttttcagaggctttttccgcatcatttgcagcctgctgcttgggggaagcctcgtcgaaggtgctaaaaagatcaaagttgcagaactgttagccaacatgccagaccccactcaggatgaggttagaggagatggggaggagggagagaggaaacccctggaagccgccctgccctccgaggatctgaccgacttaaaggagctgacagaggaaagtgaccttctttcggacatctttggcctggatctgaagagagaaggaggacagtacaaactgattcctcataatccaaatgctgggctcagtgacctcatgagcaacccagtccccatgcctgaggtgcaggaaaaatttcaggtaatttatctagttttataaggaacagaagaaaaagaaga

SEQ ID NO: 27065 - DNA, 4536 bp, Homo sapiens
  source 1..4536: mol_type = unassigned DNA
tattgagaaacgatttgcctatagtttcctccaacaactcattcgctatgtggatgaagcccatcagtatatcctggagtttggtcgttcttcctttaattgatcagtatttcaaaaaccatcgtttatacttcttatctgcagcaagcagacctctctgctctggaggacatgcttccaacaaagagaaagaaatggtgactaggcaatgatgcaacatcaattgtcaactgtcttcatattttgggtcagactttggatgcaaggacagtgatgaagactggcctggagagtgttaaaagtgcactcagagcttttctggacaacgctgcagaggatctggagaagaccatggaaaacctcaagcagggccagttcactcacacccgaaaccagcccaaaggggttactcagattatcaattacaccacagtggccctgctgccaatgctgtcttcattatttgaacatattggccagcatcagttcggagaagacctaatattggaagatgtccaggtgtcttgttatagaattctgactagcttatatgctttgggaaccagcaagagtatttacgtggagaggcaacgttctgcattaggagaatgtctagctgcctttgctggtgcttttcctgtagcatttttggaaactcatctggacaaacataatatttactccatctacaataccaagtcttcacgagaaagagcagctctcagtttgccaactaatgtggaagatgtttgtccaaacataccgtctttggagaaactcatggaagaaatcgtggaattagccgagtccggcattcgctacactcaaatgccacatgtcatggaagtcatactgcccatgctttgcagctacatgtctcgttggtgggagcatggacctgagaacaatccagaacgggccgagatgtgctgcacagccctgaactcagagcacatgaacacacttctagggaacatattgaaaatcatatataataacttggggattgatgagggagcctggatgaagaggctagcagtgttttcccagcctataataaataaagtgaaacctcagctcttgaaaactcatttcttgccgttaatggagaaactcaagaaaaaggcagctacggtggtgtctgaggaagaccacctgaaagctgaggccaggggggacatgtcggaggcagaactcctcatcctagatgagttcaccacactggccagagatctctatgccttctaccctctcttgattagatttgtggactataacagggcaaagtggctaaaggagcctaacccagaagcagaggagctcttccgcatggtggctgaagtgtttatctactggtcgaagtcccataatttcaaaagagaagagcagaacttcgttgtacagaatgaaatcaacaatatgtctttccttattactgataccaagtcaaagatgtcaaaggcagctgtttctgatcaggaaaggaagaaaatgaagcgcaaaggagatcggtattccatgcagacctctctgattgtagcagctctgaagcggttactgcccattgggttgaacatctgtgcccctggggaccaggagctcattgctctggccaaaaatcgatttagcctgaaagataccgaggatgaagtacgagatataatccgcagcaatattcatttacaaggcaagttggaggatcctgctattagatggcaaatggctctttacaaagacttaccaaacaggactgatgatacctcagatccagagaagacggtagaaagagtattggatatagcaaatgtgctttttcatcttgaacagaagtctaaacgtgtgggtcggagacattactgtctggtggaacatcctcagagatctaaaaaggctgtatggcataaactactgtccaagcagaggaaaagggctgttgtagcctgcttccggatggcccccttatataatctgccaaggcatcgggctgtcaatctctttcttcagggatatgaaaagtcttggattgaaacagaagaacattactttgaagataaactgatagaagatttagcaaaacctggggctgaacctccagaagaagatgaaggcactaagagagttgatcctctacatcagctgatccttctgtttagtcggacagctttaacagagaaatgcaaactggaggaagattttttatatatggcctatgcagatattatggcaaagagttgtcatgatgaggaagatgacgatggtgaagaggaagtgaagagttttgaacacgatattatcaaagatttaagaaacaaatttgccagcctcggcgagaactctctggaaaaagaaatggaaaagcaaaagcttctataccagcaagcccgactccacgatcgtggcgcggctgagatggtgctacagacaatcagtgccagcaaaggtgaaactggaccaatggtagcagctactctgaaacttggaattgctattttaaatggtgggaactccacagtacagcagaaaatgcttgactacctcaaggagaaaaaggatgtgggcttctttcagagcctggccggcctgatgcagtcatgtagtgtccttgacctaaatgcatttgagcgacaaaacaaagctgaaggtcttgggatggtgacagaggaaggatcaggagaaaaggttctgcaggacgatgagttcacctgtgacctcttccgattcctgcaactactctgtgagggacacaactcagattttcagaattatctgagaactcagactggcaataatacaactgtcaacataattatctccactgtagactacctactgagagttcaggaatcaattagtgacttttattggtattactctgggaaagatgttattgatgaacaaggacaacggaatttctccaaagctatccaagtggcaaaacaagtctttaacactcttacagagtatattcagggtccttgcactgggaatcaacagagtttggcacacagcaggctgtgggatgctgtggtcggctttcttcatgtgtttgcccatatgcagatgaagctgtcgcaggattccagtcaaattgagctattaaaagaattaatggatctgcagaaggatatggtggtcatgttgctgtccatgttagaaggtaatgttgttaatggaacgattggcaaacagatggtggatatgcttgtggaatcttccaacaacgtggagatgattctcaaattttttgacatgttcttaaaactaaaggatttgacgtcgtctgatacttttaaagaatatgaccccgatggcaagggagtcatttccaagagggacttccacaaagcgatggagagccataagcactacacgcagtcagaaacggaatttcttttgtcttgtgcggagacggatgagaatgaaaccctcgactacgaagagttcgtcaaacgcttccacgaacctgcgaaggacatcggcttcaacgtcgccgtccttctgacaaacctctctgagcacatgcccaacgatacccgacttcagacttttctggaattagcagagagcgtcctgaattatttccagccctttctgggccgcatcgaaatcatgggaagcgccaaacgcatcgagagggtctattttgaaatcagtgagtccagccgaacccagtgggagaagccccaggtcaaggagtccaaaagacagttcatatttgacgtggtcaacgaaggcggagagaaagagaagatggaactctttgtgaacttctgcgaggacaccatctttgaaatgcagctggcggctcagatctcggagtcggacttgaacgagaggtcagcgaataaggaagaaagcgagaaggagaggccggaagagcaggggccgaggatggctttcttctccattctgacggtcaggtcggccctgtttgcgctcaggtacaatatcttgacccttatgcgaatgctcagtctgaagagcctgaagaagcagatgaaaaaagtaaaaaagatgaccgtgaaggacatggtcacggccttcttttcatcctactggagtattttcatgaccctcttgcacttcgtggccagcgttttcagaggctttttccgcatcatttgcagcctgctgcttgggggaagcctcgtcgaaggtgctaaaaagatcaaagttgcagaactgttagccaacatgccagaccccactcaggatgaggttagaggagatggggaggagggagagaggaaacccctggaagccgccctgccctccgaggatctgaccgacttaaaggagctgacagaggaaagtgaccttctttcggacatctttggcctggatctgaagagagaaggaggacagtacaaactgattcctcataatccaaatgctgggctcagtgacctcatgagcaacccagtccccatgcctgaggtgcaggaaaaatttcaggaacagaaggcaaaagaagaagaaaaggaagaaaaagaagaaaccaaatctgaacctgaaaaagccgagggagaagatgga

SEQ ID NO: 27066 - DNA, 16197 bp, Homo sapiens
  source 1..16197: mol_type = unassigned DNA
gatgatgaagtggttctgcagtgcaccgcaaccatccacaaagaacaacagaagctatgcttggcagcagaaggatttggcaacagactttgtttcttggagtccacttccaattccaagaatgtgcccccagacctctccatctgcacctttgtgctggagcagtccctctctgtccgggcgctgcaggagatgctggctaacaccgtggagaaatcagaagggcaagttgatgtggaaaaatggaaattcatgatgaagactgctcaaggtggtggtcatcgaacactcctctacggacatgccatattgctgcgccattcctatagtggcatgtatctgtgctgcctgtccacctcccggtcttcaactgataagctggcttttgatgttggcttgcaagaggacaccacaggggaggcttgttggtggaccatacaccctgcctctaagcagcgatcagaaggagaaaaagtacgagttggagatgacctcatcttagttagcgtgtcctctgaaaggtacttgcacttgtcttatggcaacggcagcttacacgtggatgccgctttccagcagactctctggagcgtggccccaatcagctcaggaagtgaggcagcccaagggtatctcattggtggtgatgtcctcaggttgctgcatggacacatggacgagtgtctcactgtcccttcaggagaacatggtgaagagcagcggagaactgttcattatgaaggtggcgctgtgtctgttcatgcacgttccctttggagactagagacgctaagagttgcgtggagtggaagccacataagatggggacagccattccgactacgccatgtcacaacaggaaaatacttgagtctcatggaagacaaaaaccttctactcatggacaaagagaaagctgatgtaaaatcaacagcatttaccttccggtcttccaaggaaaaattggatgtaggggtgagaaaagaagtagatggcatgggaacatctgaaataaaatacggtgactcagtatgctatatacaacatgtagacacaggcctatggcttacttaccagtctgtggacgtgaaatccgtgagaatgggatctatacaacgtaaggctattatgcatcatgaaggccacatggatgatggcataagtttgtcgagatcccagcatgaagaatcacgcacagcccgagttatccggagcacagtcttccttttcaatagatttataaggggccttgatgctctcagcaagaaagcgaaggcttccacagtcgatttgcctatagagtccgtaagcctaagtctgcaggatctcattggctacttccaccccccagatgagcatttagagcatgaagacaaacagaacagactacgagccctgaagaatcggcaaaatctcttccaggaagagggaatgatcaacctcgtgcttgagtgcatagaccgtttgcacgtctacagcagtgcagcacactttgctgatgttgctgggcgagaagcaggagagtcttggaaatccattctgaattctctgtatgagttgctggcggctctaattagaggaaatcgtaaaaactgtgctcaattttctggctccctcgactggttgatcagcagattggaaagactggaagcttcttcaggcattctggaagttttacactgtgttttagtagaaagtccagaagctctaaatattattaaagaaggacatattaaatctattatctcacttttagacaaacatggaagaaatcacaaggttctggatgtcttgtgctcactctgtgtttgccacggggttgcagtccgttctaaccagcatctcatctgtgacaatctcctaccaggaagagacttgttattgcagacacgtcttgtgaaccatgtcagcagcatgagacccaatatttttctgggcgtcagtgaaggttctgctcagtataagaaatggtactatgaattgatggtggaccacacagagccctttgtgacagctgaagcaactcacctgcgagtgggctgggcttccactgaaggatattctccctaccctggagggggcgaagagtggggtggaaatggtgttggagatgatctcttctcctatggatttgatggccttcatctctggtcaggttgtattgctcgtactgtaagctcaccaaaccaacatctgttaagaactgatgatgtcatcagttgctgtttagatctgagtgccccaagcatctcgttccgaattaatggacaacctgttcaaggaatgtttgagaatttcaacatcgatggcctcttctttccagtcgttagtttctctgcaggaataaaagtacgctttctgcttggagggcgacatggagaattcaaatttcttcctccacctgggtatgctccttgttatgaagctgttctgccaaaagaaaagttgaaagtggaacacagccgagagtacaagcaagaaagaacttacacacgcgacctgctgggccccacagtttccctgacgcaagctgccttcacacccatccctgtggataccagccagatcgtgttgcctcctcatctagaaagaataagagaaaaactggcagagaatatccatgaactctgggttatgaataaaattgagcttggctggcagtatggtccggttagagatgacaacaagagacaacacccatgcctggtggagttctccaagctgcctgaacaggagcgcaattacaacttacaaatgtcgcttgagaccctgaagactttgttggcattaggatgtcatgtgggtatatcagatgaacatgctgaagacaaggtgaaaaaaatgaagctacccaagaattaccagctgacaagtggatacaagcctgcccctatggacctgagctttatcaaactcaccccatcacaagaagcaatggtggacaagttggcagaaaatgcacataatgtgtgggcgcgggatcgaatccggcagggctggacttatggcatccaacaggacgtaaagaacagaagaaatcctcgccttgttccctacactcttctggatgaccgaaccaagaaatccaacaaggacagcctccgcgaggctgtgcgcacgctgctggggtacggctacaacttggaagcaccagatcaagatcatgcagccagagccgaagtgtgcagcggcaccggggaaaggttccgaatcttccgtgccgagaagacctatgcagtgaaggccggacggtggtattttgaatttgagacggtcactgctggagacatgagggttggttggagtcgtcctggttgtcaaccggatcaggagcttggctcagatgaacgtgcctttgcctttgatggcttcaaggcccagcggtggcatcagggcaatgaacactatgggcgctcttggcaagcaggcgatgtcgtggggtgtatggttgacatgaacgaacacaccatgatgttcacactgaatggtgaaatccttcttgatgattcaggctcagaactggctttcaaggactttgatgttggcgatggattcatacctgtgtgtagccttggagtggctcaagtgggtaggatgaactttggaaaggatgtcagcaccttgaaatatttcaccatctgtggcttacaagagggctatgaaccatttgccgttaatacaaacagggatattaccatgtggctgagcaagaggcttcctcagtttcttcaagttccatcaaaccatgaacatatagaggtgaccagaatagacggcaccatagacagttccccatgtttaaaggtcactcagaagtcttttggttctcagaacagcaacactgatatcatgttttatcgcctgagcatgccgatcgagtgcgcggaggtcttctccaagacggtggctggagggctccctggggctggcctttttgggcccaagaatgacttggaagattatgatgctgattctgactttgaggttctgatgaagacagctcatggccatctagtgcccgatcgtgttgacaaagacaaagaagctactaaaccagagtttaacaaccacaaagattatgcccaggaaaagccctctcgtctgaaacaaagatttttgcttagaagaacaaagccagattacagcacaagccattctgcaagactcaccgaagatgtccttgctgatgatcgggatgactatgatttcttgatgcaaacgtccacgtactattactcagtgagaatctttcctggacaagaacctgctaatgtctgggtgggctggattacatcagatttccatcagtatgacacaggctttgacttggacagagttcgcacagtaacagttactctaggagatgaaaaaggaaaagtgcatgaaagcatcaaacgcagcaactgctatatggtatgtgcgggtgagagcatgagccccgggcaaggacgcaacaataatggactggagattggctgtgtggtggatgctgccagcgggctgctcacattcattgccaatggcaaggaactgagcacatactatcaggtggaaccgagtacaaaattatttcctgcggtttttgcacaagctacaagtcccaatgttttccagtttgagttgggaagaataaagaatgtgatgcctctctcggcgggattattcaagagtgagcacaagaaccccgtgccgcagtgccccccgcgcctccacgtgcagttcctgtcacacgtcctgtggagcagaatgcccaaccagtttttgaaggtagatgtgtctcgaataagtgaacgccaaggctggttggtgcagtgtttggatcctctgcagttcatgtctcttcatatccctgaggaaaacagatctgttgacatcttagagttgacagagcaggaggaattgctgaaatttcactatcacactctccggctctactcagccgtctgtgctcttgggaaccaccgggtggcccatgccctgtgcagccatgtggatgaacctcagctcctctatgccattgagaacaagtacatgcctggtttgctgcgtgctggctactatgacctgctgattgacatccacctgagctcctatgccactgccaggctcatgatgaacaacgagtacattgtccccatgacggaggagacgaagagcatcaccctgttccctgatgagaacaaaaaacacggccttccagggatcggcctcagcacctccctcaggccacggatgcagttttcctcccccagttttgtaagcattagtaatgaatgttaccagtacagtccagagttcccactggacatcctcaagtccaaaaccatacagatgctgacagaagctgttaaagagggcagtcttcatgcccgggacccagttggagggactactgaattcctctttgtacctctcatcaagcttttctataccctgctgatcatgggcatctttcacaacgaggacttgaagcacatcttgcagttgattgagcccagtgtgtttaaagaagctgccactccggaggaggagagtgacacgctggagaaagagctcagtgtggacgatgcaaagctgcaaggagctggtgaggaagaagccaaggggggcaagcggcccaaggaaggcctgctccaaatgaaactgccagagccagttaaattgcagatgtgcctactgcttcagtacctctgtgactgccaggtccggcaccggatagaagccattgtagccttttcagatgattttgtggctaagctccaagacaatcaacgtttccgatacaacgaagtcatgcaagccttaaacatgtcagctgcactcacagccaggaagacaaaggaatttagatcaccacctcaagaacagatcaatatgcttctcaattttaaggatgacaaaagtgaatgtccatgtccagaagaaattcgtgaccaactattggatttccatgaagatttgatgacacattgtggaattgagctggatgaagatgggtctctggatggaaacagtgatttaacaattagagggcgtctgctatccctggtagaaaaggtgacatatctgaagaagaagcaagcagaaaaaccagttgagagtgactccaaaaagtcctccactctgcagcagctgatttctgagaccatggtccgatgggctcaggagtctgtcattgaagaccccgagctggtgagggccatgtttgtgttgctccatcggcagtatgacggcattgggggtcttgttcgggccctgccaaagacctacacgataaatggtgtgtccgtggaggacaccatcaacctgctggcatcccttggtcagattcggtccctgctgagtgtgagaatgggcaaagaagaagagaagctcatgattcgtggattaggggatattatgaataacaaagtgttttaccagcaccctaatctcatgagggcactggggatgcacgagactgtgatggaggtcatggtgaacgtccttggaggtggagagtccaaggaaatcacctttcccaagatggtggccaactgttgccgttttctctgttacttctgtcgtataagtaggcagaatcaaaaagctatgtttgatcatctcagttatttactggaaaacagcagtgttggtcttgcctccccagctatgagaggttcaacaccactggatgtggctgcagcttcggtgatggataataatgaactagcattagctctgcgtgagccggatctagaaaaggtagttcgttatttggctggttgtggactgcaaagttgccagatgctggtgtctaagggctatccagacattgggtggaacccagttgaaggagagagatatcttgactttcttagatttgctgtcttctgtaatggggagagtgtggaggaaaatgcaaatgtcgtggtgagattgctcattcggaggcctgagtgttttggtcctgctttgagaggagaaggtgggaatgggcttcttgcagcaatggaagaagccatcaaaatcgccgaggatccttcccgagatggtccctcaccaaatagcggatccagtaaaacacttgacacagaggaggaggaagatgacactatccacatggggaacgcgatcatgaccttctattcagctttgattgacctcttgggacgctgtgctcctgagatgcatttgattcatgccgggaagggagaagccatcagaattaggtccattttgagatccctcattcccctgggagatttggtgggcgttatcagcatcgcttttcagatgccaacaatagccaaagatgggaatgtggtggaacctgacatgtctgcggggttttgcccagatcacaaggcagccatggttttattccttgacagggtctatgggattgaggttcaagacttcctcctccatcttcttgaggttggctttctgccagatctccgggcggctgcttctttagatacggcagctttgagtgctacagacatggccttggccctcaatcggtacctttgcacagccgtcttgccattgttaacaagatgtgctcctctctttgctggcacagagcaccacgcttctctcattgactcattacttcatactgtgtatagactttctaagggctgttcacttaccaaagctcagcgggattccatagaagtttgtttactctctatttgtggacaactgagaccttctatgatgcagcacttactcagaagattagtatttgatgttccattattaaatgaacacgcaaagatgcctcttaaactgctgacaaatcattatgaaagatgctggaaatattactgcctgcctggagggtggggaaactttggtgctgcctcagaagaagaacttcatttatcaagaaagttgttctggggcatttttgatgccctgtctcaaaagaaatatgaacaagaacttttcaaactggcactgccttgcctgagtgcagttgcgggagctttgcctccagactacatggagtcaaattatgtcagtatgatggaaaaacagtcatcaatggattctgaagggaactttaacccacaacctgttgatacctcaaatattacaattcctgagaaattggaatacttcattaacaaatatgcagaacactcccatgacaaatggtcaatggacaagttggcaaatggatggatttatggagaaatatattcagactcttctaaggttcagccattaatgaagccatataagctattgtctgaaaaggaaaaagaaatttatcgctggccaatcaaagaatctttaaaaactatgctggcttggggctggagaattgaaagaactcgggagggagacagcatggccctttacaaccggactcgtcgtatttctcagacaagccaggtttctgtggacgctgcccatggttacagtccccgggccattgacatgagcaatgttacactatctagagacctgcatgctatggcagaaatgatggctgaaaactaccataatatatgggcaaagaaaaagaaaatggagttggagtccaaaggaggaggaaaccatcctctgctggtgccctatgatacactgacagccaaagagaaagccaaggatagagaaaaagcacaggacatcctcaagttcttgcagatcaatggatatgctgtatccagaggatttaaggacctggaactggacacgccttctattgagaaacgatttgcctatagtttcctccaacaactcattcgctatgtggatgaagcccatcagtatatcctggagtttgatggtggcagcagaggcaaaggagaacatttcccttatgaacaagaaatcaagttctttgcaaaagtcgttcttcctttaattgatcagtatttcaaaaaccatcgtttatacttcttatctgcagcaagcagacctctctgctctggaggacatgcttccaacaaagagaaagaaatggtgactagcctattctgcaaacttggagttcttgtcaggcataggatttcactatttggcaatgatgcaacatcaattgtcaactgtcttcatattttgggtcagactttggatgcaaggacagtgatgaagactggcctggagagtgttaaaagtgcactcagagcttttctggacaacgctgcagaggatctggagaagaccatggaaaacctcaagcagggccagttcactcacacccgaaaccagcccaaaggggttactcagattatcaattacaccacagtggccctgctgccaatgctgtcttcattatttgaacatattggccagcatcagttcggagaagacctaatattggaagatgtccaggtgtcttgttatagaattctgactagcttatatgctttgggaaccagcaagagtatttacgtggagaggcaacgttctgcattaggagaatgtctagctgcctttgctggtgcttttcctgtagcatttttggaaactcatctggacaaacataatatttactccatctacaataccaagtcttcacgagaaagagcagctctcagtttgccaactaatgtggaagatgtttgtccaaacataccgtctttggagaaactcatggaagaaatcgtggaattagccgagtccggcattcgctacactcaaatgccacatgtcatggaagtcatactgcccatgctttgcagctacatgtctcgttggtgggagcatggacctgagaacaatccagaacgggccgagatgtgctgcacagccctgaactcagagcacatgaacacacttctagggaacatattgaaaatcatatataataacttggggattgatgagggagcctggatgaagaggctagcagtgttttcccagcctataataaataaagtgaaacctcagctcttgaaaactcatttcttgccgttaatggagaaactcaagaaaaaggcagctacggtggtgtctgaggaagaccacctgaaagctgaggccaggggggacatgtcggaggcagaactcctcatcctagatgagttcaccacactggccagagatctctatgccttctaccctctcttgattagatttgtggactataacagggcaaagtggctaaaggagcctaacccagaagcagaggagctcttccgcatggtggctgaagtgtttatctactggtcgaagtcccataatttcaaaagagaagagcagaacttcgttgtacagaatgaaatcaacaatatgtctttccttattactgataccaagtcaaagatgtcaaaggcagctgtttctgatcaggaaaggaagaaaatgaagcgcaaaggagatcggtattccatgcagacctctctgattgtagcagctctgaagcggttactgcccattgggttgaacatctgtgcccctggggaccaggagctcattgctctggccaaaaatcgatttagcctgaaagataccgaggatgaagtacgagatataatccgcagcaatattcatttacaaggcaagttggaggatcctgctattagatggcaaatggctctttacaaagacttaccaaacaggactgatgatacctcagatccagagaagacggtagaaagagtattggatatagcaaatgtgctttttcatcttgaacagaagtctaaacgtgtgggtcggagacattactgtctggtggaacatcctcagagatctaaaaaggctgtatggcataaactactgtccaagcagaggaaaagggctgttgtagcctgcttccggatggcccccttatataatctgccaaggcatcgggctgtcaatctctttcttcagggatatgaaaagtcttggattgaaacagaagaacattactttgaagataaactgatagaagatttagcaaaacctggggctgaacctccagaagaagatgaaggcactaagagagttgatcctctacatcagctgatccttctgtttagtcggacagctttaacagagaaatgcaaactggaggaagattttttatatatggcctatgcagatattatggcaaagagttgtcatgatgaggaagatgacgatggtgaagaggaagtgaagagttttgaagaaaaagaaatggaaaagcaaaagcttctataccagcaagcccgactccacgatcgtggcgcggctgagatggtgctacagacaatcagtgccagcaaaggtgaaactggaccaatggtagcagctactctgaaacttggaattgctattttaaatggtgggaactccacagtacagcagaaaatgcttgactacctcaaggagaaaaaggatgtgggcttctttcagagcctggccggcctgatgcagtcatgtagtgtccttgacctaaatgcatttgagcgacaaaacaaagctgaaggtcttgggatggtgacagaggaaggatcaggagaaaaggttctgcaggacgatgagttcacctgtgacctcttccgattcctgcaactactctgtgagggacacaactcagattttcagaattatctgagaactcagactggcaataatacaactgtcaacataattatctccactgtagactacctactgagagttcaggaatcaattagtgacttttattggtattactctgggaaagatgttattgatgaacaaggacaacggaatttctccaaagctatccaagtggcaaaacaagtctttaacactcttacagagtatattcagggtccttgcactgggaatcaacagagtttggcacacagcaggctgtgggatgctgtggtcggctttcttcatgtgtttgcccatatgcagatgaagctgtcgcaggattccagtcaaattgagctattaaaagaattaatggatctgcagaaggatatggtggtcatgttgctgtccatgttagaaggtaatgttgttaatggaacgattggcaaacagatggtggatatgcttgtggaatcttccaacaacgtggagatgattctcaaattttttgacatgttcttaaaactaaaggatttgacgtcgtctgatacttttaaagaatatgaccccgatggcaagggagtcatttccaagagggacttccacaaagcgatggagagccataagcactacacgcagtcagaaacggaatttcttttgtcttgtgcggagacggatgagaatgaaaccctcgactacgaagagttcgtcaaacgcttccacgaacctgcgaaggacatcggcttcaacgtcgccgtccttctgacaaacctctctgagcacatgcccaacgatacccgacttcagacttttctggaattagcagagagcgtcctgaattatttccagccctttctgggccgcatcgaaatcatgggaagcgccaaacgcatcgagagggtctattttgaaatcagtgagtccagccgaacccagtgggagaagccccaggtcaaggagtccaaaagacagttcatatttgacgtggtcaacgaaggcggagagaaagagaagatggaactctttgtgaacttctgcgaggacaccatctttgaaatgcagctggcggctcagatctcggagtcggacttgaacgagaggtcagcgaataaggaagaaagcgagaaggagaggccggaagagcaggggccgaggatggctttcttctccattctgacggtcaggtcggccctgtttgcgctcaggtacaatatcttgacccttatgcgaatgctcagtctgaagagcctgaagaagcagatgaaaaaagtaaaaaagatgaccgtgaaggacatggtcacggccttcttttcatcctactggagtattttcatgaccctcttgcacttcgtggccagcgttttcagaggctttttccgcatcatttgcagcctgctgcttgggggaagcctcgtcgaaggtgctaaaaagatcaaagttgcagaactgttagccaacatgccagaccccactcaggatgaggttagaggagatggggaggagggagagaggaaacccctggaagccgccctgccctccgaggatctgaccgacttaaaggagctgacagaggaaagtgaccttctttcggacatctttggcctggatctgaagagagaaggaggacagtacaaactgattcctcataatccaaatgctgggctcagtgacctcatgagcaacccagtccccatgcctgaggtgcaggaaaaatttcaggaacagaaggcaaaagaagaagaaaaggaagaaaaagaagaaaccaaatctgaacctgaaaaagccgagggagaagatggagaaaaagaagagaaagccaaggaagacaagggcaaacaaaagttgaggcagcttcacacacacagatacggagaaccagaagtgccagagtcagcattctggaagaaaatcatagcatatcaacagaaacttctaaactattttgctcgcaacttttacaacatgagaatgttagccttatttgtcgcatttgctatcaatttcatcttgctcttttataaggtctccacttcttctgtggttgaaggaaaggagctccccacgagaagttcaagtgaaaatgccaaagtgacaagcctggacagcagctcccatagaatcatcgcagttcactatgtactagaggagagcagcggctacatggagcccacgttgcgtatcttagctattctgcacacggtcatttctttcttctgcatcattggatactactgcttgaaagtcccattggttatttttaagcgagaaaaggaagtggcacggaaattggaatttgatgggctttatattacagaacagccttcagaagatgatattaaaggccagtgggatagactcgtaatcaacacacagtcatttcccaacaactactgggacaaatttgttaaaagaaaggttatggataaatatggagagttctacggccgagacagaatcagtgaattacttggcatggacaaggcagctctggacttcagtgatgccagagaaaagaagaagccaaagaaagacagctccttatcagctgtactgaactccattgatgtgaagtatcagatgtggaaactaggagtcgttttcactgacaactccttcctctacctagcctggtatatgactatgtctgttcttggacactataacaactttttttttgccgctcaccttctcgacattgctatgggattcaagacattaagaaccatcttgtcctcagtaactcacaatggcaaacagctcgtattaaccgttggcttattagctgttgttgtatacctatacactgtggtggcattcaattttttccgaaaattctacaataaaagtgaagatggtgatacaccagatatgaaatgtgacgatatgctaacatgctatatgttccacatgtatgttggagttcgtgctggaggagggatcggggatgaaatcgaagacccagcaggagatgaatatgagatctatcgaatcatctttgacatcactttcttcttctttgttattgtcattctcttggccataatacaaggtctaattattgatgcttttggagaactaagagaccaacaggaacaagtcaaagaagacatggagaccaaatgcttcatctgtgggataggcaatgattacttcgacacagtgccacatggctttgaaacccacactttacaggagcacaacttggctaattacttgttttttctgatgtatcttataaacaaagatgaaacagaacacacaggacaggaatcttatgtctggaagatgtatcaagaaaggtgttgggaatttttcccagcaggggattgcttccggaaacagtatgaagaccagctaaattaaactcagacccaatcacctctaaaaaccaaaaccctacccctctctctccctctctcaatttctctgctctcttggaaacattttgctgattttgtgaattgccagcgttgtgtgttttctgggagcatcgaagctctgtttcggaagagctgtttcctccccccaccttttgtatttactttgagactaaagactgaagaataatctaaattcatactcagacaaaaaaaggaattctggaaagaaaaccattctggacactgtcataacacacatagatagattttcttctgagactcccggagtcttctcgagctacgagaccttcacagagacacgtggcagccacactcacccagcctctttatttcaccatcctggaaggaaactgtctgtctaatggtcacagagcactgtagcacttaacagattgccatggacaccagttgcgaagggaaatagtgccttactatatgtgggttgagctatgcagaagatacgtgcatgaaaaaacatctttattttctttatgtcgacctttcttttcttagattgattttgtgaggttttttttttttcctttagtcttttctttagtgggggagggtaagaaaagcagtttgcacttaaaaagaaaaaaaaaaaacgggtggtgtgtctcaggacaaaaggaggctcttctcattcagctaaattcacatttgccccccccccccgcccccgcccccatatgctcctgctattattttggtaatgctctgatgcaacattgcaactttatgaaatctttgtatgaaaacaaaaagactgcaaaaaatacactttcaaaagaaaccattcattgcatgtttattatgcaagtttaaatgaacaaagaaaaccttcagaaacaagttgatcaacgtgagagaaatttcatgataattattcatagtaataaagtgtcgtgggcttaattgtatatctggagccagtgtcatccaccaacaatgtgatacaatatgaacttgacagtagttttgggttttgctcattctttcagccacctgtgatcagttttgttgattaaggacttcttgtcaggccattttttaatatcaaagctgaagcaatatccattcagggatttcatcagttgcatcacaaaacacggatgataatatacatcactccattttttccattttgagtccttttaaatgtaatgctaacctttacaattaaaaagtcagattcagaatggaaacaaggtcattttgcaaacattggagctcttttattacaagtctgcttgttaattttagaactgtaaaaccgctctgattaaactatttaactaac

SEQ ID NO: 27067 - DNA, 15473 bp, Homo sapiens
  source 1..15473: mol_type = unassigned DNA
atggctgagctaggtggtggtggtgaagaggatgcaagatggtacaggaaggaggatgaagtggtactccagtgcatcgccaccattcataaggagcagaggaagttctgcctggcagccgagggacttgggaatcgcctgtgcttcttggaacccacttcagaagccaagtacattcctccagatctctgcgtctgcaattttgtgctggaacagtccctatctgtcagagccctgcaggaaatgcttgccaacacaggtgaaaatggcggcgaaggggcagcacaaggaggtggccacaggaccctgttatacggccatgcagttctcctgaggcactctttcagcggaatgtatctaacatgcttgactacatcaagatcccagacagacaaacttgcctttgatgtaggtctacgggaacatgccacaggagaagcctgttggtggactatacatcctgcttccaaacagaggtccgaaggagagaaagttcgaattggcgatgacctcatcctcgtcagcgtgtcctctgaaagataccttcatctctcagtatcaaatggtaacatacaagtggatgcctcctttatgcaaacactctggaatgtacatcctacgtgctcaggaagtagcatcgaagaaggatacctacttggtgggcatgtagtacgtcttttccatggtcatgatgaatgtttgacgataccatctacagaccagaatgattcccagcacaggaggatattctacgaagctgggggagctgggactcgagccaggtctctttggagagtggaaccccttcggataagctggagtggcagtaacatcagatggggccaggctttccgactccggcatctcaccacaggccactacctggccttgacagaagaccaaggccttatactgcaagaccgggcaaagtcagacaccaagtccacagctttctctttccgggcatcaaaggaactcaaggagaaattagactccagtcacaagcgagacatagaaggcatgggagttccagaaatcaagtatggagattctgtctgctttgtgcagcatatagccagtggtctgtgggtgacctacaaagcacaagacgccaaaacttcccgcctgggacctctaaaaagaaaggtcatactccatcaggaaggccacatggatgatggattaacactgcagagatgccagcgtgaggagtcccaggctgctcggatcatccggaacactacagccttattcagccagtttgtcagcggaaacaatcgcacagctgcccccatcaccctgcctatagaagaagtcctgcagaccctacaggacttgatcgcctacttccagcccccagaggaggagatgcgacatgaagacaagcagaacaagctccgctcactcaaaaacagacaaaatcttttcaaggaagagggaatgttggcccttgtcttaaattgcattgaccgcttaaatgtctacaatagcgtagcacactttgcagggattgcaagggaagagagtggcatggcctggaaagaaattctgaacctcctctacaaattgctggctgctctcattcgcggaaacagaaacaattgcgctcaattctccaataaccttgattggctcatcagtaaattggacagactagaatcttcctcaggtatcttggaagttttgcactgcatcttaactgaaagcccagaagccttaaatctgatagcggagggccacatcaagtcgatcatctccctgttggataagcacgggcggaatcacaaggttctggatatcctgtgctccctctgtctctgcaatggggttgcagtgagagccaaccagaatctgatctgtgacaacttgctgccccggagaaacctactcctgcagacacgactgattaacgatgtaaccagtatccggccaaacatcttcctgggagtcgcggagggctcagcccagtacaagaagtggtacttcgagctgattatcgaccaggtggaccccttcctaacagcagagcccacacatctgcgggtgggctgggcctcttcttcaggctatgccccatacccaggaggtggagaaggatggggaggcaatggtgttggtgacgacctgtactcctatggctttgatggacttcacctttggtcaggccggatacccagagctgtggcttccatcaaccagcacctcctgagatcggatgacgtggtaagctgctgcctggacctcggggtgcccagcatctcattccgcatcaatgggcagcccgtgcaggggatgtttgagaacttcaacacagacgggctcttcttccctgtgatgagcttttcagcaggtgtcaaagtacgtttcctgatgggtggacgtcatggagagtttaagttcctgcctccctctggctatgccccttgctatgaagccttacttccaaaagagaagatgagattggagcctgtcaaagaatataaacgtgatgctgatggcattagagatctcttgggtaccacccagttcctctcccaagcctctttcatcccatgccccgtagacaccagtcaggttattttgccacctcacctagaaaagatccgagacagactagctgaaaacatccatgagctttggggaatgaataaaatagaacttggctggactttcggcaagatacgagatgacaataaaagacaacacccttgccttgtggagttttcaaagctcccagaaactgagaagaactataacctgcaaatgtcaactgaaaccttaaaaaccctcttggccctggggtgccacattgctcatgttaacccagctgctgaggaggatctcaagaaggtcaaactgcccaaaaactatatgatgtccaacggctataagccagcccctttggatttgtctgatgtgaagctgttacctcctcaagaaattttagtggataagcttgcagaaaatgcacacaatgtttgggcaaaagacagaataaaacaaggatggacctatggcatccaacaggatttgaagaacaaaagaaatccccgtctggtgccatatgcattactggatgagcgtaccaagaagtcaaacagggacagcctgcgggaagctgtgcgcacttttgttggttacgggtataacattgagccatcagaccaagaactagctgactcggctgtggagaaggtcagcatagacaagatccgatttttccgggtagagcgatcttatgcagtgagatctggaaagtggtattttgagtttgaagtggtgactggaggagacatgcgagtcggctgggcgaggccaggctgtcgacctgatgtcgagctgggggccgatgaccaagcctttgtgtttgaaggcaacaggggccagcgttggcatcaaggaagtgggtattttgggcgtacctggcagccaggggatgtggtcggatgtatgattaacctggatgatgcttcaatgatcttcacactgaatggggagctgctgatcaccaacaaaggctctgaacttgccttcgctgactacgagattgagaatggcttcgtgcccatctgctgtctgggtctatctcagatcggccgcatgaatctcgggacagatgccagtaccttcaagttttataccatgtgcggtctccaagagggctttgagccttttgctgtcaacatgaacagagatgttgctatgtggttcagcaagcgcctcccgacgtttgtcaacgtgccaaaggatcatccacacatagaggtcatgaggattgatggcaccatggacagccctccgtgtctcaaggtgacgcataagacatttggcacacagaatagcaatgccgacatgatctattgccgcttgagcatgcctgtcgagtgccactcctccttcagccacagcccctgtctggacagtgaagctttccagaaaaggaaacagatgcaagaaatactctctcatacaacaacacagtgctactacgccatccgcatctttgctggacaggatccatcctgtgtctgggtcggatgggtgactccagactatcacttgtacagtgaaaagtttgacctgaataaaaactgcacagtgactgtcaccctaggggatgaaagaggccgggtccatgaaagtgtgaaacgcagcaactgctacatggtctggggtggagacattgtagccagttcccagagatcaaatcggagcaacgtggacctggagatcggctgtctcgtggatctggccatgggcatgttgtccttctcagccaatggaaaggaactgggcacctgctaccaggtggagcctaataccaaagtgtttccagcagtcttcctgcagcctacaagtacttctttgtttcagtttgaacttggaaagctgaagaacgcaatgcccctgtcagcggccatattcaggagtgaagagaagaacccagtcccacagtgtccacctcggctggacgtccaaaccatccagcccgtgctctggagccgcatgcccaacagcttcctgaaggtggagaccgagcgtgtgagcgagcgccacggctgggtggtgcagtgcctggagcccctgcagatgatggcgctccacatccccgaggagaacaggtgtgtggatatcctggagctctgtgagcaggaggacctgatgcggttccattaccacacgctgaggctctacagcgcggtgtgcgccctgggaaacagccgcgtggcctacgccctgtgcagccacgtggacctctcccagctcttctatgccattgacaacaagtacctccccggcctccttcgatctggtttctatgacctgctcatcagcatccacctggccagcgccaaggagaggaagctgatgatgaagaacgagtacatcatccccattaccagcaccaccaggaatatccgcctcttcccggacgagtccaagaggcatggactgcctggggtgggcctgagaacatgtctcaagcccgggttcaggttctccaccccttgctttgttgtgactggtgaggatcaccaaaagcagagccccgagattcccttggagagtctcaggacgaaggctctgagtatgctgacagaggcagtgcagtgcagcggggcccacatccgagaccctgtaggggggtctgtggagttccagtttgtgcctgtgctgaaactcattggaaccctgctggtcatgggcgtgtttgatgatgatgatgttcggcagatcctcctcctgattgatccctctgtgtttggggagcatagtgcggggacagaggagggagcagaaaaggaggaagtgacccaggtggaggagaaggctgtggaggctggggagaaggccggcaaggaggctcctgtcaaaggcttgttgcagactcgattacccgaatccgtcaagctgcagatgtgtgagctcctcagctatctctgcgactgtgagctgcagcaccgagtggaggccattgtggcatttggtgacatttatgtctccaagctgcaggcaaatcagaagttccgctacaatgagctcatgcaggccctgaacatgtctgcggccctgactgcccggaagaccaaggagttccgctcacccccacaggagcagatcaacatgctgcttaactttcaactgggagagaactgcccctgcccagaggagattcgggaggagctgtatgatttccatgaggaccttctccttcactgtggggttcctttggaagaagaggaagaggaggaggaggacacctcctggacaggaaaactctgtgccttggtttacaaaatcaaaggcccacccaagccagagaaggagcagccgacggaggaggaggagagatgccccacaacattgaaggaactcatctcacagacgatgatctgctgggcccaggaggaccagatccaggattcagagctggtccgaatgatgttcaacctcctccggaggcagtatgacagcattggggagctgctgcaggcgctgcggaagacctacaccatcagccacacctctgtaagcgacaccatcaacctgctggctgccctgggccaaatccgctccctcctcagtgtcaggatgggcaaggaagaggagttgctcatgatcaatgggctgggagacataatgaacaacaaggtgttttaccagcatcccaacctcatgagagtcctgggcatgcacgagacggtgatggaggtgatggtgaacgtgttgggtacagagaaatctcagattgcatttccaaagatggttgctagctgctgccgtttcctttgctatttctgtcgaattagccggcaaaatcagaaggccatgtttgagcatctgagttatcttctggagaatagcagtgttggcctagcctccccgtcgatgaggggatccaccccgctggatgtggcagcttcctctgtgatggacaacaatgagttagcgctgagcttagaggaaccagacctcgagaaggtggtgacctacttggcaggctgtggcctacagagctgccccatgcttctggccaaaggataccctgatgtcggctggaaccccattgaaggggaacgctacctgtccttcctgaggtttgctgtcttcgtgaacagtgagagtgtggaagaaaacgccagcgttgtggtcaagctgctcatcagacgcccagagtgcttcggcccggccctgcggggtgaggggggaaacgggctcttggcagccatgcagggtgccattaagatctctgagaacccagcgctcgacctcccctctcaaggatacaaaagagaagtcagcacgggggacgatgaagaggaagaagaaatcgtgcatatgggcaatgcaattatgtcattttattcggcccttatagatctactgggccgctgtgctcctgaaatgcacctcatccagacaggaaagggggaagccatccgcatcaggtccatcctgcgctccctggtccccacagaagacctggttgggatcatcagcatccccttgaaactgccctccctcaacaaagatgggtcggtcagtgagccagatatggcggccaatttctgccctgaccacaaggcacctatggtgctgttcttggaccgcgtttatggcattaaggatcaaacttttctgctccacttgctggaggttggatttttacctgacctaagagcttctgcctctctagatacagtttccctaagcaccacagaggctgcgcttgcactaaataggtatatatgttctgctgtgctcccgctcctcacaagatgtgcccctctctttgccggaacagaacactgcacctctctgattgattccacactgcagacaatatacaggctatccaagggacgttccctcaccaaagcacaaagggacactatagaagaatgtttgcttgccatttgcaatcacttgaggccttccatgttacagcaactcctgcgacgcctcgtttttgatgtgccgcaactcaatgaatactgcaaaatgcctctcaagcttctgacgaatcactatgaacagtgttggaagtattactgcctgccttcaggatgggggagctacgggctagctgtggaagaagagctgcacctaacggagaagcttttctgggggatttttgactcgctctcccataagaaatatgacccagatcttttccgaatggccctgccttgtctcagtgctatagctggggccttgccaccagattatttagataccagaatcacagccacgttggagaaacagatctcagtggatgcggatggcaactttgacccaaaacctattaacaccatgaatttttccttgcctgaaaaattggaatacatcgtcaccaagtatgctgagcattcacatgataaatgggcctgtgacaagagtcagagtggatggaaatatgggatttccctggatgaaaatgtgaagacccacccactgataaggcctttcaagacattaacggagaaggagaaggaaatttatcgctggcctgcgcgagagtccctgaaaaccatgctggctgtgggctggactgtggagaggaccaaagagggagaagctttggttcaacagcgggaaaatgagaagcttcgaagtgtgtcccaggccaaccagggcaacagctacagtcctgctcccctcgacctctcaaacgttgtgctctccagagagctccagggaatggtggaggtcgtggctgagaactatcacaatatctgggccaagaagaagaagctggagctggagagcaaaggtggtggcagccaccctcttctggtaccatatgacaccttgactgccaaggaaaagttcaaggaccgggagaaggcacaggacctgtttaagttcctccaagtgaatggcatcatagtttccaggggtatgaaggatatggagctggatgcctcctccatggagaagaggtttgcctataagttcttgaagaagatcctgaaatacgttgattctgctcaagaatttattgcccatttagaagccattgtcagcagtgggaaaactgaaaagtctccccgtgaccaggagatcaaattctttgccaaagttctcctcccgctggttgaccagtacttcaccagtcattgcctctacttcttgtcatcccctctgaagccccttagcagcagcggatatgcctcccataaggagaaagaaatggtggccggcctgttctgcaaacttgccgctctcgttagacacagaatttccctctttggtagtgattctactacaatggtgagctgtcttcacatcttagctcagacacttgacacaaggactgtcatgaagtcaggctcagagctggtgaaggctgggttacgagcattctttgaaaatgctgcagaagatttggagaagacttcagaaaacctgaaacttgggaagttcacccattcccgaacgcagattaaaggcgtttctcagaatattaactacactacagtggctctgctccccatcctgacgtccatctttgagcacgtcactcagcatcagtttggaatggatctactcttgggtgatgtgcagatttcatgctaccacatactgtgcagcctctactcccttgggacgggaaagaacatttatgttgaaaggcaacgccctgcccttggagaatgtctggcctcgctggcagctgccataccagtggcattcctggagcccacccttaatcgctacaatccactctcggtcttcaacaccaaaacccccagggagaggtctattctggggatgccagacacggtagaagacatgtgtcctgacatcccccagctggaaggcctgatgaaggaaatcaacgacctggccgagtcaggggcccggtacacagagatgccccatgtcatcgaggtgatcttacccatgctctgcaactacttgtcctactggtgggagcggggtcctgagaacctgccccccagcacagggccatgctgcaccaaggtcacctctgaacacctcagtctcatcctgggcaacattctgaaaatcatcaacaacaacctgggcatcgatgaggcctcctggatgaagcgcattgcagtgtatgcacagcccatcatcagcaaagccaggcccgacctgctgagaagccacttcatcccaactctggagaagctgaagaaaaaggctgtcaagacggtgcaggaggaggagcagttgaaagccgatggcaaaggggacacccaggaggcagaactcctcatcctggacgagttcgcggtcctctgcagagatctctatgccttctaccccatgctgatccgctacgtggacaacaacagatctaactggctgaaaagtcctgatgctgattctgaccagctcttccgcatggtggcagaagtcttcattctgtggtgtaaatctcataacttcaagagagaagagcaaaattttgtgattcagaatgaaattaataatttggcatttttaactggagacagcaaaagcaagatgtcaaaatctggaggacaagaccaggagcggaagaagacaaagcggcggggagacttgtattccatccagacctccctcatcgtggctgcactcaagaaaatgctgcccattggtttgaatatgtgtactccaggcgaccaggagctgatctccctcgcaaaatcgcgatacagccatagggacacagatgaagaggtcagagaacatctgcggaacaacttgcacttgcaggaaaagtctgatgacccagctgtaaaatggcaactgaacctctacaaggatgttctgaagagtgaagaacctttcaatccggaaaagacagtggagcgtgtgcagagaatttcagcagctgtcttccacctggaacaggtggaacagcctttgaggtccaagaaggccgtctggcacaaactgttatcaaagcaacggaaacgggcagtggtggcctgtttcaggatggcccctctctacaacctgcccaggcaccgctctattaacctcttcctccatggctatcagagattttggatagaaacagaggagtattcctttgaagagaaactagtacaggatttggctaaatctccaaaggtggaagaggaggaggaggaagagacagaaaaacaacctgacccactacatcagatcattctctattttagccgcaacgctctcacggagaggagcaaattggaagacgaccctttgtacacctcctattccagcatgatggccaagagttgtcaaagtggtgaggatgaagaagaagatgaagacaaggaaaaaacattcgaagagaaagagatggagaagcaaaaaaccctctatcagcaagctcggctgcatgagcgtggtgctgcagagatggtccttcagatgataagcgctagcaaaggtgagatgagccccatggtggttgagacgctgaagctggggatcgccattctgaacggaggcaatgctggtgtgcaacagaaaatgctagattacctaaaggagaaaaaggatgctggattctttcaaagcctttctggtcttatgcagtcttgcagaagtgtccttgatttgaatgcatttgagaggcagaataaagctgaaggcctggggatggtgactgaagaaggaacactcattgttcgggaacgtggtgaaaaagtactccagaatgacgagttcacgcgtgatctctttagattcctacagttactttgtgagggacataacagtgactttcagaacttcctgcggactcagatgggcaacaccaccaccgtgaatgtcatcatcagcactgtggactaccttctgcgtctgcaggaatcaatcagtgatttctactggtattattcagggaaggacatcattgatgaatctggacagcacaatttttccaaagctctggcagtcaccaagcagattttcaattctcttacagaatacatccagggcccttgcattggtaatcaacagagcctggctcacagcaggctgtgggacgcagtggttggcttcctccatgtctttgctaatatgcagatgaaactctctcaggattccagtcagatcgagctgctgaaggaactcttggatctccttcaggacatggtggtgatgcttctgtccctcctggaagggaatgtggtaaatggcaccattggcaagcagatggttgacacactggtagaatcatctaccaatgtagaaatgatcttgaaattctttgacatgttcttgaaacttaaagacttaaccagctcagacaccttcaaagaatatgacccagatggtaaaggaattatctccaaaaaagaattccagaaggccatggaagggcaaaaacagtacacgcagtcagagattgactttctcctgtcgtgtgcagaagctgatgagaatgacatgtttaattacgttgattttgtagaccggttccatgagccagccaaggacatagggtttaatgtggctgtgttattgacaaatctttctgaacacatgccaaacgattcccgcctgaagtgtctgttggacccagcagaaagtgtgctaaattacttcgaaccctacctaggacgcatcgagatcatgggtggggccaagaagattgagcgtgtttattttgagatcagtgaatccagtcgcactcagtgggagaagccccaggtgaaggaatctaagcgacagttcatttttgatgttgtcaatgaaggtggggagcaggaaaagatggagctgtttgtgaacttctgtgaggacaccatctttgaaatgcagttagcatctcagatctctgaatccgattcagctgacaggccagaagaggaggaagaagatgaagattcttcttacgtgttagaaattgcgggtgaagaggaagaagacgggtctcttgagccggcctctgcatttgctatggcctgtgcctctgtgaagaggaatgtcaccgacttcctgaagagagcaaccctgaagaacctcaggaagcagtacaggaacgtgaaaaagatgactgcgaaggagctggtgaaggtgctcttctcctttttctggatgctgttcgtggggctattccagttgctcttcaccatcctgggaggaatctttcagatcctctggagcacagtgtttggagggggcctggtagaaggggcaaagaacatcagagtgaccaagatcctgggtgacatgcctgacccaacccaatttggtatccatgatgacactatggaggctgagagggcagaggtgatggagccaggtatcaccactgaactagtacacttcataaagggggagaagggagatacagatatcatgtcagacctctttggactccacccaaagaaagagggcagcttaaagcatgggcctgaagtgggtttgggtgacctctcagaaattattggcaaggatgaaccccctacattagagagtactgtacagaagaagaggaaagctcaggcagcagaaatgaaagcagcaaatgaagcagaaggaaaagtagaatccgagaaggcagacatggaagatggagagaaggaagacaaagacaaagaagaggagcaagctgagtacctgtggacagaagtgacaaaaaagaagaagcggcggtgtggtcagaaggttgagaagccggaagctttcacagccaatttctttaaagggctggaaatctatcagaccaagttactgcattacctggccaggaatttctacaacctgaggttccttgctctgtttgtagccttcgctatcaacttcatcctgcttttttataaggtcactgaagaacctttagaagaagagacagaggatgttgcaaacctatggaattcctttaatgacgaggaagaggaagaagcgatggtattctttgtccttcaggagagcaccgggtatatggcaccaaccctgcgtgccctggccatcatccataccatcatctctctagtctgtgtggtgggctactactgcctgaaggtgcctttggtggttttcaaaagggaaaaagaaatcgccaggaagctggagtttgatggcctatatatcaccgaacagccatctgaagatgacatcaaggggcagtgggaccgcttggtgatcaacacaccatcttttcctaataactactgggacaagtttgtaaagagaaaggtgatcaacaagtatggagatctctacggagcagaacgcattgctgaacttctgggtttggacaaaaatgctcttgactttagcccagtagaagagaccaaagcagaagcggcttctctggtgtcatggctaagttccatagacatgaagtaccatatctggaagcttggagttgtttttactgacaactcctttctctaccttgcctggtatacaaccatgtcagtcctgggccactacaataacttcttctttgctgctcacctattggacatcgcaatgggcttcaagacactgaggaccattctgtcatctgtaactcacaatggcaaacagttggttctgactgtcggtctcctggccgtggtggtttatctctatactgtggtggctttcaacttcttccgcaagttctacaacaaaagcgaagacgatgacgagcccgatatgaagtgcgacgacatgatgacgtgttaccttttccacatgtacgtgggagtgagagcaggaggtggcattggtgatgaaattgaagaccctgctggtgatccttatgaaatgtatcgcattgtctttgacattacctttttcttcttcgtcattgtcatcttgctggccatcattcaaggtcttattattgatgctttcggagagctaagagaccagcaggaacaagtacgagaagatatggagactaaatgtttcatctgtgggattggcaatgactactttgacacaacccctcatggttttgaaacacatacattacaagagcacaacttagccaactacttgttctttctgatgtatttgattaataaagatgaaacagagcacacgggtcaggaatcttatgtctggaagatgtaccaagaaaggtgttgggatttcttcccagccggtgactgctttcgtaaacaatatgaagatcagcttggataaatctgaatcaaagaagcgcgacaattctggacagtcaacttcccatgaaataaagtcccctttttacagttctgcaacatatctgaaatgtgacattttctaaatgcctcccttaaaaaaaaaactgctgaaaatctgtgctattttgaaattgatttggctttttgtgcctaatggacatacactgtgggagagaacctgtcaaaatgtcgaagaaggaaggcgaagaatcaagtaatctctaggcaaatgccttcaagttttccagttctgaggtaactagttcagtttgttgggatggaagcatgaaggaaagggctagagaagtatgaaatctcgaatgtgtaatacctgaaaatttaaacacttgaatgtcatcatggtatccaacttgtgactcatagggtctgaactcactccaaaagataataactgcagtctaatttttcccatggtacttgctagtgactgtatccagaaaagctttaagcagttaaagaaacagaaaaaaaccgacactttgtcgacactgaaatatcgattaagtgccttaaaacctctttagacatagctatgcaagttttttatgtttgtgttccagaaggacagttccattcattagttgtgatcttccgtcttactttatgaaactgcacttgaaggttattcatacaagtttttttagtaacagctgtcagtcaactgctgttattagaagaaaagtactgtactgaaaattcagaaaaaaaatctcaaccttatgccaaaatggagtaatgctttatggtcccttgtaagtagtggagctgctctgtttaggtgaatctcctcaaatacaatgaagtgcccactgcaataaagtaatacgtacc

SEQ ID NO: 27068 - DNA, 15559 bp, Homo sapiens
  source 1..15559: mol_type = unassigned DNA
cgcacgccgagcggctgccgggggaagcagaggcgccggaggctggggcaccgccgacgcctcgggagccatggccgaagggggagaaggaggcgaggacgagatccagtttctgaggactgaggatgaagtggtactccagtgcatcgccaccattcataaggagcagaggaagttctgcctggcagccgagggacttgggaatcgcctgtgcttcttggaacccacttcagaagccaagtacattcctccagatctctgcgtctgcaattttgtgctggaacagtccctatctgtcagagccctgcaggaaatgcttgccaacacaggtgaaaatggcggcgaaggggcagcacaaggaggtggccacaggaccctgttatacggccatgcagttctcctgaggcactctttcagcggaatgtatctaacatgcttgactacatcaagatcccagacagacaaacttgcctttgatgtaggtctacgggaacatgccacaggagaagcctgttggtggactatacatcctgcttccaaacagaggtccgaaggagagaaagttcgaattggcgatgacctcatcctcgtcagcgtgtcctctgaaagataccttcatctctcagtatcaaatggtaacatacaagtggatgcctcctttatgcaaacactctggaatgtacatcctacgtgctcaggaagtagcatcgaagaaggatacctacttggtgggcatgtagtacgtcttttccatggtcatgatgaatgtttgacgataccatctacagaccagaatgattcccagcacaggaggatattctacgaagctgggggagctgggactcgagccaggtctctttggagagtggaaccccttcggataagctggagtggcagtaacatcagatggggccaggctttccgactccggcatctcaccacaggccactacctggccttgacagaagaccaaggccttatactgcaagaccgggcaaagtcagacaccaagtccacagctttctctttccgggcatcaaaggaactcaaggagaaattagactccagtcacaagcgagacatagaaggcatgggagttccagaaatcaagtatggagattctgtctgctttgtgcagcatatagccagtggtctgtgggtgacctacaaagcacaagacgccaaaacttcccgcctgggacctctaaaaagaaaggtcatactccatcaggaaggccacatggatgatggattaacactgcagagatgccagcgtgaggagtcccaggctgctcggatcatccggaacactacagccttattcagccagtttgtcagcggaaacaatcgcacagctgcccccatcaccctgcctatagaagaagtcctgcagaccctacaggacttgatcgcctacttccagcccccagaggaggagatgcgacatgaagacaagcagaacaagctccgctcactcaaaaacagacaaaatcttttcaaggaagagggaatgttggcccttgtcttaaattgcattgaccgcttaaatgtctacaatagcgtagcacactttgcagggattgcaagggaagagagtggcatggcctggaaagaaattctgaacctcctctacaaattgctggctgctctcattcgcggaaacagaaacaattgcgctcaattctccaataaccttgattggctcatcagtaaattggacagactagaatcttcctcaggtatcttggaagttttgcactgcatcttaactgaaagcccagaagccttaaatctgatagcggagggccacatcaagtcgatcatctccctgttggataagcacgggcggaatcacaaggttctggatatcctgtgctccctctgtctctgcaatggggttgcagtgagagccaaccagaatctgatctgtgacaacttgctgccccggagaaacctactcctgcagacacgactgattaacgatgtaaccagtatccggccaaacatcttcctgggagtcgcggagggctcagcccagtacaagaagtggtacttcgagctgattatcgaccaggtggaccccttcctaacagcagagcccacacatctgcgggtgggctgggcctcttcttcaggctatgccccatacccaggaggtggagaaggatggggaggcaatggtgttggtgacgacctgtactcctatggctttgatggacttcacctttggtcaggccggatacccagagctgtggcttccatcaaccagcacctcctgagatcggatgacgtggtaagctgctgcctggacctcggggtgcccagcatctcattccgcatcaatgggcagcccgtgcaggggatgtttgagaacttcaacacagacgggctcttcttccctgtgatgagcttttcagcaggtgtcaaagtacgtttcctgatgggtggacgtcatggagagtttaagttcctgcctccctctggctatgccccttgctatgaagccttacttccaaaagagaagatgagattggagcctgtcaaagaatataaacgtgatgctgatggcattagagatctcttgggtaccacccagttcctctcccaagcctctttcatcccatgccccgtagacaccagtcaggttattttgccacctcacctagaaaagatccgagacagactagctgaaaacatccatgagctttggggaatgaataaaatagaacttggctggactttcggcaagatacgagatgacaataaaagacaacacccttgccttgtggagttttcaaagctcccagaaactgagaagaactataacctgcaaatgtcaactgaaaccttaaaaaccctcttggccctggggtgccacattgctcatgttaacccagctgctgaggaggatctcaagaaggtcaaactgcccaaaaactatatgatgtccaacggctataagccagcccctttggatttgtctgatgtgaagctgttacctcctcaagaaattttagtggataagcttgcagaaaatgcacacaatgtttgggcaaaagacagaataaaacaaggatggacctatggcatccaacaggatttgaagaacaaaagaaatccccgtctggtgccatatgcattactggatgagcgtaccaagaagtcaaacagggacagcctgcgggaagctgtgcgcacttttgttggttacgggtataacattgagccatcagaccaagaactagctgactcggctgtggagaaggtcagcatagacaagatccgatttttccgggtagagcgatcttatgcagtgagatctggaaagtggtattttgagtttgaagtggtgactggaggagacatgcgagtcggctgggcgaggccaggctgtcgacctgatgtcgagctgggggccgatgaccaagcctttgtgtttgaaggcaacaggggccagcgttggcatcaaggaagtgggtattttgggcgtacctggcagccaggggatgtggtcggatgtatgattaacctggatgatgcttcaatgatcttcacactgaatggggagctgctgatcaccaacaaaggctctgaacttgccttcgctgactacgagattgagaatggcttcgtgcccatctgctgtctgggtctatctcagatcggccgcatgaatctcgggacagatgccagtaccttcaagttttataccatgtgcggtctccaagagggctttgagccttttgctgtcaacatgaacagagatgttgctatgtggttcagcaagcgcctcccgacgtttgtcaacgtgccaaaggatcatccacacatagaggtcatgaggattgatggcaccatggacagccctccgtgtctcaaggtgacgcataagacatttggcacacagaatagcaatgccgacatgatctattgccgcttgagcatgcctgtcgagtgccactcctccttcagccacagcccctgtctggacagtgaagctttccagaaaaggaaacagatgcaagaaatactctctcatacaacaacacagtgctactacgccatccgcatctttgctggacaggatccatcctgtgtctgggtcggatgggtgactccagactatcacttgtacagtgaaaagtttgacctgaataaaaactgcacagtgactgtcaccctaggggatgaaagaggccgggtccatgaaagtgtgaaacgcagcaactgctacatggtctggggtggagacattgtagccagttcccagagatcaaatcggagcaacgtggacctggagatcggctgtctcgtggatctggccatgggcatgttgtccttctcagccaatggaaaggaactgggcacctgctaccaggtggagcctaataccaaagtgtttccagcagtcttcctgcagcctacaagtacttctttgtttcagtttgaacttggaaagctgaagaacgcaatgcccctgtcagcggccatattcaggagtgaagagaagaacccagtcccacagtgtccacctcggctggacgtccaaaccatccagcccgtgctctggagccgcatgcccaacagcttcctgaaggtggagaccgagcgtgtgagcgagcgccacggctgggtggtgcagtgcctggagcccctgcagatgatggcgctccacatccccgaggagaacaggtgtgtggatatcctggagctctgtgagcaggaggacctgatgcggttccattaccacacgctgaggctctacagcgcggtgtgcgccctgggaaacagccgcgtggcctacgccctgtgcagccacgtggacctctcccagctcttctatgccattgacaacaagtacctccccggcctccttcgatctggtttctatgacctgctcatcagcatccacctggccagcgccaaggagaggaagctgatgatgaagaacgagtacatcatccccattaccagcaccaccaggaatatccgcctcttcccggacgagtccaagaggcatggactgcctggggtgggcctgagaacatgtctcaagcccgggttcaggttctccaccccttgctttgttgtgactggtgaggatcaccaaaagcagagccccgagattcccttggagagtctcaggacgaaggctctgagtatgctgacagaggcagtgcagtgcagcggggcccacatccgagaccctgtaggggggtctgtggagttccagtttgtgcctgtgctgaaactcattggaaccctgctggtcatgggcgtgtttgatgatgatgatgttcggcagatcctcctcctgattgatccctctgtgtttggggagcatagtgcggggacagaggagggagcagaaaaggaggaagtgacccaggtggaggagaaggctgtggaggctggggagaaggccggcaaggaggctcctgtcaaaggcttgttgcagactcgattacccgaatccgtcaagctgcagatgtgtgagctcctcagctatctctgcgactgtgagctgcagcaccgagtggaggccattgtggcatttggtgacatttatgtctccaagctgcaggcaaatcagaagttccgctacaatgagctcatgcaggccctgaacatgtctgcggccctgactgcccggaagaccaaggagttccgctcacccccacaggagcagatcaacatgctgcttaactttcaactgggagagaactgcccctgcccagaggagattcgggaggagctgtatgatttccatgaggaccttctccttcactgtggggttcctttggaagaagaggaagaggaggaggaggacacctcctggacaggaaaactctgtgccttggtttacaaaatcaaaggcccacccaagccagagaaggagcagccgacggaggaggaggagagatgccccacaacattgaaggaactcatctcacagacgatgatctgctgggcccaggaggaccagatccaggattcagagctggtccgaatgatgttcaacctcctccggaggcagtatgacagcattggggagctgctgcaggcgctgcggaagacctacaccatcagccacacctctgtaagcgacaccatcaacctgctggctgccctgggccaaatccgctccctcctcagtgtcaggatgggcaaggaagaggagttgctcatgatcaatgggctgggagacataatgaacaacaaggtgttttaccagcatcccaacctcatgagagtcctgggcatgcacgagacggtgatggaggtgatggtgaacgtgttgggtacagagaaatctcagattgcatttccaaagatggttgctagctgctgccgtttcctttgctatttctgtcgaattagccggcaaaatcagaaggccatgtttgagcatctgagttatcttctggagaatagcagtgttggcctagcctccccgtcgatgaggggatccaccccgctggatgtggcagcttcctctgtgatggacaacaatgagttagcgctgagcttagaggaaccagacctcgagaaggtggtgacctacttggcaggctgtggcctacagagctgccccatgcttctggccaaaggataccctgatgtcggctggaaccccattgaaggggaacgctacctgtccttcctgaggtttgctgtcttcgtgaacagtgagagtgtggaagaaaacgccagcgttgtggtcaagctgctcatcagacgcccagagtgcttcggcccggccctgcggggtgaggggggaaacgggctcttggcagccatgcagggtgccattaagatctctgagaacccagcgctcgacctcccctctcaaggatacaaaagagaagtcagcacgggggacgatgaagaggaagaagaaatcgtgcatatgggcaatgcaattatgtcattttattcggcccttatagatctactgggccgctgtgctcctgaaatgcacctcatccagacaggaaagggggaagccatccgcatcaggtccatcctgcgctccctggtccccacagaagacctggttgggatcatcagcatccccttgaaactgccctccctcaacaaagatgggtcggtcagtgagccagatatggcggccaatttctgccctgaccacaaggcacctatggtgctgttcttggaccgcgtttatggcattaaggatcaaacttttctgctccacttgctggaggttggatttttacctgacctaagagcttctgcctctctagatacagtttccctaagcaccacagaggctgcgcttgcactaaataggtatatatgttctgctgtgctcccgctcctcacaagatgtgcccctctctttgccggaacagaacactgcacctctctgattgattccacactgcagacaatatacaggctatccaagggacgttccctcaccaaagcacaaagggacactatagaagaatgtttgcttgccatttgcaatcacttgaggccttccatgttacagcaactcctgcgacgcctcgtttttgatgtgccgcaactcaatgaatactgcaaaatgcctctcaagcttctgacgaatcactatgaacagtgttggaagtattactgcctgccttcaggatgggggagctacgggctagctgtggaagaagagctgcacctaacggagaagcttttctgggggatttttgactcgctctcccataagaaatatgacccagatcttttccgaatggccctgccttgtctcagtgctatagctggggccttgccaccagattatttagataccagaatcacagccacgttggagaaacagatctcagtggatgcggatggcaactttgacccaaaacctattaacaccatgaatttttccttgcctgaaaaattggaatacatcgtcaccaagtatgctgagcattcacatgataaatgggcctgtgacaagagtcagagtggatggaaatatgggatttccctggatgaaaatgtgaagacccacccactgataaggcctttcaagacattaacggagaaggagaaggaaatttatcgctggcctgcgcgagagtccctgaaaaccatgctggctgtgggctggactgtggagaggaccaaagagggagaagctttggttcaacagcgggaaaatgagaagcttcgaagtgtgtcccaggccaaccagggcaacagctacagtcctgctcccctcgacctctcaaacgttgtgctctccagagagctccagggaatggtggaggtcgtggctgagaactatcacaatatctgggccaagaagaagaagctggagctggagagcaaaggtggtggcagccaccctcttctggtaccatatgacaccttgactgccaaggaaaagttcaaggaccgggagaaggcacaggacctgtttaagttcctccaagtgaatggcatcatagtttccaggggtatgaaggatatggagctggatgcctcctccatggagaagaggtttgcctataagttcttgaagaagatcctgaaatacgttgattctgctcaagaatttattgcccatttagaagccattgtcagcagtgggaaaactgaaaagtctccccgtgaccaggagatcaaattctttgccaaagttctcctcccgctggttgaccagtacttcaccagtcattgcctctacttcttgtcatcccctctgaagccccttagcagcagcggatatgcctcccataaggagaaagaaatggtggccggcctgttctgcaaacttgccgctctcgttagacacagaatttccctctttggtagtgattctactacaatggtgagctgtcttcacatcttagctcagacacttgacacaaggactgtcatgaagtcaggctcagagctggtgaaggctgggttacgagcattctttgaaaatgctgcagaagatttggagaagacttcagaaaacctgaaacttgggaagttcacccattcccgaacgcagattaaaggcgtttctcagaatattaactacactacagtggctctgctccccatcctgacgtccatctttgagcacgtcactcagcatcagtttggaatggatctactcttgggtgatgtgcagatttcatgctaccacatactgtgcagcctctactcccttgggacgggaaagaacatttatgttgaaaggcaacgccctgcccttggagaatgtctggcctcgctggcagctgccataccagtggcattcctggagcccacccttaatcgctacaatccactctcggtcttcaacaccaaaacccccagggagaggtctattctggggatgccagacacggtagaagacatgtgtcctgacatcccccagctggaaggcctgatgaaggaaatcaacgacctggccgagtcaggggcccggtacacagagatgccccatgtcatcgaggtgatcttacccatgctctgcaactacttgtcctactggtgggagcggggtcctgagaacctgccccccagcacagggccatgctgcaccaaggtcacctctgaacacctcagtctcatcctgggcaacattctgaaaatcatcaacaacaacctgggcatcgatgaggcctcctggatgaagcgcattgcagtgtatgcacagcccatcatcagcaaagccaggcccgacctgctgagaagccacttcatcccaactctggagaagctgaagaaaaaggctgtcaagacggtgcaggaggaggagcagttgaaagccgatggcaaaggggacacccaggaggcagaactcctcatcctggacgagttcgcggtcctctgcagagatctctatgccttctaccccatgctgatccgctacgtggacaacaacagatctaactggctgaaaagtcctgatgctgattctgaccagctcttccgcatggtggcagaagtcttcattctgtggtgtaaatctcataacttcaagagagaagagcaaaattttgtgattcagaatgaaattaataatttggcatttttaactggagacagcaaaagcaagatgtcaaaagccatgcaagtaaagtctggaggacaagaccaggagcggaagaagacaaagcggcggggagacttgtattccatccagacctccctcatcgtggctgcactcaagaaaatgctgcccattggtttgaatatgtgtactccaggcgaccaggagctgatctccctcgcaaaatcgcgatacagccatagggacacagatgaagaggtcagagaacatctgcggaacaacttgcacttgcaggaaaagtctgatgacccagctgtaaaatggcaactgaacctctacaaggatgttctgaagagtgaagaacctttcaatccggaaaagacagtggagcgtgtgcagagaatttcagcagctgtcttccacctggaacaggtggaacagcctttgaggtccaagaaggccgtctggcacaaactgttatcaaagcaacggaaacgggcagtggtggcctgtttcaggatggcccctctctacaacctgcccaggcaccgctctattaacctcttcctccatggctatcagagattttggatagaaacagaggagtattcctttgaagagaaactagtacaggatttggctaaatctccaaaggtggaagaggaggaggaggaagagacagaaaaacaacctgacccactacatcagatcattctctattttagccgcaacgctctcacggagaggagcaaattggaagacgaccctttgtacacctcctattccagcatgatggccaagagttgtcaaagtggtgaggatgaagaagaagatgaagacaaggaaaaaacattcgaagagaaagagatggagaagcaaaaaaccctctatcagcaagctcggctgcatgagcgtggtgctgcagagatggtccttcagatgataagcgctagcaaaggtgagatgagccccatggtggttgagacgctgaagctggggatcgccattctgaacggaggcaatgctggtgtgcaacagaaaatgctagattacctaaaggagaaaaaggatgctggattctttcaaagcctttctggtcttatgcagtcttgcagtgtccttgatttgaatgcatttgagaggcagaataaagctgaaggcctggggatggtgactgaagaaggaacactcattgttcgggaacgtggtgaaaaagtactccagaatgacgagttcacgcgtgatctctttagattcctacagttactttgtgagggacataacagtgactttcagaacttcctgcggactcagatgggcaacaccaccaccgtgaatgtcatcatcagcactgtggactaccttctgcgtctgcaggaatcaatcagtgatttctactggtattattcagggaaggacatcattgatgaatctggacagcacaatttttccaaagctctggcagtcaccaagcagattttcaattctcttacagaatacatccagggcccttgcattggtaatcaacagagcctggctcacagcaggctgtgggacgcagtggttggcttcctccatgtctttgctaatatgcagatgaaactctctcaggattccagtcagatcgagctgctgaaggaactcttggatctccttcaggacatggtggtgatgcttctgtccctcctggaagggaatgtggtaaatggcaccattggcaagcagatggttgacacactggtagaatcatctaccaatgtagaaatgatcttgaaattctttgacatgttcttgaaacttaaagacttaaccagctcagacaccttcaaagaatatgacccagatggtaaaggaattatctccaaaaaagaattccagaaggccatggaagggcaaaaacagtacacgcagtcagagattgactttctcctgtcgtgtgcagaagctgatgagaatgacatgtttaattacgttgattttgtagaccggttccatgagccagccaaggacatagggtttaatgtggctgtgttattgacaaatctttctgaacacatgccaaacgattcccgcctgaagtgtctgttggacccagcagaaagtgtgctaaattacttcgaaccctacctaggacgcatcgagatcatgggtggggccaagaagattgagcgtgtttattttgagatcagtgaatccagtcgcactcagtgggagaagccccaggtgaaggaatctaagcgacagttcatttttgatgttgtcaatgaaggtggggagcaggaaaagatggagctgtttgtgaacttctgtgaggacaccatctttgaaatgcagttagcatctcagatctctgaatccgattcagctgacaggccagaagaggaggaagaagatgaagattcttcttacgtgttagaaattgcgggtgaagaggaagaagacgggtctcttgagccggcctctgcatttgctatggcctgtgcctctgtgaagaggaatgtcaccgacttcctgaagagagcaaccctgaagaacctcaggaagcagtacaggaacgtgaaaaagatgactgcgaaggagctggtgaaggtgctcttctcctttttctggatgctgttcgtggggctattccagttgctcttcaccatcctgggaggaatctttcagatcctctggagcacagtgtttggagggggcctggtagaaggggcaaagaacatcagagtgaccaagatcctgggtgacatgcctgacccaacccaatttggtatccatgatgacactatggaggctgagagggcagaggtgatggagccaggtatcaccactgaactagtacacttcataaagggggagaagggagatacagatatcatgtcagacctctttggactccacccaaagaaagagggcagcttaaagcatgggcctgaagtgggtttgggtgacctctcagaaattattggcaaggatgaaccccctacattagagagtactgtacagaagaagaggaaagctcaggcagcagaaatgaaagcagcaaatgaagcagaaggaaaagtagaatccgagaaggcagacatggaagatggagagaaggaagacaaagacaaagaagaggagcaagctgagtacctgtggacagaagtgacaaaaaagaagaagcggcggtgtggtcagaaggttgagaagccggaagctttcacagccaatttctttaaagggctggaaatctatcagaccaagttactgcattacctggccaggaatttctacaacctgaggttccttgctctgtttgtagccttcgctatcaacttcatcctgcttttttataaggtcactgaagaacctttagaagaagagacagaggatgttgcaaacctatggaattcctttaatgacgaggaagaggaagaagcgatggtattctttgtccttcaggagagcaccgggtatatggcaccaaccctgcgtgccctggccatcatccataccatcatctctctagtctgtgtggtgggctactactgcctgaaggtgcctttggtggttttcaaaagggaaaaagaaatcgccaggaagctggagtttgatggcctatatatcaccgaacagccatctgaagatgacatcaaggggcagtgggaccgcttggtgatcaacacaccatcttttcctaataactactgggacaagtttgtaaagagaaaggtgatcaacaagtatggagatctctacggagcagaacgcattgctgaacttctgggtttggacaaaaatgctcttgactttagcccagtagaagagaccaaagcagaagcggcttctctggtgtcatggctaagttccatagacatgaagtaccatatctggaagcttggagttgtttttactgacaactcctttctctaccttgcctggtatacaaccatgtcagtcctgggccactacaataacttcttctttgctgctcacctattggacatcgcaatgggcttcaagacactgaggaccattctgtcatctgtaactcacaatggcaaacagttggttctgactgtcggtctcctggccgtggtggtttatctctatactgtggtggctttcaacttcttccgcaagttctacaacaaaagcgaagacgatgacgagcccgatatgaagtgcgacgacatgatgacgtgttaccttttccacatgtacgtgggagtgagagcaggaggtggcattggtgatgaaattgaagaccctgctggtgatccttatgaaatgtatcgcattgtctttgacattacctttttcttcttcgtcattgtcatcttgctggccatcattcaaggtcttattattgatgctttcggagagctaagagaccagcaggaacaagtacgagaagatatggagactaaatgtttcatctgtgggattggcaatgactactttgacacaacccctcatggttttgaaacacatacattacaagagcacaacttagccaactacttgttctttctgatgtatttgattaataaagatgaaacagagcacacgggtcaggaatcttatgtctggaagatgtaccaagaaaggtgttgggatttcttcccagccggtgactgctttcgtaaacaatatgaagatcagcttggataaatctgaatcaaagaagcgcgacaattctggacagtcaacttcccatgaaataaagtcccctttttacagttctgcaacatatctgaaatgtgacattttctaaatgcctcccttaaaaaaaaaactgctgaaaatctgtgctattttgaaattgatttggctttttgtgcctaatggacatacactgtgggagagaacctgtcaaaatgtcgaagaaggaaggcgaagaatcaagtaatctctaggcaaatgccttcaagttttccagttctgaggtaactagttcagtttgttgggatggaagcatgaaggaaagggctagagaagtatgaaatctcgaatgtgtaatacctgaaaatttaaacacttgaatgtcatcatggtatccaacttgtgactcatagggtctgaactcactccaaaagataataactgcagtctaatttttcccatggtacttgctagtgactgtatccagaaaagctttaagcagttaaagaaacagaaaaaaaccgacactttgtcgacactgaaatatcgattaagtgccttaaaacctctttagacatagctatgcaagttttttatgtttgtgttccagaaggacagttccattcattagttgtgatcttccgtcttactttatgaaactgcacttgaaggttattcatacaagtttttttagtaacagctgtcagtcaactgctgttattagaagaaaagtactgtactgaaaattcagaaaaaaaatctcaaccttatgccaaaatggagtaatgctttatggtcccttgtaagtagtggagctgctctgtttaggtgaatctcctcaaatacaatgaagtgcccactgcaataaagtaatacgtaccaata

SEQ ID NO: 27069 - DNA, 15557 bp, Homo sapiens
  source 1..15557: mol_type = unassigned DNA
gcagcagcagtcagcgcacgccgagcggctgccgggggaagcagaggcgccggaggctggggcaccgccgacgcctcgggagccatggccgaagggggagaaggaggcgaggacgagatccagtttctgaggactgaggatgaagtggtactccagtgcatcgccaccattcataaggagcagaggaagttctgcctggcagccgagggacttgggaatcgcctgtgcttcttggaacccacttcagaagccaagtacattcctccagatctctgcgtctgcaattttgtgctggaacagtccctatctgtcagagccctgcaggaaatgcttgccaacacaggtgaaaatggcggcgaaggggcagcacaaggaggtggccacaggaccctgttatacggccatgcagttctcctgaggcactctttcagcggaatgtatctaacatgcttgactacatcaagatcccagacagacaaacttgcctttgatgtaggtctacgggaacatgccacaggagaagcctgttggtggactatacatcctgcttccaaacagaggtccgaaggagagaaagttcgaattggcgatgacctcatcctcgtcagcgtgtcctctgaaagataccttcatctctcagtatcaaatggtaacatacaagtggatgcctcctttatgcaaacactctggaatgtacatcctacgtgctcaggaagtagcatcgaagaaggatacctacttggtgggcatgtagtacgtcttttccatggtcatgatgaatgtttgacgataccatctacagaccagaatgattcccagcacaggaggatattctacgaagctgggggagctgggactcgagccaggtctctttggagagtggaaccccttcggataagctggagtggcagtaacatcagatggggccaggctttccgactccggcatctcaccacaggccactacctggccttgacagaagaccaaggccttatactgcaagaccgggcaaagtcagacaccaagtccacagctttctctttccgggcatcaaaggaactcaaggagaaattagactccagtcacaagcgagacatagaaggcatgggagttccagaaatcaagtatggagattctgtctgctttgtgcagcatatagccagtggtctgtgggtgacctacaaagcacaagacgccaaaacttcccgcctgggacctctaaaaagaaaggtcatactccatcaggaaggccacatggatgatggattaacactgcagagatgccagcgtgaggagtcccaggctgctcggatcatccggaacactacagccttattcagccagtttgtcagcggaaacaatcgcacagctgcccccatcaccctgcctatagaagaagtcctgcagaccctacaggacttgatcgcctacttccagcccccagaggaggagatgcgacatgaagacaagcagaacaagctccgctcactcaaaaacagacaaaatcttttcaaggaagagggaatgttggcccttgtcttaaattgcattgaccgcttaaatgtctacaatagcgtagcacactttgcagggattgcaagggaagagagtggcatggcctggaaagaaattctgaacctcctctacaaattgctggctgctctcattcgcggaaacagaaacaattgcgctcaattctccaataaccttgattggctcatcagtaaattggacagactagaatcttcctcaggtatcttggaagttttgcactgcatcttaactgaaagcccagaagccttaaatctgatagcggagggccacatcaagtcgatcatctccctgttggataagcacgggcggaatcacaaggttctggatatcctgtgctccctctgtctctgcaatggggttgcagtgagagccaaccagaatctgatctgtgacaacttgctgccccggagaaacctactcctgcagacacgactgattaacgatgtaaccagtatccggccaaacatcttcctgggagtcgcggagggctcagcccagtacaagaagtggtacttcgagctgattatcgaccaggtggaccccttcctaacagcagagcccacacatctgcgggtgggctgggcctcttcttcaggctatgccccatacccaggaggtggagaaggatggggaggcaatggtgttggtgacgacctgtactcctatggctttgatggacttcacctttggtcaggccggatacccagagctgtggcttccatcaaccagcacctcctgagatcggatgacgtggtaagctgctgcctggacctcggggtgcccagcatctcattccgcatcaatgggcagcccgtgcaggggatgtttgagaacttcaacacagacgggctcttcttccctgtgatgagcttttcagcaggtgtcaaagtacgtttcctgatgggtggacgtcatggagagtttaagttcctgcctccctctggctatgccccttgctatgaagccttacttccaaaagagaagatgagattggagcctgtcaaagaatataaacgtgatgctgatggcattagagatctcttgggtaccacccagttcctctcccaagcctctttcatcccatgccccgtagacaccagtcaggttattttgccacctcacctagaaaagatccgagacagactagctgaaaacatccatgagctttggggaatgaataaaatagaacttggctggactttcggcaagatacgagatgacaataaaagacaacacccttgccttgtggagttttcaaagctcccagaaactgagaagaactataacctgcaaatgtcaactgaaaccttaaaaaccctcttggccctggggtgccacattgctcatgttaacccagctgctgaggaggatctcaagaaggtcaaactgcccaaaaactatatgatgtccaacggctataagccagcccctttggatttgtctgatgtgaagctgttacctcctcaagaaattttagtggataagcttgcagaaaatgcacacaatgtttgggcaaaagacagaataaaacaaggatggacctatggcatccaacaggatttgaagaacaaaagaaatccccgtctggtgccatatgcattactggatgagcgtaccaagaagtcaaacagggacagcctgcgggaagctgtgcgcacttttgttggttacgggtataacattgagccatcagaccaagaactagctgactcggctgtggagaaggtcagcatagacaagatccgatttttccgggtagagcgatcttatgcagtgagatctggaaagtggtattttgagtttgaagtggtgactggaggagacatgcgagtcggctgggcgaggccaggctgtcgacctgatgtcgagctgggggccgatgaccaagcctttgtgtttgaaggcaacaggggccagcgttggcatcaaggaagtgggtattttgggcgtacctggcagccaggggatgtggtcggatgtatgattaacctggatgatgcttcaatgatcttcacactgaatggggagctgctgatcaccaacaaaggctctgaacttgccttcgctgactacgagattgagaatggcttcgtgcccatctgctgtctgggtctatctcagatcggccgcatgaatctcgggacagatgccagtaccttcaagttttataccatgtgcggtctccaagagggctttgagccttttgctgtcaacatgaacagagatgttgctatgtggttcagcaagcgcctcccgacgtttgtcaacgtgccaaaggatcatccacacatagaggtcatgaggattgatggcaccatggacagccctccgtgtctcaaggtgacgcataagacatttggcacacagaatagcaatgccgacatgatctattgccgcttgagcatgcctgtcgagtgccactcctccttcagccacagcccctgtctggacagtgaagctttccagaaaaggaaacagatgcaagaaatactctctcatacaacaacacagtgctactacgccatccgcatctttgctggacaggatccatcctgtgtctgggtcggatgggtgactccagactatcacttgtacagtgaaaagtttgacctgaataaaaactgcacagtgactgtcaccctaggggatgaaagaggccgggtccatgaaagtgtgaaacgcagcaactgctacatggtctggggtggagacattgtagccagttcccagagatcaaatcggagcaacgtggacctggagatcggctgtctcgtggatctggccatgggcatgttgtccttctcagccaatggaaaggaactgggcacctgctaccaggtggagcctaataccaaagtgtttccagcagtcttcctgcagcctacaagtacttctttgtttcagtttgaacttggaaagctgaagaacgcaatgcccctgtcagcggccatattcaggagtgaagagaagaacccagtcccacagtgtccacctcggctggacgtccaaaccatccagcccgtgctctggagccgcatgcccaacagcttcctgaaggtggagaccgagcgtgtgagcgagcgccacggctgggtggtgcagtgcctggagcccctgcagatgatggcgctccacatccccgaggagaacaggtgtgtggatatcctggagctctgtgagcaggaggacctgatgcggttccattaccacacgctgaggctctacagcgcggtgtgcgccctgggaaacagccgcgtggcctacgccctgtgcagccacgtggacctctcccagctcttctatgccattgacaacaagtacctccccggcctccttcgatctggtttctatgacctgctcatcagcatccacctggccagcgccaaggagaggaagctgatgatgaagaacgagtacatcatccccattaccagcaccaccaggaatatccgcctcttcccggacgagtccaagaggcatggactgcctggggtgggcctgagaacatgtctcaagcccgggttcaggttctccaccccttgctttgttgtgactggtgaggatcaccaaaagcagagccccgagattcccttggagagtctcaggacgaaggctctgagtatgctgacagaggcagtgcagtgcagcggggcccacatccgagaccctgtaggggggtctgtggagttccagtttgtgcctgtgctgaaactcattggaaccctgctggtcatgggcgtgtttgatgatgatgatgttcggcagatcctcctcctgattgatccctctgtgtttggggagcatagtgcggggacagaggagggagcagaaaaggaggaagtgacccaggtggaggagaaggctgtggaggctggggagaaggccggcaaggaggctcctgtcaaaggcttgttgcagactcgattacccgaatccgtcaagctgcagatgtgtgagctcctcagctatctctgcgactgtgagctgcagcaccgagtggaggccattgtggcatttggtgacatttatgtctccaagctgcaggcaaatcagaagttccgctacaatgagctcatgcaggccctgaacatgtctgcggccctgactgcccggaagaccaaggagttccgctcacccccacaggagcagatcaacatgctgcttaactttcaactgggagagaactgcccctgcccagaggagattcgggaggagctgtatgatttccatgaggaccttctccttcactgtggggttcctttggaagaagaggaagaggaggaggaggacacctcctggacaggaaaactctgtgccttggtttacaaaatcaaaggcccacccaagccagagaaggagcagccgacggaggaggaggagagatgccccacaacattgaaggaactcatctcacagacgatgatctgctgggcccaggaggaccagatccaggattcagagctggtccgaatgatgttcaacctcctccggaggcagtatgacagcattggggagctgctgcaggcgctgcggaagacctacaccatcagccacacctctgtaagcgacaccatcaacctgctggctgccctgggccaaatccgctccctcctcagtgtcaggatgggcaaggaagaggagttgctcatgatcaatgggctgggagacataatgaacaacaaggtgttttaccagcatcccaacctcatgagagtcctgggcatgcacgagacggtgatggaggtgatggtgaacgtgttgggtacagagaaatctcagattgcatttccaaagatggttgctagctgctgccgtttcctttgctatttctgtcgaattagccggcaaaatcagaaggccatgtttgagcatctgagttatcttctggagaatagcagtgttggcctagcctccccgtcgatgaggggatccaccccgctggatgtggcagcttcctctgtgatggacaacaatgagttagcgctgagcttagaggaaccagacctcgagaaggtggtgacctacttggcaggctgtggcctacagagctgccccatgcttctggccaaaggataccctgatgtcggctggaaccccattgaaggggaacgctacctgtccttcctgaggtttgctgtcttcgtgaacagtgagagtgtggaagaaaacgccagcgttgtggtcaagctgctcatcagacgcccagagtgcttcggcccggccctgcggggtgaggggggaaacgggctcttggcagccatgcagggtgccattaagatctctgagaacccagcgctcgacctcccctctcaaggatacaaaagagaagtcagcacgggggacgatgaagaggaagaagaaatcgtgcatatgggcaatgcaattatgtcattttattcggcccttatagatctactgggccgctgtgctcctgaaatgcacctcatccagacaggaaagggggaagccatccgcatcaggtccatcctgcgctccctggtccccacagaagacctggttgggatcatcagcatccccttgaaactgccctccctcaacaaagatgggtcggtcagtgagccagatatggcggccaatttctgccctgaccacaaggcacctatggtgctgttcttggaccgcgtttatggcattaaggatcaaacttttctgctccacttgctggaggttggatttttacctgacctaagagcttctgcctctctagatacagtttccctaagcaccacagaggctgcgcttgcactaaataggtatatatgttctgctgtgctcccgctcctcacaagatgtgcccctctctttgccggaacagaacactgcacctctctgattgattccacactgcagacaatatacaggctatccaagggacgttccctcaccaaagcacaaagggacactatagaagaatgtttgcttgccatttgcaatcacttgaggccttccatgttacagcaactcctgcgacgcctcgtttttgatgtgccgcaactcaatgaatactgcaaaatgcctctcaagcttctgacgaatcactatgaacagtgttggaagtattactgcctgccttcaggatgggggagctacgggctagctgtggaagaagagctgcacctaacggagaagcttttctgggggatttttgactcgctctcccataagaaatatgacccagatcttttccgaatggccctgccttgtctcagtgctatagctggggccttgccaccagattatttagataccagaatcacagccacgttggagaaacagatctcagtggatgcggatggcaactttgacccaaaacctattaacaccatgaatttttccttgcctgaaaaattggaatacatcgtcaccaagtatgctgagcattcacatgataaatgggcctgtgacaagagtcagagtggatggaaatatgggatttccctggatgaaaatgtgaagacccacccactgataaggcctttcaagacattaacggagaaggagaaggaaatttatcgctggcctgcgcgagagtccctgaaaaccatgctggctgtgggctggactgtggagaggaccaaagagggagaagctttggttcaacagcgggaaaatgagaagcttcgaagtgtgtcccaggccaaccagggcaacagctacagtcctgctcccctcgacctctcaaacgttgtgctctccagagagctccagggaatggtggaggtcgtggctgagaactatcacaatatctgggccaagaagaagaagctggagctggagagcaaaggtggtggcagccaccctcttctggtaccatatgacaccttgactgccaaggaaaagttcaaggaccgggagaaggcacaggacctgtttaagttcctccaagtgaatggcatcatagtttccaggggtatgaaggatatggagctggatgcctcctccatggagaagaggtttgcctataagttcttgaagaagatcctgaaatacgttgattctgctcaagaatttattgcccatttagaagccattgtcagcagtgggaaaactgaaaagtctccccgtgaccaggagatcaaattctttgccaaagttctcctcccgctggttgaccagtacttcaccagtcattgcctctacttcttgtcatcccctctgaagccccttagcagcagcggatatgcctcccataaggagaaagaaatggtggccggcctgttctgcaaacttgccgctctcgttagacacagaatttccctctttggtagtgattctactacaatggtgagctgtcttcacatcttagctcagacacttgacacaaggactgtcatgaagtcaggctcagagctggtgaaggctgggttacgagcattctttgaaaatgctgcagaagatttggagaagacttcagaaaacctgaaacttgggaagttcacccattcccgaacgcagattaaaggcgtttctcagaatattaactacactacagtggctctgctccccatcctgacgtccatctttgagcacgtcactcagcatcagtttggaatggatctactcttgggtgatgtgcagatttcatgctaccacatactgtgcagcctctactcccttgggacgggaaagaacatttatgttgaaaggcaacgccctgcccttggagaatgtctggcctcgctggcagctgccataccagtggcattcctggagcccacccttaatcgctacaatccactctcggtcttcaacaccaaaacccccagggagaggtctattctggggatgccagacacggtagaagacatgtgtcctgacatcccccagctggaaggcctgatgaaggaaatcaacgacctggccgagtcaggggcccggtacacagagatgccccatgtcatcgaggtgatcttacccatgctctgcaactacttgtcctactggtgggagcggggtcctgagaacctgccccccagcacagggccatgctgcaccaaggtcacctctgaacacctcagtctcatcctgggcaacattctgaaaatcatcaacaacaacctgggcatcgatgaggcctcctggatgaagcgcattgcagtgtatgcacagcccatcatcagcaaagccaggcccgacctgctgagaagccacttcatcccaactctggagaagctgaagaaaaaggctgtcaagacggtgcaggaggaggagcagttgaaagccgatggcaaaggggacacccaggaggcagaactcctcatcctggacgagttcgcggtcctctgcagagatctctatgccttctaccccatgctgatccgctacgtggacaacaacagatctaactggctgaaaagtcctgatgctgattctgaccagctcttccgcatggtggcagaagtcttcattctgtggtgtaaatctcataacttcaagagagaagagcaaaattttgtgattcagaatgaaattaataatttggcatttttaactggagacagcaaaagcaagatgtcaaaatctggaggacaagaccaggagcggaagaagacaaagcggcggggagacttgtattccatccagacctccctcatcgtggctgcactcaagaaaatgctgcccattggtttgaatatgtgtactccaggcgaccaggagctgatctccctcgcaaaatcgcgatacagccatagggacacagatgaagaggtcagagaacatctgcggaacaacttgcacttgcaggaaaagtctgatgacccagctgtaaaatggcaactgaacctctacaaggatgttctgaagagtgaagaacctttcaatccggaaaagacagtggagcgtgtgcagagaatttcagcagctgtcttccacctggaacaggtggaacagcctttgaggtccaagaaggccgtctggcacaaactgttatcaaagcaacggaaacgggcagtggtggcctgtttcaggatggcccctctctacaacctgcccaggcaccgctctattaacctcttcctccatggctatcagagattttggatagaaacagaggagtattcctttgaagagaaactagtacaggatttggctaaatctccaaaggtggaagaggaggaggaggaagagacagaaaaacaacctgacccactacatcagatcattctctattttagccgcaacgctctcacggagaggagcaaattggaagacgaccctttgtacacctcctattccagcatgatggccaagagttgtcaaagtggtgaggatgaagaagaagatgaagacaaggaaaaaacattcgaagagaaagagatggagaagcaaaaaaccctctatcagcaagctcggctgcatgagcgtggtgctgcagagatggtccttcagatgataagcgctagcaaaggtgagatgagccccatggtggttgagacgctgaagctggggatcgccattctgaacggaggcaatgctggtgtgcaacagaaaatgctagattacctaaaggagaaaaaggatgctggattctttcaaagcctttctggtcttatgcagtcttgcagtgtccttgatttgaatgcatttgagaggcagaataaagctgaaggcctggggatggtgactgaagaaggaacactcattgttcgggaacgtggtgaaaaagtactccagaatgacgagttcacgcgtgatctctttagattcctacagttactttgtgagggacataacagtgactttcagaacttcctgcggactcagatgggcaacaccaccaccgtgaatgtcatcatcagcactgtggactaccttctgcgtctgcaggaatcaatcagtgatttctactggtattattcagggaaggacatcattgatgaatctggacagcacaatttttccaaagctctggcagtcaccaagcagattttcaattctcttacagaatacatccagggcccttgcattggtaatcaacagagcctggctcacagcaggctgtgggacgcagtggttggcttcctccatgtctttgctaatatgcagatgaaactctctcaggattccagtcagatcgagctgctgaaggaactcttggatctccttcaggacatggtggtgatgcttctgtccctcctggaagggaatgtggtaaatggcaccattggcaagcagatggttgacacactggtagaatcatctaccaatgtagaaatgatcttgaaattctttgacatgttcttgaaacttaaagacttaaccagctcagacaccttcaaagaatatgacccagatggtaaaggaattatctccaaaaaagaattccagaaggccatggaagggcaaaaacagtacacgcagtcagagattgactttctcctgtcgtgtgcagaagctgatgagaatgacatgtttaattacgttgattttgtagaccggttccatgagccagccaaggacatagggtttaatgtggctgtgttattgacaaatctttctgaacacatgccaaacgattcccgcctgaagtgtctgttggacccagcagaaagtgtgctaaattacttcgaaccctacctaggacgcatcgagatcatgggtggggccaagaagattgagcgtgtttattttgagatcagtgaatccagtcgcactcagtgggagaagccccaggtgaaggaatctaagcgacagttcatttttgatgttgtcaatgaaggtggggagcaggaaaagatggagctgtttgtgaacttctgtgaggacaccatctttgaaatgcagttagcatctcagatctctgaatccgattcagctgacaggccagaagaggaggaagaagatgaagattcttcttacgtgttagaaattgcgggtgaagaggaagaagacgggtctcttgagccggcctctgcatttgctatggcctgtgcctctgtgaagaggaatgtcaccgacttcctgaagagagcaaccctgaagaacctcaggaagcagtacaggaacgtgaaaaagatgactgcgaaggagctggtgaaggtgctcttctcctttttctggatgctgttcgtggggctattccagttgctcttcaccatcctgggaggaatctttcagatcctctggagcacagtgtttggagggggcctggtagaaggggcaaagaacatcagagtgaccaagatcctgggtgacatgcctgacccaacccaatttggtatccatgatgacactatggaggctgagagggcagaggtgatggagccaggtatcaccactgaactagtacacttcataaagggggagaagggagatacagatatcatgtcagacctctttggactccacccaaagaaagagggcagcttaaagcatgggcctgaagtgggtttgggtgacctctcagaaattattggcaaggatgaaccccctacattagagagtactgtacagaagaagaggaaagctcaggcagcagaaatgaaagcagcaaatgaagcagaaggaaaagtagaatccgagaaggcagacatggaagatggagagaaggaagacaaagacaaagaagaggagcaagctgagtacctgtggacagaagtgacaaaaaagaagaagcggcggtgtggtcagaaggttgagaagccggaagctttcacagccaatttctttaaagggctggaaatctatcagaccaagttactgcattacctggccaggaatttctacaacctgaggttccttgctctgtttgtagccttcgctatcaacttcatcctgcttttttataaggtcactgaagaacctttagaagaagagacagaggatgttgcaaacctatggaattcctttaatgacgaggaagaggaagaagcgatggtattctttgtccttcaggagagcaccgggtatatggcaccaaccctgcgtgccctggccatcatccataccatcatctctctagtctgtgtggtgggctactactgcctgaaggtgcctttggtggttttcaaaagggaaaaagaaatcgccaggaagctggagtttgatggcctatatatcaccgaacagccatctgaagatgacatcaaggggcagtgggaccgcttggtgatcaacacaccatcttttcctaataactactgggacaagtttgtaaagagaaaggtgatcaacaagtatggagatctctacggagcagaacgcattgctgaacttctgggtttggacaaaaatgctcttgactttagcccagtagaagagaccaaagcagaagcggcttctctggtgtcatggctaagttccatagacatgaagtaccatatctggaagcttggagttgtttttactgacaactcctttctctaccttgcctggtatacaaccatgtcagtcctgggccactacaataacttcttctttgctgctcacctattggacatcgcaatgggcttcaagacactgaggaccattctgtcatctgtaactcacaatggcaaacagttggttctgactgtcggtctcctggccgtggtggtttatctctatactgtggtggctttcaacttcttccgcaagttctacaacaaaagcgaagacgatgacgagcccgatatgaagtgcgacgacatgatgacgtgttaccttttccacatgtacgtgggagtgagagcaggaggtggcattggtgatgaaattgaagaccctgctggtgatccttatgaaatgtatcgcattgtctttgacattacctttttcttcttcgtcattgtcatcttgctggccatcattcaaggtcttattattgatgctttcggagagctaagagaccagcaggaacaagtacgagaagatatggagactaaatgtttcatctgtgggattggcaatgactactttgacacaacccctcatggttttgaaacacatacattacaagagcacaacttagccaactacttgttctttctgatgtatttgattaataaagatgaaacagagcacacgggtcaggaatcttatgtctggaagatgtaccaagaaaggtgttgggatttcttcccagccggtgactgctttcgtaaacaatatgaagatcagcttggataaatctgaatcaaagaagcgcgacaattctggacagtcaacttcccatgaaataaagtcccctttttacagttctgcaacatatctgaaatgtgacattttctaaatgcctcccttaaaaaaaaaactgctgaaaatctgtgctattttgaaattgatttggctttttgtgcctaatggacatacactgtgggagagaacctgtcaaaatgtcgaagaaggaaggcgaagaatcaagtaatctctaggcaaatgccttcaagttttccagttctgaggtaactagttcagtttgttgggatggaagcatgaaggaaagggctagagaagtatgaaatctcgaatgtgtaatacctgaaaatttaaacacttgaatgtcatcatggtatccaacttgtgactcatagggtctgaactcactccaaaagataataactgcagtctaatttttcccatggtacttgctagtgactgtatccagaaaagctttaagcagttaaagaaacagaaaaaaaccgacactttgtcgacactgaaatatcgattaagtgccttaaaacctctttagacatagctatgcaagttttttatgtttgtgttccagaaggacagttccattcattagttgtgatcttccgtcttactttatgaaactgcacttgaaggttattcatacaagtttttttagtaacagctgtcagtcaactgctgttattagaagaaaagtactgtactgaaaattcagaaaaaaaatctcaaccttatgccaaaatggagtaatgctttatggtcccttgtaagtagtggagctgctctgtttaggtgaatctcctcaaatacaatgaagtgcccactgcaataaagtaatacgtaccaat

SEQ ID NO: 27070 - DNA, 594 bp, Homo sapiens
  source 1..594: mol_type = unassigned DNA
ggactgttgaagacaggtctccacacacagctccagcagccacatttgcaaccttggccatctgtccagaacctgctcccacctcaggcccaggccaaccgtgcactgctgcaatgggctctgagctggagacggcgatggagaccctcatcaacgtgttccacgcccactcgggcaaagagggggacaagtacaagctgagcaagaaggagctgaaagagctgctgcagacggagctctctggcttcctggatgcccagaaggatgtggatgctgtggacaaggtgatgaaggagctagacgagaatggagacggggaggtggacttccaggagtatgtggtgcttgtggctgctctcacagtggcctgtaacaatttcttctgggagaacagttgagcagacagccacattgggcagcgcccttcctctccaccctcccagacctgcctcttccccctgcttccacctcaccccacttatccctctccataaccccacccttgcccaccccacccccacccccaccaagggcgcaagagtagcggtccaagcctgcaactcatctttcattaaaggcttctctctcaccagc

SEQ ID NO: 27071 - DNA, 522 bp, Homo sapiens
  source 1..522: mol_type = unassigned DNA
cacagctccagcagccacatttgcaaccttggccatctgtccagaacctgctcccacctcaggcccaggccaaccgtgcactgctgcaatgggctctgagctggagacggcgatggagaccctcatcaacgtgttccacgcccactcgggcaaagagggggacaagtacaagctgagcaagaaggagctgaaagagctgctgcagacggagctctctggcttcctggatgtgaaagagcttatgctgtaggcaacagaagccctcaagacctttgaggaggcctagaagagtcccataattcaatgcagttcctctcgctcatctttgcctcctgctcctcaaccacccccttgcctctgactcagtgctgtacccttccctatacacctccctcttcctctcctcccaccacaggcccagaaggatgtggatgctgtggacaaggtgatgaaggagctagacgagaatggagacggggaggtggacttccaggagtatgtggtgcttgtggctgctctcac

SEQ ID NO: 27072 - DNA, 784 bp, Homo sapiens
  source 1..784: mol_type = unassigned DNA
cctcagagaaccccaggctgaggccccacacacagagggggatccaggttgagacccccagagaagagtcctggattgaaatccctctgtgggttctcagactcccaagactaagtttctcactgagggtcctctcagtgaggccccatggaggagccacagactaagaccccctcagcagaattccccccttaccgggctcaaccagcacagccagccacagctccagcagccacatttgcaaccttggccatctgtccagaacctgctcccacctcaggcccaggccaaccgtgcactgctgcaatgggctctgagctggagacggcgatggagaccctcatcaacgtgttccacgcccactcgggcaaagagggggacaagtacaagctgagcaagaaggagctgaaagagctgctgcagacggagctctctggcttcctggatgcccagaaggatgtggatgctgtggacaaggtgatgaaggagctagacgagaatggagacggggaggtggacttccaggagtatgtggtgcttgtggctgctctcacagtggcctgtaacaatttcttctgggagaacagttgagcagacagccacattgggcagcgcccttcctctccaccctcccagacctgcctcttccccctgcttccacctcaccccacttatccctctccataaccccacccttgcccaccccacccccacccccaccaagggcgcaagagtagcggtccaagcctgcaactcatctttcattaaaggcttctctctcacc

SEQ ID NO: 27073 - DNA, 236 bp, Homo sapiens
  source 1..236: mol_type = unassigned DNA
agaacctgctcccacctcaggcccaggccaaccggagccctcaagtccctgccaaggccccctctgtctcccaggtgttgggaagggtcccagccctcccctgcctcgcctcctgtggggtgcactgctgcaatgggctctgagctggagacggcgatggagaccctcatcaacgtgttccacgcccactcgggcaaagagggggacaagtacaagctgagcaagaaggagctgaa

SEQ ID NO: 27074 - DNA, 616 bp, Homo sapiens
  source 1..616: mol_type = unassigned DNA
actccctgaaggaaaaggagaactgtgccatctcagagggcattttccaagaggaagcttcaacggaccacaccaaaatgccatctcaaatggaacacgccatggaaaccatgatgtttacatttcacaaattcgctggggataaaggctacttaacaaaggaggacctgagagtactcatggaaaaggagttccctggatttttggaaaatcaaaaagaccctctggctgtggacaaaataatgaaggacctggaccagtgtagagatggcaaagtgggcttccagagcttcttttccctaattgcgggcctcaccattgcatgcaatgactattttgtagtacacatgaagcagaagggaaagaagtaggcagaaatgagcagttcgctcctccctgataagagttgtcccaaagggtcgcttaaggaatctgccccacagcttcccccatagaaggatttcatgagcagatcaggacacttagcaaatgtaaaaataaaatctaactctcatttgacaagcagagaaagaaaagttaaataccagataagcttttgatttttgtattgtttgcatccccttgccctcaataaataaagttcttttttagttcc

SEQ ID NO: 27075 - DNA, 1202 bp, Homo sapiens
  source 1..1202: mol_type = unassigned DNA
ccggtggggcgggaagcccggcttctggggaggtgccgcccctccactggcgcaggccgccgagacccccagacggacctcctagggctaatctgatagtgcctctgaggtcgataggactccacgtgccactccctgcagggtcatccagcaagtaattcctagacccgtaggtggccgcagagccggttacctctggttctgcgccagcgtgccccacccgcaggacggccgggttctttgatttgtacactttctaaaaccaaacccgagaggaagggcaggctcagggtggggatgccctgaaatattcgagagcaggaccgtttctactgaagagaagtttacaagaacgctctgtctggggcgggcgaggcctctgcgaggcgggtccgggagcgagggcagggcgtgggccgcgcgcccggggtcgggggagtcgggggcaggaagagggggaggagacagggctgggggagcgccctgccgagcgcccgccaggctcctcccgctcccgcgccgcctccctctacccacccgccgcacgtactaaggaaggcgcacagcccgccgcgctcgcctctccgccccgcgtccagctcgcccagctcgcccagcgtccgccgcgcctcggccaaggcttcaacggaccacaccaaaatgccatctcaaatggaacacgccatggaaaccatgatgtttacatttcacaaattcgctggggataaaggctacttaacaaaggaggacctgagagtactcatggaaaaggagttccctggatttttggaaaatcaaaaagaccctctggctgtggacaaaataatgaaggacctggaccagtgtagagatggcaaagtgggcttccagagcttcttttccctaattgcgggcctcaccattgcatgcaatgactattttgtagtacacatgaagcagaagggaaagaagtaggcagaaatgagcagttcgctcctccctgataagagttgtcccaaagggtcgcttaaggaatctgccccacagcttcccccatagaaggatttcatgagcagatcaggacacttagcaaatgtaaaaataaaatctaactctcatttgacaagcagagaaagaaaagttaaataccagataagcttttgatttttgtattgtttgcatccccttgccctcaataaataaagttcttttttagttccaaa

SEQ ID NO: 27076 - DNA, 594 bp, Homo sapiens
  source 1..594: mol_type = unassigned DNA
gggcaaggctgggccgggaagggcgtgggttgaggagaggctccagacccgcacgccgcgcgcacagagctctcagcgccgctcccagccacagcctcccgcgcctcgctcagctccaacatggcaaaaatctccagccctacagagactgagcggtgcatcgagtccctgattgctgtcttccagaagtatgctggaaaggatggttataactacactctctccaagacagagttcctaagcttcatgaatacagaactagctgccttcacaaagaaccagaaggaccctggtgtccttgaccgcatgatgaagaaactggacaccaacagtgatggtcagctagatttctcagaatttcttaatctgattggtggcctagctatggcttgccatgactccttcctcaaggctgtcccttcccagaagcggacctgaggaccccttggccctggccttcaaacccaccccctttccttccagcctttctgtcatcatctccacagcccacccatcccctgagcacactaaccacctcatgcaggccccacctgccaatagtaataaagcaatgtcacttttttaaaacatgaa

SEQ ID NO: 27077 - DNA, 308 bp, Homo sapiens
  source 1..308: mol_type = unassigned DNA
accactgctggctttttgctgtagctccacattcctgtgcattgaggggttaacattaggctgggaagatgacaaaacttgaagagcatctggagggaattgtcaatatcttccaccaatactcagttcggaaggggcattttgacaccctctctaagggtgagctgaagcagctgcttacaaaggagcttgcaaacaccatcaagaggcctaagaaagggtcttctgtcattgatgaaatattccaaggcctggatgctaatcaagatgaacaggtcgactttcaagaattcatatccctggtagcc

SEQ ID NO: 27078 - DNA, 516 bp, Homo sapiens
  source 1..516: mol_type = unassigned DNA
aagatgaagcctgaactgattataaaaccttccttggctcagtgcccttcaccactgctggctttttgctgtagctccacattcctgtgcattgaggggttaacattaggctgggaagatgacaaaacttgaagagcatctggagggaattgtcaatatcttccaccaatactcagttcggaaggggcattttgacaccctctctaagggtgagctgaagcagctgcttacaaaggagcttgcaaacaccatcaagaatatcaaagataaagctgtcattgatgaaatattccaaggcctggatgctaatcaagatgaacaggtcgactttcaagaattcatatccctggtagccattgcgctgaaggctgcccattaccacacccacaaagagtaggtagctctctgaaggctttttacccagcaatgtcctcaatgagggtcttttctttccctcaccaaaacccagccttgcccgtggggagtaagagttaataaacacactcacgaaaagtt

SEQ ID NO: 27079 - DNA, 1137 bp, Homo sapiens
  source 1..1137: mol_type = unassigned DNA
aacaaattggtaatcggtggttaaataaatatgcccaaagtcccacagctagaaagtagcagggctggaatttgaacccagtccaataaaacctcaaaaccggtgcactttctaccgtatcctgaggcttctttactttggggccctggttagccttagcagcctagttttctacatccttcatgccagttgaatgaaactactgacatgctccacattcttctttctcccatgcttttgttcattcagttacctcctcctaaaatgtctgcatttacccagataatcttccaatggaaatccatggttcaagtgccacctcttcaggaaagccatctgacttcaatcaggaagccagagagctccgtctgcagcagctctttcagctccttcttgctcagcttgtacttgtccccctctttgcccgagtgggcgtggaacacgttgatgagggtctccatcgccgtctccagctcagagcccattgcagcagtgcacctacccacccccatcatggaagtgagctgaggaccaggcccggagtacctggggtctaggcagcagtggatggtgcaggggaaagaggtgggaaggaggtcctgggagggacactggatgtcttaccccaagctgggccttgcagtacctgtggctggctgtgctggttgagcccgcttccacaggtcagccctgacaaaggtcagctagccccttgaggacatcagctttggcctcagggtcctaatggcagcagaaccactgacagagctagaggagtccattgagaccgtggtcaccaccttcttcacctttgcaaggcaggagggccggaaggatagcctcagcgtcaacgagttcaaagagctggttacccagcagttgccccatctgctcaaggatgtgggctctcttgatgagaagatgaagagcttggatgtgaatcaggactcggagctcaagttcaatgagtactggagattgattggggagctggccaaggaaatcaggaagaagaaagacctgaagatcaggaagaagtaaagccgcctggctgagatggggtgggcagggcagagctgatcagggccgagcagaaccgcactcttcccaaataaagcttcctccttgaaacacaaa

SEQ ID NO: 27080 - DNA, 892 bp, Homo sapiens
  source 1..892: mol_type = unassigned DNA
cggtgtccaaaacaaaatggccgccacgtccagtgcttgtctgaccggctaaaatggcgtctacgcaattacgtcaggcgtcagatccgcgcacgactagagggcgggaaagatttgagctacgcctgcgcagagttgagaagctgatgtctcctcgacttccaactggaaccttgaacccccacatttctggaccttgagcattcctcaagtaggaagatgtaatgcaccttgacctctttctaaataagacacttccccaaataaggggagttgagagtgaacagtcttcacgtctccacccacttccagatcccagaggagacagacatcggatggctgttacctcctcctaaaatgtctgcatttacccagataatcttccaatggaaatccatggttcaagtgccacctcttcaggaaagccatctgacttcaatcaggtcagccctgacaaaggtcagctagccccttgaggacatcagctttggcctcagggtcctaatggcagcagaaccactgacagagctagaggagtccattgagaccgtggtcaccaccttcttcacctttgcaaggcaggagggccggaaggatagcctcagcgtcaacgagttcaaagagctggttacccagcagttgccccatctgctcaaggatgtgggctctcttgatgagaagatgaagagcttggatgtgaatcaggactcggagctcaagttcaatgagtactggagattgattggggagctggccaaggaaatcaggaagaagaaagacctgaagatcaggaagaagtaaagccgcctggctgagatggggtgggcagggcagagctgatcagggccgagcagaaccgcactcttcccaaataaagcttcctccttgaaac

SEQ ID NO: 27081 - DNA, 547 bp, Homo sapiens
  source 1..547: mol_type = unassigned DNA
gctgggaggagcggttagagtgtgtgtgggcggatgcgagtggccggagaccagggcccaacataaacaagctttggagacaaacaaccttatgacctgtcagccctgacaaaggtcagctagccccttgaggacatcagctttggcctcagggtcctaatggcagcagaaccactgacagagctagaggagtccattgagaccgtggtcaccaccttcttcacctttgcaaggcaggagggccggaaggatagcctcagcgtcaacgagttcaaagagctggttacccagcagttgccccatctgctcaaggatgtgggctctcttgatgagaagatgaagagcttggatgtgaatcaggactcggagctcaagttcaatgagtactggagattgattggggagctggccaaggaaatcaggaagaagaaagacctgaagatcaggaagaagtaaagccgcctggctgagatggggtgggcagggcagagctgatcagggccgagcagaaccgcactcttcccaaataaagcttcctccttgaaac

SEQ ID NO: 27082 - DNA, 579 bp, Homo sapiens
  source 1..579: mol_type = unassigned DNA
gtactaaacccgtcctggagcagggagtcagagacgccccgttccaggacccttgtcaccgggagacaggagcggggaggatctgtggggtcctgggttcagcactctgccctgctgccgctgaggagaggtcagccctgacaaaggtcagctagccccttgaggacatcagctttggcctcagggtcctaatggcagcagaaccactgacagagctagaggagtccattgagaccgtggtcaccaccttcttcacctttgcaaggcaggagggccggaaggatagcctcagcgtcaacgagttcaaagagctggttacccagcagttgccccatctgctcaaggatgtgggctctcttgatgagaagatgaagagcttggatgtgaatcaggactcggagctcaagttcaatgagtactggagattgattggggagctggccaaggaaatcaggaagaagaaagacctgaagatcaggaagaagtaaagccgcctggctgagatggggtgggcagggcagagctgatcagggccgagcagaaccgcactcttcccaaataaagcttcctccttgaaac

SEQ ID NO: 27083 - DNA, 684 bp, Homo sapiens
  source 1..684: mol_type = unassigned DNA
aggcagcagtggatggtgcaggggaaagaggtgggaaggaggtcctgggagggacactggatgtcttaccccaagctgggccttgcagtacctgtggctggctgtgctggttgagcccgaatcgaccacggaaatttgacacctccgggcttggaagcagctctctcctccttccccgctgcttataaacctcagccctgaggctccagctcactctaccccatctccttgccgggtcagccctgacaaaggtcagctagccccttgaggacatcagctttggcctcagggtcctaatggcagcagaaccactgacagagctagaggagtccattgagaccgtggtcaccaccttcttcacctttgcaaggcaggagggccggaaggatagcctcagcgtcaacgagttcaaagagctggttacccagcagttgccccatctgctcaaggatgtgggctctcttgatgagaagatgaagagcttggatgtgaatcaggactcggagctcaagttcaatgagtactggagattgattggggagctggccaaggaaatcaggaagaagaaagacctgaagatcaggaagaagtaaagccgcctggctgagatggggtgggcagggcagagctgatcagggccgagcagaaccgcactcttcccaaataaagcttcctccttgaaac

SEQ ID NO: 27084 - DNA, 1017 bp, Homo sapiens
  source 1..1017: mol_type = unassigned DNA
gtctcagcggctgccaacagatcatgagccatcagctcctctggggccagctataggacaacagaactctcaccaaaggaccagacacagtgggcaccatgggacagtgtcggtcagccaacgcagaggatgctcaggaattcagtgatgtggagagggccattgagaccctcatcaagaactttcaccagtactccgtggagggtgggaaggagacgctgaccccttctgagctacgggacctggtcacccagcagctgccccatctcatgccgagcaactgtggcctggaagagaaaattgccaacctgggcagctgcaatgactctaaactggagttcaggagtttctgggagctgattggagaagcggccaagagtgtgaagctggagaggcctgtccgggggcactgagaactccctctggaattcttggggggtgttggggagagactgtgggcctggagataaaacttgtctcctctaccaccaccctgtaccctagcctgcacctgtcctcatctctgcaaagttcagcttccttccccaggtctctgtgcactctgtcttggatgctctggggagctcatgggtggaggagtctccaccagagggaggctcaggggactggttgggccagggatgaatatttgagggataaaaattgtgtaagagccaaagaattggtagtagggggagaacagagaggagctgggctatgggaaatgatttgaataatggagctgggaatatggctggatatctggtactaaaaaagggtctttaagaacctacttcctaatctcttccccaatccaaaccatagctgtctgtccagtgctctcttcctgcctccagctctgccccaggctcctcctagactctgtccctgggctagggcaggggaggagggagagcagggttgggggagaggctgaggagagtgtgacatgtggggagaggaccagctgggtgcttgggcattgacagaatgatggttgttttgtatcatttgatt

SEQ ID NO: 27085 - DNA, 1080 bp, Homo sapiens
  source 1..1080: mol_type = unassigned DNA
gaaacccaaggcttttcacccaaatatactgcctgctgtccagagggcacacttaggatcatgagccatcagctcctctggggccagctataggacaacagaactctcaccaaaggaccagacacagtgggcaccatgggacagtgtcggtcagccaacgcagaggatgctcaggaattcagtgatgtggagagggccattgagaccctcatcaagaactttcaccagtactccgtggagggtgggaaggagacgctgaccccttctgagctacgggacctggtcacccagcagctgccccatctcatgccgagcaactgtggcctggaagagaaaattgccaacctgggcagctgcaatgactctaaactggagttcaggagtttctgggagctgattggagaagcggccaagagtgtgaagctggagaggcctgtccgggggcactgagaactccctctggaattcttggggggtgttggggagagactgtgggcctggagataaaacttgtctcctctaccaccaccctgtaccctagcctgcacctgtcctcatctctgcaaagttcagcttccttccccaggtctctgtgcactctgtcttggatgctctggggagctcatgggtggaggagtctccaccagagggaggctcaggggactggttgggccagggatgaatatttgagggataaaaattgtgtaagagccaaagaattggtagtagggggagaacagagaggagctgggctatgggaaatgatttgaataatggagctgggaatatggctggatatctggtactaaaaaagggtctttaagaacctacttcctaatctcttccccaatccaaaccatagctgtctgtccagtgctctcttcctgcctccagctctgccccaggctcctcctagactctgtccctgggctagggcaggggaggagggagagcagggttgggggagaggctgaggagagtgtgacatgtggggagaggaccagctgggtgcttgggcattgacagaatgatggttgttttgtatcatttgattaataaaaaaaaatgaaaaaagtgaaa

SEQ ID NO: 27086 - DNA, 1218 bp, Homo sapiens
  source 1..1218: mol_type = unassigned DNA
ctctgggccgctgaggggagctgaagggaggtcaggcaaacactcactcaatctgcctccctccatcaggctgcccttctctggcttcctcctgatccaagttctctacattcatctctctgcctccaggactggtataagagctgagctcaggtgagctggctcctcctgtcttgtctcagcggctgccaacagatcatgagccatcagctcctctggggccagctataggacaacagaactctcaccaaaggaccagacacagtgggcaccatgggacagtgtcggtcagccaacgcagaggatgctcaggaattcagtgatgtggagagggccattgagaccctcatcaagaactttcaccagtactccgtggagggtgggaaggagacgctgaccccttctgagctacgggacctggtcacccagcagctgccccatctcatgccgagcaactgtggcctggaagagaaaattgccaacctgggcagctgcaatgactctaaactggagttcaggagtttctgggagctgattggagaagcggccaagagtgtgaagctggagaggcctgtccgggggcactgagaactccctctggaattcttggggggtgttggggagagactgtgggcctggagataaaacttgtctcctctaccaccaccctgtaccctagcctgcacctgtcctcatctctgcaaagttcagcttccttccccaggtctctgtgcactctgtcttggatgctctggggagctcatgggtggaggagtctccaccagagggaggctcaggggactggttgggccagggatgaatatttgagggataaaaattgtgtaagagccaaagaattggtagtagggggagaacagagaggagctgggctatgggaaatgatttgaataatggagctgggaatatggctggatatctggtactaaaaaagggtctttaagaacctacttcctaatctcttccccaatccaaaccatagctgtctgtccagtgctctcttcctgcctccagctctgccccaggctcctcctagactctgtccctgggctagggcaggggaggagggagagcagggttgggggagaggctgaggagagtgtgacatgtggggagaggaccagctgggtgcttgggcattgacagaatgatggttgttttgtatcatttgattaataaaaaaaaatgaaaaaagtgaaa

SEQ ID NO: 27087 - DNA, 1025 bp, Homo sapiens
  source 1..1025: mol_type = unassigned DNA
agatcatgagccatcagctcctctggggccagctataggacaacagaactctcaccaaaggaccagacacagtgggcaccatgggacagtgtcggtcagccaacgcagaggatgctcaggaattcagtgatgtggagagggccattgagaccctcatcaagaactttcaccagtactccgtggagggtgggaaggagacgctgaccccttctgagctacgggacctggtcacccagcagctgccccatctcatgccgagcaactgtggcctggaagagaaaattgccaacctgggcagctgcaatgactctaaactggagttcaggagtttctgggagctgattggagaagcggccaagagtgtgaagctggagaggcctgtccgggggcactgagaactccctctggaattcttggggggtgttggggagagactgtgggcctggagataaaacttgtctcctctaccaccaccctgtaccctagcctgcacctgtcctcatctctgcaaagttcagcttccttccccaggtctctgtgcactctgtcttggatgctctggggagctcatgggtggaggagtctccaccagagggaggctcaggggactggttgggccagggatgaatatttgagggataaaaattgtgtaagagccaaagaattggtagtagggggagaacagagaggagctgggctatgggaaatgatttgaataatggagctgggaatatggctggatatctggtactaaaaaagggtctttaagaacctacttcctaatctcttccccaatccaaaccatagctgtctgtccagtgctctcttcctgcctccagctctgccccaggctcctcctagactctgtccctgggctagggcaggggaggagggagagcagggttgggggagaggctgaggagagtgtgacatgtggggagaggaccagctgggtgcttgggcattgacagaatgatggttgttttgtatcatttgattaataaaaaaaaatgaaaaaagtgaaa

SEQ ID NO: 27088 - DNA, 557 bp, Homo sapiens
  source 1..557: mol_type = unassigned DNA
gctctccttcctgggtctgtctctgccacctggtctgccacagatccatgatgtgcagttctctggagcaggcgctggctgtgctggtcactaccttccacaagtactcctgccaagagggcgacaagttcaagctgagtaagggggaaatgaaggaacttctgcacaaggagctgcccagctttgtggggcattccagagaaccatgtgctgtgagggccttccgagtccatctgtttaatcctgtcattggagacttgagaaaccagagcccagaagggaaaagtgattgtcccaagatcacacagcactgggagaaagtggatgaggaggggctgaagaagctgatgggcagcctggatgagaacagtgaccagcaggtggacttccaggagtatgctgttttcctggcactcatcactgtcatgtgcaatgacttcttccagggctgcccagaccgaccctgaagcagaactcttgacttcctgccatggatctcttgggcccaggactgttgatgcctttgagttttgtattcaataaactttttttgtctg

SEQ ID NO: 27089 - DNA, 998 bp, Homo sapiens
  source 1..998: mol_type = unassigned DNA
tggcaccagtctccaggccccagagcaggggttgcctcccctcaccccggtccaggatgcccagtccccacgacacctcccacttcccactgtggcctgggtgggctcaggggctgcccttgacctggcctagagccctcccccagctggtggtggagctggcactctctgggagggagggggctgggagggaatgagtgggaatggcaagaggccagggtttggtgggatcaggttgaggcaggtttggtttccttaaaatgccaagttgggggccagtggggcccacatataaatcctcaccctgggagcctggctgccttgctctccttcctgggtctgtctctgccacctggtctgccacagatccatgatgtgcagttctctggagcaggcgctggctgtgctggtcactaccttccacaagtactcctgccaagagggcgacaagttcaagctgagtaagggggaaatgaaggaacttctgcacaaggagctgcccagctttgtgggggagaaagtggatgaggaggggctgaagaagctgatgggcagcctggatgagaacagtgaccagcaggtggacttccaggagtatgctgttttcctggcactcatcactgtcatgtgcaatgacttcttccagggctgcccagaccgaccctgaagcagaactcttgacttcctgccatggatctcttgggcccaggactgttgatgcctttgagttttgtattcaataaactttttttgtctgttgataatattttaattgctcagtgatgttccataacccggctggctcagctggagtgctgggagatgagggcctcctggatcctgctcccttctgggctctgactctcctggaaatctctccaaggccagagctatgctttaggtctcaattttggaatttcaaacaccagcaaaaaattggaaatcgagataggttgctgacttttattttgtcaaataaagatattaaaaaaggcaaa

SEQ ID NO: 27090 - DNA, 457 bp, Homo sapiens
  source 1..457: mol_type = unassigned DNA
ggaggagggtgtgccgctgagtcactgcctgggcatctgggcctggaacctcggccacagatccatgatgtgcagttctctggagcaggcgctggctgtgctggtcactaccttccacaagtactcctgccaagagggcgacaagttcaagctgagtaagggggaaatgaaggaacttctgcacaaggagctgcccagctttgtgggggagaaagtggatgaggaggggctgaagaagctgatgggcagcctggatgagaacagtgaccagcaggtggacttccaggagtatgctgttttcctggcactcatcactgtcatgtgcaatgacttcttccagggctgcccagaccgaccctgaagcagaactcttgacttcctgccatggatctcttgggcccaggactgttgatgcctttgagttttgtattcaataaactttttttgtctgttgata

SEQ ID NO: 27091 - DNA, 453 bp, Homo sapiens
  source 1..453: mol_type = unassigned DNA
gtgagctcaccatgtgggggtgaggctgagagaaaacaagtacacagccacagatccatgatgtgcagttctctggagcaggcgctggctgtgctggtcactaccttccacaagtactcctgccaagagggcgacaagttcaagctgagtaagggggaaatgaaggaacttctgcacaaggagctgcccagctttgtgggggagaaagtggatgaggaggggctgaagaagctgatgggcagcctggatgagaacagtgaccagcaggtggacttccaggagtatgctgttttcctggcactcatcactgtcatgtgcaatgacttcttccagggctgcccagaccgaccctgaagcagaactcttgacttcctgccatggatctcttgggcccaggactgttgatgcctttgagttttgtattcaataaactttttttgtctgttgataata

SEQ ID NO: 27092 - DNA, 579 bp, Homo sapiens
  source 1..579: mol_type = unassigned DNA
aaatggctcaccaaggttgcacagctggcgacaggcagagaggatcccacaagtttttcttctgggtgcagcttcctcgagttcagggcaggaggcaggtgaggatggccaggcctctggagcaggcggtagctgccatcgtgtgcaccttccaggaatacgcagggcgctgtggggacaaatacaagctctgccaggcggagctcaaggagctgctgcagaaggagctggccacctggaccccgactgagtttcgggaatgtgactacaacaaattcatgagtgttctggacaccaacaaggactgcgaggtggactttgtggagtatgtgcgctcacttgcctgcctctgtctctactgccacgagtacttcaaggactgcccctcagagcccccctgctcccagtagcctctgctccagggggtgcgctggctgtcgggggctgggcatgtctcccacaccccctcctaccctctctcctgtacccctttcaatctggacttgcccaggtcttctgcgatcagttaacccattttacctaggaggcccagagatgtgagggctccttcctcaggat

SEQ ID NO: 27093 - DNA, 856 bp, Homo sapiens
  source 1..856: mol_type = unassigned DNA
ggggaggtgagcaattccaggaagggcttcccctccaatagaacagagtatccctatacagaacctccctgctcaaaacccccaggggtcgggagggtaacctcaggggaggccagtctcagattggtaaacacccgaactggtcaactctcaagagaccatctggttcaggttcctgactgggccagcgagtgaggatggccaggcctctggagcaggcggtagctgccatcgtgtgcaccttccaggaatacgcagggcgctgtggggacaaatacaagctctgccaggcggagctcaaggagctgctgcagaaggagctggccacctggaccccgactgagtttcgggaatgtgactacaacaaattcatgagtgttctggacaccaacaaggactgcgaggtggactttgtggagtatgtgcgctcacttgcctgcctctgtctctactgccacgagtacttcaaggactgcccctcagagcccccctgctcccagtagcctctgctccagggggtgcgctggctgtcgggggctgggcatgtctcccacaccccctcctaccctctctcctgtacccctttcaatctggacttgcccaggtcttctgcgatcagttaacccattttacctaggaggcccagagatgtgagggctccttcctcaggatgcccagcgaatgaggggtagagccactctggggcccagcctgcctgccgcacccctgtggcctcccttgtggatgggaggaggcgggatctgctctgaggccctcgaggctcagcagagcgtgcaccaatgagaccacgatgggaaagggcctatttaactcctaataaaaaactggcatcagc

SEQ ID NO: 27094 - DNA, 566 bp, Homo sapiens
  source 1..566: mol_type = unassigned DNA
ttcccctctctacaaccctctctcctcagcgcttcttctttcttggtttggtgcttctgagatgtgggcttgcacacgctgttgctatagtacgtgttgatcctgactgctgtcatggcgtgccctctggagaaggccctggatgtgatggtgtccaccttccacaagtactcgggcaaagagggtgacaagttcaagctcaacaagtcagaactaaaggagctgctgacccgggagctgcccagcttcttggggaaaaggacagatgaagctgctttccagaagctgatgagcaacttggacagcaacagggacaacgaggtggacttccaagagtactgtgtcttcctgtcctgcatcgccatgatgtgtaacgaattctttgaaggcttcccagataagcagcccaggaagaaatgaaaactcctctgatgtggttggggggtctgccagctggggccctccctgtcgccagtgggcacttttttttttccaccctggctccttcagacacgtgcttgatgctgagcaagttcaataaagattcttggaagttttgaggctga

SEQ ID NO: 27095 - DNA, 531 bp, Homo sapiens
  source 1..531: mol_type = unassigned DNA
tcctttcttgggaggctacaaatagtgacgccctgtctctaagctcctacagctgaaacgccagcaccagtgatcctgactgctgtcatggcgtgccctctggagaaggccctggatgtgatggtgtccaccttccacaagtactcgggcaaagagggtgacaagttcaagctcaacaagtcagaactaaaggagctgctgacccgggagctgcccagcttcttggggaaaaggacagatgaagctgctttccagaagctgatgagcaacttggacagcaacagggacaacgaggtggacttccaagagtactgtgtcttcctgtcctgcatcgccatgatgtgtaacgaattctttgaaggcttcccagataagcagcccaggaagaaatgaaaactcctctgatgtggttggggggtctgccagctggggccctccctgtcgccagtgggcacttttttttttccaccctggctccttcagacacgtgcttgatgctgagcaagttcaataaagattcttggaagtttt

SEQ ID NO: 27096 - DNA, 573 bp, Homo sapiens
  source 1..573: mol_type = unassigned DNA
ggccctgggagtttgctgcccgaatctccagagcttgcgcagcggatcttgcaaatgttcactgcccagagcatgtgttccccactgtgcacaccctcccagccagatcctgactgctgtcatggcgtgccctctggagaaggccctggatgtgatggtgtccaccttccacaagtactcgggcaaagagggtgacaagttcaagctcaacaagtcagaactaaaggagctgctgacccgggagctgcccagcttcttggggaaaaggacagatgaagctgctttccagaagctgatgagcaacttggacagcaacagggacaacgaggtggacttccaagagtactgtgtcttcctgtcctgcatcgccatgatgtgtaacgaattctttgaaggcttcccagataagcagcccaggaagaaatgaaaactcctctgatgtggttggggggtctgccagctggggccctccctgtcgccagtgggcacttttttttttccaccctggctccttcagacacgtgcttgatgctgagcaagttcaataaagattcttggaagttttgaggctga

SEQ ID NO: 27097 - DNA, 600 bp, Homo sapiens
  source 1..600: mol_type = unassigned DNA
agtatccgctctcccctgtcccctgctatgggcagggcctggctggggtataaataggtcagacctctgggccgtccccattcttcccctctctacaaccctctctcctcagcgcttcttctttcttggtttgatcctgactgctgtcatggcgtgccctctggagaaggccctggatgtgatggtgtccaccttccacaagtactcgggcaaagagggtgacaagttcaagctcaacaagtcagaactaaaggagctgctgacccgggagctgcccagcttcttggggaaaaggacagatgaagctgctttccagaagctgatgagcaacttggacagcaacagggacaacgaggtggacttccaagagtactgtgtcttcctgtcctgcatcgccatgatgtgtaacgaattctttgaaggcttcccagataagcagcccaggaagaaatgaaaactcctctgatgtggttggggggtctgccagctggggccctccctgtcgccagtgggcacttttttttttccaccctggctccttcagacacgtgcttgatgctgagcaagttcaataaagattcttggaagttttgaggctga

SEQ ID NO: 27098 - DNA, 513 bp, Homo sapiens
  source 1..513: mol_type = unassigned DNA
attcttcccctctctacaaccctctctcctcagcgcttcttctttcttggtttgatcctgactgctgtcatggcgtgccctctggagaaggccctggatgtgatggtgtccaccttccacaagtactcgggcaaagagggtgacaagttcaagctcaacaagtcagaactaaaggagctgctgacccgggagctgcccagcttcttggggaaaaggacagatgaagctgctttccagaagctgatgagcaacttggacagcaacagggacaacgaggtggacttccaagagtactgtgtcttcctgtcctgcatcgccatgatgtgtaacgaattctttgaaggcttcccagataagcagcccaggaagaaatgaaaactcctctgatgtggttggggggtctgccagctggggccctccctgtcgccagtgggcacttttttttttccaccctggctccttcagacacgtgcttgatgctgagcaagttcaataaagattcttggaagtttt

SEQ ID NO: 27099 - DNA, 710 bp, Homo sapiens
  source 1..710: mol_type = unassigned DNA
tcccacacttctgaggttttctttccaggacagcctggtttcccttcttcggcttattgttccatcagatttcagattttgagttctgatttttggtcagaagagtaaagtttctgggattggggacgtgtgtgctatgggaactcagtgtgtccccagcccttgtttgtaaacaaggaagggacagagatcagggaaataaaggcagaaggcagtgagagggaggctatgcctgctgcttggattctctgggctcactcccacagtgagctgcacactgtgatggagactcctctggagaaggccctgaccactatggtgaccacgtttcacaaatattcggggagagagggtagcaaactgaccctgagtaggaaggaactcaaggagctgatcaagaaagagctgtgtcttggggagatgaaggagagcagcatcgatgacttgatgaagagcctggacaagaacagcgaccaggagatcgacttcaaggagtactcggtgttcctgaccatgctgtgcatggcctacaacgacttctttctagaggacaacaagtgaccagggctgccctccaccctcaccctccaccctttgctgctgacctcggctgctcctctcacagaccctctttggccccctgccctcctctccctcccagatggacccttccatgggaggaaataaagtttccatcgcaggtgctggga

SEQ ID NO: 27100 - DNA, 506 bp, Homo sapiens
  source 1..506: mol_type = unassigned DNA
cagccccctctcagccctggactctctctttgccctgtccccgactttaataatgggacactcctcgatatcagagctgcacactgtgatggagactcctctggagaaggccctgaccactatggtgaccacgtttcacaaatattcggggagagagggtagcaaactgaccctgagtaggaaggaactcaaggagctgatcaagaaagagctgtgtcttggggagatgaaggagagcagcatcgatgacttgatgaagagcctggacaagaacagcgaccaggagatcgacttcaaggagtactcggtgttcctgaccatgctgtgcatggcctacaacgacttctttctagaggacaacaagtgaccagggctgccctccaccctcaccctccaccctttgctgctgacctcggctgctcctctcacagaccctctttggccccctgccctcctctccctcccagatggacccttccatgggaggaaataaagtttccatcgca

SEQ ID NO: 27101 - DNA, 710 bp, Homo sapiens; identical to SEQ ID NO: 27099
  source 1..710: mol_type = unassigned DNA

SEQ ID NO: 27102 - DNA, 684 bp, Homo sapiens
  source 1..684: mol_type = unassigned DNA
ctgcgcagatgaggggagactcgtcaccaggcgtgcagtgggcactgctgggctcccccatcccgtcctaacccggaacagccccgggcaggaggcgtggaaagtcgagggggtaaaccgcgaatgtgcgttgtgtaagccacggcgcagggtggggcgcgggcgggacttgggcgggcggggtgggcttggccgagctggcctccggggcaccgaccgctataaggccagtcggactgcgacacagcccatcccctcgaccgctcgcgtcgcatttggccgcctccctaccgctccaagcccagccctcagccatggcatgccccctggatcaggccattggcctcctcgtggccatcttccacaagtactccggcagggagggtgacaagcacaccctgagcaagaaggagctgaaggagctgatccagaaggagctcaccattggctcgaagctgcaggatgctgaaattgcaaggctgatggaagacttggaccggaacaaggaccaggaggtgaacttccaggagtatgtcaccttcctgggggccttggctttgatctacaatgaagccctcaagggctgaaaataaatagggaagatggagacaccctctgggggtcctctctgagtcaaatccagtggtgggtaattgtacaataaattttttttggtcaaattta

SEQ ID NO: 27103 - DNA, 673 bp, Homo sapiens
  source 1..673: mol_type = unassigned DNA
gagctgcgcagatgaggggagactcgtcaccaggcgtgcagtgggcactgctgggctcccccatcccgtcctaacccggaacagccccgggcaggaggcgtggaaagtcgagggggtaaaccgcgaatgtgcgttgtgagccctgggtactttccagggccagctgccctcacgctgggggtccagccatcccctgcccagttcagccgctggatccagactggggccatctgtggcgctcccccgctggagggatagtcaggagcagcagtgctgtgccaggtccaagcccagccctcagccatggcatgccccctggatcaggccattggcctcctcgtggccatcttccacaagtactccggcagggagggtgacaagcacaccctgagcaagaaggagctgaaggagctgatccagaaggagctcaccattggctcgaagctgcaggatgctgaaattgcaaggctgatggaagacttggaccggaacaaggaccaggaggtgaacttccaggagtatgtcaccttcctgggggccttggctttgatctacaatgaagccctcaagggctgaaaataaatagggaagatggagacaccctctgggggtcctctctgagtcaaatccagtggtgggtaattgtacaataaattttttttggtcaaattta

SEQ ID NO: 27104 - DNA, 442 bp, Homo sapiens
  source 1..442: mol_type = unassigned DNA
ggcttggggtgcaggccagcccagactgactactggctgaaagatctgctttgggaagctttttgaaagcaaagatgagcaacactcaagctgagaggtccataataggcatgatcgacatgtttcacaaatacaccagacgtgatgacaagattgagaagccaagcctgctgacgatgatgaaggagaacttccccaacttccttagtgcctgtgacaaaaagggcacaaattacctcgccgatgtctttgagaaaaaggacaagaatgaggataagaagattgatttttctgagtttctgtccttgctgggagacatagccacagactaccacaagcagagccatggagcagcgccctgttccgggggcagccagtgacccagccccaccaatgggcctccagagaccccaggaacaataaaatgtcttctcccaccaga

SEQ ID NO: 27105 - DNA, 479 bp, Homo sapiens
  source 1..479: mol_type = unassigned DNA
tgggaagagccaggctgagccttataaaggactgctctttgtccaaacacacacatctcactcatccttctactcgtgacgcttcccagctctggctttttgaaagcaaagatgagcaacactcaagctgagaggtccataataggcatgatcgacatgtttcacaaatacaccagacgtgatgacaagattgagaagccaagcctgctgacgatgatgaaggagaacttccccaacttccttagtgcctgtgacaaaaagggcacaaattacctcgccgatgtctttgagaaaaaggacaagaatgaggataagaagattgatttttctgagtttctgtccttgctgggagacatagccacagactaccacaagcagagccatggagcagcgccctgttccgggggcagccagtgacccagccccaccaatgggcctccagagaccccaggaacaataaaatgtcttctcccaccaga

SEQ ID NO: 27106 - DNA, 495 bp, Homo sapiens
  source 1..495: mol_type = unassigned DNA
gagcagccttcctgagagaggagagagaaagctcagggaggtctggagcaaagatactcctggaggtggggagtgaggcagggataaggaaggagagtatcctccagcaccttccagtgggtggggcaagtccgtgggcatcatgttgaccgagctggagaaagccttgaactctatcatcgacgtctaccacaagtactccctgataaaggggaatttccatgccgtctacagggatgacctgaagaaattgctagagaccgagtgtcctcagtatatcaggaaaaagggtgcagacgtctggttcaaagagttggatatcaacactgatggtgcagttaacttccaggagttcctcattctggtgataaagatgggcgtggcagcccacaaaaaaagccatgaagaaagccacaaagagtagctgagttactgggcccagaggctgggcccctggacatgtacctgcagaataataaagtcatcaatacctca

SEQ ID NO: 27107 - DNA, 523 bp, Homo sapiens
  source 1..523: mol_type = unassigned DNA
gagaaaccagagactgtagcaactctggcagggagaagctgtctctgatggcctgaagctgtgggcagctggccaagcctaaccgctataaaaaggagctgcctctcagccctgcatgtctcttgtcagctgtctttcagaagacctggtggggcaagtccgtgggcatcatgttgaccgagctggagaaagccttgaactctatcatcgacgtctaccacaagtactccctgataaaggggaatttccatgccgtctacagggatgacctgaagaaattgctagagaccgagtgtcctcagtatatcaggaaaaagggtgcagacgtctggttcaaagagttggatatcaacactgatggtgcagttaacttccaggagttcctcattctggtgataaagatgggcgtggcagcccacaaaaaaagccatgaagaaagccacaaagagtagctgagttactgggcccagaggctgggcccctggacatgtacctgcagaataataaagtcatcaatacctca

SEQ ID NO: 27108 - DNA, 577 bp, Homo sapiens
  source 1..577: mol_type = unassigned DNA
aaacactctgtgtggctcctcggctttgacagagtgcaagacgatgacttgcaaaatgtcgcagctggaacgcaacatagagaccatcatcaacaccttccaccaatactctgtgaagctggggcacccagacaccctgaaccagggggaattcaaagagctggtgcgaaaagatctgcaaaattttctcaagaaggagaataagaatgaaaaggtcatagaacacatcatggaggacctggacacaaatgcagacaagcagctgagcttcgaggagttcatcatgctgatggcgaggctaacctgggcctcccacgagaagatgcacgagggtgacgagggccctggccaccaccataagccaggcctcggggagggcaccccctaagaccacagtggccaagatcacagtggccacggccacggccacagtcatggtggccacggccacagccactaatcaggaggccaggccaccctgcctctacccaaccagggccccggggcctgttatgtcaaactgtcttggctgtggggctaggggctggggccaaataaagtctcttcctccaagtca

SEQ ID NO: 27109 - DNA, 877 bp, Homo sapiens
  source 1..877: mol_type = unassigned DNA
cctggcagccctgccacccccgccttcggctcccattggctgccacggcctgcagtgggctgcaccagggttcatccatcctccctgggcagagggaataagaggctgcctctgcccaccagtcctgccgcccaggacccgcagcagagacgacgcctgcagcaaggagaccaggaaggggtgagacaaggaagaggatgtctgagctggagaaggccatggtggccctcatcgacgttttccaccaatattctggaagggagggagacaagcacaagctgaagaaatccgaactgaaggagctcatcaacaatgagctttcccatttcttagaggaaatcaaagagcaggaggttgtggacaaagtcatggaaacactggacaatgatggagacggcgaatgtgacttccaggaattcatggcctttgttgccatggttactactgcctgccacgagttctttgaacatgagtgagattagaaagcagccaaacctttcctgtaacagagacggtcatgcaagaaagcagacagcaagggcttgcagcctagtaggagctgagctttccagccgtgttgtagctaattaggaagcttgatttgctttgtgattgaaaaattgaaaacctctttccaaaggctgttttaacggcctgcatcattctttctgctatattaggcctgtgtgtaagctgactggccccagggactcttgttaacagtaacttaggagtcaggtctcagtgataaagcgtgcaccgtgcagcccgccatggccgtgtagaccctaacccggagggaaccctgactacagaaattaccccggggcacccttaaaacttccactacctttaaaaaacaaagccttatccagca

SEQ ID NO: 27110 - DNA, 839 bp, Homo sapiens
  source 1..839: mol_type = unassigned DNA
ttgctcctagtcactgtctcactttcagattgattttaacagcttgcagttgatggtttgctcacctgcactctaccacctcatcttggagccttgcaggaacagagagggaccctgtggggattaattcaggggaaattaatccctgaattcccttgctgctctgcctctgtatttttgccagtttccctgttggcccaacccagccagaattcagagggcatgggaatatatccccgtggcccacacggacagagaaggcaggcccacagctgtctaagaggccggtggaaggattatgataaaagtgcaaattcccagaatgcccctccaggccatgcctgctgctctgagcttgaaaagagtgccaaggccattccatcccccttgtctgggttgaggtctgtattgataacatatgaaatgttttaggatgaggtatagatgagaaggcaactttcctttgcgagcccctaggatgtctgagctggagaaggccatggtggccctcatcgacgttttccaccaatattctggaagggagggagacaagcacaagctgaagaaatccgaactgaaggagctcatcaacaatgagctttcccatttcttagaggaaatcaaagagcaggaggttgtggacaaagtcatggaaacactggacaatgatggagacggcgaatgtgacttccaggaattcatggcctttgttgccatggttactactgcctgccacgagttctttgaacatgagtgagattagaaagcagccaaacctttcctgtaacagagacggtcatgcaagaaagcagacagcaagggcttgcagcctagtagga

SEQ ID NO: 27111 - DNA, 1279 bp, Homo sapiens
  source 1..1279: mol_type = unassigned DNA
cacctagaaggaaggagagctgctcagagaggccccagggaatctgactcaacaggccctaccaggctctcctcttggtctgtgagcatccagccttacttttgtatccaatcatatttccatacttcgctgaactgtgtttatggatagtttccaccagatctttggatcttcatcttgaaggctgccgtgccacataagctatgatcaaatacatctgttatgctcttctcctattcatctgccttctgcccgttgattttcagcaaactcccagaggatgaaggggagttttctgtttggccccacaggggaggagcgagcgagattgacgtggaagctgggcctctgaaggacacagagtgctctaagaaagggacgatggggcagatccatgttcacaaacacgcccatgtgaattcactctcagatgtctcctcgtgtcagcacgctgggtgccagcacgctctgatattgacacaaagggccacggagtcaccactcactccacacacactcaccccgtgcccacttacccagggagggccaggaatgaggatgccactgtggctcagtgatggcgccgagacacaggtgaacactgtaaaatgtggatgcctggaggcagcccacaccctgggccttggctgggggaaaggttccagaaacgtcatcacaacgatgcatttcatcagaactgagcacatgaatggggaggggcaggacttcctgaatgtcccaaccccactgtcccaccctctgtgtcaatatgaggctgccttataaagcaccaagaggctgccagtgggacattttctcggccctgccagcccccaggaggaaggtgggtctgaatctagcaccatgacggaactagagacagccatgggcatgatcatagacgtcttttcccgatattcgggcagcgagggcagcacgcagaccctgaccaagggggagctcaaggtgctgatggagaaggagctaccaggcttcctgcagagtggaaaagacaaggatgccgtggataaattgctcaaggacctggatgccaatggagatgcccaggtggacttcagtgagttcatagtgttcgtggctgcaatcacgtctgcctgtcacaagtactttgagaaggcaggactcaaatgatgccctggagatgtcacagattcctggcagagccatggtcccaggcttcccaaaagtgtttgttggcaattattcccctaggctgagcctgctcatgtacctctgattaataaatgcttatgaaatg

SEQ ID NO: 27112 - DNA, 1468 bp, Homo sapiens
  source 1..1468: mol_type = unassigned DNA
cagaaattcagacaagagcattctccttatctcatctgcacaggaagcaggtctaagtgtaatttcacaagcccctgactctgtgtagacacccagctctccagaaaaatgctttgaagacaaaggatacagcatacagtcccgtgtctcggctgagtcatcgcattccttaatagtgtcttctccccgggtttggtggcctgcttctggagtggtcagttctgctgccgacatgcccacccagctcgagatggccatggacaccatgattagaatcttccaccgctattctggcaaggaaaggaagagattcaagctcagcaagggggaactgaaactgctcctgcagcgagagctcacggaattcctctcgtgccaaaaggaaacccagttggttgataagatagtgcaggacctggatgccaataaggacaacgaagtggattttaatgaattcgtggtcatggtggcagctctgacagttgcttgtaatgattactttgtagaacaattgaagaagaaaggaaaataaaggaagttcgtgaatgctaatcaagggctaaataaagtggaaagcagcatccttgaaaatcatcgctctcaggacggggtctgcctggaatagcactgaatgtgtttagtagtgcctttggcttgggggctttggagaaagctgcttgagcccttcccatgctcataaattaggtaaggagcagtgaggaagtgtctacagcaacctcagccaatgtgatgtgcctctacagctgtatgaagtagattctctgattttatcttgaaatccacaacttccacaaaaaagaaaaatcttttaccatttctcattaaaaaagtaatataagtttattgtagggggaaataatcaaatgtaatctcattacccagatataatcactgttaacttcttcattcgaattttccctaggtccatgtatctatatatctatggttcataaaaatgagattacaccaaaaaatatcttttgttatctatatagttccagcttaataaatatacaactgtattattatttttgtctgaatagtattttcattgatatatcacaatatatttactccaattccctattgcatatagattatttctaatttttctattaataatactaagggagcttttaagtcaatacatctgaatcttgaataaaattcttgttccttctctttggatgggtattcagactcttaattttacaaatgaagaaataaagtcccagaaggtaacagagatagaactaggcacgattttctattcttctttccttcctttctttgtgagagttaacgattatttaaaagtattcataattttctgataataaaagtaagacatggcattatgacactggatattcaaaaaccacgatgtccttttacttgaagattttaaaaggaaatgattacaataaatacccagagtcaacaatta

SEQ ID NO: 27113 - DNA, 1017 bp, Homo sapiens
  source 1..1017: mol_type = unassigned DNA
gagtctggaccacgcagactcagaacagcactactcacagcagggcctcttgctcgctctagctgctgggaggaaaacggcttgctaatctccacgcccagaaattcagacaagagcattctccttatctcatctgcacaggaagcaggtctaagtgtaatttcacaagcccctgactctgtgtagacacccagctctccagaaaaatgctttgaagacaaaggatacagcatacagtcccgtgtctcggctgagtcatcgcattccttaatagtgtcttctccccgggtttggtggcctgcttctggagtggtcagttctgctgccgacatgcccacccagctcgagatggccatggacaccatgattagaatcttccaccgctattctggcaaggaaaggaagagattcaagctcagcaagggggaactgaaactgctcctgcagcgagagctcacggaattcctctcgtgccaaaaggaaacccagttggttgataagatagtgcaggacctggatgccaataaggacaacgaagtggattttaatgaattcgtggtcatggtggcagctctgacagttgcttgtaatgattactttgtagaacaattgaagaagaaaggaaaataaaggtaagtaataagctcatctaaaggcagaaatatatccaaagttatgtacttaatgttcatttataccgttcagatctatagacccagtaatgtcatttatagctataatatccagtgcatatattaataattaattgctactattgaattatgtgccccttaaaatattgactttatgtagatattctaaatctcatatgccctacttgaaacttgcctgtattattaagaggctatatgcatctttttggtttgtcaaaacgagggcattacaaaaatttagctactttcaaatgagacttgaatttggcaaatttctaagatggacattcatatccttaaattgtattttgaacttcttaccctattaaaaaaaattaactgg

SEQ ID NO: 27114 - DNA, 3583 bp, Homo sapiens
  source 1..3583: mol_type = unassigned DNA
gactcggggtaggggaggtcggggagggggcgataaaatggcgcagggggcggagtgaggcgcagtcgttcgcccaggctttggcccggcttccggaggaaggtgggagtcaatcattttgacaagtctcctgaaaggaacagctagcaggaactgaaacctttttccatttggtctcgtggcaaaggcagagattgctccagcagctccacacaaaatgatgtgctcacgggtgccctctgaacagtcttctggtacctctctcttgcctaaagacggtgccccattttcttgggattccttggatgaggatggattggatgactccttgctggagctgtcagagggagaagaagatgatggtgatgtaaattacacagaggaagagattgatgcactgttgaaggaagatgacccatcatatgagcagtcttctggggaagatgatggtgggcatgttgagaagggagaaagagggagtcaaattctacttgatactccccgagagaaaaattcatcgtacagcctgggaccagtagctgagactcctgacctcttcaaactacctcagctaagtacatcaagtggtcatggaccagctcatactaaaccattaaacagacgctctgtactagaaaagaatcttataaaagtaactgttgcaccatttaatccaacagtttgtgatgctctgcttgataaggacgagactgattcgtccaaagatactgaaaaactctcttcccttggagaagagatgagagaagatggtcttagcccaaatgaaagcaaactttgtactgaatctgaagggatcagccccaataactctgcctggaatgggccccagctctcttcttcaaacaataactttcaacagactgtctctgataaaaatatgcctgacagtgagaaccctacgtctgtattctctcggatctcagaccattcagagactcctaatatggagttatcctgcagaaatggtggttcacacaagtcaagttgtgaaatgagatctctggttgtttccacctcatcaaacaaacaggatgttcttaacaaggattctgggaagatgaaaggccatgagagaagactaggcaaagtcattcctgttctacaaactaagaccaggactaatgttccgacgttttcacagtcaaatctagaacagcagaagcagctttatctcaggagtgtcattgctcatatagaagacccagaggacactaaccaaggatgaatccctagaagtggaattgctgggcgcagtggctcatgcctgtaatcccagcactttgggaggctgaggcagatggatcatctgaggtcaggagttcaagaccagcctgactaacatgatgaaacctgtctctactaaaaatataaaaattagctgggcgtggtggtgggcgcctgtaatcccagctactcgggaggctgaggcaggagaatctcttgaacccaagaggcagaagttgtagtgagcgaagatcaggccattgcactccagcctgggcaacgagcaaaattccatctcaaaagaaaaaaatgttcattttctaaatatataatttcttctacagttattaactagcattcttttgtaaagattttctattactttactattactataacctcatggatttttttaaagaatcaatatgttgtaatcaattatagctactgttcttggtttttctttttgatgctcaatttgtctcaaatttgataaatgggagctccttcaagatgactcttgttcctattgacatgatcccattaatctttttttttaattgtggtaaaaaaaatacatctaacataaaattaccatcttaaccatttttaagtgcacaattcagtaatgttacatatattcacattgttgtgaaacatatctccagaacctcttcatcttgcaaatctaaaactctatacctacacaacagttccccctctctcccttcagtctctggtaaccaccattctactttctttttttttaaatatgactactttagataccttttataagtggaatcatacaatatttatctttttgtgactggcttatttcgtttagtataatgtcttcaagatttacccattgtggcatgtgacaggatttccttcctttttaaatatttttatttttattttttttctatttttctcaccactcaatttccttcctttttaaggctgaataatattccattgtatatatacacaccattttgtttaatccattcatctgtcagtagacatttgggttgcttccacttcttggctattgtgaattgtgccactatgaacatgggtctacagatatctctttaagaccctatttttaattcttctggatatatatgcagaagtgggattgctggaccatatggtaggtctgtttttaattttttgaggaacttcatactgtttttcatagcagttgcaccattttgcagtcctaccaacagtgcacaagagttctaatttttccccatccttgccagcacttatttttttgtgctttttttttttttttgaggctggagtctcgccctgtcatccaggctggagtgcagtggtacagtcttggctcactgcaacccctacctcccacattcaagtgattctcgtgcctcagcctcccaagtagctgggactacaggcgcactccaccacgtctggctaatttttgtattttagtagagatggggttttgccatgttggtcaggctggtctcgaactcctgagctcaagtgatctccccatctcggcctcccaaagtgctgggattgcaggtgtgaaccactgtgcctggcttgtgtttttgtttttgtttgtttttttttatagtagctatcctaaagggtgttaaatcagtattcattgtttttgtgtcccaactaagtattgttcactgaaaagccaagtagtatattatggcttcattttctttcttgaattgtttatttttgtagagttgttaattgcttcagtttctttcattaaattttttttttgggagagctttttcctagagccttctgttctactgctccaatttgcactgcttgttctttagccctgcaacagagctgtcatcccaggattttcctctgctgccctcctgggttgaatcctgtttcttggatcctatatcttcctctttcttatttttggttttagtagaggacatcctctgagaatatctaagaaagggtgcatagatgttttctttgtgtttacatatctgaacatgtctttattctatcctcatacttgattgatagtttgatataaaattctaaatttaaaatcaatttttgctcagaaatttgaagacatggccaggcgcagtggctcacgcctgtaatcccagcactttgggaggctgaggtgggcggatcccaaggtcaagagttcgagaccagtctggccaatatggtgaaaccccatctctactaaaaaaaaaacatacaaaaattagcctggtgtggtggcgggtgcctgtagtccagcctgggcaacaaaacaagactccatctcaaaaaaaaaaaaaaaaaaaaa

SEQ ID NO: 27115 - DNA, 4318 bp, Homo sapiens
  source 1..4318: mol_type = unassigned DNA
actgctggtttgccctccccctggtgttggcccggctgactcggggtaggggaggtcggggagggggcgataaaatggcgcagggggcggagtgaggcgcagtcgttcgcccaggctttggcccggcttccggaggaaggtgggagtcaatcattttgacaagtctcctgaaaggaacagctagcaggaactgaaacctttttccatttggtctcgtggcaaaggcagagattgctccagcagctccacacaaaatgatgtgctcacgggtgccctctgaacagtcttctggtacctctctcttgcctaaagacggtgccccattttcttgggattccttggatgaggatggattggatgactccttgctggagctgtcagagggagaagaagatgatggtgatgtaaattacacagaggaagagattgatgcactgttgaaggaagatgacccatcatatgagcagtcttctggggaagatgatggtgggcatgttgagaagggagaaagagggagtcaaattctacttgatactccccgagagaaaaattcatcgtacagcctgggaccagtagctgagactcctgacctcttcaaactacctcagctaagtacatcaagtggtcatggaccagctcatactaaaccattaaacagacgctctgtactagaaaagaatcttataaaagtaactgttgcaccatttaatccaacagtttgtgatgctctgcttgataaggacgagactgattcgtccaaagatactgaaaaactctcttcccttggagaagagatgagagaagatggtcttagcccaaatgaaagcaaactttgtactgaatctgaagggatcagccccaataactctgcctggaatgggccccagctctcttcttcaaacaataactttcaacagactgtctctgataaaaatatgcctgacagtgagaaccctacgtctgtattctctcggatctcagaccattcagagactcctaatatggagttatcctgcagaaatggtggttcacacaagtcaagttgtgaaatgagatctctggttgtttccacctcatcaaacaaacaggatgttcttaacaaggattctgggaagatgaaaggccatgagagaagactaggcaaagtcattcctgttctacaaactaagaccaggactaatgttccgacgttttcacagtcaaatctagaacagcagaagcagctttatctcaggagtgtcattgctcatatagaagacccagaggacactaaccaaggtatctcgggggagctttgtgccttgatggatcaagttcatcatatgcagcactcaaaatggcagcatccttcggacctcaccacgcgaaactacgcccgccgacagaaacatctgcaaagatacagtctgactcagtgggttgacaggaacatgcgaagccaccatcggttccagcgtctcccagacttctcgtacagttaatttgtgtcatcccatcagcaatgaaggtccctatccagggtcctgcttggagcagcatttcatgttcttttgctgttttgtgctttgccgattttggattttatttttcacaaaatttttatttaaaaaactcgtcaccttttggaaatgcccattgccgacttgaatttttttgtatgaagtccctcctgattttgtgtgtgtgtgtctgtgtttaagcaagcgttcggttggtatagtttttttttgtttttttaatttaaattgaaggtagctgcctcctgaaagccagcattaagccagaacacccaggttcaagcaaaagacccacctctctgcagaggcaaagtctactttctggtacctcaaagaaatcattgttcaatcttccataaggaagagattctttaccaggctgtgagccagtgttagataacttgtgaatggatataagttacttttaacaacccctcttacttttttatttgaatcctctgaatacctgtcagtattttaaagttggcaatccaggacattataagtaggatggagcaggagaagaatcctattgaaaggacaaattaaaatagtaaatcctctcctctcccttctgtaggtactagctgccttgatttttttttgtgggtgggggggattttttcattccttattgaacttattttgcacaatagtgtttacaaatcttatacatcttactttgacagaagacttataataccttgtggtcttgagactggttgtctcctttgcctttcttcaaggattttcctttttctttttaccccccagtgaccactctgctctttaggattctagtggcagtattcttgtaacctgttagacgtggatatacctcttcaggatggcctccttgctgtctttattgaagagctgcccacccagagtcttgactctagggcaggctagtgctattgtggtgtcagttgatatttagtttcatttgctgaaccccaaatttgagtgttagttagggagcctccattctgtgggagagtgtggaaaggcactcttttttctccatattagttaacaagaggtgtctttaggccctggatgttaccatctcatttggtcaagcccctgatacctagtttcacatggatgctaacgtggatgtaatatagttgtgacagcctatgcacaaaagcattacctgatcttaaggtttggtattctaaccaaagttgacagactgtgcgtctgtcttaatggatgtcttaggagttggttattctctcttttttttttgagacggagtttcgctgttgttgcccaggctggagtgcaatggcgtatctccactcaccacaacctccgcctcctgggttcaagggattctcctgtcttagcctcctgagtagctgtgattacaggcatgcgccaccatgcctggctaatttcatattttttagtagagacaggatttctccatgttggtcaggctggtcttgaactcctgacctcaggtgatctgcccacctcggcctcctaaagtgctgggattacaggcatgagccactgcacctggccggttattctctctttacagatagctatagacatcattttaggaagtgttgcagtctggcatttgtgctattgttcattctctgtgaaggctgttcatagttgctatagcctgtgtttagttttgtgatttcatcaatcccatctttctgtgtgagtaatgcattctaaacatcctaccccactttagaaacggacgtggggaacgcttggtcatttaagccaacaataaatttaggtgaatgtccctaagtgtttactgtttttatccagtcaaggatttgcttttccttgaacatttgttttaaattctggggccaaaatgcaaaggagaagttctattcaaaggcagtagttgaaatctattattttagttagcctacttggcatttactacatcggtcacttctccaggctgccctaaattaggttgatggagtgagacatgccaaacatccacctttgggaccatagcatagttaaaattaaatgtagttggaatagctagcattgcagctacagtagggaactgtagtctagttccctacagaaaacccaaggagtgaagggacaggattttgcctaggcaaaaatctaagactcgtgccctcctggtacatggggttttaagactgaatgtgtaataggagcactgcctttgccaaatcaaatgagtgacaggttaactagaaaatgtgacaatcacatttcctcttagctcaaataattctgtttttccaaagctttagcagcttaattaaatctgttggactgggggaggagagagctgttctctagtggttaacatggtattctttaagaagaaaaaacaaagccaaagaaaactcattatctggcatgttcgccttaaagatggtactgggtagaatctggagttttcatctcttttcaaagctgcatatctcttatatttggtattggcctctaagtctaatattgcagttggaattcttgctgtattattttttaagcaagtgttaggtgcatttaactgctttcttcatccatgacgacattcccaccatgggggtcttgacaaagcagagtaaaaatatgctgtttacattgtttacttacaagtaaggagcctgaaataacctgtagtttcgaatgcaggccctgatttactggcgttgtcagtttcaattatgaaactgaagtttggtgcctcctctttatcatgttttttcccttgtagcagttgtgtttaatgtcattaaaaagaaataaaagttctttgtcagtga

SEQ ID NO: 27116 - DNA, 3320 bp, Homo sapiens
  source 1..3320: mol_type = unassigned DNA
gatgagacgggaaaaggtggagccagtgggcacggtgggcggtgcggagggcggggctgaggcgcctgagcggggcacaaccctcctagaggcgggacggtttcctgccaatcactgctggtttgccctccccctggtgttggcccggctgactcggggaaggtgggagtcaatcattttgacaagtctcctgaaaggaacagctagcaggaactgaaacctttttccatttggtctcgtggcaaaggcagagattgctccagcagctccacacaaaatgatgtgctcacgggtgccctctgaacagtcttctggtacctctctcttgcctaaagacggtgccccattttcttgggattccttggatgaggatggattggatgactccttgctggagctgtcagagggagaagaagatgatggtgatgtaaattacacagaggaagagattgatgcactgttgaaggaagatgacccatcatatgagcagtcttctggggaagatgatggtgggcatgttgagaagggagaaagagggagtcaaattctacttgatactccccgagagaaaaattcatcgtacagcctgggaccagtagctgagactcctgacctcttcaaactacctcagctaagtacatcaagtggtcatggaccagctcatactaaaccattaaacagacgctctgtactagaaaagaatcttataaaagtaactgttgcaccatttaatccaacagtttgtgatgctctgcttgataaggacgagactgattcgtccaaagatactgaaaaactctcttcccttggagaagagatgagagaagatggtcttagcccaaatgaaagcaaactttgtactgaatctgaagggatcagccccaataactctgcctggaatgggccccagctctcttcttcaaacaataactttcaacagactgtctctgataaaaatatgcctgacagtgagaaccctacgtctgtattctctcggatctcagaccattcagagactcctaatatggagttatcctgcagaaatggtggttcacacaagtcaagttgtgaaatgagatctctggttgtttccacctcatcaaacaaacaggatgttcttaacaaggattctgggaagatgaaaggccatgagagaagactaggcaaagtcattcctgttctacaaactaagaccaggactaatgttccgacgttttcacagtcaaatctagaacagcagaagcagctttatctcaggagtgtcattgctcatatagaagacccagaggacactaaccaaggtatctcgggggagctttgtgccttgatggatcaagttcatcatatgcagcactcaaaatggcagcatccttcggacctcaccacgcgaaactacgcccgccgacagaaacatctgcaaagatacagtctgactcagtgggttgacaggaacatgcgaagccaccatcggttccagcgtctcccagacttctcgtacagttaatttgtgtcatcccatcagcaatgaaggtccctatccagggtcctgcttggagcagcatttcatgttcttttgctgttttgtgctttgccgattttggattttatttttcacaaaatttttatttaaaaaactcgtcaccttttggaaatgcccattgccgacttgaatttttttgtatgaagtccctcctgattttgtgtgtgtgtgtctgtgtttaagcaagcgttcggttggtatagtttttttttgtttttttaatttaaattgaaggtagctgcctcctgaaagccagcattaagccagaacacccaggttcaagcaaaagacccacctctctgcagaggcaaagtctactttctggtacctcaaagaaatcattgttcaatcttccataaggaagagattctttaccaggctgtgagccagtgttagataacttgtgaatggatataagttacttttaacaacccctcttacttttttatttgaatcctctgaatacctgtcagtattttaaagttggcaatccaggacattataagtaggatggagcaggagaagaatcctattgaaaggacaaattaaaatagtaaatcctctcctctcccttctgtaggtactagctgccttgatttttttttgtgggtgggggggattttttcattccttattgaacttattttgcacaatagtgtttacaaatcttatacatcttactttgacagaagacttataataccttgtggtcttgagactggttgtctcctttgcctttcttcaaggattttcctttttctttttaccccccagtgaccactctgctctttaggattctagtggcagtattcttgtaacctgttagacgtggatatacctcttcaggatggcctccttgctgtctttattgaagagctgcccacccagagtcttgactctagggcaggctagtgctattgtggtgtcagttgatatttagtttcatttgctgaaccccaaatttgagtgttagttagggagcctccattctgtgggagagtgtggaaaggcactcttttttctccatattagttaacaagaggtgtctttaggccctggatgttaccatctcatttggtcaagcccctgatacctagtttcacatggatgctaacgtggatgtaatatagttgtgacagcctatgcacaaaagcattacctgatcttaaggtttggtattctaaccaaagttgacagactgtgcgtctgtcttaatggatgtcttaggagttggttattctctcttttttttttgagacggagtttcgctgttgttgcccaggctggagtgcaatggcgtatctccactcaccacaacctccgcctcctgggttcaagggattctcctgtcttagcctcctgagtagctgtgattacaggcatgcgccaccatgcctggctaatttcatattttttagtagagacaggatttctccatgttggtcaggctggtcttgaactcctgacctcaggtgatctgcccacctcggcctcctaaagtgctgggattacaggcatgagccactgcacctggccggttattctctctttacagatagctatagacatcattttaggaagtgttgcagtctggcatttgtgctattgttcattctctgtgaaggctgttcatagttgctatagcctgtgtttagttttgtgatttcatcaatcccatctttctgtgtgagtaatgcattctaaacatcctaccccactttagaaacggacgtggggaacgcttggtcatttaagccaacaataaatttaggtgaatgtc

SEQ ID NO: 27117 - DNA, 1483 bp, Homo sapiens
  source 1..1483: mol_type = unassigned DNA
ctggtgttggcccggctgactcggggtaggggaggtcggggagggggcgataaaatggcgcagggggcggagtgaggcgcagtcgttcgcccaggctttggcccggcttccggaggaaggtgggagtcaatcattttgacaagtctcctgaaaggaacagctagcaggaactgaaacctttttccatttggtctcgtggcaaaggcagagattgctccagcagctccacacaaaatgatgtgctcacgggtgccctctgaacagtcttctggtacctctctcttgcctaaagacggtgccccattttcttgggattccttggatgaggatggattggatgactccttgctggagctgtcagagggagaagaagatgatggtgatgtaaattacacagaggaagagattgatgcactgttgaaggaagatgacccatcatatgagcagtcttctggggaagatgatggtgggcatgttgagaagggagaaagagggagtcaaattctacttgatactccccgagagaaaaattcatcgtacagcctgggaccagtagctgagactcctgacctcttcaaactacctcagctaagtacatcaagtggtcatggaccagctcatactaaaccattaaacagacgctctgtactagaaaagaatcttataaaagtaactgttgcaccatttaatccaacagtttgtgatgctctgcttgataaggacgagactgattcgtccaaagatactgaaaaactctcttcccttggagaagagatgagagaagatggtcttagcccaaatgaaagcaaactttgtactgaatctgaagggatcagccccaataactctgcctggaatgggccccagctctcttcttcaaacaataactttcaacagactgtctctgataaaaatatgcctgacagtgagaaccctacgtctgtattctctcggatctcagaccattcagagactcctaatatggagttatcctgcagaaatggtggttcacacaagtcaagttgtgaaatgagatctctggttgtttccacctcatcaaacaaagatgttcttaacaaggattctgggaagatgaaaggccatgagagaagactaggcaaagtcattcctgttctacaaactaagaccaggactaatgttccgacgttttcacagtcaaatctagaacagcagaagcagctttatctcaggagtgtcattgctcatatagaagacccagaggacactaaccaaggatgaatccctagaagtggaattgctgggcgcagtggctcatgcctgtaatcccagcactttgggaggctgaggcagatggatcatctgaggtcaggagttcaagaccagcctgactaacatgatgaaacctgtctctactaaaaatataaaaattagctgggcgtggtggtgggcgcctgtaatcccagctactcgggaggctgaggcaggagaatctcttgaaccc

SEQ ID NO: 27118 - DNA, 706 bp, Homo sapiens
  source 1..706: mol_type = unassigned DNA
gggagggacgagggggtcggcgttacccggcttggagggggatgggggcgcctgttgcttctccagggggttgcgcacgccgtccgccccttggagggattgggaggcccacgccctgctgcgagaagggcgcgttctagctcctgaggaaggtgggagtcaatcattttgacaagtctcctgaaaggaacagctagcaggaactgaaacctttttccatttggtctcgtggcaaaggcagagattgctccagcagctccacacaaaatgatgtgctcacgggtgccctctgaacagtcttctggtacctctctcttgcctaaagacggtgccccattttcttgggattccttggatgaggatggattggatgactccttgctggagctgtcagagggagaagaagatgatggtgatgtaaattacacagaggaagagattgatgcactgttgaaggaagatgacccatcatatgagcagtcttctggggaagatgatggtgggcatgttgagaagggagaaagagggagtcaaattctacttgatactccccgagagaaaaattcatcgtacagcctgggaccagtagctgagactcctgacctcttcaaactacctcagctaagtacatcaagtggtcatggaccagctcatactaaaccattaaacagacgctctgtactagaaaagaatcttataaaagtaa

SEQ ID NO: 27119 - DNA, 573 bp, Homo sapiens
  source 1..573: mol_type = unassigned DNA
gcagtcgttcgcccaggctttggcccggcttccggaggaaggtgggagtcaatcattttgacaagtctcctgaaaggaacagctagcaggaactgaaacctttttccatttggtctcgtggcaaaggcagagattgctccagcagctccacacagtatggaagacagttatttaccttcttgtgttctcgaattttgttttatttcaaaaaaatgatgtgctcacgggtgccctctgaacagtcttctggtacctctctcttgcctaaagacggtgccccattttcttgggattccttggatgaggatggattggatgactccttgctggagctgtcagagggagaagaagatgatggtgatgtaaattacacagaggaagagattgatgcactgttgaaggaagatgacccatcatatgagcagtcttctggggaagatgatggtgggcatgttgagaagggagaaagagggagtcaaattctacttgatactccccgagagaaaaattcatcgtacagcctgggaccagtagctgagactcctgacctcttcaaactacctcagctaagta

SEQ ID NO: 27120 - DNA, 429 bp, Homo sapiens
  source 1..429: mol_type = unassigned DNA
tgctggtttgccctccccctggtgttggcccggctgactcggggtaggggaggtcggggagggggcgataaaatggcgcagggggcggagtgaggcgcagtcgttcgcccaggctttggcccggcttccggagtgtgccacatttatgttcacgatctcatttaattcttgccacaaccctatcaggaaggtgggagtcaatcattttgacaagtctcctgaaaggaacagctagcaggaactgaaacctttttccatttggtctcgtggcaaaggcagagattgctccagcagctccacacaaaatgatgtgctcacgggtgccctctgaacagtcttctggtacctctctcttgcctaaagacggtgccccattttcttgggattccttggatgaggatggattggatgactccttgctggagctgt

SEQ ID NO: 27121 - DNA, 551 bp, Homo sapiens
  source 1..551: mol_type = unassigned DNA
cttagacattgcctagcaccccttttccatccctttcccattttgtaaatgaggaaacaagtctaaatggtcaagtggcatacccaagttattggagctggctagtgatacaaccaggactacaccccaggtctttggactcccatgccagtattcatcctactaaagtagatgatagtcttaagaaagtacaaattgttgggaggaacaaaactagtttgcttagttgcataatttttttttctttgaagatttctttggtgtgcttgactcagaaaatccaactttctggtattacaaaaaaaatcaagattaaaattaatacatcgagcaccttaaagcataatacagttgactttgtaattagcagagttgaaagtgatgagaagatcctctaattttctttttgcctgcaggaaggtgggagtcaatcattttgacaagtctcctgaaaggaacagctagcaggaactgaaacctttttccatttggtctcgtggcaaaggcagagattgctccagcagctccacacaaaatgatgtgctcacggg

SEQ ID NO: 27122 - DNA, 725 bp, Homo sapiens
  source 1..725: mol_type = unassigned DNA
ctctctttccctttaaagctcccagtatagcatcttccagtacttacttgaaccgtaatgggtcatttttaacgtctgatccccttcagacaagctctggcaggcccttgacgtatccccagcgactaagcaccacgtctggcacttaataggggggtggaatgggagtcctggattcaaagtttggctccaacacaagacaactggacgcaagaggaaggtgggagtcaatcattttgacaagtctcctgaaaggaacagctagcaggaactgaaacctttttccatttggtctcgtggcaaaggcagagattgctccagcagctccacacaaaatgatgtgctcacgggtgccctctgaacagtcttctggtacctctctcttgcctaaagacggtgccccattttcttgggattccttggatgaggatggattggatgactccttgctggagctgtcagagggagaagaagatgatggtgatgtaaattacacagaggaagagattgatgcactgttgaaggaagatgacccatcatatgagcagtcttctggggaagatgatggtgggcatgttgagaagggagaaagagggagtcaaattctacttgatactccccgagagaaaaattcatcgtacagcctgggaccagtagctgagactcctgacctcttcaaactacctcagctaagtacatcaagtggtcatggaccagctcatact

SEQ ID NO: 27123 - DNA, 1688 bp, Homo sapiens
  source 1..1688: mol_type = unassigned DNA
ctggtgttggcccggctgactcggggtaggggaggtcggggagggggcgataaaatggcgcagggggcggagtgaggcgcagtcgttcgcccaggctttggcccggcttccggaggaaggtgggagtcaatcattttgacaagtctcctgaaaggaacagctagcaggaactgaaacctttttccatttggtctcgtggcaaaggcagagattgctccagcagctccacacaaaatgatgtgctcacgggtgccctctgaacagtcttctggtacctctctcttgcctaaagacggtgccccattttcttgggattccttggatgaggatggattggatgactccttgctggagctgtcagagggagaagaagatgatggtgatgtaaattacacagaggaagagattgatgcactgttgaaggaagatgacccatcatatgagcagtcttctggggaagatgatggtgggcatgttgagaagggagaaagagggagtcaaattctacttgatactccccgagagaaaaattcatcgtacagcctgggaccagtagctgagactcctgacctcttcaaactacctcagctaagtacatcaagtggtcatggaccagctcatactaaaccattaaacagacgctctgtactagaaaagaatcttataaaagtaactgttgcaccatttaatccaacagtttgtgatgctctgcttgataaggacgagactgattcgtccaaagatactgaaaaactctcttcccttggagaagagatgagagaagatggtcttagcccaaatgaaagcaaactttgtactgaatctgaagggatcagccccaataactctgcctggaatgggccccagctctcttcttcaaacaataactttcaacagactgtctctgataaaaatatgcctgacagtgagaaccctacgtctgtattctctcggatctcagaccattcagagactcctaatatggagttatcctgcagaaatggtggttcacacaagtcaagttgtgaaatgagatctctggttgtttccacctcatcaaacaaagatgttcttaacaaggattctgggaagatgaaaggccatgagagaagactaggcaaagtcattcctgttctacaaactaagaccaggactaatgttccgacgttttcacagtcaaatctagaacagcagaagcagctttatctcaggagtgtcattgctcatatagaagacccagaggacactaaccaaggatgaatccctagaagtggaattgctggacagggtttcaccaagttggccaggctgttctcgagctcttgacttcaagtgatcagccctcctcagcctcccaaagtgctgagattacgggtgtgagcccccgcgcctgactgagaattaacattttaatattgagtgttttgattaaagtcttctctaatttccttcataaatgttttgtagcttttgtacagtcttgcacatcttttatccaatttatcccggagtgtttcatattgtgatgcttttgtaaaatgatttagtttttaaaatttcagtatctgttcattgctattatatagaaatgtaattgatttttgtgtcttggtcttacattctataaccttcctaaattcttttattagttttagtaactttttaatagatttcatcaggttttccct

SEQ ID NO: 27124 - DNA, 551 bp, Homo sapiens
  source 1..551: mol_type = unassigned DNA
agtcgttcgcccaggctttggcccggcttccggagaaatgatgtgctcacgggtgccctctgaacagtcttctggtacctctctcttgcctaaagacggtgccccattttcttgggattccttggatgaggatggattggatgactccttgctggagctgtcagagggagaagaagatgatggtgatgtaaattacacagaggaagagattgatgcactgttgaaggaagatgacccatcatatgagcagtcttctggggaagatgatggtgggcatgttgagaagggagaaagagggagtcaaattctacttgatactccccgagagaaaaattcatcgtacagcctgggaccagtagctgagactcctgacctcttcaaactacctcagctaagtacatcaagtggtcatggaccagctcatactaaaccattaaacagacgctctgtactagaaaagaatcttataaaagtaactgttgcaccatttaatccaacagtttgtgatgctctgcttgataaggacgagactgattcgtccaaagatactg

SEQ ID NO: 27125 - DNA, 3708 bp, Homo sapiens
  source 1..3708: mol_type = unassigned DNA
ggcatctctcgcgtgctcttgcttgcgcactaatttgtcctccaccgcctcccgttcaggccggctctcctgcggggcggggaaaggggtgggaagaggctgggagctgcggccgctgtgccagggtgaccggtagagttgtagccgaggtggcggcgcggggcggggcgggcggagagagaaggaaggaggtggttgtgcaggatggcgacggcggcctacgagcagctgaagctgcatatcacacctgaaaaattttatgtggaagcttgtgatgatggagcagatgacgtacttaccattgaccgtgtgtccacagaggttacccttgcagtcaagaaagatgttcctccttcagctgtcacaagaccaatatttggtatactgggcacaatccatctggtggcaggtaattatcttatagtcattaccaaaaagataaaagtaggtgaatttttcagtcatgtagtctggaaagcaacagattttgatgtcctttcttataagaagacaatgttgcacttaactgatattcagttacaagataataaaaccttcctagcgatgctaaaccatgtcttgaatgtggatggattttacttttcaacaacatatgatttgacccatactttgcagcggctatccaacactagtcctgaattccaagaaatgagtctcttggaaagggcagatcagcggtttgtatggaatggtcatcttctaagagaactttctgcacagccagaggttcatcggtttgcccttccagtgttacatggctttattaccatgcattcatgttctattaatggaaaatactttgattggattctcatctcgaggaggagctgtttcagagctggtgtgcgctattatgtaagaggaattgattcggaaggccatgcagctaactttgtagaaacagaacaaattgtgcactacaatgggagcaaagcttcgtttgtacagactcgaggatcaatacctgttttctggtcccaaagaccaaacctcaagtacaaaccactgccacagatcagcaaagtagcaaatcacatggacggtttccaaaggcattttgattcccaagtaattatttatggaaaacaagttataatcaatctgattaaccagaagggctcggagaagccacttgagcagacatttgcaacaatggtgtcttccttgggaagtggaatgatgagatacattgcctttgacttccataaggaatgtaaaaatatgagatgggatcgactaagtattttattggatcaggtagcagaaatgcaagatgaattaagttattttctagtggactctgctggccaggtggtggcaaaccaggaaggcgtgttccgaagcaattgcatggattgtctagatagaaccaatgtgatccagagtttgttagctcgtcgttcacttcaggcccaacttcagagactaggagttttgcatgtgggacaaaagcttgaagaacaagatgaatttgagaagatttacaaaaatgcctgggctgacaacgcaaatgcttgtgccaagcaatatgcgggaactggtgccttgaagactgactttaccagaactggaaagagaactcatttgggacttataatggatggctggaactcaatgatacgatattataagaacaacttttccgatggatttagacaagattccatagacttatttcttggaaactattcagtggatgaattagaatctcatagtcctttaagtgttccaagggactggaaattcctggctttgcctattatcatggttgttgccttttcaatgtgcattatctgtttgcttatggctggtgacacttggacagaaacactggcctatgtgctcttctggggagttgcaagcattggaacattttttatcattctttacaatggcaaagattttgtcgatgctcccagactggtccagaaagaaaagatagactgaatttgtatttgtggaaagcggcttggcttggaagattccattgtgcagaactggagtctttactgacccgctttccacatcagcccaaggtctttttaatgcctttatccaaaagcacatcttgtgctccatgcaggatgatgacagaattgatctgatgttactgccttgatggtctctttactattgggacagttagatttataatttgaagctattctgtaattaaaatataacctgaattcagcttgcagaatggaagctgaatctgttcattgtattctattgattgtcaatttaattagctgttgcagaataagtaatatattttaaaaacctagctcctttcattatttaaaacagcaaaattatttttgtagctcagtttcattattgtcattgtagaagcggtcactattagcaggcatacttttccacacatctttggacttttcttaaaagttcagtaataagctaactgtgtttataaaatgtaagtctcttacagacatcaagtagtttgatgagacagtctgtgacttcatgataggaaagaggaggatgaggtctggggttctttaaagtctctggtgggctgcctcatgactttaatcagcttgaactgccagtgcaccagcagtttaggtgtgatgagagaattcagatatactttatctttttaaaaaagtgtaaataaaatcaaagaatgtaaagtctatctcttacgctagaggtccaaagctgcctctgttttaaagattatcccaatgtggaagatgcccatgactggtcagctacttcctcctatacattttggtttctttgagggtcactcattgagacacgcaggcctctgagagggtcttgttctagatttcatattgcacttggagggtaacagctgctttttcacgcatggtactcttgatgtttttcactctgtcaaggattttgttggctatcaatgaatgtgtctaaaacttagtgcttccaggtagttatagtactccaaatcaaggaccaacttaaacgttaatttttgtgcaaaaacaaacctgaaaaatatgcttcggaaactgtgcatagttctaattgtaagtcagattgtatattcaaattgtaattaagagatttaaatattagaacggtatgtaaggtagtataattaccactattttaaataattcagttaaacactgctgcaatatttcagtgttgtgcttgaaaatatgtacagtttttttccaatattaataccttatgttgtccttaaatatttctaaaagcgcctttatttcagcattacctttttttcatcactatcttttataaaacattaatataagtcgttacttttagaaactaaaggaaataatagctggaaaaccctctgtagtttaaaatcagtcattaaactcacaatagggtaagtaaatatagccacctgttaacatgtaaataagcataatttgttccaaagatggaatattgaaacttagttcatgtctgctgtaaaatattatttaaatgctgctgggcatttcacttaaagaacttaatgtcaacagctacaacaaagaccaaatctgaactgctaatgtggctgctttgtagggaatggactaatatcagtgtgttagatcttaaggtatcagtatttcagaatcctgcgacgattttatttctaaattcatgtactgtatgtccataagtgaaaataaaatgtcatattcttttcta

SEQ ID NO: 27126 - DNA, 1909 bp, Homo sapiens
  source 1..1909: mol_type = unassigned DNA
gtgcaggatggcgacggcggcctacgagcagctgaagctgcatatcacacctgaaaaattttatgtggaagcttgtgatgatggagcagatgacgtacttaccattgaccgtgtgtccacagaggttacccttgcagtcaagaaagatgttcctccttcagctgtcacaagaccaatatttggtatactgggcacaatccatctggtggcagttacaagataataaaaccttcctagcgatgctaaaccatgtcttgaatgtggatggattttacttttcaacaacatatgatttgacccatactttgcagcggctatccaacactagtcctgaattccaagaaatgagtctcttggaaagggcagatcagcggtttgtatggaatggtcatcttctaagagaactttctgcacagccagaggttcatcggtttgcccttccagtgttacatggctttattaccatgcattcatgttctattaatggaaaatactttgattggattctcatctcgaggaggagctgtttcagagctggtgtgcgctattatgtaagaggaattgattcggaaggccatgcagctaactttgtagaaacagaacaaattgtgcactacaatgggagcaaagcttcgtttgtacagactcgaggatcaatacctgttttctggtcccaaagaccaaacctcaagtacaaaccactgccacagatcagcaaagtagcaaatcacatggacggtttccaaaggcattttgattcccaagtaattatttatggaaaacaagttataatcaatctgattaaccagaagggctcggagaagccacttgagcagacatttgcaacaatggtgtcttccttgggaagtggaatgatgagatacattgcctttgacttccataaggaatgtaaaaatatgagatgggatcgactaagtattttattggatcaggtagcagaaatgcaagatgaattaagttattttctagtggactctgctggccaggtggtggcaaaccaggaaggcgtgttccgaagcaattgcatggattgtctagatagaaccaatgtgatccagagtttgttagctcgtcgttcacttcaggcccaacttcagagactaggagttttgcatgtgggacaaaagcttgaagaacaagatgaatttgagaagatttacaaaaatgcctgggctgacaacgcaaatgcttgtgccaagcaatatgcgggaactggtgccttgaagactgactttaccagaactggaaagagaactcatttgggacttataatggatggctggaactcaatgatacgatattataagaacaacttttccgatggatttagacaagattccatagacttatttcttggaaactattcagtggatgaattagaatctcatagtcctttaagtgttccaagggactggaaattcctggctttgcctattatcatggttgttgccttttcaatgtgcattatctgtttgcttatggctggtgacacttggacagaaacactggcctatgtgctcttctggggagttgcaagcattggaacattttttatcattctttacaatggcaaagattttgtcgatgctcccagactggtccagaaagaaaagatagactgaatttgtatttgtggaaagcggcttggcttggaagattccattgtgcagaactggagtctttactgacccgctttccacatcagcccaaggtctttttaatgcctttatccaaaagcacatcttgtgctccatgcaggatgatgacagaattgatctgatgttactgccttgatggtctctttactattgggacagttagatttataatttgaagctattctgtaattaaaatataacctgaattcagcttgcagaatggaagctga

SEQ ID NO: 27127 - DNA, 3908 bp, Homo sapiens
  source 1..3908: mol_type = unassigned DNA
ccgcccgcccgccttgtcccgcgtcgccgctcttcgcgtgcccgcgcgccccgggcccggccgctgtgtcgccctgagcggagcgccgcccgcgggatccccacgcggaaagggggcgcgccccggcggcggcctggcctcggacgcccccggccgggctagaagccgccgcggcagcagattctcttcaggggaagagtccacatcccacctcatcatgtcccgaagaagccagcgcctcacgcgctactcccagggtgacgatgacggcagcagcagcagcggagggagctcggtggctgggagtcagagcaccctgtttaaagacagtcctctcaggaccttgaagaggaaatccagcaacatgaagcgcctgtccccagcgccacagctgggcccgtcctctgatgcacacacctcctactacagtgagtcgctggtccacgagtcctggttcccacccaggagctccctggaggaactgcatggtgacgccaactggggtgaggacctgcgggtgcggaggaggagaggcacgggtggctcagagagcagcagggccagcgggcttgtggggcgcaaggccaccgaggacttcctgggctcttcctcgggctactcctctgaggacgactacgtgggctactcggatgtggaccagcagagttccagctcgcggctccgaagcgccgtctcacgggcgggctccttactctggatggtggccacttcgccaggccggctcttcagacttctctactggtgggctggcaccacctggtaccgcctgaccacagctgcctccctccttgacgtcttcgttttaaccaggcgcttctcgtccctgaagacgttcctctggttcctgctgccgctgctcttgctgacgtgcctgacgtatggtgcttggtatttctacccctatgggctgcagacattccaccctgctttggtttcctggtgggcagcgaaggacagcaggaggccggatgagggctgggaagccagagactcatcgccacatttccaggctgagcagcgtgttatgtcccgggtacactctctggagcggcgtctggaagctcttgctgctgaattttcctccaactggcagaaggaggccatgcggctggaacgtctggagctgcggcaaggggctcctggccagggaggtggtggtggcctgagccacgaggacaccctggcgctgctggaggggctagtgagccgccgtgaagctgccctgaaggaggatttccgcagggaaactgctgctcgcatccaggaagaactgtctgccctgagagcagagcatcagcaagactcagaagacctcttcaagaagatcgtccgggcctcccaggagtccgaggctcgcatccagcagctgaagtcagagtggcaaagcatgacccaggagtccttccaggagagctctgtgaaggagctgaggcggctggaggaccagctggccggcctgcagcaggagctggcggctctggcactgaagcagagctcggtggcggaagaagtgggcctgctgccccagcagatccaggccgtgcgggacgacgtggaatctcagttcccggcctggatcagtcagttccttgcccgaggtggagggggccgcgtggggctccttcagagagaggagatgcaagctcagctgcgagagctggagagcaagatcctcacccatgtggcagagatgcagggcaagtcggccagggaagccgcggcctccctgagcctgacgctgcagaaagaaggtgtgattggagtgacagaggagcaggtgcaccacatcgtgaagcaggccctgcagcgctacagtgaggaccgcatcgggctggcagactacgccctggagtcaggaggggccagcgtcatcagcacccgatgttctgagacctacgagaccaagacggccctcctcagcctcttcggcatccccctgtggtaccactcccagtcaccccgagtcatcctccagccagatgtgcacccaggcaactgctgggccttccaggggccacaaggcttcgccgtggtccgcctctctgcccgcatccgccccacagccgttaccttagagcatgtgcccaaggccttgtcacccaacagcactatctccagtgcccccaaggacttcgccatctttgggtttgacgaagacctgcagcaggaggggacactccttggcaagttcacttacgatcaggacggcgagcctattcagacgtttcactttcaggcccctacgatggccacgtaccaggtggtggagctgcggatcctgactaactggggccaccccgagtacacctgcatctaccgcttcagagtgcatggggagcccgcccactagccctgcttactggtgcctgctgccagccatctgggagtgggtgaacagcaccccgccgcttcccccacacgcttgctcggcgctctgacttctaggagcacaagagaggagcctgtggccccatgcagatgaaaaggacgggcagggtctcctgagcagcaggtggctcgaggcggttagcaggctccagcagctcccttcttccttccctctgtgcccgtggcgtctgcttcccatcctgggagtgtgtatatatgtagcatatcatgggggactgggaagttgggagaggtaggacctgactggtcttggctggggtcaggggctggtgcctgggagctgatgaagcaggtgccagggctgtgggaggggcaagctacggcctgggctaggtgagctgcctctgcccctgggcaaggaagcgaggccctctgggaggagggtgcttagctccagagcaggatgggacttccccaggcaggaagcacttgatggagagctgcccagctctcctacaaggttagtgccctccacctagggaagcatgaaccacagggtccctgagggccttcgacaaaagtgtgtatttgtcccggggagggtagcagtgggccatggggcttcttgtgccctaaaggggactggctgctgtgatcttctaaggggcccagggccaaccctgtaggcttcccctctgctggggacggtagttgcttttctctctcctgatgctaggttggggcccaccctgctccctgttcctgctagggcctgccagtgcccctgagcttgctttccacattctcccagggtatggagacctagacctgtctttggggccattagcatctggggttatagcaagaagagtggggagcatggaactcctgggctcttgtggggacgttcagggtatcggggtgcgaggtctgtctgcaccggcccccacatctaaccaggccctgatgtaggggtcgtccgctcaggctgcccccttgggctcttgcagctcttgttcaggtagtcgcccttctggtttgttctctgtggggcagttggtgggggctgggggaagaggctggcagaagttaccctggatagggaagggggaggaggggacttttagagccagcaggccccactgtattatgtatatatttttcaaggtctgtttttctaactgaaaagctaagggcttgattcctagccccgttctgtggggcactgggtgatactcagtttcttgttcctggccgtggagaggggcctggggcactggttccggctgtgtctggtggtctggctgcggggaaggggcaagaaggcgggcaggccttcactgcagcactgagcctcaaatccgctctggagcatgaggctggatgcagtggtggtgaggccgccccgctccatcccgaggcagccagggtttgttttgcgctctcctgtcacaaatgctgcactattggttcttaagttttttatctccagatcctaatttatgcctatgcaaaaaataaatgacgcccaagagctg

SEQ ID NO: 27128 - DNA, 4022 bp, Homo sapiens
  source 1..4022: mol_type = unassigned DNA
cacacgcgcgccgcccggccccactcgcgcagcgcgggcctccgccggccgcattgtccgcccgcccgccttgtcccgcgtcgccgctcttcgcgtgcccgcgcgccccgggcccggccgctgtgtcgccctgagcggagcgccgcccgcgggatccccacgcggaaagggggcgcgccccggcggcggcctggcctcggacgcccccggccgggctagaagccgccgcggcagcagattctcttcaggggaagagtccacatcccacctcatcatgtcccgaagaagccagcgcctcacgcgctactcccagggtgacgatgacggcagcagcagcagcggagggagctcggtggctgggagtcagagcaccctgtttaaagacagtcctctcaggaccttgaagaggaaatccagcaacatgaagcgcctgtccccagcgccacagctgggcccgtcctctgatgcacacacctcctactacagtgagtcgctggtccacgagtcctggttcccacccaggagctccctggaggaactgcatggtgacgccaactggggtgaggacctgcgggtgcggaggaggagaggcacgggtggctcagagagcagcagggccagcgggcttgtggggcgcaaggccaccgaggacttcctgggctcttcctcgggctactcctctgaggacgactacgtggaagacagtgaaggaagaggctcgaaagtgacagagactgagccagtgtcctcgttccccgcaggctactcggatgtggaccagcagagttccagctcgcggctccgaagcgccgtctcacgggcgggctccttactctggatggtggccacttcgccaggccggctcttcagacttctctactggtgggctggcaccacctggtaccgcctgaccacagctgcctccctccttgacgtcttcgttttaaccaggcgcttctcgtccctgaagacgttcctctggttcctgctgccgctgctcttgctgacgtgcctgacgtatggtgcttggtatttctacccctatgggctgcagacattccaccctgctttggtttcctggtgggcagcgaaggacagcaggaggccggatgagggctgggaagccagagactcatcgccacatttccaggctgagcagcgtgttatgtcccgggtacactctctggagcggcgtctggaagctcttgctgctgaattttcctccaactggcagaaggaggccatgcggctggaacgtctggagctgcggcaaggggctcctggccagggaggtggtggtggcctgagccacgaggacaccctggcgctgctggaggggctagtgagccgccgtgaagctgccctgaaggaggatttccgcagggaaactgctgctcgcatccaggaagaactgtctgccctgagagcagagcatcagcaagactcagaagacctcttcaagaagatcgtccgggcctcccaggagtccgaggctcgcatccagcagctgaagtcagagtggcaaagcatgacccaggagtccttccaggagagctctgtgaaggagctgaggcggctggaggaccagctggccggcctgcagcaggagctggcggctctggcactgaagcagagctcggtggcggaagaagtgggcctgctgccccagcagatccaggccgtgcgggacgacgtggaatctcagttcccggcctggatcagtcagttccttgcccgaggtggagggggccgcgtggggctccttcagagagaggagatgcaagctcagctgcgagagctggagagcaagatcctcacccatgtggcagagatgcagggcaagtcggccagggaagccgcggcctccctgagcctgacgctgcagaaagaaggtgtgattggagtgacagaggagcaggtgcaccacatcgtgaagcaggccctgcagcgctacagtgaggaccgcatcgggctggcagactacgccctggagtcaggaggggccagcgtcatcagcacccgatgttctgagacctacgagaccaagacggccctcctcagcctcttcggcatccccctgtggtaccactcccagtcaccccgagtcatcctccagccagatgtgcacccaggcaactgctgggccttccaggggccacaaggcttcgccgtggtccgcctctctgcccgcatccgccccacagccgttaccttagagcatgtgcccaaggccttgtcacccaacagcactatctccagtgcccccaaggacttcgccatctttgggtttgacgaagacctgcagcaggaggggacactccttggcaagttcacttacgatcaggacggcgagcctattcagacgtttcactttcaggcccctacgatggccacgtaccaggtggtggagctgcggatcctgactaactggggccaccccgagtacacctgcatctaccgcttcagagtgcatggggagcccgcccactagccctgcttactggtgcctgctgccagccatctgggagtgggtgaacagcaccccgccgcttcccccacacgcttgctcggcgctctgacttctaggagcacaagagaggagcctgtggccccatgcagatgaaaaggacgggcagggtctcctgagcagcaggtggctcgaggcggttagcaggctccagcagctcccttcttccttccctctgtgcccgtggcgtctgcttcccatcctgggagtgtgtatatatgtagcatatcatgggggactgggaagttgggagaggtaggacctgactggtcttggctggggtcaggggctggtgcctgggagctgatgaagcaggtgccagggctgtgggaggggcaagctacggcctgggctaggtgagctgcctctgcccctgggcaaggaagcgaggccctctgggaggagggtgcttagctccagagcaggatgggacttccccaggcaggaagcacttgatggagagctgcccagctctcctacaaggttagtgccctccacctagggaagcatgaaccacagggtccctgagggccttcgacaaaagtgtgtatttgtcccggggagggtagcagtgggccatggggcttcttgtgccctaaaggggactggctgctgtgatcttctaaggggcccagggccaaccctgtaggcttcccctctgctggggacggtagttgcttttctctctcctgatgctaggttggggcccaccctgctccctgttcctgctagggcctgccagtgcccctgagcttgctttccacattctcccagggtatggagacctagacctgtctttggggccattagcatctggggttatagcaagaagagtggggagcatggaactcctgggctcttgtggggacgttcagggtatcggggtgcgaggtctgtctgcaccggcccccacatctaaccaggccctgatgtaggggtcgtccgctcaggctgcccccttgggctcttgcagctcttgttcaggtagtcgcccttctggtttgttctctgtggggcagttggtgggggctgggggaagaggctggcagaagttaccctggatagggaagggggaggaggggacttttagagccagcaggccccactgtattatgtatatatttttcaaggtctgtttttctaactgaaaagctaagggcttgattcctagccccgttctgtggggcactgggtgatactcagtttcttgttcctggccgtggagaggggcctggggcactggttccggctgtgtctggtggtctggctgcggggaaggggcaagaaggcgggcaggccttcactgcagcactgagcctcaaatccgctctggagcatgaggctggatgcagtggtggtgaggccgccccgctccatcccgaggcagccagggtttgttttgcgctctcctgtcacaaatgctgcactattggttcttaagttttttatctccagatcctaatttatgcctatgcaaaaaataaatgacgcccaa

SEQ ID NO: 27129 - DNA, 4055 bp, Homo sapiens
  source 1..4055: mol_type = unassigned DNA
ggacttcccgggcagcctcccgggaggaggagggcaaaggccgactgccccaacccggccccgggcagcgcctacgggttttgtgccagacaggccgtttccagggacaggcagttcccagcctctgcctgtcagaactcagggcctcagaggaaggcccgttttgttcagttctaaaacaaaacaaaacaaagcaatggggggcgcggtgtgacttagagagccaggaggcgcgcctttggtgacaatttctgcaggtgtcacctccttcagcaggacagaggctaagaggagtccctgtgtgggcagctggagccttcagattctcttcaggggaagagtccacatcccacctcatcatgtcccgaagaagccagcgcctcacgcgctactcccagggtgacgatgacggcagcagcagcagcggagggagctcggtggctgggagtcagagcaccctgtttaaagacagtcctctcaggaccttgaagaggaaatccagcaacatgaagcgcctgtccccagcgccacagctgggcccgtcctctgatgcacacacctcctactacagtgagtcgctggtccacgagtcctggttcccacccaggagctccctggaggaactgcatggtgacgccaactggggtgaggacctgcgggtgcggaggaggagaggcacgggtggctcagagagcagcagggccagcgggcttgtggggcgcaaggccaccgaggacttcctgggctcttcctcgggctactcctctgaggacgactacgtgggctactcggatgtggaccagcagagttccagctcgcggctccgaagcgccgtctcacgggcgggctccttactctggatggtggccacttcgccaggccggctcttcagacttctctactggtgggctggcaccacctggtaccgcctgaccacagctgcctccctccttgacgtcttcgttttaaccaggcgcttctcgtccctgaagacgttcctctggttcctgctgccgctgctcttgctgacgtgcctgacgtatggtgcttggtatttctacccctatgggctgcagacattccaccctgctttggtttcctggtgggcagcgaaggacagcaggaggccggatgagggctgggaagccagagactcatcgccacatttccaggctgagcagcgtgttatgtcccgggtacactctctggagcggcgtctggaagctcttgctgctgaattttcctccaactggcagaaggaggccatgcggctggaacgtctggagctgcggcaaggggctcctggccagggaggtggtggtggcctgagccacgaggacaccctggcgctgctggaggggctagtgagccgccgtgaagctgccctgaaggaggatttccgcagggaaactgctgctcgcatccaggaagaactgtctgccctgagagcagagcatcagcaagactcagaagacctcttcaagaagatcgtccgggcctcccaggagtccgaggctcgcatccagcagctgaagtcagagtggcaaagcatgacccaggagtccttccaggagagctctgtgaaggagctgaggcggctggaggaccagctggccggcctgcagcaggagctggcggctctggcactgaagcagagctcggtggcggaagaagtgggcctgctgccccagcagatccaggccgtgcgggacgacgtggaatctcagttcccggcctggatcagtcagttccttgcccgaggtggagggggccgcgtggggctccttcagagagaggagatgcaagctcagctgcgagagctggagagcaagatcctcacccatgtggcagagatgcagggcaagtcggccagggaagccgcggcctccctgagcctgacgctgcagaaagaaggtgtgattggagtgacagaggagcaggtgcaccacatcgtgaagcaggccctgcagcgctacagtgaggaccgcatcgggctggcagactacgccctggagtcaggaggggccagcgtcatcagcacccgatgttctgagacctacgagaccaagacggccctcctcagcctcttcggcatccccctgtggtaccactcccagtcaccccgagtcatcctccagccagatgtgcacccaggcaactgctgggccttccaggggccacaaggcttcgccgtggtccgcctctctgcccgcatccgccccacagccgttaccttagagcatgtgcccaaggccttgtcacccaacagcactatctccagtgcccccaaggacttcgccatctttgggtttgacgaagacctgcagcaggaggggacactccttggcaagttcacttacgatcaggacggcgagcctattcagacgtttcactttcaggcccctacgatggccacgtaccaggtggtggagctgcggatcctgactaactggggccaccccgagtacacctgcatctaccgcttcagagtgcatggggagcccgcccactagccctgcttactggtgcctgctgccagccatctgggagtgggtgaacagcaccccgccgcttcccccacacgcttgctcggcgctctgacttctaggagcacaagagaggagcctgtggccccatgcagatgaaaaggacgggcagggtctcctgagcagcaggtggctcgaggcggttagcaggctccagcagctcccttcttccttccctctgtgcccgtggcgtctgcttcccatcctgggagtgtgtatatatgtagcatatcatgggggactgggaagttgggagaggtaggacctgactggtcttggctggggtcaggggctggtgcctgggagctgatgaagcaggtgccagggctgtgggaggggcaagctacggcctgggctaggtgagctgcctctgcccctgggcaaggaagcgaggccctctgggaggagggtgcttagctccagagcaggatgggacttccccaggcaggaagcacttgatggagagctgcccagctctcctacaaggttagtgccctccacctagggaagcatgaaccacagggtccctgagggccttcgacaaaagtgtgtatttgtcccggggagggtagcagtgggccatggggcttcttgtgccctaaaggggactggctgctgtgatcttctaaggggcccagggccaaccctgtaggcttcccctctgctggggacggtagttgcttttctctctcctgatgctaggttggggcccaccctgctccctgttcctgctagggcctgccagtgcccctgagcttgctttccacattctcccagggtatggagacctagacctgtctttggggccattagcatctggggttatagcaagaagagtggggagcatggaactcctgggctcttgtggggacgttcagggtatcggggtgcgaggtctgtctgcaccggcccccacatctaaccaggccctgatgtaggggtcgtccgctcaggctgcccccttgggctcttgcagctcttgttcaggtagtcgcccttctggtttgttctctgtggggcagttggtgggggctgggggaagaggctggcagaagttaccctggatagggaagggggaggaggggacttttagagccagcaggccccactgtattatgtatatatttttcaaggtctgtttttctaactgaaaagctaagggcttgattcctagccccgttctgtggggcactgggtgatactcagtttcttgttcctggccgtggagaggggcctggggcactggttccggctgtgtctggtggtctggctgcggggaaggggcaagaaggcgggcaggccttcactgcagcactgagcctcaaatccgctctggagcatgaggctggatgcagtggtggtgaggccgccccgctccatcccgaggcagccagggtttgttttgcgctctcctgtcacaaatgctgcactattggttcttaagttttttatctccagatcctaatttatgcctatgcaaaaaataaatgacgcccaagagctgtggga

SEQ ID NO: 27130 - DNA, 2725 bp, Homo sapiens
  source 1..2725: mol_type = unassigned DNA
actcttgtttcgctccttgacaaccctggcgggggttcgctggctgcggccccggctccggcccccgcaggagcagctgcccctagggggagacagactcgcctgctgtgcctgggtcggaaggattcccgctgctcatcctcatcctggatacaggtggcaggcgccaagccaggattctcttcaggggaagagtccacatcccacctcatcatgtcccgaagaagccagcgcctcacgcgctactcccagggtgacgatgacggcagcagcagcagcggagggagctcggtggctgggagtcagagcaccctgtttaaagacagtcctctcaggaccttgaagaggaaatccagcaacatgaagcgcctgtccccagcgccacagctgggcccgtcctctgatgcacacacctcctactacagtgagtcgctggtccacgagtcctggttcccacccaggagctccctggaggaactgcatggtgacgccaactggggtgaggacctgcgggtgcggaggaggagaggcacgggtggctcagagagcagcagggccagcgggcttgtggggcgcaaggccaccgaggacttcctgggctcttcctcgggctactcctctgaggacgactacgtgggctactcggatgtggaccagcagagttccagctcgcggctccgaagcgccgtctcacgggcgggctccttactctggatggtggccacttcgccaggccggctcttcagacttctctactggtgggctggcaccacctggtaccgcctgaccacagctgcctccctccttgacgtcttcgttttaaccaggcgcttctcgtccctgaagacgttcctctggttcctgctgccgctgctcttgctgacgtgcctgacgtatggtgcttggtatttctacccctatgggctgcagacattccaccctgctttggtttcctggtgggcagcgaaggacagcaggaggccggatgagggctgggaagccagagactcatcgccacatttccaggctgagcagcgtgttatgtcccgggtacactctctggagcggcgtctggaagctcttgctgctgaattttcctccaactggcagaaggaggccatgcggctggaacgtctggagctgcggcaaggggctcctggccagggaggtggtggtggcctgagccacgaggacaccctggcgctgctggaggggctagtgagccgccgtgaagctgccctgaaggaggatttccgcagggaaactgctgctcgcatccaggaagaactgtctgccctgagagcagagcatcagcaagactcagaagacctcttcaagaagatcgtccgggcctcccaggagtccgaggctcgcatccagcagctgaagtcagagtggcaaagcatgacccaggagtccttccaggagagctctgtgaaggagctgaggcggctggaggaccagctggccggcctgcagcaggagctggcggctctggcactgaagcagagctcggtggcggaagaagtgggcctgctgccccagcagatccaggccgtgcgggacgacgtggaatctcagttcccggcctggatcagtcagttccttgcccgaggtggagggggccgcgtggggctccttcagagagaggagatgcaagctcagctgcgagagctggagagcaagatcctcacccatgtggcagagatgcagggcaagtcggccagggaagccgcggcctccctgagcctgacgctgcagaaagaaggtgtgattggagtgacagaggagcaggtgcaccacatcgtgaagcaggccctgcagcgctacagtgaggaccgcatcgggctggcagactacgccctggagtcaggaggggccagcgtcatcagcacccgatgttctgagacctacgagaccaagacggccctcctcagcctcttcggcatccccctgtggtaccactcccagtcaccccgagtcatcctccagccagatgtgcacccaggcaactgctgggccttccaggggccacaaggcttcgccgtggtccgcctctctgcccgcatccgccccacagccgttaccttagagcatgtgcccaaggccttgtcacccaacagcactatctccagtgcccccaaggacttcgccatctttgggtttgacgaagacctgcagcaggaggggacactccttggcaagttcacttacgatcaggacggcgagcctattcagacgtttcactttcaggcccctacgatggccacgtaccaggtggtggagctgcggatcctgactaactggggccaccccgagtacacctgcatctaccgcttcagagtgcatggggagcccgcccactagccctgcttactggtgcctgctgccagccatctgggagtgggtgaacagcaccccgccgcttcccccacacgcttgctcggcgctctgacttctaggagcacaagagaggagcctgtggccccatgcagatgaaaaggacgggcagggtctcctgagcagcaggtggctcgaggcggttagcaggctccagcagctcccttcttccttccctctgtgcccgtggcgtctgcttcccatcctgggagtgtgtatatatgtagcatatcatgggggactgggaagttgggagaggtaggacctgactggtcttggctggggtcaggggctggtgcctgggagctgatgaagcaggtgccag

SEQ ID NO: 27131 - DNA, 2486 bp, Homo sapiens
  source 1..2486: mol_type = unassigned DNA
gttttggagaatggggcctcgacctttttcatcttgtgaaacccagactcaatggtgtcacctccttcagcaggacagaggctaagaggagtccctgtgtgggcagctggagccttcagattctcttcaggggaagagtccacatcccacctcatcatgtcccgaagaagccagcgcctcacgcgctactcccagggtgacgatgacggcagcagcagcagcggagggagctcggtggctgggagtcagagcaccctgtttaaagacagtcctctcaggaccttgaagaggaaatccagcaacatgaagcgcctgtccccagcgccacagctgggcccgtcctctgatgcacacacctcctactacagtgagtcgctggtccacgagtcctggttcccacccaggagctccctggaggaactgcatggtgacgccaactggggctactcggatgtggaccagcagagttccagctcgcggctccgaagcgccgtctcacgggcgggctccttactctggatggtggccacttcgccaggccggctcttcagacttctctactggtgggctggcaccacctggtaccgcctgaccacagctgcctccctccttgacgtcttcgttttaaccaggcgcttctcgtccctgaagacgttcctctggttcctgctgccgctgctcttgctgacgtgcctgacgtatggtgcttggtatttctacccctatgggctgcagacattccaccctgctttggtttcctggtgggcagcgaaggacagcaggaggccggatgagggctgggaagccagagactcatcgccacatttccaggctgagcagcgtgttatgtcccgggtacactctctggagcggcgtctggaagctcttgctgctgaattttcctccaactggcagaaggaggccatgcggctggaacgtctggagctgcggcaaggggctcctggccagggaggtggtggtggcctgagccacgaggacaccctggcgctgctggaggggctagtgagccgccgtgaagctgccctgaaggaggatttccgcagggaaactgctgctcgcatccaggaagaactgtctgccctgagagcagagcatcagcaagactcagaagacctcttcaagaagatcgtccgggcctcccaggagtccgaggctcgcatccagcagctgaagtcagagtggcaaagcatgacccaggagtccttccaggagagctctgtgaaggagctgaggcggctggaggaccagctggccggcctgcagcaggagctggcggctctggcactgaagcagagctcggtggcggaagaagtgggcctgctgccccagcagatccaggccgtgcgggacgacgtggaatctcagttcccggcctggatcagtcagttccttgcccgaggtggagggggccgcgtggggctccttcagagagaggagatgcaagctcagctgcgagagctggagagcaagatcctcacccatgtggcagagatgcagggcaagtcggccagggaagccgcggcctccctgagcctgacgctgcagaaagaaggtgtgattggagtgacagaggagcaggtgcaccacatcgtgaagcaggccctgcagcgctacagtgaggaccgcatcgggctggcagactacgccctggagtcaggaggggccagcgtcatcagcacccgatgttctgagacctacgagaccaagacggccctcctcagcctcttcggcatccccctgtggtaccactcccagtcaccccgagtcatcctccagccagatgtgcacccaggcaactgctgggccttccaggggccacaaggcttcgccgtggtccgcctctctgcccgcatccgccccacagccgttaccttagagcatgtgcccaaggccttgtcacccaacagcactatctccagtgcccccaaggacttcgccatctttgggtttgacgaagacctgcagcaggaggggacactccttggcaagttcacttacgatcaggacggcgagcctattcagacgtttcactttcaggcccctacgatggccacgtaccaggtggtggagctgcggatcctgactaactggggccaccccgagtacacctgcatctaccgcttcagagtgcatggggagcccgcccactagccctgcttactggtgcctgctgccagccatctgggagtgggtgaacagcaccccgccgcttcccccacacgcttgctcggcgctctgacttctaggagcacaagagaggagcctgtggccccatgcagatgaaaaggacgggcagggtctcctgagcagcaggtggctcgaggcggttagcaggctccagcagctcccttcttccttccctctgtgcccgtggcgtctgcttcccatcctgggagtgtgtatatatgtagcatatcatgggggactgggaagttgggagaggtaggacctgactggtcttggct

SEQ ID NO: 27132 - DNA, 545 bp, Homo sapiens
  source 1..545: mol_type = unassigned DNA
atttagttcttcccagcggcagcttgggtatggtataaacatgttgccttgtttctgccctgggcaaaggtgtcacctccttcagcaggacagaggctaagaggagtccctgtgtgggcagctggagccttcagattctcttcaggggaagagtccacatcccacctcatcatgtcccgaagaagccagcgcctcacgcgctactcccagggtgacgatgacggcagcagcagcagcggagggagctcggtggctgggagtcagagcaccctgtttaaagacagtcctctcaggaccttgaagaggaaatccagcaacatgaagcgcctgtccccagcgccacagctgggcccgtcctctgatgcacacacctcctactacagtgagtcgctggtccacgagtcctggttcccacccaggagctccctggaggaactgcatggtgacgccaactgggaccccacttttcagaagctcttggaggcccagaagagcccctggttcttccctgcacaggtgaggacctgcgggtgcggaggaggaga

SEQ ID NO: 27133 - DNA, 538 bp, Homo sapiens
  source 1..538: mol_type = unassigned DNA
gttttggagaatggggcctcgacctttttcatcttgtgaaacccagactcaatggtgtcacctccttcagcaggacagaggctaagaggagtccctgtgtgggcagctggagccttcagattctcttcaggggaagagtccacatcccacctcatcatgtcccgaagaagccagcgcctcacgcgctactcccagggtgacgatgacggcagcagcagcagcggagggagctcggtggctgggagtcagagcaccctgtttaaagacagtcctctcaggaccttgaagaggaaatccagcaacatgaagcgcctgtccccagcgccacagctgggcccgtcctctgatgcacacacctcctactacagtgagtcgctggtccacgagtcctggttcccacccaggagctccctggaggaactgcatggtgacgccaactggggctactcggatgtggaccagcagagttccagctcgcggctccgaagcgccgtctcacgggcgggctccttactctggatggtggccacttcgccag

SEQ ID NO: 27134 - DNA, 444 bp, Homo sapiens
  source 1..444: mol_type = unassigned DNA
ggatccagcctccacccgggtccgcggcccgcgccctgactcacctcctggcccccgccccgcctgccgcgccactgattctcttcaggggaagagtccacatcccacctcatcatgtcccgaagaagccagcgcctcacgcgctactcccagggtgacgatgacggcagcagcagcagcggagggagctcggtggctgggagtcagagcaccctgtttaaagacagtcctctcaggaccttgaagaggaaatccagcaacatgaagcgcctgtccccagcgccacagctgggcccgtcctctgatgcacacacctcctactacagtgagtcgctggtccacgagtcctggttcccacccaggagctccctggaggaactgcatggtgacgccaactggggtgaggacctgcgggtgcggaggaggagaggcacgggtggctca

SEQ ID NO: 27135 - DNA, 1012 bp, Homo sapiens
  source 1..1012: mol_type = unassigned DNA
ccacacgcgcgccgcccggccccactcgcgcagcgcgggcctccgccggccgcattgtccgcccgcccgccttgtcccgcgtcgccgctcttcgcgtgcccgcgcgccccgggcccggccgctgtgtcgccctgagcggagcgccgcccgcgggatccccacgcggaaagggggcgcgccccggcggcggcctggcctcggacgcccccggccgggctagaagccgccgcggcagcaggtgtcacctccttcagcaggacagaggctaagaggagtccctgtgtgggcagctggagccttcagattctcttcaggggaagagtccacatcccacctcatcatgtcccgaagaagccagcgcctcacgcgctactcccagggtgacgatgacggcagcagcagcagcggagggagctcggtggctgggagtcagagcaccctgtttaaagacagtcctctcaggaccttgaagaggaaatccagcaacatgaagcgcctgtccccagcgccacagctgggcccgtcctctgatgcacacacctcctactacagtgagtcgctggtccacgagtcctggttcccacccaggagctccctggaggaactgcatggtgacgccaactggggctactcggatgtggaccagcagagttccagctcgcggctccgaagcgccgtctcacgggcgggctccttactctggatggtggccacttcgccaggccggctcttcagacttctctactggtgggctggcaccacctggtaccgcctgaccacagctgcctccctccttgacgtcttcgttttaaccaggcgcttctcgtccctgaagacgttcctctggttcctgctgccgctgctcttgctgacgtgcctgacgtatggtgcttggtatttctacccctatgggctgcagacattccaccctgctttggtttcctggtgggcagcgaaggacagcaggaggccggatgagggctgggaagccagagactcatcgccacatttc

SEQ ID NO: 27136 - DNA, 546 bp, Homo sapiens
  source 1..546: mol_type = unassigned DNA
tccagggacaggcagttcccagcctctgcctgtcagaactcagggcctcagaggaaggcccgttttgttcagttctaaaacaaaacaaaacaaagcaatggggggcgcggtgtgacttagagagccaggaggcgcgcctttggtgacaatttctgcagcaggacagaggctaagaggagtccctgtgtgggcagctggagccttcagattctcttcaggggaagagtccacatcccacctcatcatgtcccgaagaagccagcgcctcacgcgctactcccagggtgacgatgacggcagcagcagcagcggagggagctcggtggctgggagtcagagcaccctgtttaaagacagtcctctcaggaccttgaagaggaaatccagcaacatgaagcgcctgtccccagcgccacagctgggcccgtcctctgatgcacacacctcctactacagtgagtcgctggtccacgagtcctggttcccacccaggagctccctggaggaactgcatggtgacgccaactggggtgaggacctgcgggt

SEQ ID NO: 27137 - DNA, 621 bp, Homo sapiens
  source 1..621: mol_type = unassigned DNA
gtagatttcagctcccagaggctcacttcttgttttggagaatggggcctcgacctttttcatcttgtgaaacccagactcaatggtgtcacctccttcagcaggacagaggctaagaggagtccctgtgtgggcagctggagccttcagattctcttcaggggaagagtccacatcccacctcatcatgtcccgaagaagccagcgcctcacgcgctactcccagggtgacgatgacggcagcagcagcagcggagggagctcggtggctgggagtcagagcaccctgtttaaagacagtcctctcaggaccttgaagaggaaatccagcaacatgaagcgcctgtccccagcgccacagctgggcccgtcctctgatgcacacacctcctactacagtgagtcgctggtccacgagtcctggttcccacccaggagctccctggaggaactgcatggtgacgccaactggggtgaggacctgcgggtgcggaggaggagaggcacgggtggctcagagagcagcagggccagcgggcttgtggggcgcaaggccaccgaggacttcctgggctcttcctcgggctactcctctgaggacgactacgtgggtaggcgatg

SEQ ID NO: 27138 - DNA, 1004 bp, Homo sapiens
  source 1..1004: mol_type = unassigned DNA
gattcgcagtagtagatttcagctcccagaggctcacttcttgttttggagaatggggcctcgacctttttcatcttgtgaaacccagactcaatggtaaactgttttgtgatgccaggatgccgcaggaaagactgagaggcatctctgggagttctgggagggcggaggcgggtgctgacagttttcagcactccccgctcaacctccatcagaatatttagttcttcccagcggcagcttgggtatggtataaacatgttgccttgtttctgccctgggcaaaggtgtcacctccttcagcaggacagaggctaagaggagtccctgtgtgggcagctggagccttcagattctcttcaggggaagagtccacatcccacctcatcatgtcccgaagaagccagcgcctcacgcgctactcccagggtgacgatgacggcagcagcagcagcggagggagctcggtggctgggagtcagagcaccctgtttaaagacagtcctctcaggaccttgaagaggaaatccagcaacatgaagcgcctgtccccagcgccacagctgggcccgtcctctgatgcacacacctcctactacagtgagtcgctggtccacgagtcctggttcccacccaggagctccctggaggaactgcatggtgacgccaactggggtgaggacctgcgggtgcggaggaggagaggcacgggtggctcagagagcagcagggccagcgggcttgtggggcgcaaggccaccgaggacttcctgggctcttcctcgggctactcctctgaggacgactacgtgggctactcggatgtggaccagcagagttccagctcgcggctccgaagcgccgtctcacgggcgggctccttactctggatggtggccacttcgccaggccggctcttcagacttctctactggtgggctggcaccacctggtaccgcctgaccacagctgcctccctccttgacgtcttcgttttaaccagg

SEQ ID NO: 27139 - DNA, 1254 bp, Homo sapiens
  source 1..1254: mol_type = unassigned DNA
acttttcaggggacattcagaggcatcagccccttcctcctcaccagctcccagagttcccatctccatccccaatcctaaagaaggaaatcgatgccacggtcctcaaggagccctggggacccaggcgccctactcgaagatgtggcccacaatcccagaccccggaggattgcccagcgaggccggaacaccagcaggatggcagaggacacctccccaaacatgaatgacaacatcctgttgcctgtccgcaacaatgaccaagccctaggcctgactcagtgcatgctgggatgtgtgtcctggttcacctgttttgcctgctccctgagaactcaggcccagcaggttctgtttaacacgtgcagatgcaagctgctgtgccagaagctcatggagaagacaggcattctgctcctctgtgctttcggattctggatgttttctattcacttaccatcgaaaatgaaagtctggcaggatgacagcataaatggtccactgcagagcttgaggttgtaccaggagaaggtgcgacatcacagtggggaaatccaggacctccgaggtagcatgaaccagctcattgccaagctccaggagatggaagccatgtccgatgagcaaaaaatggcccagaaaataatgaagatgatacacggagattacatcgaaaagccagactttgccctgaagtctataggggccagcattgactttgagcacacgtcagtcacctataaccatgagaaggcccactcctactggaactggatccagctgtggaactacgcacagcccccagacgtgatccttgagcccaacgtgacacctggcaattgctgggcctttgagggtgaccgcggccaggtgaccatccaattggctcagaaggtttacctgtccaacctcacgctgcagcacatccccaagaccatctcattgtcaggcagcctggacaccgcccccaaggacttcgtcatctatggcatggagggctcccccaaggaggaggtgttcctgggggcatttcagtttcagccagaaaacatcatccagatgttcccactccagaaccagccggcccgggctttcagtgcggtcaaggtgaagatctcaagcaactgggggaacccaggcttcacttgcctgtaccgcgtgcgagtgcatggctctgtggccccgcccagagagcagcctcaccagaacccctaccctaagagagattaaaatttattctttacccccaga

SEQ ID NO: 27140 - DNA, 513 bp, Homo sapiens
  source 1..513: mol_type = unassigned DNA
atcctaaagaaggaaatcgatgccacggtcctcaaggagccctggggacccaggcgccctactcgaagatgtggcccacaatcccagaccccggaggattgcccagcgaggccggaacaccagcaggatggcagaggacacctccccaaacatgaatgacaacatcctgttgcctgtccgcaacaatgaccaagccctaggcctgactcagtgcatgctgggatgtgtgtatgcaagctgctgtgccagaagctcatggagaagacaggcattctgctcctctgtgctttcggtgtgtcccagggccctgcccagtcccaggtggaggtatccctgggccctggcactgattataggacactgggcaagacactgcactgccacgtgactcagtttccccatctgcctgatgggtgttgctgtgagaattatgaaatgaaatgatgaccatgaaaatattgtagaagccaagaaatgcttcagaagttataaagctctccccaaaccgtgtta

SEQ ID NO: 27141 - DNA, 1153 bp, Homo sapiens
  source 1..1153: mol_type = unassigned DNA
cagccccttcctcctcaccagctcccagagttcccatctccatccccaatcctaaagaaggaaatcgatgccacggtcctcaaggagccctggggacccaggcgccctactcgaagatgtggcccacaatcccagaccccggaggattgcccagcgaggccggaacaccagcaggatggcagaggacacctccccaaacatgacctggttcacctgttttgcctgctccctgagaactcaggcccagcaggttctgtttaacacgtgcagatgcaagctgctgtgccagaagctcatggagaagacaggcattctgctcctctgtgctttcggattctggatgttttctattcacttaccatcgaaaatgaaagtctggcaggatgacagcataaatggtccactgcagagcttgaggttgtaccaggagaaggtgcgacatcacagtggggaaatccaggacctccgaggtagcatgaaccagctcattgccaagctccaggagatggaagccatgtccgatgagcaaaaaatggcccagaaaataatgaagatgatacacggagattacatcgaaaagccagactttgccctgaagtctataggggccagcattgactttgagcacacgtcagtcacctataaccatgagaaggcccactcctactggaactggatccagctgtggaactacgcacagcccccagacgtgatccttgagcccaacgtgacacctggcaattgctgggcctttgagggtgaccgcggccaggtgaccatccaattggctcagaaggtttacctgtccaacctcacgctgcagcacatccccaagaccatctcattgtcaggcagcctggacaccgcccccaaggacttcgtcatctatggcatggagggctcccccaaggaggaggtgttcctgggggcatttcagtttcagccagaaaacatcatccagatgttcccactccagaaccagccggcccgggctttcagtgcggtcaaggtgaagatctcaagcaactgggggaacccaggcttcacttgcctgtaccgcgtgcgagtgcatggctctgtggccccgcccagagagcagcctcaccagaacccctaccctaagagagattaaaatttattctttacccccaga

SEQ ID NO: 27142 - DNA, 528 bp, Homo sapiens
  source 1..528: mol_type = unassigned DNA
ggcgccctactcgaagatgtggcccacaatcccagaccccggaggattgcccagcgaggccggaacaccagcaggatggcagaggacacctccccaaacatgaatgacaacatcctgttgcctgtccgcaacaatgaccaagccctaggcctgactcagtgcatgctgggatgtgtgtcctggttcacctgttttgcctgctccctgagaactcaggcccagcaggttctgtttaacacgtgcagatgcaagctgctgtgccagaagctcatggagaagacaggcattctgctcctctgtgctttcggtgtgtcccagggccctgcccagtcccaggtggaggtatccctgggccctggcactgattataggacactgggcaagacactgcactgccacgtgactcagtttccccatctgcctgatgggtgttgctgtgagaattatgaaatgaaatgatgaccatgaaaatattgtagaagccaagaaatgcttcagaagttataaagctctccccaaaccgtgtta

SEQ ID NO: 27143 - DNA, 445 bp, Homo sapiens
  source 1..445: mol_type = unassigned DNA
gcatgtgtctgctgctccctagtctgggccatgagtgagggtggaggccaagtctcatgcatttttgcagcccccacaagactgtgcaggtggccggccctcattgaatgcggggttaatttaactcagcctctgtgtgagtggatgattcaggttgccagagacagaaccctcagcttagcatgggaagtagcttccctgttgaccctgagttcatctgaggttggcttggaaggtgtgggcaccatttggcccagttcttacagctctgaagagagcagcaggaatggggctgagcagggaagacaactttccattgaaggcccctttcagggccagaactgtccctcccaccctgcagctgccctgcctctgcccatgaggggtgagagtcaggcgacctcatgccaagtgtagaaaggggcagatgggagccccaggttat

SEQ ID NO: 27144 - DNA, 5130 bp, Homo sapiens
  source 1..5130: mol_type = unassigned DNA
gctgatgtttgagccagcatgtcgcggaggaagcaagcgaagcctcaacatttccaatccgaccccgaagtggcctcgctcccccggcgagatggagacacagaaaagggtcaaccgagtcgccctactaagagcaaggatgcccacgtctgtggccggtgctgtgccgagttctttgaattatcagatcttctgctccacaagaagaactgtactaaaaatcaattagttttaatcgtaaatgaaaatccagcctccccacccgaaaccttctcccccagcccccctcctgataatcctgatgaacaaatgaatgacacagttaacaaaacagatcaagtggactgcagcgacctttcagaacacaacggacttgacagggaagagtccatggaggtggaggccccggttgctaacaaaagcggcagcggcacttccagcggcagccacagcagtaccgccccaagcagcagcagcagcagcagcagcagcagcggcggcggcggcagctcctccacaggtacctcagcgatcacaacctctctacctcaactcggggacctgacaacactgggcaacttctccgtaatcaacagcaacgtcatcatcgagaacctccagagcaccaaggtggcggtggcccagttctcccaggaagcgaggtgcggcggggcctctgggggcaagctggccgtcccagccctcatggaacaactcctagctctgcagcagcagcagatccaccagctgcaattgatcgaacagattcgtcaccaaatattgctgttggcttctcagaatgcagacttgccaacatcttctagtccttctcaaggtactttacgaacatctgccaaccccttgtccacgctaagttcccatttatctcagcagctggcagcagcagctggattggcacagagcctcgccagccaatctgccagcattagtggtgtgaaacagctacccccaatccagctacctcagagcagttctggcaacaccatcattccatccaacagcggctcttctcccaatatgaacatattggcagcggcagttaccaccccgtcctctgaaaaagtggcttcaagtgctggggcctcccatgtcagcaacccagcggtctcatcatcgtcctcaccagcttttgcaataagcagtttattaagtcctgcgtctaatccacttctacctcagcaagcctccgctaactcggttttccccagccctttgcccaacatcggaacaactgcagaggatttaaactccttgtctgccttggcccagcaaagaaaaagcaagccaccaaatgtcactgcctttgaagcgaaaagtacttccgatgaggcattcttcaaacacaagtgcaggttctgcgcgaaggtctttgggagtgacagtgccttgcagatccacttgcgttcccataccggagagaggccattcaagtgcaacatctgcgggaacaggttctccaccaaggggaatctgaaagtccactttcagcgccacaaagagaaataccctcatatccagatgaacccctatcctgtgcctgagcatttggacaatatccccacgagtactggcatcccatatggcatgtccatccctccagagaagccagtcaccagctggctagacaccaaaccagtcctgcctactctgaccacttcagtcggcctgccgttgcccccaaccctcccaagcctcatacccttcatcaagacggaagagccagcccccatccccatcagccattctgccaccagccccccaggctcagtcaaaagtgactccgggggccctgagtcagccacaagaaacctaggtgggctcccagaggaagccgaagggtccactctgccaccctctggtggcaaaagcgaagagagtggcatggtcaccaactcagtcccgacggcgagcagtagcgtcctgagctccccagcggcagactgcggccccgcgggcagtgccaccaccttcaccaaccctttgttgccgctcatgtccgagcagttcaaggccaagtttccttttgggggactcctggactcagctcaggcatcagagacgtccaagcttcagcaactggtagaaaacattgacaagaaggccactgaccccaatgagtgcatcatctgccaccgggttctcagctgccagagcgccttgaaaatgcactacaggacacacactggggagaggccctttaagtgtaagatctgtggccgggctttcaccacgaaagggaatcttaaaacccactacagtgtccatcgtgctatgcccccgctcagagtccagcattcctgccccatctgccagaagaagttcacgaacgctgtggtcctgcagcagcacatccgaatgcatatgggaggccagatccccaacaccccagtccccgacagctactctgagtccatggagtctgacacaggttcctttgatgagaaaaattttgatgacctagacaacttctctgatgaaaacatggaagactgtcctgagggcagcatccctgatacacctaagtctgcagacgcctcccaagacagcttatcctcttcgcctttgcccctcgagatgtcgagcatcgctgctttggaaaatcagatgaagatgatcaatgctggcctggcagagcagctacaggccagcctgaagtcagtggagaatgggtccatcgagggggatgtcctgaccaatgattcatcctcagtgggtggtgacatggaaagccaaagtgctggcagcccagccatctcagagtctacctcttccatgcaggctctgtccccgtccaacagcacgcaggagttccacaagtcacccagcattgaggagaaaccacagagagcggtcccaagcgagtttgccaatggtttgtctcccaccccagtgaatggtggggctttggatttgacatctagtcacgcagagaaaatcatcaaagaagattctttggggatcctcttcccttttagagaccggggtaaatttaaaaacactgcttgtgacatttgtggcaaaacatttgcttgtcagagtgccttggacattcactatagaagtcataccaaagagagaccatttatttgcacagtttgcaatcgtggcttttccacaaagggtaatttgaagcagcacatgttgacacatcagatgcgagatctgccatcccagctctttgagcccagttccaaccttggccccaatcagaactcagcggtgattcccgccaactcgttgtcatctctcatcaagacagaggtcaacggcttcgtgcatgtttctcctcaggacagtaaggacacccccaccagtcacgtcccgtctgggcctctgtcttcctctgccacatccccagttctgctccctgctctgcccaggagaactcccaagcagcactactgcaacacatgtggcaaaaccttctcctcatcgagtgccctgcagattcacgagagaactcacactggagagaaaccctttgcttgcactatttgtggaagagctttcacgactaaaggcaatcttaaggtacacatgggcactcacatgtggaatagcacccctgcacgacggggtcggcggctctctgtggatggccccatgacatttctaggaggcaatcccgtcaagttcccagaaatgttccagaaggatttggcggcaagatcaggaagtggggatccttccagcttctggaatcagtatgcagcagcgctctccaacgggctggcgatgaaggccaacgagatctccgtcattcagaacggtggcatccctccaattcctggaagcctcggcagtgggaacagctcacctgttagtgggctgacgggaaacctggagaggctccagaactcagagcccaatgctcccctggccggcctggagaaaatggcaagcagtgagaacggaaccaacttccgcttcacccgcttcgtggaggacagcaaggagatcgtcacgagttaaagcagctcgggctggagacatagcattcattcctgttcagaatgcgacctatggtggcctcctactccttgccccccaccccgccccgccccttccttctgttccccagatctatgaactacaacattatgaagacattcttttgtaccttgttcaactttagagttctaagaaagcttatttattagcgatataaccttgctttgcaaacagaatgcaagcgttaactttggtcttctgtattttggactaaatactaattgactagagtgctgtaaacttgctgtaacatttatggcaattgcaagttgccctgctaggcagttgtaatctggcattaacttattttctatatccagtttaatatgaatctggtgttgatgcaatgcctcagtgatgcattagatctctaataaagtctgtatatacatgtacactttgatcctgctggaaaattttatcagcaaacacattgtctaatctttcaaaacagatttaaggaaaggactgaaagtacagactgaacagtgtggttctttgaaaggtttggttttttaatttttattctaaaattcaacctttttttttgtcgatttaaccatttccattttgaactgctatttgtattgtgctttttacttgagtcgtcttcaatgttaataagtttctgtacagtaataagcacgcagaattctttagagaaaaagaaaacaagcgttgttttggtagttgaaactgagacgtaacattttgccttgtaggtatattcacgatagaaaatgtgtgctggaatttcacaatgctgctaagtatagcatcttgaacaaccttcagtggagaaaatgtagatgctcttgtatatacaataagaaatatcactttcattcaaatgtacatatgttccttacaagagcaaatgcttcttcttgatcaagagagcaggtatagtgtttgtttattttgtcttaggtatggaagaaaaaaattggactgttacatgcactttcttggaaagttgaaaggaaagggggggtccaatttctttaacatttaatacttactaacaacagagatactgtaattttactcaagtaatcaaatacattttttttgcaacagataaaacaaaatactgtg

SEQ ID NO: 27145 - DNA, 5253 bp, Homo sapiens
  source 1..5253: mol_type = unassigned DNA
ctttggaggttcagagctgcaagaagatggggactggtgtcggggcgccagcgcctgacccgctggggttgcggccggggtggagagtgctgctggccgccagttgttccggagacggtgcaaacggacggggaaagtgtcggggtctggctcgcaaaatttatctccgcatctcttcccacaacacttgcaccctctgccccccaaaatctttctggagacacagaaaagggtcaaccgagtcgccctactaagagcaaggatgcccacgtctgtggccggtgctgtgccgagttctttgaattatcagatcttctgctccacaagaagaactgtactaaaaatcaattagttttaatcgtaaatgaaaatccagcctccccacccgaaaccttctcccccagcccccctcctgataatcctgatgaacaaatgaatgacacagttaacaaaacagatcaagtggactgcagcgacctttcagaacacaacggacttgacagggaagagtccatggaggtggaggccccggttgctaacaaaagcggcagcggcacttccagcggcagccacagcagtaccgccccaagcagcagcagcagcagcagcagcagcagcggcggcggcggcagctcctccacaggtacctcagcgatcacaacctctctacctcaactcggggacctgacaacactgggcaacttctccgtaatcaacagcaacgtcatcatcgagaacctccagagcaccaaggtggcggtggcccagttctcccaggaagcgaggtgcggcggggcctctgggggcaagctggccgtcccagccctcatggaacaactcctagctctgcagcagcagcagatccaccagctgcaattgatcgaacagattcgtcaccaaatattgctgttggcttctcagaatgcagacttgccaacatcttctagtccttctcaaggtactttacgaacatctgccaaccccttgtccacgctaagttcccatttatctcagcagctggcagcagcagctggattggcacagagcctcgccagccaatctgccagcattagtggtgtgaaacagctacccccaatccagctacctcagagcagttctggcaacaccatcattccatccaacagcggctcttctcccaatatgaacatattggcagcggcagttaccaccccgtcctctgaaaaagtggcttcaagtgctggggcctcccatgtcagcaacccagcggtctcatcatcgtcctcaccagcttttgcaataagcagtttattaagtcctgcgtctaatccacttctacctcagcaagcctccgctaactcggttttccccagccctttgcccaacatcggaacaactgcagaggatttaaactccttgtctgccttggcccagcaaagaaaaagcaagccaccaaatgtcactgcctttgaagcgaaaagtacttccgatgaggcattcttcaaacacaagtgcaggttctgcgcgaaggtctttgggagtgacagtgccttgcagatccacttgcgttcccataccggagagaggccattcaagtgcaacatctgcgggaacaggttctccaccaaggggaatctgaaagtccactttcagcgccacaaagagaaataccctcatatccagatgaacccctatcctgtgcctgagcatttggacaatatccccacgagtactggcatcccatatggcatgtccatccctccagagaagccagtcaccagctggctagacaccaaaccagtcctgcctactctgaccacttcagtcggcctgccgttgcccccaaccctcccaagcctcatacccttcatcaagacggaagagccagcccccatccccatcagccattctgccaccagccccccaggctcagtcaaaagtgactccgggggccctgagtcagccacaagaaacctaggtgggctcccagaggaagccgaagggtccactctgccaccctctggtggcaaaagcgaagagagtggcatggtcaccaactcagtcccgacggcgagcagtagcgtcctgagctccccagcggcagactgcggccccgcgggcagtgccaccaccttcaccaaccctttgttgccgctcatgtccgagcagttcaaggccaagtttccttttgggggactcctggactcagctcaggcatcagagacgtccaagcttcagcaactggtagaaaacattgacaagaaggccactgaccccaatgagtgcatcatctgccaccgggttctcagctgccagagcgccttgaaaatgcactacaggacacacactggggagaggccctttaagtgtaagatctgtggccgggctttcaccacgaaagggaatcttaaaacccactacagtgtccatcgtgctatgcccccgctcagagtccagcattcctgccccatctgccagaagaagttcacgaacgctgtggtcctgcagcagcacatccgaatgcatatgggaggccagatccccaacaccccagtccccgacagctactctgagtccatggagtctgacacaggttcctttgatgagaaaaattttgatgacctagacaacttctctgatgaaaacatggaagactgtcctgagggcagcatccctgatacacctaagtctgcagacgcctcccaagacagcttatcctcttcgcctttgcccctcgagatgtcgagcatcgctgctttggaaaatcagatgaagatgatcaatgctggcctggcagagcagctacaggccagcctgaagtcagtggagaatgggtccatcgagggggatgtcctgaccaatgattcatcctcagtgggtggtgacatggaaagccaaagtgctggcagcccagccatctcagagtctacctcttccatgcaggctctgtccccgtccaacagcacgcaggagttccacaagtcacccagcattgaggagaaaccacagagagcggtcccaagcgagtttgccaatggtttgtctcccaccccagtgaatggtggggctttggatttgacatctagtcacgcagagaaaatcatcaaagaagattctttggggatcctcttcccttttagagaccggggtaaatttaaaaacactgcttgtgacatttgtggcaaaacatttgcttgtcagagtgccttggacattcactatagaagtcataccaaagagagaccatttatttgcacagtttgcaatcgtggcttttccacaaagggtaatttgaagcagcacatgttgacacatcagatgcgagatctgccatcccagctctttgagcccagttccaaccttggccccaatcagaactcagcggtgattcccgccaactcgttgtcatctctcatcaagacagaggtcaacggcttcgtgcatgtttctcctcaggacagtaaggacacccccaccagtcacgtcccgtctgggcctctgtcttcctctgccacatccccagttctgctccctgctctgcccaggagaactcccaagcagcactactgcaacacatgtggcaaaaccttctcctcatcgagtgccctgcagattcacgagagaactcacactggagagaaaccctttgcttgcactatttgtggaagagctttcacgactaaaggcaatcttaaggtacacatgggcactcacatgtggaatagcacccctgcacgacggggtcggcggctctctgtggatggccccatgacatttctaggaggcaatcccgtcaagttcccagaaatgttccagaaggatttggcggcaagatcaggaagtggggatccttccagcttctggaatcagtatgcagcagcgctctccaacgggctggcgatgaaggccaacgagatctccgtcattcagaacggtggcatccctccaattcctggaagcctcggcagtgggaacagctcacctgttagtgggctgacgggaaacctggagaggctccagaactcagagcccaatgctcccctggccggcctggagaaaatggcaagcagtgagaacggaaccaacttccgcttcacccgcttcgtggaggacagcaaggagatcgtcacgagttaaagcagctcgggctggagacatagcattcattcctgttcagaatgcgacctatggtggcctcctactccttgccccccaccccgccccgccccttccttctgttccccagatctatgaactacaacattatgaagacattcttttgtaccttgttcaactttagagttctaagaaagcttatttattagcgatataaccttgctttgcaaacagaatgcaagcgttaactttggtcttctgtattttggactaaatactaattgactagagtgctgtaaacttgctgtaacatttatggcaattgcaagttgccctgctaggcagttgtaatctggcattaacttattttctatatccagtttaatatgaatctggtgttgatgcaatgcctcagtgatgcattagatctctaataaagtctgtatatacatgtacactttgatcctgctggaaaattttatcagcaaacacattgtctaatctttcaaaacagatttaaggaaaggactgaaagtacagactgaacagtgtggttctttgaaaggtttggttttttaatttttattctaaaattcaacctttttttttgtcgatttaaccatttccattttgaactgctatttgtattgtgctttttacttgagtcgtcttcaatgttaataagtttctgtacagtaataagcacgcagaattctttagagaaaaagaaaacaagcgttgttttggtagttgaaactgagacgtaacattttgccttgtaggtatattcacgatagaaaatgtgtgctggaatttcacaatgctgctaagtatagcatcttgaacaaccttcagtggagaaaatgtagatgctcttgtatatacaataagaaatatcactttcattcaaatgtacatatgttccttacaagagcaaatgcttcttcttgatcaagagagcaggtatagtgtttgtttattttgtcttaggtatggaagaaaaaaattggactgttacatgcactttcttggaaagttgaaaggaaagggggggtccaatttctttaacatttaatacttactaacaacagagatactgtaattttactcaagtaatcaaatacattttttttgcaacagataaaacaaaatactgtg

SEQ ID NO: 27146 - DNA, 4334 bp, Homo sapiens
  source 1..4334: mol_type = unassigned DNA
attctgccccagctgatgtttgagccagcatgtcgcggaggaagcaagcgaagcctcaacatttccaatccgaccccgaagtggcctcgctcccccggcgagatggagacacagaaaagggtcaaccgagtcgccctactaagagcaaggatgcccacgtctgtggccggtgctgtgccgagttctttgaattatcagatcttctgctccacaagaagaactgtactaaaaatcaattagttttaatcgtaaatgaaaatccagcctccccacccgaaaccttctcccccagcccccctcctgataatcctgatgaacaaatgaatgacacagttaacaaaaccggcagccacagcagtaccgccccaagcagcagcagcagcagcagcagcagcagcggcggcggcggcagctcctccacaggtacctcagcgatcacaacctctctacctcaactcggggacctgacaacactgggcaacttctccgtaatcaacagcaacgtcatcatcgagaacctccagagcaccaaggtggcggtggcccagttctcccaggaagcgaggtgcggcggggcctctgggggcaagctggccgtcccagccctcatggaacaactcctagctctgcagcagcagcagatccaccagctgcaattgatcgaacagattcgtcaccaaatattgctgttggcttctcagaatgcagacttgccaacatcttctagtccttctcaaggtactttacgaacatctgccaaccccttgtccacgctaagttcccatttatctcagcagctggcagcagcagctggattggcacagagcctcgccagccaatctgccagcattagtggtgtgaaacagctacccccaatccagctacctcagagcagttctggcaacaccatcattccatccaacagcggctcttctcccaatatgaacatattggcagcggcagttaccaccccgtcctctgaaaaagtggcttcaagtgctggggcctcccatgtcagcaacccagcggtctcatcatcgtcctcaccagcttttgcaataagcagtttattaagtcctgcgtctaatccacttctacctcagcaagcctccgctaactcggttttccccagccctttgcccaacatcggaacaactgcagaggatttaaactccttgtctgccttggcccagcaaagaaaaagcaagccaccaaatgtcactgcctttgaagcgaaaagtacttccgatgaggcattcttcaaacacaagtgcaggttctgcgcgaaggtctttgggagtgacagtgccttgcagatccacttgcgttcccataccggagagaggccattcaagtgcaacatctgcgggaacaggttctccaccaaggggaatctgaaagtccactttcagcgccacaaagagaaataccctcatatccagatgaacccctatcctgtgcctgagcatttggacaatatccccacgagtactggcatcccatatggcatgtccatccctccagagaagccagtcaccagctggctagacaccaaaccagtcctgcctactctgaccacttcagtcggcctgccgttgcccccaaccctcccaagcctcatacccttcatcaagacggaagagccagcccccatccccatcagccattctgccaccagccccccaggctcagtcaaaagtgactccgggggccctgagtcagccacaagaaacctaggtgggctcccagaggaagccgaagggtccactctgccaccctctggtggcaaaagcgaagagagtggcatggtcaccaactcagtcccgacggcgagcagtagcgtcctgagctccccagcggcagactgcggccccgcgggcagtgccaccaccttcaccaaccctttgttgccgctcatgtccgagcagttcaaggccaagtttccttttgggggactcctggactcagctcaggcatcagagacgtccaagcttcagcaactggtagaaaacattgacaagaaggccactgaccccaatgagtgcatcatctgccaccgggttctcagctgccagagcgccttgaaaatgcactacaggacacacactggggagaggccctttaagtgtaagatctgtggccgggctttcaccacgaaagggaatcttaaaacccactacagtgtccatcgtgctatgcccccgctcagagtccagcattcctgccccatctgccagaagaagttcacgaacgctgtggtcctgcagcagcacatccgaatgcatatgggaggccagatccccaacaccccagtccccgacagctactctgagtccatggagtctgacacaggttcctttgatgagaaaaattttgatgacctagacaacttctctgatgaaaacatggaagactgtcctgagggcagcatccctgatacacctaagtctgcagacgcctcccaagacagcttatcctcttcgcctttgcccctcgagatgtcgagcatcgctgctttggaaaatcagatgaagatgatcaatgctggcctggcagagcagctacaggccagcctgaagtcagtggagaatgggtccatcgagggggatgtcctgaccaatgattcatcctcagtgggtggtgacatggaaagccaaagtgctggcagcccagccatctcagagtctacctcttccatgcaggctctgtccccgtccaacagcacgcaggagttccacaagtcacccagcattgaggagaaaccacagagagcggtcccaagcgagtttgccaatggtttgtctcccaccccagtgaatggtggggctttggatttgacatctagtcacgcagagaaaatcatcaaagaagattctttggggatcctcttcccttttagagaccggggtaaatttaaaaacactgcttgtgacatttgtggcaaaacatttgcttgtcagagtgccttggacattcactatagaagtcataccaaagagagaccatttatttgcacagtttgcaatcgtggcttttccacaaagggtaatttgaagcagcacatgttgacacatcagatgcgagatctgccatcccagctctttgagcccagttccaaccttggccccaatcagaactcagcggtgattcccgccaactcgttgtcatctctcatcaagacagaggtcaacggcttcgtgcatgtttctcctcaggacagtaaggacacccccaccagtcacgtcccgtctgggcctctgtcttcctctgccacatccccagttctgctccctgctctgcccaggagaactcccaagcagcactactgcaacacatgtggcaaaaccttctcctcatcgagtgccctgcagattcacgagagaactcacactggagagaaaccctttgcttgcactatttgtggaagagctttcacgactaaaggcaatcttaaggtacacatgggcactcacatgtggaatagcacccctgcacgacggggtcggcggctctctgtggatggccccatgacatttctaggaggcaatcccgtcaagttcccagaaatgttccagaaggatttggcggcaagatcaggaagtggggatccttccagcttctggaatcagtatgcagcagcgctctccaacgggctggcgatgaaggccaacgagatctccgtcattcagaacggtggcatccctccaattcctggaagcctcggcagtgggaacagctcacctgttagtgggctgacgggaaacctggagaggctccagaactcagagcccaatgctcccctggccggcctggagaaaatggcaagcagtgagaacggaaccaacttccgcttcacccgcttcgtggaggacagcaaggagatcgtcacgagttaaagcagctcgggctggagacatagcattcattcctgttcagaatgcgacctatggtggcctcctactccttgccccccaccccgccccgccccttccttctgttccccagatctatgaactacaacattatgaagacattcttttgtaccttgttcaactttagagttctaagaaagcttatttattagcgatataaccttgctttgcaaacagaatgcaagcgttaactttggtcttctgtattttggactaaatactaattgactagagtgctgtaaacttgctgtaacatttatggcaattgcaagttgccctgctaggcagttgtaatctggcattaacttattttctatatccagtttaatatgaatctggtgttgatgcaatgcctcagtgatgcattagatctctaataaagtctgtatatacatgtacact

SEQ ID NO: 27147 - DNA, 565 bp, Homo sapiens
  source 1..565: mol_type = unassigned DNA
atgtcgcggaggaagcaagcgaagcctcaacatttccaatccgaccccgaagtggcctcgctcccccggcgagatggtacacatgggcactcacatgtggaatagcacccctgcacgacggggtcggcggctctctgtggatggccccatgacatttctaggaggcaatcccgtcaagttcccagaaatgttccagaaggatttggcggcaagatcaggaagtggggatccttccagcttctggaatcagtatgcagcagcgctctccaacgggctggcgatgaaggccaacgagatctccgtcattcagaacggtggcatccctccaattcctggaagcctcggcagtgggaacagctcacctgttagtgggctgacgggaaacctggagaggctccagaactcagagcccaatgctcccctggccggcctggagaaaatggcaagcagtgagaacggaaccaacttccgcttcacccgcttcgtggaggacagcaaggagatcgtcacgagttaaagcagctcgggctggagacatagcattcattcctgttcagaatgcgac

SEQ ID NO: 27148 - DNA, 4925 bp, Homo sapiens
  source 1..4925: mol_type = unassigned DNA
gcttttacaatgggagctgcagaagcgtagggaagaagctgaagaaaaaaagggggcgtctcccctttaaagacttgcaaagattgagagagaaagagagagagtcaagaacagagaatcagagagagagagagagtctgtgtctctgggaaagaagaacatctctgcttcacagtgatttgcgctgggggagaggcatcaattggcttcggacccaagggggagacgagaccaggtcaccccggttaagaccaagtgagcgttgcccctccctctcccaactctctacccgggaatgtctcggcgaaagcagcggaaaccccaacagttaatctcggactgcgaaggtcccagcgcgtctgagaacggtgatgctagcgaggaggatcacccccaagtctgtgccaagtgctgcgcacaattcactgacccaactgaattcctcgcccaccagaacgcatgttctactgaccctcctgtaatggtgataattgggggccaggagaaccccaacaactcttcggcctcctctgaaccccggcctgagggtcacaataatcctcaggtcatggacacagagcatagcaaccccccagattctgggtcctccgtgcccacggatcccacctggggcccagagaggagaggagaggagtctccagggcatttcctggtcgctgccacaggtacagcggctgggggaggcgggggcctgatcttggccagtcccaagctgggagcaaccccattacctccagaatcgacccctgcaccccctcctcctccaccaccccctccgcccccaggggtaggcagtggccacttgaatatccccctgatcttggaagagctacgggtgctgcagcagcggcagatccatcagatgcagatgactgagcaaatctgcaggcaggtgctgttgcttggctccttaggccagacggtgggtgcccctgccagtccctcagagctacctgggacagggactgcctcttccaccaagcccctactacccctcttcagccccatcaagcctgtccaaaccagcaagacactggcatcttcctcctcctcctcctcttcctcttcaggggcagaaacgcccaagcaggccttcttccacctttaccacccactggggtcacagcatcctttctctgctggaggggttgggcgaagccacaaacccacccctgccccttccccagccttgccaggcagcacagatcagctgattgcctcgcctcatctggcattcccaagcaccacgggactactggcagcacagtgtcttggggcagcccgaggccttgaggccactgcctccccagggctcctgaagccaaagaatggaagtggtgagctgagctacggagaagtgatgggtcccttggagaagcctggtggaaggcacaaatgccgcttctgtgccaaagtatttggcagtgacagtgccctgcagatccaccttcgttcccacacgggtgagaggccctataagtgcaatgtctgtggaaaccgttttaccacccgtggcaacctcaaagtgcatttccaccggcatcgtgagaagtacccacatgtgcagatgaacccacacccagtaccagagcacctagactatgtcattaccagcagtggcttgccttatggtatgtccgtgccaccagagaaggccgaggaggaggcagccactccaggtggaggggttgagcgcaagcctctggtggcctccacaacagcactcagtgccacagagagcctgactctgctctccaccagtgcaggcacagccacggctccaggactccctgctttcaataagtttgtgctcatgaaagcagtggaacccaagaataaagctgatgaaaacacccccccagggagtgagggctcagccatcagtggagtggcagaaagtagcacggcaactcgcatgcaactaagtaagttggtgacttcactaccaagctgggcactgcttaccaaccacttcaagtccactggcagcttccccttcccctatgtgctagagcccttgggggcctcaccctctgagacatcaaagctgcagcaactggtagaaaagattgaccggcaaggagctgtggcggtgacctcagctgcctcaggagcccccaccacctctgcccctgcaccttcatcctcagcctcttctggacctaaccagtgtgtcatctgtctccgagtgcttagctgtcctcgggccctacgccttcattatggccaacatggaggtgagaggcccttcaaatgcaaagtgtgtggcagagccttctccaccaggggtaatctgcgtgcacatttcgtgggccacaaggccagtccagctgcccgggcacagaattcctgccccatctgccagaagaagttcaccaatgctgtcactctgcagcagcatgtccggatgcacctggggggccagatccccaacggtggtactgcactccctgaaggtggaggagctgctcaggagaatggctccgagcaatctacagtctccggggcagggagtttcccccagcagcagtcccagcagccatcaccggaagaggagttgtctgaggaggaggaagaggaggatgaggaagaagaggaagatgtgactgatgaagattccctggcagggagaggctcagagagtggaggtgagaaggcaatatcagtgagaggtgattcagaagaggcatctggggcagaggaggaggtggggacagtggcggcagcagccacagctgggaaggagatggacagtaatgagaaaactactcaacagtcttctttgccaccaccaccaccacctgacagcctggatcagcctcagccaatggagcagggaagcagtggtgttttaggaggcaaggaagaggggggcaaaccggagagaagctcaagtccggcatcagcactcaccccagaaggggaagccaccagcgtgaccttggtagaggagctgagcctgcaggaggcaatgagaaaggagccaggagagagcagcagcagaaaggcctgcgaagtgtgtggccaggcctttccctcccaggcagctctggaggagcatcagaagacccaccccaaggaggggccgctcttcacttgtgttttctgcaggcagggctttcttgagcgggctaccctcaagaagcatatgctcctggcacaccaccaggtacagccctttgccccccatggccctcagaatattgctgctctttctctagtccctggctgttcgccttccatcacctccacagggctctccccctttccccgaaaagatgaccccacgatcccatgagcctgtttttctgtacctgctgctctttgtcccacagagcagaaacagcttcacaaaaggacctcccagagttatgagccctgattttgtctttttctctaagttcttaacatgttatgtccctagtggcttttctgtagtccctgagcttggaaattactgtgcttacaaggggatggccccctaaggaatttttcttccctcctcattctttgtacctgaggaacatagattctctgcagctttctcaaggggaaccctctccagcttccctggtgtgacccttcttccccctcctctctcctctccctttccctttggtaggtgcacctgagcacctacatttggcattgcagcctagccaaaaagggctggcagctgtctctggagggcccagtgccactcctctggggtgacctttctgctcagctggtgggtatgggtcccctatctttctagaaccagtatgtggcattcctgtcaaatggcctgcccatgaagccctggaattccagctccacctccactaccactccaagcctggccccaccagtgctgtttggcctaggaactgtggctgggaaggtgcctccaacaatgggatccagggaagccaaggagaagacagcccccctcctatttcagcctcctgcacccaaggcagtgcctgagaagcccatcatagacaagaagtagcaaactgtacattccttcttcctccccctgctccagaaggtgccggtactgaagatgctccagtaattggtgacccaaccctaggaagtagggagaaatgaaggaagggcataggaaaattttcccagtaaatcccctgatggtcacattaaggtaaaggttttggctggtcagtgtgccaagacctctccagcttctcattcatgatgacctctcaaagttgggaaacaagctgatttcttgccaagaggtctcccaggagatatttgggaaatgtgaagttcgtatctttaaggagcatttttggtcagcatggttgatgaactaatgatgagagagttaaggaatgttgctagaacatagggcttgctggtacctatgtgactaagaaagggacatgatgtaagggaaaaggcctcaaattcttgtgaatgtggacattctcgttaatattcttttgggctaatagtgacatagtgtgcagaggtgtaccagggatcatgggggatttcctagcactagtatgcttctagttttagataactccctcctttattccctggccccttgtattttccttatcttcctctttcaagacccctacccattttgcctatccgtaggctggggcttgtgtctttgtcattgtctggttcttaagagtcccagctccaggtggcgtcctccctgcctctccgtcttgtaatgagttgtagtatttactcttaacataggatcatttggaacaggagttctgaggaggagagagtgagggttttgctattgactgacttgaacgatggcttctcctcaagctgtaggctccagagcttcctaacctagtaaaatgtcaagaacagacgggagatattagtgtctttccctctatcattaaaggtgttttaaccaa

SEQ ID NO: 27149 - DNA, 2665 bp, Homo sapiens
  source 1..2665: mol_type = unassigned DNA
agagagagagtctgtgtctctgggaaagaagaacatctctgcttcacagtgatttgcgctgggggagaggcatcaattggcttcggacccaagggggagacgagaccaggtcaccccggttaagaccaagtgagcgttgcccctccctctcccaactctctacccgggaatgtctcggcgaaagcagcggaaaccccaacagttaatctcggactgcgaaggtcccagcgcgtctgagaacggtgatgctagcgaggaggatcacccccaagtctgtgccaagtgctgcgcacaattcactgacccaactgaattcctcgcccaccagaacgcatgttctactgaccctcctgtaatggtgataattgggggccaggagaaccccaacaactcttcggcctcctctgaaccccggcctgagggtcacaataatcctcaggtcatggacacagagcatagcaaccccccagattctgggtcctccgtgcccacggatcccacctggggcccagagaggagaggagaggagtctccagggcatttcctggtcgctgccacaggtacagcggctgggggaggcgggggcctgatcttggccagtcccaagctgggagcaaccccattacctccagaatcgacccctgcaccccctcctcctccaccaccccctccgcccccaggggtaggcagtggccacttgaatatccccctgatcttggaagagctacgggtgctgcagcagcggcagatccatcagatgcagatgactgagcaaatctgcaggcaggtgctgttgcttggctccttaggccagacggtgggtgcccctgccagtccctcagagctacctgggacagggactgcctcttccaccaagcccctactacccctcttcagccccatcaagcctgtccaaaccagcaagacactggcatcttcctcctcctcctcctcttcctcttcaggggcagaaacgcccaagcaggccttcttccacctttaccacccactggggtcacagcatcctttctctgctggaggggttgggcgaagccacaaacccacccctgccccttccccagccttgccaggcagcacagatcagctgattgcctcgcctcatctggcattcccaagcaccacgggactactggcagcacagtgtcttggggcagcccgaggccttgaggccactgcctccccagggctcctgaagccaaagaatggaagtggtgagctgagctacggagaagtgatgggtcccttggagaagcctggtggaaggcacaaatgccgcttctgtgccaaagtatttggcagtgacagtgccctgcagatccaccttcgttcccacacgggtgagaggccctataagtgcaatgtctgtggaaaccgttttaccacccgtggcaacctcaaagtgcatttccaccggcatcgtgagaagtacccacatgtgcagatgaacccacacccagtaccagagcacctagactatgtcattaccagcagtggcttgccttatggtatgtccgtgccaccagagaaggccgaggaggaggcagccactccaggtggaggggttgagcgcaagcctctggtggcctccacaacagcactcagtgccacagagagcctgactctgctctccaccagtgcaggcacagccacggctccaggactccctgctttcaataagtttgtgctcatgaaagcagtggaacccaagaataaagctgatgaaaacacccccccagggagtgagggctcagccatcagtggagtggcagaaagtagcacggcaactcgcatgcaactaagtaagttggtgacttcactaccaagctgggcactgcttaccaaccacttcaagtccactggcagcttccccttcccctatgtgccagaagaagttcaccaatgctgtcactctgcagcagcatgtccggatgcacctggggggccagatccccaacggtggtactgcactccctgaaggtggaggaggtggggacagtggcggcagcagccacagctgggaaggagatggacagtaatgagaaaactactcaacagtcttctttgccaccaccaccaccacctgacagcctggatcagcctcagccaatggagcagggaagcagtggtgttttaggaggcaaggaagaggggggcaaaccggagagaagctcaagtccggcatcagcactcaccccagaaggggaagccaccagcgtgaccttggtagaggagctgagcctgcaggaggcaatgagaaaggagccaggagagagcagcagcagaaaggcctgcgaagtgtgtggccaggcctttccctcccaggcagctctggaggagcatcagaagacccaccccaaggaggggccgctcttcacttgtgttttctgcaggcagggctttcttgagcgggctaccctcaagaagcatatgctcctggcacaccaccaggtacagccctttgccccccatggccctcagaatattgctgctctttctctagtccctggctgttcgccttccatcacctccacagggctctccccctttccccgaaaagatgaccccacgatcccatgagcctgtttttctgtacctgctgctctttgtcccacagagcagaaacagcttcacaaaaggacctccc

SEQ ID NO: 27150 - DNA, 3762 bp, Homo sapiens
  source 1..3762: mol_type = unassigned DNA
atgtctcggcgcaagcaggccaagccccagcacctcaagtcggacgaggagctgctgccgcctgacggggctcccgagcacgccgccccgggggaaggtgcggaggacgcagacagcgggcccgagagccgcagcgggggcgaggagaccagcgtgtgcgagaaatgctgcgccgagttcttcaagtgggcggacttcctggagcaccagcggagctgcaccaagctcccgcccgtgctgatcgtgcacgaggacgcgcccgcgccgccccccgaggacttccccgagccttcgcccgccagctcccccagcgagcgcgccgaaagcgaggcggccgaggaggcgggtgcggagggcgcggagggcgaggccaggccggtggagaaggaggccgagcccatggacgcggaacccgcgggggacacgcgcgcgccccggcccccgcctgcggcccctgcacccccaacgcccgcctacggcgcgcccagcaccaacgtgaccctggaggcgctgctgagcaccaaggtggcggtggcgcagttctcgcagggcgcgcgcgcggcaggcggctcgggagcaggtggaggcgtggcagctgcagccgtgcccctgatcctggaacagctcatggccctgcagcagcagcagatccaccagctgcagctcatcgagcagatccgcagccaggtggccctcatgcagcgcccgccgccgcggccctcactcagccccgcggccgccccgagcgcaccgggcccggcccccagccagctgcccgggctggccgcgctcccgctgtcggccggggcccctgccgccgccatcgcgggctcgggccccgccgccccggccgccttcgagggcgcgcagccgctgtcccggcccgagtctggcgccagcacccccggcggccctgcggagcccagcgcgcccgccgcccccagcgccgcccctgcccccgctgcccccgccccggcgccagcgccgcagagcgcagcctcgtcgcagccgcagagcgcatccacgccgcctgccctggccccggggtccctgctgggtgcggcgcccggcctgccaagtccgcttctacctcagacttccgccagcggcgtcatcttccccaacccgctggtcagcatcgcggccacggccaacgctctggacccgctgtccgcgctcatgaagcaccgcaagggcaagccgcccaatgtgtcggtgttcgagcccaaagccagcgccgaggacccgttcttcaagcacaaatgccgcttctgcgccaaggtcttcggcagcgacagcgcgctccagatccacctgcgctcgcacacaggcgagcggcccttcaagtgcaacatctgcgggaaccgcttctccaccaaaggcaacctgaaggtgcacttccagaggcacaaggagaagtacccccacatccagatgaacccttacccggtccccgagtacctggacaacgtgcccacctgctcgggcatcccctacggcatgtcgctgccccccgagaagcccgtgaccacctggctggacagcaagcccgtgctgcccaccgtgcccacgtccgtggggctgcaactgccgcccactgtccctggcgcgcacggctacgccgactctcccagcgccaccccagccagccgctccccgcagaggccctcgcccgcctccagcgagtgcgcctccttgtccccaggcctcaaccacgtggagtccggcgtgtcggccaccgccgagtccccacagtcgctcctcggcgggccgcccctcactaaagccgagcccgtcagcctgccctgcaccaacgccagggccggggacgctcccgtgggcgcgcaggctagcgctgcacccacatcggtggacggcgcacccacgagcctcggcagccccgggctgcccgccgtctccgagcagttcaaggcccagtttccgttcggggggctgctagactcgatgcaaacgtcggaaacctcgaagctgcagcagctggtggagaacatcgacaagaagatgacggacccgaaccagtgcgtcatctgccaccgggtgctgagctgccagagcgcgctgaagatgcactaccggacgcacacgggggagcggccgttcaagtgcaagatctgcggccgcgccttcaccaccaagggcaacctcaagacgcacttcggcgtgcaccgtgcaaagccgcccctgcgcgtgcagcactcctgccccatctgccagaagaagttcaccaacgccgtggtcctgcagcagcacatccgcatgcacatgggcggccagatccccaacacgccgctgccggagggcttccaggatgccatggactccgagctggcctacgacgacaagaacgcggagaccctgagcagctacgatgacgacatggacgagaactccatggaggacgacgctgagctgaaggacgcggccaccgacccggccaagccactcctgtcctacgcggggtcctgcccgccctccccgccctcggtcatctccagcattgccgccctggagaaccagatgaagatgatcgactcggtcatgagctgccagcagctgaccggcctcaagtccgtggagaacgggtccggggagagtgaccgcctgagcaacgactcctcgtcggccgtgggcgacctggagagccgcagcgcgggcagccccgccctgtccgagtcctcgtcctcgcaggccctgtcgccggcccccagcaatggtgagagcttccgctccaagtccccgggcctgggcgccccggaggagccccaggaaatcccgctcaagaccgagaggccggacagcccagccgccgccccgggcagcggaggcgcccctggccgcgcgggcatcaaggaggaggcgcccttcagcctgctgttcctgagcagggagcggggtcccagccaaagcactcctagcctgatctccagcgccgcacccaccatgatcaaaatggaagtgaacggtcacggcaaggccatggcgctgggcgagggtcccccgctgcccgcgggcgtccaggtccccgccgggcctcagacagtgatgggcccgggcctggcgcccatgctggcccccccaccgcgccggacgcccaagcagcacaactgccagtcgtgcgggaagaccttctcctcggccagcgccctgcagatccatgagcgcacgcacaccggcgagaagccgttcggctgcaccatctgcggccgggccttcaccactaagggcaacctcaaggtgcacatggggacacacatgtggaataacgcccccgcgagacgcggccgccgcctgtctgtggagaaccccatggctctcctagggggtgatgccctgaagttctctgaaatgttccagaaggacctggcagctcgggcaatgaacgtcgaccccagtttttggaaccagtatgctgcagccatcactaacgggctcgccatgaagaacaacgagatctccgtcatccagaacggcggcatcccccagctccccgtgagtcttgggggcagcgccctcccccctctgggcagcatggccagtgggatggacaaagcacgcactggcagtagcccacccatcgtcagcttggacaaagcgagctcagaaacagcagccagccgcccattcacgcggtttatcgaggataacaaggagattggtatcaactagccagtgactcgctcatctgccctgcccaggcccacgttttgaagttggagcatcaggcctccgacctttcttgcc

SEQ ID NO: 27151 - DNA, 3903 bp, Homo sapiens
  source 1..3903: mol_type = unassigned DNA
atgtctcggcgcaagcaggccaagccccagcacctcaagtcggacgaggagctgctgccgcctgacggggctcccgagcacgccgccccgggggaaggtgcggaggacgcagacagcgggcccgagagccgcagcgggggcgaggagaccagcgtgtgcgagaaatgctgcgccgagttcttcaagtgggcggacttcctggagcaccagcggagctgcaccaagctcccgcccgtgctgatcgtgcacgaggacgcgcccgcgccgccccccgaggacttccccgagccttcgcccgccagctcccccagcgagcgcgccgaaagcgaggcggccgaggaggcgggtgcggagggcgcggagggcgaggccaggccggtggagaaggaggccgagcccatggacgcggaacccgcgggggacacgcgcgcgccccggcccccgcctgcggcccctgcacccccaacgcccgcctacggcgcgcccagcaccaacgtgaccctggaggcgctgctgagcaccaaggtggcggtggcgcagttctcgcagggcgcgcgcgcggcaggcggctcgggagcaggtggaggcgtggcagctgcagccgtgcccctgatcctggaacagctcatggccctgcagcagcagcagatccaccagctgcagctcatcgagcagatccgcagccaggtggccctcatgcagcgcccgccgccgcggccctcactcagccccgcggccgccccgagcgcaccgggcccggcccccagccagctgcccgggctggccgcgctcccgctgtcggccggggcccctgccgccgccatcgcgggctcgggccccgccgccccggccgccttcgagggcgcgcagccgctgtcccggcccgagtctggcgccagcacccccggcggccctgcggagcccagcgcgcccgccgcccccagcgccgcccctgcccccgctgcccccgccccggcgccagcgccgcagagcgcagcctcgtcgcagccgcagagcgcatccacgccgcctgccctggccccggggtccctgctgggtgcggcgcccggcctgccaagtccgcttctacctcagacttccgccagcggcgtcatcttccccaacccgctggtcagcatcgcggccacggccaacgctctggacccgctgtccgcgctcatgaagcaccgcaagggcaagccgcccaatgtgtcggtgttcgagcccaaagccagcgccgaggacccgttcttcaagcacaaatgccgcttctgcgccaaggtcttcggcagcgacagcgcgctccagatccacctgcgctcgcacacaggcgagcggcccttcaagtgcaacatctgcgggaaccgcttctccaccaaaggcaacctgaaggtgcacttccagaggcacaaggagaagtacccccacatccagatgaacccttacccggtccccgagtacctggacaacgtgcccacctgctcgggcatcccctacggcatgtcgctgccccccgagaagcccgtgaccacctggctggacagcaagcccgtgctgcccaccgtgcccacgtccgtggggctgcaactgccgcccactgtccctggcgcgcacggctacgccgactctcccagcgccaccccagccagccgctccccgcagaggccctcgcccgcctccagcgagtgcgcctccttgtccccaggcctcaaccacgtggagtccggcgtgtcggccaccgccgagtccccacagtcgctcctcggcgggccgcccctcactaaagccgagcccgtcagcctgccctgcaccaacgccagggccggggacgctcccgtgggcgcgcaggctagcgctgcacccacatcggtggacggcgcacccacgagcctcggcagccccgggctgcccgccgtctccgagcagttcaaggcccagtttccgttcggggggctgctagactcgatgcaaacgtcggaaacctcgaagctgcagcagctggtggagaacatcgacaagaagatgacggacccgaaccagtgcgtcatctgccaccgggtgctgagctgccagagcgcgctgaagatgcactaccggacgcacacgggggagcggccgttcaagtgcaagatctgcggccgcgccttcaccaccaagggcaacctcaagacgcacttcggcgtgcaccgtgcaaagccgcccctgcgcgtgcagcactcctgccccatctgccagaagaagttcaccaacgccgtggtcctgcagcagcacatccgcatgcacatgggcggccagatccccaacacgccgctgccggagggcttccaggatgccatggactccgagctggcctacgacgacaagaacgcggagaccctgagcagctacgatgacgacatggacgagaactccatggaggacgacgctgagctgaaggacgcggccaccgacccggccaagccactcctgtcctacgcggggtcctgcccgccctccccgccctcggtcatctccagcattgccgccctggagaaccagatgaagatgatcgactcggtcatgagctgccagcagctgaccggcctcaagtccgtggagaacgggtccggggagagtgaccgcctgagcaacgactcctcgtcggccgtgggcgacctggagagccgcagcgcgggcagccccgccctgtccgagtcctcgtcctcgcaggccctgtcgccggcccccagcaatggtgagagcttccgctccaagtccccgggcctgggcgccccggaggagccccaggaaatcccgctcaagaccgagaggccggacagcccagccgccgccccgggcagcggaggcgcccctggccgcgcgggcatcaaggaggaggcgcccttcagcctgctgttcctgagcagggagcggggtaagtgtcccagcactgtgtgtggtgtctgtggcaagccttttgcttgcaagagcgcgttggaaatccactaccgcagccatactaaggagcggccattcgtctgcgcgctctgcaggcgagggtgctccactatgggtaatttaaaacagcacttactgacacacagattgaaagagctgccttctcagttatttgaccccaactttgctctaggtcccagccaaagcactcctagcctgatctccagcgccgcacccaccatgatcaaaatggaagtgaacggtcacggcaaggccatggcgctgggcgagggtcccccgctgcccgcgggcgtccaggtccccgccgggcctcagacagtgatgggcccgggcctggcgcccatgctggcccccccaccgcgccggacgcccaagcagcacaactgccagtcgtgcgggaagaccttctcctcggccagcgccctgcagatccatgagcgcacgcacaccggcgagaagccgttcggctgcaccatctgcggccgggccttcaccactaagggcaacctcaaggtgcacatggggacacacatgtggaataacgcccccgcgagacgcggccgccgcctgtctgtggagaaccccatggctctcctagggggtgatgccctgaagttctctgaaatgttccagaaggacctggcagctcgggcaatgaacgtcgaccccagtttttggaaccagtatgctgcagccatcactaacgggctcgccatgaagaacaacgagatctccgtcatccagaacggcggcatcccccagctccccgtgagtcttgggggcagcgccctcccccctctgggcagcatggccagtgggatggacaaagcacgcactggcagtagcccacccatcgtcagcttggacaaagcgagctcagaaacagcagccagccgcccattcacgcggtttatcgaggataacaaggagattggtatcaactag

SEQ ID NO: 27152 - DNA, 2958 bp, Homo sapiens
  source 1..2958: mol_type = unassigned DNA
atgtctcggcgcaagcaggccaagccccagcacctcaagtcggacgaggagctgctgccgcctgacggggctcccgagcacgccgccccgggggaaggtgcggaggacgcagacagcgggcccgagagccgcagcgggggcgaggagaccagcgtgtgcgagaaatgctgcgccgagttcttcaagtgggcggacttcctggagcaccagcggagctgcaccaagctcccgcccgtgctgatcgtgcacgaggacgcgccccccggcctgccaagtccgcttctacctcagacttccgccagcggcgtcatcttccccaacccgctggtcagcatcgcggccacggccaacgctctggacccgctgtccgcgctcatgaagcaccgcaagggcaagccgcccaatgtgtcggtgttcgagcccaaagccagcgccgaggacccgttcttcaagcacaaatgccgcttctgcgccaaggtcttcggcagcgacagcgcgctccagatccacctgcgctcgcacacaggcgagcggcccttcaagtgcaacatctgcgggaaccgcttctccaccaaaggcaacctgaaggtgcacttccagaggcacaaggagaagtacccccacatccagatgaacccttacccggtccccgagtacctggacaacgtgcccacctgctcgggcatcccctacggcatgtcgctgccccccgagaagcccgtgaccacctggctggacagcaagcccgtgctgcccaccgtgcccacgtccgtggggctgcaactgccgcccactgtccctggcgcgcacggctacgccgactctcccagcgccaccccagccagccgctccccgcagaggccctcgcccgcctccagcgagtgcgcctccttgtccccaggcctcaaccacgtggagtccggcgtgtcggccaccgccgagtccccacagtcgctcctcggcgggccgcccctcactaaagccgagcccgtcagcctgccctgcaccaacgccagggccggggacgctcccgtgggcgcgcaggctagcgctgcacccacatcggtggacggcgcacccacgagcctcggcagccccgggctgcccgccgtctccgagcagttcaaggcccagtttccgttcggggggctgctagactcgatgcaaacgtcggaaacctcgaagctgcagcagctggtggagaacatcgacaagaagatgacggacccgaaccagtgcgtcatctgccaccgggtgctgagctgccagagcgcgctgaagatgcactaccggacgcacacgggggagcggccgttcaagtgcaagatctgcggccgcgccttcaccaccaagggcaacctcaagacgcacttcggcgtgcaccgtgcaaagccgcccctgcgcgtgcagcactcctgccccatctgccagaagaagttcaccaacgccgtggtcctgcagcagcacatccgcatgcacatgggcggccagatccccaacacgccgctgccggagggcttccaggatgccatggactccgagctggcctacgacgacaagaacgcggagaccctgagcagctacgatgacgacatggacgagaactccatggaggacgacgctgagctgaaggacgcggccaccgacccggccaagccactcctgtcctacgcggggtcctgcccgccctccccgccctcggtcatctccagcattgccgccctggagaaccagatgaagatgatcgactcggtcatgagctgccagcagctgaccggcctcaagtccgtggagaacgggtccggggagagtgaccgcctgagcaacgactcctcgtcggccgtgggcgacctggagagccgcagcgcgggcagccccgccctgtccgagtcctcgtcctcgcaggccctgtcgccggcccccagcaatggtgagagcttccgctccaagtccccgggcctgggcgccccggaggagccccaggaaatcccgctcaagaccgagaggccggacagcccagccgccgccccgggcagcggaggcgcccctggccgcgcgggcatcaaggaggaggcgcccttcagcctgctgttcctgagcagggagcggggtcccagccaaagcactcctagcctgatctccagcgccgcacccaccatgatcaaaatggaagtgaacggtcacggcaaggccatggcgctgggcgagggtcccccgctgcccgcgggcgtccaggtccccgccgggcctcagacagtgatgggcccgggcctggcgcccatgctggcccccccaccgcgccggacgcccaagcagcacaactgccagtcgtgcgggaagaccttctcctcggccagcgccctgcagatccatgagcgcacgcacaccggcgagaagccgttcggctgcaccatctgcggccgggccttcaccactaagggcaacctcaaggtgcacatggggacacacatgtggaataacgcccccgcgagacgcggccgccgcctgtctgtggagaaccccatggctctcctagggggtgatgccctgaagttctctgaaatgttccagaaggacctggcagctcgggcaatgaacgtcgaccccagtttttggaaccagtatgctgcagccatcactaacgggctcgccatgaagaacaacgagatctccgtcatccagaacggcggcatcccccagctccccgtgagtcttgggggcagcgccctcccccctctgggcagcatggccagtgggatggacaaagcacgcactggcagtagcccacccatcgtcagcttggacaaagcgagctcagaaacagcagccagccgcccattcacgcggtttatcgaggataacaaggagattggtatcaactagccagtgactcgctcatctgccctgcccaggcccacgttttgaagttggagcatcaggcctccgacctttcttgcc

SEQ ID NO: 27153 - DNA, 3452 bp, Homo sapiens
  source 1..3452: mol_type = unassigned DNA
aactccaggaatttgtggcggagagggcaaataactgcggctctcccggcgccccgatgctcgcaccatgtcgaggcgcaagcaggcgaaaccccagcacatcaactcggaggaggaccagggcgagcagcagccgcagcagcagaccccggagtttgcagatgcggccccagcggcgcccgcggcgggggagctgggtgctccagtgaaccacccagggaatgacgaggtggcgagtgaggatgaagccacagtaaagcggcttcgtcgggaggagacgcacgtctgtgagaaatgctgtgcggagttcttcagcatctctgagttcctggaacataagaaaaattgcactaaaaatccacctgtcctcatcatgaatgacagcgaggggcctgtgccttcagaagacttctccggagctgtactgagccaccagcccaccagtcccggcagtaaggactgtcacagggagaatggcggcagctcagaggacatgaaggagaagccggatgcggagtctgtggtgtacctaaagacagagacagccctgccacccaccccccaggacataagctatttagccaaaggcaaagtggccaacactaatgtgaccttgcaggcactacggggcaccaaggtggcggtgaatcagcggagcgcggatgcactccctgcccccgtgcctggtgccaacagcatcccgtgggtcctcgagcagatcttgtgtctgcagcagcagcagctacagcagatccagctcaccgagcagatccgcatccaggtgaacatgtgggcctcccacgccctccactcaagcggggcaggggccgacactctgaagaccttgggcagccacatgtctcagcaggtttctgcagctgtggctttgctcagccagaaagctggaagccaaggtctgtctctggatgccttgaaacaagccaagctacctcacgccaacatcccttctgccaccagctccctgtccccagggctggcacccttcactctgaagccggatgggacccgggtgctcccgaacgtcatgtcccgcctcccgagcgctttgcttcctcaggccccgggctcggtgctcttccagagccctttctccactgtggcgctagacacatccaagaaagggaaggggaagccaccgaacatctccgcggtggatgtcaaacccaaagacgaggcggccctctacaagcacaagtgtaagtactgtagcaaggtttttgggactgatagctccttgcagatccacctccgctcccacactggagagagacccttcgtgtgctctgtctgtggtcatcgcttcaccaccaagggcaacctcaaggtgcactttcaccgacatccccaggtgaaggcaaacccccagctgtttgccgagttccaggacaaagtggcggccggcaatggcatcccctatgcactctctgtacctgaccccatagatgaaccgagtctttctttagacagcaaacctgtccttgtaaccacctctgtagggctacctcagaatctttcttcggggactaatcccaaggacctcacgggtggctccttgcccggtgacctgcagcctgggccttctccagaaagtgagggtggacccacactccctggggtgggaccaaactataattccccaagggctggtggcttccaagggagtgggacccctgagccagggtcagagaccctgaaattgcagcagttggtggagaacattgacaaggccaccactgatcccaacgaatgtctcatttgccaccgagtcttaagctgtcagagctccctcaagatgcattatcgcacccacaccggggagagaccgttccagtgtaagatctgtggccgagccttttctaccaaaggtaacctgaagacacaccttggggttcaccgaaccaacacatccattaagacgcagcattcgtgccccatctgccagaagaagttcactaatgccgtgatgctgcagcaacatattcggatgcacatgggcggtcagattcccaacacgcccctgccagagaatccctgtgactttacgggttctgagccaatgaccgtgggtgagaacggcagcaccggcgctatctgccatgatgatgtcatcgaaagcatcgatgtagaggaagtcagctcccaggaggctcccagcagctcctccaaggtccccacgcctcttcccagcatccactcggcatcacccacgctagggtttgccatgatggcttccttagatgccccagggaaagtgggtcctgccccttttaacctgcagcgccagggcagcagagaaaacggttccgtggagagcgatggcttgaccaacgactcatcctcgctgatgggagaccaggagtatcagagccgaagcccagatatcctggaaaccacatccttccaggcactctccccggccaatagtcaagccgaaagcatcaagtcaaagtctcccgatgctgggagcaaagcagagagctccgagaacagccgcactgagatggaaggtcggagcagtctcccttccacgtttatccgagccccgccgacctatgtcaaggttgaagttcctggcacatttgtgggaccctcgacattgtccccagggatgacccctttgttagcagcccagccacgccgacaggccaagcaacatggctgcacacggtgtgggaagaacttctcgtctgctagcgctcttcagatccacgagcggactcacactggagagaagccttttgtgtgcaacatttgtgggcgagcttttaccaccaaaggcaacttaaaggttcactacatgacacacggggcgaacaataactcagcccgccgtggaaggaagttggccatcgagaacaccatggctctgttaggtacggacggaaaaagagtctcagaaatctttcccaaggaaatcctggccccttcagtgaatgtggaccctgttgtgtggaaccagtacaccagcatgctcaatggcggtctggccgtgaagaccaatgagatctctgtgatccagagtgggggggttcctaccctcccggtttccttgggggccacctccgttgtgaataacgccactgtctccaagatggatggctcccagtcgggtatcagtgcagatgtggaaaaaccaagtgctactgacggcgttcccaaacaccagtttcctcacttcctggaagaaaacaagattgcggtcagctaagggagaacttgcgtggaaggagcaatgcagacacagtgaaatctctagaatctgctttgttttgtaagaactcatctcctcctgttttctttttcttactgatatgcaaatgatgtttactacgttggttgtgaccacaacctcaggcaagtgctacaatcacgattgttgctatgctgctttgcaaaaagttgaaaaaataaaaaaaaaatgcataccaaaa

SEQ ID NO: 27154 - DNA, 831 bp, Homo sapiens
  source 1..831: mol_type = unassigned DNA
atgtcgaggcgcaagcaggcgaaaccccagcacatcaactcggaggaggaccagggcgagcagcagccgcagcagcagaccccggagtttgcagatgcggccccagcggcgcccgcggcgggggagctgggtcggagcagtctcccttccacgtttatccgagccccgccgacctatgtcaaggttgaagttcctggcacatttgtgggaccctcgacattgtccccagggatgacccctttgttagcagcccagccacgccgacaggccaagcaacatggctgcacacggtgtgggaagaacttctcgtctgctagcgctcttcagatccacgagcggactcacactggagagaagccttttgtgtgcaacatttgtgggcgagcttttaccaccaaaggcaacttaaaggttcactacatgacacacggggcgaacaataactcagcccgccgtggaaggaagttggccatcgagaacaccatggctctgttaggtacggacggaaaaagagtctcagaaatctttcccaaggaaatcctggccccttcagtgaatgtggaccctgttgtgtggaaccagtacaccagcatgctcaatggcggtctggccgtgaagaccaatgagatctctgtgatccagagtgggggggttcctaccctcccggtttccttgggggccacctccgttgtgaataacgccactgtctccaagatggatggctcccagtcgggtatcagtgcagatgtggaaaaaccaagtgctactgacggcgttcccaaacaccagtttcctcacttcctggaagaaaacaagattgcggtcagctaa

SEQ ID NO: 27155 - DNA, 1918 bp, Homo sapiens
  source 1..1918: mol_type = unassigned DNA
aactccaggaatttgtggcggagagggcaaataactgcggctctcccggcgccccgatgctcgcaccatgtcgaggcgcaagcaggcgaaaccccagcacatcaactcggaggaggaccagggcgagcagcagccgcagcagcagaccccggagtttgcagatgcggccccagcggcgcccgcggcgggggagctgggtgctccagtgaaccacccagggaatgacgaggtggcgagtgaggatgaagccacagtaaagcggcttcgtcgggaggagacgcacgtctgtgagaaatgctgtgcggagttcttcagcatctctgagttcctggaacataagaaaaattgcactaaaaatccacctgtcctcatcatgaatgacagcgaggggcctgtgccttcagaagacttctccggagctgtactgagccaccagcccaccagtcccggcagtaaggactgtcacagggagaatggcggcagctcagaggacatgaaggagaagccggatgcggagtctgtggtgtacctaaagacagagacagccctgccacccaccccccaggacataagctatttagccaaaggcaaagtggccaacactaatgtgaccttgcaggcactacggggcaccaaggtggcggtgaatcagcggagcgcggatgcactccctgcccccgtgcctggtgccaacagcatcccgtgggtcctcgagcagatcttgtgtctgcagcagcagcagctacagcagatccagctcaccgagcagatccgcatccaggtgaacatgtgggcctcccacgccctccactcaagcggggcaggggccgacactctgaagaccttgggcagccacatgtctcagcaggtttctgcagctgtggctttgctcagccagaaagctggaagccaaggtctgtctctggatgccttgaaacaagccaagctacctcacgccaacatcccttctgccaccagctccctgtccccagggctggcacccttcactctgaagccggatgggacccgggtgctcccgaacgtcatgtcccgcctcccgagcgctttgcttcctcaggccccgggctcggtgctcttccagagccctttctccactgtggcgctagacacatccaagaaagggaaggggaagccaccgaacatctccgcggtggatgtcaaacccaaagacgaggcggccctctacaagcacaagtgtcggagcagtctcccttccacgtttatccgagccccgccgacctatgtcaaggttgaagttcctggcacatttgtgggaccctcgacattgtccccagggatgacccctttgttagcagcccagccacgccgacaggccaagcaacatggctgcacacggtgtgggaagaacttctcgtctgctagcgctcttcagatccacgagcggactcacactggagagaagccttttgtgtgcaacatttgtgggcgagcttttaccaccaaaggcaacttaaaggttcactacatgacacacggggcgaacaataactcagcccgccgtggaaggaagttggccatcgagaacaccatggctctgttaggtacggacggaaaaagagtctcagaaatctttcccaaggaaatcctggccccttcagtgaatgtggaccctgttgtgtggaaccagtacaccagcatgctcaatggcggtctggccgtgaagaccaatgagatctctgtgatccagagtgggggggttcctaccctcccggtttccttgggggccacctccgttgtgaataacgccactgtctccaagatggatggctcccagtcgggtatcagtgcagatgtggaaaaaccaagtgctactgacggcgttcccaaacaccagtttcctcacttcctggaagaaaacaagattgcggtcagctaa

SEQ ID NO: 27156 - DNA, 9678 bp, Homo sapiens
  source 1..9678: mol_type = unassigned DNA
gacgtcggcgcacgtcagcggcggcgcgcgcctggctgggccctggggagcgggagggaaggagcgaaggagcgaaggagcaagcggagcggccgtcgcccaagccaagccgcgctgccaaccctcccgcccgcccgcgctcctgtccgccgtgtctagcagcggggcccagcatggtcatggcggatggcccgaggcacttgcagcgcgggccggtccgggtggggttctacgacatcgagggcacgctgggcaagggcaacttcgctgtggtgaagctggggcggcaccggatcaccaagacggaggtggcaataaaaataatcgataagtctcagctggatgcagtgaaccttgagaaaatctaccgagaagtacaaataatgaaaatgttagaccaccctcacataatcaaactttatcaggtaatggagaccaaaagtatgttgtaccttgtgacagaatatgccaaaaatggagaaatttttgactatcttgctaatcatggccggttaaatgagtctgaagccaggcgaaaattctggcaaatcctgtctgctgttgattattgtcatggtcggaagattgtgcaccgtgacctcaaagctgaaaatctcctgctggataacaacatgaatatcaaaatagcagatttcggttttggaaatttctttaaaagtggtgaactgctggcaacatggtgtggcagccccccttatgcagccccagaagtctttgaagggcagcagtatgaaggaccacagctggacatctggagtatgggagttgttctttatgtccttgtctgtggagctctgccctttgatggaccgactcttccaattttgaggcagagggttctggaaggaagattccggattccgtatttcatgtcagaagattgcgagcaccttatccgaaggatgttggtcctagacccatccaaacggctaaccatagcccaaatcaaggagcataaatggatgctcatagaagttcctgtccagagacctgttctctatccacaagagcaagaaaatgagccatccatcggggagtttaatgagcaggttctgcgactgatgcacagccttggaatagatcagcagaaaaccattgagtctttgcagaacaagagctataaccactttgctgccatttatttcttgttggtggagcgcctgaaatcacatcggagcagtttcccagtggagcagagacttgatggccgccagcgtcggcctagcaccattgctgagcaaacagttgccaaggcacagactgtggggctcccagtgaccatgcattcaccgaacatgaggctgctgcgatctgccctcctcccccaggcatccaacgtggaggccttttcatttccagcatctggctgtcaggcggaagctgcattcatggaagaagagtgtgtggacactccaaaggtcaatggctgtctgcttgaccctgtgcctcctgtcctggtgcggaagggatgccagtcactgcccagcaacatgatggagacctccattgacgaagggctggagacagaaggagaggccgaggaagaccccgctcatgcctttgaggcatttcagtccacacgcagcgggcagagacggcacactctgtcagaagtgaccaatcaactggtcgtgatgcctggggcagggaaaattttctccatgaatgacagcccctcccttgacagtgtggactctgagtatgatatggggtctgttcagagggacctgaactttctggaagacaacccttcccttaaggacatcatgttagccaatcagccttcaccccgcatgacatctcccttcataagcctgagacctaccaacccagccatgcaggctctgagctcccagaaacgagaggtccacaacaggtctccagtgagcttcagagagggccgcagagcatcagatacctccctcacccagggaattgtagcatttagacaacatcttcagaatctggctagaaccaaaggaattctagagttgaacaaagtgcagttgttgtatgaacaaataggaccggaggcagaccctaacctggcgccggcggctcctcagctccaggaccttgctagcagctgccctcaggaagaagtttctcagcagcaggaaagcgtctccactctccctgccagcgtgcatccccagctgtccccacggcagagcctggagacccagtacctgcagcacagactccagaagcccagccttctgtcaaaggcccagaacacctgtcagctttattgcaaagaaccaccgcggagccttgagcagcagctgcaggaacataggctccagcagaagcgactctttcttcagaagcagtctcaactgcaggcctattttaatcagatgcagatagcagagagctcctacccacagccaagtcagcagctgccccttccccgccaggagactccaccgccttctcagcaggccccaccgttcagcctgacccagcccctgagccccgtcctggagccttcctccgagcagatgcaatacagccctttcctcagccagtaccaagagatgcagcttcagcccctgccctccacttccggtccccgggctgctcctcctctgcccacgcagctacagcagcagcagccgccaccgccaccaccccctccaccaccacgacagccaggagctgccccagcccccttacagttctcctatcagacttgtgagctgccaagcgctgcttcccctgcgccagactatcccactccctgtcagtatcctgtggatggagcccagcagagcgacctaacggggccagactgtcccagaagcccaggactgcaagaggccccctccagctacgacccactagccctctctgagctacctggactctttgattgtgaaatgctagacgctgtggatccacaacacaacgggtatgtcctggtgaattagtctcagcacaggaattgaggtgggtcaggtgaaggaagagtgtatgttcctatttttattccagccttttaaatttaaagcttattttcttgccctctccctaacggggagaaatcgagccacccaactggaatcagagggtctggctggggtggatgttgcttcctcctggttctgccccaccacaaagttttctgtggcaagtgctggaacatagttgtaggctgaggctcctgcccttcggtcgagtggagcaagctctcgagggcagcactgacaaatgtgttcctaagaagacattcagacccaggtgttatgcaggattacatccgtttattatcaagggcaaccttggtgaaagcagaaagggtgtgtgctattgcatatatatgggggaaaaggcaatatatttttcactgaagctgagcaaccacatattgctacaaggcaaatcaagaagacatcaggaaatcagatgcacaggaaataaaggaaagctgtgctttgtcattgaatcctaagttcttagctgctgatgcaagttgtcccccaaggccatcacaaagcagtggggcatgagctgtgtttcaggggccactaaataacagctggtactgaccccagaaaccgccttcatctccattcggaagcaggtgacacaccccttcagaaggtgccctgggttgccgagtgtcagaatatactcaggactccagaggtgtcacacgtggaactgacaggagacccgccaccgtggaggcagggggcaagaaactcaagaacgcatcaagagcaccagccctgggccagggaagacaggctcttcctgcagtttctcgtggacactgctggcttgcgggcagtcggtctccagggtacctgttgtctcttttccgatgtaataactactttgaccttacactatatgttgctagtagtttattgagctttgtatatttggacagtttcatatagggcttagagattttaaggacatgataaatgaacttttctgtcccatgtgaagtggtagtgcggtgcctttcccccagatcatgctttaattctttcttttctgtagaaaccaacagtttccatttatgtcaatgctaaatccaaagtcacttcagagtttgttttccaccatgtgggaatcagcattcttaatttcgttaaagttttgacttgtaatgaaatgttcaagtattacagcaatattcaaagaaagaaccacagatgtgttaaccatttaagcagatcatctgccaaacattatattactaataaaacttaaccaacacttacaattcagtcatcaaagtaagtaaaaattagatgctacagctagctaactgtatccctagaaatgatgaataatttgccatttggacagttaacatccaggtgttacaaagtcagtgttaattctaaagatgatcatttctgccctttagaatggcttgtcccatcagcagatgaatgtgttaagcacaaagcatcttccttaaagcacaaagagagggactaactgatgctgcatctagaaaacacctttaagttgcctttcctctttgtagttagcgttcaggcaggtgacgtgtggaaagtctagggggttccattctggccatgcgagcccagctcctaccaacgtcggtaacttgagcagtccctgttgctggccagagactgcctggtcgccagcgctcaccatgggtgccaggatgcttcgcagaggcactgtgctcacggttggacttggtgtcagtgggaaagggcagtgtggggactgtcatttttgtgatttaataacacacagtgaaaatccaggaagaatgaattaagcttcttctgggagttgtttattcctgctcgtgcttaagattgatgatttcgtgaaataaagaacatcatttcatttaagagatcatttcattaagatctctaatctgttttgagtctttacaaaatagccagttataaaatggggcttgatttgtttagactgaaggaagacgttttcccaaaatatactacagaagtgctacaatatttgcgatattaaaatgcctgcagattgaaaatgggggccactcatttcagaactgcaggaatggtgtagttacagatcgacataaactcctgccccccaacaatgccatgagctgcttagcccaggagacctgggagctatggcaggacggttaggccagccgatgagggactgcagagaggctactggaaggttaaggacccagagagaaatcgagaggtgccctacagcagccaggcctatcaggatccgtcacacacggcagcggcgtggacaccggcctgatgcagagcgtgacccctcctgctgggacctgtgttgtaagctcctatttgcttatcttgtttatttcaagcagaaatcaataaattccataaccctctgtattgactgcaatgtaagctgctgaggagactggttctgttggtcagtcaggtgtttgctcagccctgtctgatcacctgtgctgctctgtccctaactagtgacccatggaagcttccaagcagttttctcttcatcactactaacaaacaaaacactaagaaggcttagtatcgctctttttctgcggggctactctgaagtactgacttgctttccagtctgattcacgttagcagtgtgtacactactgtatcatcatcagcttcatcaccctgtaaaccaggctcctctgaagagactttggtgagatgaacgtgaggtaaaaatttcgttcggcaaaaagtgcaatatgtgtggtactttattttttatgttctttttttaaatctggggtattagtctgtgctttgggagaaatgcactagctctgcaattcccagctgggcaagtgtgtctctagtatctccacgcaactgatacactggtccctgtaaggcaaacagcatgttagcccgacaggaagagggggcccactttcacattcccggtgacactgaccgtccccagctgccccctcgccacctctgcctgcactgccttctgtcaccgtgggaaaaggaggctgatggttctctacaccatccaccttgagaatccctgcgtgggagagcatcagggcccaccaggggagtggggatggggctcaggggctgttcatgcccatctgagcaaaccccttctctcttccatccacttttgcctcctaggaaagaaaaagtcagtggccctttcttcctcagatatcaagaactcccaagtgtttaaaccgtatgctggagtcagtggttgggacagacaggagcccaagactgaagccagcccttgcctcttgtgtcccttcccaactctggtgctggagtaatggggtgctctgcattttgatggggagcaaggggggaccccccctgtaggagtatcggcctctcccctgccccctaccctctctcgtggaccaaagtctccagcagaagagactcatcataagactgacgactcccccacctccacccacacaccgagtgtcatcagtcctaaaggcagggaaacgctcacagaattctgcccacgggttagatgtggggagaaggatattctcagctccagagtgattaggtgatcagccagaaactaaggcaaggtgacaagcagcagcctggagtcacagttggtcccaggcgtgtgggcactaagcagcctctggagacatgcgggcagttgaggatgcaaggacacagtgagtgagtggcgctcctttttggggtcctccagcctctagtcaagccccaggttcgtaaatatgtttgtattacattttaaaacctgtatcaacagtcacatttaagctccctattggtttaaagaaaattcatactccaggtaactttttcccattcgacctcctatagagacaatatgcagtgtgtcatttcacagtctcagtccctgtgaacagtggctgacaccggtgccagggctgacctgctacactcaaactcctaaactgggctgcctctaactgcctcctgggaagccacccgagccactcggtctctttgtgcctaaacatgaaaggtgaaaattggagaacagggaagctcgtaagttggagtcattgtacaggcagggatctttgatcattttgttgcttctggaatttatttaattttttttttttttgagacagagtctcgctctgtcacccaggctggaatgcagtggcgtgatttcagctcactgcaacctccacctcctgggttcaagccattctcctgcctcagcctcccaagtagctgggactacaggtgtgtgctaccgcatccagctagtttgtatatttttagtagagatggggtttcaccatgttgtccaggctgatcttgaactcctgacctcaggtgacccacccaccttggcctcccaaagtactgggattacaggtgtgagccaccacacccgacctggaatttttttatagaacttatcttcagagcaatgtatgaaagacaagagcagtatcagccgggcgcggtggctcacgcctgtaatcccaacactttgggaggccaaggcaggcggatcacgaggtcaggagattgagaccatcctaacacagtgaaacgccgtctctactaaaaatacaaaaaattagccgggcgtggtggtgggcgcctgtagttccagctactcgggaggctgaggcaggagaatggcgtgaacccgggaggtggagcttgcagtgagccaagatcgtgccactgcactccagcctgggcgacagagcaagactccacctcaaaaaaaaaaaaaaagacaagagcagtatcatctgcctctgtttctaaactggacaaagagattttcttaaagtttctatcatctcccttctgacaggttctacagtgtggtctgaagcacctgtaatgtcagagcccttgtctggcccttggtggcaggtgaacgaaagcagtggagcctctcaccttccagtagcctctcacattcttattttaccatttttgtcctaattaaggtagcctagctgattctagaagacagccatcctacgtgcacccccaccttgtgtccacatcttctccaggcaggtttcaacctatcagcagactcaggcacacactggggcacagatagagaaccaggcggcagcagtgctcgcagacccacccagggagagctgtgatgggttctgcccagatactctgctcgcccacccacaagggagcaatagcttatatttgtacattagttttaccaagcactttctcttctaaccctcacaacaattctatgaaattagctggggagatactgtccttatttttcacagctgaagaaaccaaagctttgggaagtttgtgacttctctgagatcacagctggtgatagaaggagctgggacacgcgcttgggttgactggcttctggttttggttctctggcttctagtgctggaagaagccctctctttcccttctctttcctcagtagcatctgactcttttcataagcaaacagctgtataaacaaagcccccattttggtcaagcacagggtgaatgtgatattgttcccacaaccttattctccactcaacagccgcctggctttggggaagaggccgccttcaggtgacagtgcagctgtccaggtggccgtgcactgaaccaggctgagggagacaaaaaccccgcagacccgcctgcctttcagcgtccagttaactgcagaagtttaggctcacctcaaagatgtctagtttttccaagttacaatacagcagtttcctacagaacacccccttcctcaattgccaaggggccgcatcgcacggcatcaggccaccactgcaggccagcagattccaccccaggaacggtcatgaactcagcctttgtctcaacgaggggcgtaacatttccttacagtcaagccccatcaactagaagtgcttattacttttaggattaaaaaagtaataacagactttgacttaatactctgtcttttcagaggcaaagtgggtgggtagaggggagctttaaaaatagaagtacaaaacaacatcctggaaacatatgaccccagatggaataatgtcacattccccagtgcagataatgggctgctgctggctctgtggtgtctgtctgcagaagatttgctcagtcaaggaaattcaagtggtgagacctttccaccatgggtggtaagagaaacctgccttcaccaaaatctctgaaggggaaagaagtggagagaaaggtttgcttcacttcggggactgcagtttgagaaataaaagggatacagagatatctgcactttgtagaaagggcaagattatttgcttatatctgaagggaggtgggtggttttgctggatgtttggtctgaaagagttacttttgataaagttaatctaactgtagttatattttctgtgtgcttttttttaattactaagaaaaaaattggtgagttcagtagctttggtattatgagtgcaaatcataatagctccaatgtgaaaaaaaaaatcaaaagtataacttgtcacttaatgttagaaaattgcctaaaatgcagtgtaataaataatctctgtaccaaatagtaatttaaatggggtaattttctgcaaggaaaatgtactgtttttatgtttccaaccctcttgaattaaaataaaaacaacttcttttctaa

SEQ ID NO: 27157 - DNA, 4784 bp, Homo sapiens
  source 1..4784: mol_type = unassigned DNA
attgcgcctgcgcagggagcccaaggcaagagccgctaggctgccctgcccgaagggctcaactgtcagtgagcctgcgcaggaggccaataggctgccaatactccttggactccccgccagggccctgctgtcagtgcgcctgcgcgcgggtccggcgccgaggttcttgactgctgtgccggacgccaggtgtagccatgcagcgagccgattccgagcagccctccaagcgtccccgttgcgatgacagcccgagaaccccctcaaacaccccttccgcagaggcagactggtccccgggcctggaactccatcccgactacaagacatggggtccggagcaggtgtgctccttcctcaggcgcggtggctttgaagagccggtgctgctgaagaacatccgagaaaatgaaatcacaggcgcattactgccttgtcttgatgagtctcgttttgaaaatcttggagtaagttccttgggggagaggaagaagctgcttagttatatccagcgattggttcaaatccacgttgatacaatgaaggtaattaatgatcctatccatggccacattgagctccaccctctcctcgtccgaatcattgatacacctcaatttcaacgtcttcgatacatcaaacagctgggaggtggttactatgtttttccaggagcttcacacaatcgatttgagcatagtctaggggtggggtatctagcaggatgtctagttcacgcactgggtgaaaaacaaccagagctgcagataagtgaacgagatgttctctgtgttcagattgctggactttgtcatgatctcggtcatgggccattttctcacatgtttgatggacgatttattccacttgctcgcccggaggtgaaatggacgcatgaacaaggctcagttatgatgtttgagcaccttattaattctaatggaattaagcctgtcatggaacaatatggtctcatccctgaagaagatatttgctttataaaggaacaaattgtaggaccacttgaatcacctgtcgaagattcattgtggccatataaagggcgtcctgaaaacaaaagcttcctttatgagatagtatctaataaaagaaatggcattgatgtggacaaatgggattattttgccagggactgccatcatcttggaatccaaaataattttgattacaagcgctttattaagtttgcccgtgtctgtgaagtagacaatgagttgcgtatttgtgctagagataaggaagttggaaatctgtatgacatgttccacactcgcaactctttacaccgtagagcttatcaacacaaagttggcaacattattgatacaatgattacagatgctttcctcaaagcagatgactacatagagattacaggtgctggaggaaaaaagtatcgcatttctacagcaattgacgacatggaagcctatactaagctgacagataacatttttctggagattttatactctactgatcccaaattgaaagacgcacgagagattttaaaacaaattgaataccgtaatctattcaagtatgtgggtgagacgcagccaacaggacaaataaagattaaaagggaggactatgaatctcttccaaaagaggttgccagtgctaaacccaaagtattgctagacgtgaaactgaaggctgaagattttatagtggatgttatcaacatggattatggaatgcaagaaaagaatccaattgatcatgttagcttctattgtaagactgcccccaacagagcaatcaggattactaaaaaccaggtttcacaacttctgccagagaaatttgcagagcagctgattcgagtatattgtaagaaggtggacagaaagagtttgtatgccgcaagacaatattttgttcagtggtgtgcagacagaaatttcaccaagccgcaggatggcgatgttatagccccactcataacacctcaaaaaaaggaatggaacgacagtacttcagtccaaaatccaactcgcctccgagaagcatccaaaagcagagtccagctttttaaagatgacccaatgtgaatgtctgtagtcagttgtttacaaactccctctcctgcacaattcatttagaggcttcaatcatagaattctgcaaattaatgacaactcatgctttaattttgtattttgaatgtacacgcatgctgaagctaagtaacttttaatcaaagaaataagatggtattaggcaaatcttactatactatgaaaagcattaccttgcctatttttaatattattaaagcctttctccttcagtagtctattttcttagaataacaactcttttatctattctgaactctattttttttcttttttaagagacaaggttttgctctgttgcccagcttggactcgaactttcctgggctcaagcgaccctcctgcctcagccccccaagtagctgggactaaagtcatgtgccaccacacccagcttactctgaacttttatgacagatgattgttttttgtttttaatgtagaaatgagacaagggtacaaattggaactagaaattgacattgtcattgacaaacatggctaaaaacaaaacatcaaatcctgcccccgtgaagagttccctgtcacctcaagtttgaggatagtcctctaagagtgacctaagcataagtgaaagacacctcccctcacccttctagccccctacaaggtgccaggttggggtaaagagttggagatgatggccaggagtggcctccaacacgctggtgagaggcctgattaggttttggggaagatctgagagctctggcctcttcgtgagtggaacataaagccgcctcttgttgggagatcctaccccagtgacagaggaatcccccaaactaggctgtgccctggctccgtggcggctccagacccgggtagtgcctttgtcccctgaatactcactcccccggtccagagggccttcccactgcccagcctggagaaggcctcccctgacctgctctctcagtatcctggagagctggccagaggccatcacaggcatcatcctcagagctcctcagacctgggactttgtttttgctggttcagtgcattttgtgtatttaagagcaaacactagccaggcgtggcggcgtgtgcctgtagtcccagctacttgggaggctgaggcaggaggattgctcgaacctgggaggcggaggttgcagtgagcctagatcacgccattgcactccagcctgggtgacagagtgagactccatctccaaaaaaaaaagcacaaacactgcactgcctgtgctgaaattagtgaccacccagtgggctccaggctccgctaggtaacttcgttttcccagcagtggagtgggcaccaccttggtggggcagtgcccctgtgcccagggcacacctcattcccagttctatagcaattcaccaagaacaaagtctgcagttagagccaaagctggtggtggccagagggtgctgaagatacaggccagtggggatgggagccatgagccccgaatgtcttctgctctgatgctccccggactaagcctccctggcacactgggagtgaggggcagcctgagcaagtaggggaactcagaccacaggccagcagatttcccagcagtccatcactggccaccgtgtagccagattctgttccgtccacactggggtgaagagtacttggaatgtctgccatcctgtatgatcaccccaccccctgtccatccatcagtagataataagggttggttacaattcataagagaatagttaaaacacttctcctctcatgcctaccatggtgctgtatcaaggggatttgttcacatatgggctcagcaacgcacaagtgaggtcagccatggcactaggtcattcccattttagccaaggtgcctctataggggtcagacatcatgtgcccagacctaaggtcaggaatgtcatatttttctgttaaaatcattttatttctgtgtatcttacctttaaatcattgtggtttactctgagattctgtagtcctaatattgtatcattgtgctgtctgcaaaacaacttgaatctattttgtttgcatcttttgttacatgtaacgcagctgtactttatgttctttgcaactgtttccattatgagaacgctgtgctatttacaaggttacatttttcttggccaggcgaggtggtcatgcctgtaatcccagcactttgggaggccaaggtgggcggatcacttgaggtaaagagttgagaccagcctggctagcatggcgaaacccagtctctactaaaaatacaaaaattagccgggtgaaattagccgggcgtggtggtgtgtgcttgtaatcccagctactcgggaggctgaggcaggagaatcgcttgaatccgggaggcagaggttgcagtgagccaagatcaggccactgcactccagcctcggggtcaagagcgaaactctgtctcaaacaaaaagaaagaaaggaaggaaggaaggagggaaggaaggaaggaaagagagaaagaaaagaaagaaagaaagaaagaaagagaaagaaatatctttgctatttgtataaaaatggaaattttaacagcttagcctctagagagttactgaacgtggttaccttgggaatgtaaatagaactgcaaattaaaatgactggccacttcaactgggtaagggaaacagctgcaataaagcttcgtgaatata

SEQ ID NO: 27158 - DNA, 1395 bp, Homo sapiens
  source 1..1395: mol_type = unassigned DNA
agtgcgcctgcgcgcgggtccggcgccgaggttcttgactgctgtgccggacgccaggtgtagccatgcagcgagccgattccgagcagccctccaagcgtccccgttgcgatgacagcccgagaaccccctcaaacaccccttccgcagaggcagactggtccccgggcctggaactccatcccgactacaagacatggggtccggagcaggtgtgctccttcctcaggcgcggtggctttgaagagccggtgctgctgaagaacatccgagaaaatgaaatcacaggcgcattactgccttgtcttgatgagtctcgttttgaaaatcttggagtaagttccttgggggagaggaagaagctgcttagttatatccagcgattggttcaaatccacgttgatacaatgaaggaagaagtaaaatatactcaaatccaatatacttgatctgtctggtagtgatacctaaataaggtaattaatgatcctatccatggccacattgagctccaccctctcctcgtccgaatcattgatacacctcaatttcaacgtcttcgatacatcaaacagctgggaggtggttactatgtttttccaggagcttcacacaatcgatttgagcatagtctaggggtggggtatctagcaggatgtctagttcacgcactgggtgaaaaacaaccagagctgcagataagtgaacgagatgttctctgtgttcagattgctggactttgtcatgatctcggtcatgggccattttctcacatgtttgatggacgatttattccacttgctcgcccggaggtgaaatggacgcatgaacaaggctcagttatgatgtttgagcaccttattaattctaatggaattaagcctgtcatggaacaatatggtctcatccctgaagaagatatttgctttataaaggaacaaattgtaggaccacttgaatcacctgtcgaagattcattgtggccatataaagggcgtcctgaaaacaaaagcttcctttatgagatagtatctaataaaagaaatggcattgatgtggacaaatgggattattttgccagggactgccatcatcttggaatccaaaataattttgattacaagcgctttattaagtttgcccgtgtctgtgaagtagacaatgagttgcgtatttgtgctagagataaggaagttggaaatctgtatgacatgttccacactcgcaactctttacaccgtagagcttatcaacacaaagttggcaacattattgatacaatgtaagaaacttgattgtcatttccctataaaattttccttgatacttggctagagtatcatactaggctcaactagacatttctagatgagttcaagtgaatattaagtgatt

SEQ ID NO: 27159 - DNA, 2185 bp, Homo sapiens
  source 1..2185: mol_type = unassigned DNA
ggaagctcagcagtgtccactgtcgccattccttggccatagaaaacaatgtatttgaattttgatgtaagcataacaaattgaagatgaagatgacacgttgatttcttgtttgaaattaaccaagtcccgagaaaagaaagtgaatagtgttagcacgaggaggaaggaagaaatggagattagattggatactctttctgcatcactgggtagatccagcactttaaataactgcaacttggaagataaattagcttggtatgaaggtgaagcttacatgtggcatcactggaagccttttcctgaaaaccctctctggacatgtcttgatttccaaatagcacaagttggaccctgggaccactgctcctcttgtattcgccacacacgtctcaagtcttcctgctcagatatggatctcctacattcatggcgaagcagcagttttgggaatttcgatcgttttcggaataattctttatcaaaaccagatgattcaactgaggcacatgaaggagatcccacaaatggaagtggagaacaaagtaaaacttcaaataatggaggcggtttgggtaaaaaaatgagagctatttcatggacaatgaagaaaaaagtgggtaaaaagtacatcaaagccctttctgaggaaaaggatgaggaagatggagagaatgcccacccatatagaaacagtgaccctgtgattgggacccacacagagaaggtgtccctcaaagccagtgactccatggatagtctctacagtggacagagctcatcaagtggcataacaagctgttcagatggtacaagtaaccgggacagctttcgactggatgacgatggcccctattcaggaccattctgtggccgtgccagagtgcatacggatttcacgccaagtccctatgacactgactccctcaaaatcaagaaaggagacatcatagacattatttgcaaaacaccaatggggatgtggacaggaatgttgaacaataaagtgggaaacttcaaattcatttatgtggatgtcatctcagaagaggaagcagcccccaagaaaataaaggcaaaccgaaggagtaacagcaaaaaatccaagactctgcaggagttcctagagaggattcatctgcaggaatacacctcaacacttttgctcaatggttatgagactctagaagatttaaaagatataaaagagagtcacctcattgaattaaatattgaaaacccagatgacagaagaaggttactatcagctgctgaaaacttccttgaagaagaaattattcaagagcaagaaaatgaacctgagcccctatccttgagctcagacatctccttaaataagtcacagttagatgactgcccaagggactctggttgctatatctcatcaggaaattcagataatggcaaagaggatctggagtctgaaaatctgtctgacatggtacataagattattatcacagagccaagtgactgaacacgcattcccaactatatatctacagatgcattccattttaactcttcttgagctaaaacgtcaaataggagaggaagataagataaatatttgtaaataaaacctaaagtttaaatgttttaatctgaataattgtacataaaattttgtatctctaacattccaaattactgtcaataaaatatatatttattattttaaatgctatgtgttaatatttcacttgcttgtattagaaaggcaaaatgtaagactttggtatgtgtgacatatgctttatttggctttattttacaagtacagtatctgcaaaaaacaaagtaaccttttttcatacctgccagttttgaatttatatatgttattgaacaaatagtaatagaggattcgctgttgaaacaagttgtccaagcaatgttatattcatttttatacttattgggaaagtgtgagttaatattggacacattttatcctgatccacagtggagttttagtaattatattttgttgatttcttcattttgttttctggtataaaagtagagataatgtgtagtcacttctgatttagtgaaaccaattgtaataattgtggaaatgttttgtctttaagtgtaaatattttaaaatttgacataccctaatgttaataataaaaagaactatttgcatattgca

SEQ ID NO: 27160 - DNA, 1382 bp, Homo sapiens
  source 1..1382: mol_type = unassigned DNA
tagacagcacactgctgactgttttcagttgtttctgtaacagcagaaagtgcactcactaggagtagtcagaattcaaaatgctcaagagaaagccatccaatgtttcagagaaggagaaacatcaaaaaccaaagaaaggagacatcatagacattatttgcaaaacaccaatggggatgtggacaggaatgttgaacaataaagtgggaaacttcaaattcatttatgtggatgtcatctcagaagaggaagcagcccccaagaaaataaaggcaaaccgaaggagtaacagcaaaaaatccaagactctgcaggagttcctagagaggattcatctgcaggaatacacctcaacacttttgctcaatggttatgagactctagaagatttaaaagatataaaagagagtcacctcattgaattaaatattgaaaacccagatgacagaagaaggttactatcagctgctgaaaacttccttgaagaagaaattattcaagagcaagaaaatgaacctgagcccctatccttgagctcagacatctccttaaataagtcacagttagatgactgcccaagggactctggttgctatatctcatcaggaaattcagataatggcaaagaggatctggagtctgaaaatctgtctgacatggtacataagattattatcacagagccaagtgactgaacacgcattcccaactatatatctacagatgcattccattttaactcttcttgagctaaaacgtcaaataggagaggaagataagataaatatttgtaaataaaacctaaagtttaaatgttttaatctgaataattgtacataaaattttgtatctctaacattccaaattactgtcaataaaatatatatttattattttaaatgctatgtgttaatatttcacttgcttgtattagaaaggcaaaatgtaagactttggtatgtgtgacatatgctttatttggctttattttacaagtacagtatctgcaaaaaacaaagtaaccttttttcatacctgccagttttgaatttatatatgttattgaacaaatagtaatagaggattcgctgttgaaacaagttgtccaagcaatgttatattcatttttatacttattgggaaagtgtgagttaatattggacacattttatcctgatccacagtggagttttagtaattatattttgttgatttcttcattttgttttctggtataaaagtagagataatgtgtagtcacttctgatttagtgaaaccaattgtaataattgtggaaatgttttgtctttaagtgtaaatattttaaaatttgacataccctaatgttaataataaaaagaactatttgcatattgca

SEQ ID NO: 27161 - DNA, 1888 bp, Homo sapiens
  source 1..1888: mol_type = unassigned DNA
attagacagcacactgctgactgttttcagttgtttctgtaacagcagaaagtgcactcactaggagtagtcagaattcaaaatgctcaagagaaagccatccaatgtttcagagaaggagaaacatcaaaaaccaaagcgaagcagcagttttgggaatttcgatcgttttcggaataattctttatcaaaaccagatgattcaactgaggcacatgaaggagatcccacaaatggaagtggagaacaaagtaaaacttcaaataatggaggcggtttgggtaaaaaaatgagagctatttcatggacaatgaagaaaaaagtgggtaaaaagtacatcaaagccctttctgaggaaaaggatgaggaagatggagagaatgcccacccatatagaaacagtgaccctgtgattgggacccacacagagaaggtgtccctcaaagccagtgactccatggatagtctctacagtggacagagctcatcaagtggcataacaagctgttcagatggtacaagtaaccgggacagctttcgactggatgacgatggcccctattcaggaccattctgtggccgtgccagagtgcatacggatttcacgccaagtccctatgacactgactccctcaaaatcaagaaaggagacatcatagacattatttgcaaaacaccaatggggatgtggacaggaatgttgaacaataaagtgggaaacttcaaattcatttatgtggatgtcatctcagaagaggaagcagcccccaagaaaataaaggcaaaccgaaggagtaacagcaaaaaatccaagactctgcaggagttcctagagaggattcatctgcaggaatacacctcaacacttttgctcaatggttatgagactctagaagatttaaaagatataaaagagagtcacctcattgaattaaatattgaaaacccagatgacagaagaaggttactatcagctgctgaaaacttccttgaagaagaaattattcaagagcaagaaaatgaacctgagcccctatccttgagctcagacatctccttaaataagtcacagttagatgactgcccaagggactctggttgctatatctcatcaggaaattcagataatggcaaagaggatctggagtctgaaaatctgtctgacatggtacataagattattatcacagagccaagtgactgaacacgcattcccaactatatatctacagatgcattccattttaactcttcttgagctaaaacgtcaaataggagaggaagataagataaatatttgtaaataaaacctaaagtttaaatgttttaatctgaataattgtacataaaattttgtatctctaacattccaaattactgtcaataaaatatatatttattattttaaatgctatgtgttaatatttcacttgcttgtattagaaaggcaaaatgtaagactttggtatgtgtgacatatgctttatttggctttattttacaagtacagtatctgcaaaaaacaaagtaaccttttttcatacctgccagttttgaatttatatatgttattgaacaaatagtaatagaggattcgctgttgaaacaagttgtccaagcaatgttatattcatttttatacttattgggaaagtgtgagttaatattggacacattttatcctgatccacagtggagttttagtaattatattttgttgatttcttcattttgttttctggtataaaagtagagataatgtgtagtcacttctgatttagtgaaaccaattgtaataattgtggaaatgttttgtctttaagtgtaaatattttaaaatttgacataccctaatgttaataataaaaagaactatttgcatattgca

SEQ ID NO: 27162 - DNA, 1895 bp, Homo sapiens
  source 1..1895: mol_type = unassigned DNA
gtctgacttcctcccagcacattcctgcactctgccgtgtccacactgccccacagacccagtcctccaagcctgctgccagctccctgcaagcccctcaggttgggccttgccacggtgccagcaggcagccctgggctgggggtaggggactccctacaggcacgcagccctgagacctcagagggccaccccttgagggtggccaggcccccagtggccaacctgagtgctgcctctgccaccagccctgctggcccctggttccgctggccccccagatgcctggctgagacacgccagtggcctcagctgcccacacctcttcccggcccctgaagttggcactgcagcagacagctccctgggcaccaggcagctaacagacacagccgccagcccaaacagcagcggcatgggcagcgccagcccgggtctgagcagcgtatcccccagccacctcctgctgccccccgacacggtgtcgcggacaggcttggagaaggcggcagcgggggcagtgggtctcgagagacgggactggagtcccagtccacccgccacgcccgagcagggcctgtccgccttctacctctcctactttgacatgctgtaccctgaggacagcagctgggcagccaaggcccctggggccagcagtcgggaggagccacctgaggagcctgagcagtgcccggtcattgacagccaagccccagcgggcagcctggacttggtgcccggcgggctgaccttggaggagcactcgctggagcaggtgcagtccatggtggtgggcgaagtgctcaaggacatcgagacggcctgcaagctgctcaacatcaccgcagatcccatggactggagccccagcaatgtgcagaagtggctcctgtggacagagcaccaataccggctgccccccatgggcaaggccttccaggagctggcgggcaaggagctgtgcgccatgtcggaggagcagttccgccagcgctcgcccctgggtggggatgtgctgcacgcccacctggacatctggaagtcagcggcctggatgaaagagcggacttcacctggggcgattcactactgtgcctcgaccagtgaggagagctggaccgacagcgaggtggactcatcatgctccgggcagcccatccacctgtggcagttcctcaaggagttgctactcaagccccacagctatggccgcttcattaggtggctcaacaaggagaagggcatcttcaaaattgaggactcagcccaggtggcccggctgtggggcatccgcaagaaccgtcccgccatgaactacgacaagctgagccgctccatccgccagtattacaagaagggcatcatccggaagccagacatctcccagcgcctcgtctaccagttcgtgcaccccatctgagtgcctggcccagggcctgaaacccgccctcaggggcctctctcctgcctgccctgcctcagccaggccctgagatgggggaaaacgggcagtctgctctgctgctctgaccttccagagcccaaggtcagggaggggcaaccaactgccccagggggatatgggtcctctggggccttcgggaccctggggcaggggtgcttcctcctcaggcccagctgctcccctggaggacagagggagacagggctgctccccaacacctgcctctgaccccagcatttccagagcagagcctacagaagggcagtgactcgacaaaggccacaggcagtccaggcctctctctgctccatccccctgcctcccattctgcaccacacctggcatggtgcagggagacatctgcacccctgagttgggcagccaggagtgcccccgggaatggataataaagatactagagaactga

SEQ ID NO: 27163 - DNA, 1677 bp, Homo sapiens
  source 1..1677: mol_type = unassigned DNA
aactcttcatctcgcggctgtctgacttcctcccagcacattcctgcactctgccgtgtccacactgccccacagacccagtcctccaagcctgctgccagctccctgcaagcccctcaggttgggccttgccacggtgccagcaggcagccctgggctgggggtaggggactccctacaggcacgcagccctgagacctcagagggccaccccttgagggtggccaggcccccagtggccaacctgagtgctgcctctgccaccagccctgctggcccctggttccgctggccccccagatgcctggctgagacacgccagtggcctcagctgcccacacctcttcccggcccctgaagttggcactgcagcagacagctccctgggcaccaggcagctaacagacacagccgccagcccaaacagcagcggcatgggcagcgccagcccgggtctgagcagcgtatcccccagccacctcctgctgccccccgacacggtgtcgcggacaggcttggagaaggcggcagcgggggcagtgggtctcgagagacgggactggagtcccagtccacccgccacgcccgagcagggcctgtccgccttctacctctcctactttgacatgctgtaccctgaggacagcagctgggcagccaaggcccctggggccagcagtcgggaggagccacctgaggagcctgagcagtgcccggtcattgacagccaagccccagcgggcagcctggacttggtgcccggcgggctgaccttggaggagcactcgctggagcaggtgcagtccatggtggtgggcgaagtgctcaaggacatcgagacggcctgcaagctgctcaacatcaccgcagatcccatggactggagccccagcaatgtgcagaagtggctcctgtggacagagcaccaataccggctgccccccatgggcaaggccttccaggagctggcgggcaaggagctgtgcgccatgtcggaggagcagttccgccagcgctcgcccctgggtggggatgtgctgcacgcccacctggacatctggaagtcagcctcgaccagtgaggagagctggaccgacagcgaggtggactcatcatgctccgggcagcccatccacctgtggcagttcctcaaggagttgctactcaagccccacagctatggccgcttcattaggtggctcaacaaggagaagggcatcttcaaaattgaggactcagcccaggtggcccggctgtggggcatccgcaagaaccgtcccgccatgaactacgacaagctgagccgctccatccgccagtattacaagaagggcatcatccggaagccagacatctcccagcgcctcgtctaccagttcgtgcaccccatctgagtgcctggcccagggcctgaaacccgccctcaggggcctctctcctgcctgccctgcctcagccaggccctgagatgggggaaaacgggcagtctgctctgctgctctgaccttccagagcccaaggtcagggaggggcaaccaactgccccagggggatatgggtcctctggggccttcgggaccctggggcaggggtgcttcctcctcaggcccagctgctcccctggaggacagagggagacagggctgctccccaacacctgcctctgaccccagcatt

SEQ ID NO: 27164 - DNA, 1749 bp, Homo sapiens
  source 1..1749: mol_type = unassigned DNA
gtcagctgggtgactcatacatctgtgagaccctccgtatggagaccggggcggggggtgttgcttaatgcttagaactgctgaaactaccagttcactgtctcagcactaatccaactctgctccttaagtgggatttggcttttagacattgagacctggatgctgggcatcctcgctagatcccctacaaattccccacatacgtaggccaggagcctcagcggtgccccttcaggctcatctggcaagacggtaccagcttgctcagaacaggggctggctattcatcatctcagagcatagagaccctctccttgccacccggcccttcccacctggttggtgacaaatcacaaggtggtagaagttgccagggacagataacatggcagccagcgggaagaccagcaagtccgaaccgaaccatgttatcttcaagaagatctcccgggacaaatcggtgaccatctacctggggaacagagactacatagaccatgtcagccaagtccagcctgtggatggtgtcgtgttggttgatcctgatcttgtgaagggaaagaaagtgtatgtcactctgacctgcgccttccgctatggccaagaggacattgacgtgatcggcttgaccttccgcagggacctgtacttctcccgggtccaggtgtatcctcctgtgggggccgcgagcacccccacaaaactgcaagagagcctgcttaaaaagctggggagcaacacgtacccctttctcctgacgtttcctgactacttgccctgttcagtgatgttgcagccagctccacaagattcagggaagtcctgtggggttgactttgaggtcaaagcattcgccacagacagcaccgatgccgaagaggacaaaatccccaagaagagctccgtgcgattactgatccgcaaagtacagcatgccccacttgagatgggtccccagccccgagctgaggcggcctggcagttcttcatgtctgacaagcccctgcaccttgcggtctctctcaacaaagagatctatttccatggggagcccatccctgtgaccgtgactgtcaccaataacacagagaagaccgtgaagaagattaaagcattcgtggaacaggtggccaatgtggttctctactcgagtgattattacgtcaagcccgtggctatggaggaagcgcaagaaaaagtgccaccaaacagcactttgaccaagacgctgacgctgctgcccttgctggctaacaatcgagaaaggagaggcattgccctggatgggaaaatcaagcacgaggacacaaaccttgcctccagcaccatcattaaggagggcatagaccggaccgtcctgggaatcctggtgtcttaccagatcaaggtgaagctcacagtgtcaggaatgactgggagacagaaagcaagtgaagtcgccactgaggtcccattccgcctcatgcaccctcagcctgaggacccaggtcagtttagttatcaggatgcaaatttagtttttgaggagtttgctcgccataatctgaaagatgcaggagaagctgaggaggggaagagagacaagaatgacgttgatgagtgaagatgtcggctcaggatgccggaaaatgacctgtagttaccagtgcaacgagcaaagccccacagtttagtcctttggagttatgctgcgtatgaaaggatgagtcttcttccgagaaataaagcttgtttgttctcccctgg

SEQ ID NO: 27165 - DNA, 1591 bp, Homo sapiens
  source 1..1591: mol_type = unassigned DNA
ctggatgctgggcatcctcgctagatcccctacaaattccccacatacgtaggccaggagcctcagcggtgccccttcaggctcatctggcaagacggtaccagcttgctcagaacaggggctggctattcatcatctcagagcatagagaccctctccttgccacccggcccttcccacctggttggtgacaaatcacaaggtggtagaagttgccagggacagataacatggcagccagcgggaagaccagcaagtccgaaccgaaccatgttatcttcaagaagatctcccgggacaaatcggtgaccatctacctggggaacagagactacatagaccatgtcagccaagtccagcctgtggatggtgtcgtgttggttgatcctgatcttgtgaagggaaagaaagtgtatgtcactctgacctgcgccttccgctatggccaagaggacattgacgtgatcggcttgaccttccgcagggacctgtacttctcccgggtccaggtgtatcctcctgtgggggccgcgagcacccccacaaaactgcaagagagcctgcttaaaaagctggggagcaacacgtacccctttctcctgacgtttcctgactacttgccctgttcagtgatgttgcagccagctccacaagattcagggaagtcctgtggggttgactttgaggtcaaagcattcgccacagacagcaccgatgccgaagaggacaaaatccccaagaagagctccgtgcgattactgatccgcaaagtacagcatgccccacttgagatgggtccccagccccgagctgaggcggcctggcagttcttcatgtctgacaagcccctgcaccttgcggtctctctcaacaaagagatctatttccatggggagcccatccctgtgaccgtgactgtcaccaataacacagagaagaccgtgaagaagattaaagcattcgtggaacaggtggccaatgtggttctctactcgagtgattattacgtcaagcccgtggctatggaggaagcgcaagaaaaagtgccaccaaacagcactttgaccaagacgctgacgctgctgcccttgctggctaacaatcgagaaaggagaggcattgccctggatgggaaaatcaagcacgaggacacaaaccttgcctccagcaccatcattaaggagggcatagaccggaccgtcctgggaatcctggtgtcttaccagatcaaggtgaagctcacagtgtcaggctttctgggagagctcacctccagtgaagtcgccactgaggtcccattccgcctcatgcaccctcagcctgaggacccagctaaggaaagttatcaggatgcaaatttagtttttgaggagtttgctcgccataatctgaaagatgcaggagaagctgaggaggggaagagagacaagaatgacgttgatgagtgaagatgtcggctcaggatgccggaaaatgacctgtagttaccagtgcaacgagcaaagccccacagtttagtcctttggagttatgctgcgtatgaaaggatgagtcttcttccgagaaataaagcttgtttgttctcccctgg

SEQ ID NO: 27166 - DNA, 791 bp, Homo sapiens
  source 1..791: mol_type = unassigned DNA
gagacctggatgctgggcatcctcgctagatcccctacaaattccccacatacgtaggccaggagcctcagcggtgccccttcaggctcatctggcaagacggtaccagcttgctcagaacaggggctggctattcatcatctcagagcatagagaccctctccttgccacccggcccttcccacctggttggtgacaaatcacaaggattgtcttacctttctccaaccctctaacacctgaccaacaccccaaggtggtagaagttgccagggacagataacatggcagccagcgggaagaccagcaagtccgaaccgaaccatgttatcttcaagaagatctcccgggacaaatcggtgaccatctacctggggaacagagactacatagaccatgtcagccaagtccagcctgtggatggtgtcgtgttggttgatcctgatcttgtgaagggaaagaaagtgtatgtcactctgacctgcgccttccgctatggccaagaggacattgacgtgatcggcttgaccttccgcagggacctgtacttctcccgggtccaggtgtatcctcctgtgggggccgcgagcacccccacaaaactgcaagagagcctgcttaaaaagctggggagcaacacgtacccctttctcctgacgtttcctgactacttgccctgttcagtgatgttgcagccagctccacaagattcagggaagtcctgtggggttgactttgaggtcaaagcattcgccacagacagcaccgatgccgaagaggacaaaatcccc

SEQ ID NO: 27167 - DNA, 1521 bp, Homo sapiens
  source 1..1521: mol_type = unassigned DNA
atgtgccactggaatacgtcagctatggggccatcagcattgagggggcatggctgaaatggggccccaaacggccccctctgtcctctccaccttcctcctgggtgccctgctcctctctggaccaggaggcatctggtttgagccccgaaagcccaagtccttgaccagagaagggcgcctgttctcagggaaagccactgcacaggacagctgtcaaaccacgtggtctctgggcaccttcttagtcctgagcttgaatgaggggcgagtgagtggccactgtttcttctgagtcagcagcgaagggcagttacctttggggcttgcaggcaaaattctcaaccaacagctaccacgcacttggcggggccgcctctcgtgctttatatttgagaaatatgtgcttcgtgtcttttttagaaggtgtagtgaacttcatacaattcttctggtctactgggcgcacacttcagtgtatgtcactctgacctgcgccttccgctatggccaagaggacattgacgtgatcggcttgaccttccgcagggacctgtacttctcccgggtccaggtgtatcctcctgtgggggccgcgagcacccccacaaaactgcaagagagcctgcttaaaaagctggggagcaacacgtacccctttctcctgacgtttcctgactacttgccctgttcagtgatgttgcagccagctccacaagattcagggaagtcctgtggggttgactttgaggtcaaagcattcgccacagacagcaccgatgccgaagaggacaaaatccccaagaagagctccgtgcgattactgatccgcaaagtacagcatgccccacttgagatgggtccccagccccgagctgaggcggcctggcagttcttcatgtctgacaagcccctgcaccttgcggtctctctcaacaaagagatctatttccatggggagcccatccctgtgaccgtgactgtcaccaataacacagagaagaccgtgaagaagattaaagcattcgtggaacaggtggccaatgtggttctctactcgagtgattattacgtcaagcccgtggctatggaggaagcgcaagaaaaagtgccaccaaacagcactttgaccaagacgctgacgctgctgcccttgctggctaacaatcgagaaaggagaggcattgccctggatgggaaaatcaagcacgaggacacaaaccttgcctccagcaccatcattaaggagggcatagaccggaccgtcctgggaatcctggtgtcttaccagatcaaggtgaagctcacagtgtcaggctttctgggagagctcacctccagtgaagtcgccactgaggtcccattccgcctcatgcaccctcagcctgaggacccaggtaaatgaagcagcaaaaataatataggtgaaatctcagaaattctgaagaaacattctctgcatcgaggcagcttagttgacgggaaagaaaaacagatctgtctaaatgagaactctccgta

SEQ ID NO: 27168 - DNA, 2576 bp, Homo sapiens
  source 1..2576: mol_type = unassigned DNA
agaacaggggctggctattcatcatctcagagcatagagaccctctccttgccacccggcccttcccacctggttggtgacaaatcacaaggtggtagaagttgccagggacagataacatggcagccagcgggaagaccagcaagtccgaaccgaaccatgttatcttcaagaagatctcccgggacaaatcggtgagtggtgcacaagtgaccatctacctggggaacagagactacatagaccatgtcagccaagtccagcctgtggatggtgtcgtgttggttgatcctgatcttgtgaagggaaagaaagtttcctgactacttgccctgttcagtgatgttgcagccagctccacaagattcagggaagtcctgtggggttgactttgaggtcaaagcattcgccacagacagcaccgatgccgaagaggacaaaatccccaagaagtaagagtatggttgcggaataggtgaggggtctgcggtgggggtggagagaagagacgacctccaccttgtctctgtgggacagacctcttcccatagggctggcacggctggggtaccatctgcatgtgggatggaggtcaaaggttgatcatttttggggaaaaaaaagaaaacaagaaaatgacagggaagttagcaacctccagggctcacgtaagccccgaaaagctcccgggtttcccctttgttgaagttttgttgttgttgtttgtttgtttgtttgtttgttttttgtggtaaaatgtacacaacatgaagtttgccattttaaccacttttttttctttttttcttttattttttgaaatggagcctcgctctgtcccccaggctggagtgcaatgtgacctcggctcactgcaacctccgcctcccaggttcaagcgattctcctgcctcaatctcccgagtagctgggattacaggcgtgcgccaccacgcctggctaatttttttttttttgtatttttagtagagatgggtttcaccatgttggccaggctggtcttgaactcctgacctcaagtgatccgcccgccttggcctcccaaagtgctgggattacaggcgtgagccactgtgcccggcccattttaaccacttttaaatgtaccattcagtggcttaagtacattccgaatgttgtgtagccttcaccgctgtctatacccaaaactttcccattgcctgagcaggaactctacaaccattgagcctaccgctccatccttcccattctcccaccccctgtgctgttttttttttacctaaacaagatttccgcctggcccttcgcactgtctccttgtgccccatgtacacatctctggaggcgcaggatagtgagctgcagtaatggagctcgcatgtatatggcagctattccatgaggcccttgacgccctcacaccttagccttgctgacaggaggcagagctgggaatccacggagcctaaggggctaagcttggccctcgggatgttgcctggccccacagcttcccccacagggaagggaccaggacccagacccccaggctcttccaccgtcagggctgcctcaggctctgaccagtgtcgttgccctcttcccgtccaccctgtctccatggggagcattcctggagaatctccatgtgacagtggggagagaacagaagcctccctaaagcggcctgggtgccaatccctggcttgtctgtggctgtttcccacaggagctccgtgcgattactgatccgcaaagtacagcatgccccacttgagatgggtccccagccccgagctgaggcggcctggcagttcttcatgtctgacaagcccctgcaccttgcggtctctctcaacaaagagatctatttccatggggagcccatccctgtgaccgtgactgtcaccaataacacagagaagaccgtgaagaagattaaagcattcgtggaacaggtggccaatgtggttctctactcgagtgattattacgtcaagcccgtggctatggaggaagcgcaagaaaaagtgccaccaaacagcactttgaccaagacgctgacgctgctgcccttgctggctaacaatcgagaaaggagaggcattgccctggatgggaaaatcaagcacgaggacacaaaccttgcctccagcaccatcattaaggagggcatagaccggaccgtcctgggaatcctggtgtcttaccagatcaaggtgaagctcacagtgtcaggctttctgggagagctcacctccagtgaagtcgccactgaggtcccattccgcctcatgcaccctcagcctgaggacccaggtcagttatcaggatgcaaatttagtttttgaggagtttgctcgccataatctgaaagatgcaggagaagctgaggaggggaagagagacaagaatgacgttgatgagtgaagatgtcggctcaggatgccggaaaatgacctgtagttaccagtgcaacgagcaaagccccacagtttagtcctttggagttatgctgcgtatgaaaggatgagtcttcttccgagaaataaagcttgtttgttctcccctgg

SEQ ID NO: 27169 - DNA, 926 bp, Homo sapiens
  source 1..926: mol_type = unassigned DNA
agctcctggaggcggaggccgcgggtgggggcctagtggagtgaggggtaacaagatggcgaccgagacggtggagctccataagctaaagcttgccgaactaaagcaagaatgtcttgctcgtggtttggagaccaagggaataaagcaagatcttatccacagactccaggcatatcttgaagaacatgctgaagaggaggcaaatgaagaagatgtactgggagatgaaacagaggaagaagaaacaaagcccattgagctccctgtcaaagaggaagaaccccctgaaaaaactgttgatgtggcagcagagaagaaagtggtgaaaattacatctgaaataccacagactgagagaatgcagaagagggctgaacgattcaatgtacctgtgagcttggagagtaagaaagctgctcgggcagctaggtttgggatttcttcagttccaacaaaaggtctgtcatctgataacaaacctatggttaacttggataagctgaaggaaagagctcaaagatttggtttgaatgtctcttcaatctccagaaagtctgaagatgatgagaaactgaaaaagaggaaggagcgatttgggattgtcacaagttcagctggaactggaaccacagaggatacagaggcaaagaagaggaaaagagcagagcgctttgggattgcctgatgaaaagttcctgatactttctgttctccagtgttttccatttctctccttcttcttggtcacatatatgcctaaatgcacagtcatgtgcctacgtcctgcctcgcaatgagggagcatgtaccccaggtacatccatgaactgcggcagcagtttgacttattgctgtttcagctttaaggttgttgtgtttttgtttttgattatgttgcttgttaataaaaaaaaatagaaaag

SEQ ID NO: 27170 - DNA, 995 bp, Homo sapiens
  source 1..995: mol_type = unassigned DNA
agtggagtgaggggtaacaagatggcgaccgagacggtggagctccataagctaaagcttgccgaactaaagcaagaatgtcttgctcgtggtttggagaccaagggaataaagcaagatcttatccacagactccaggcatatcttgaagaacatggaagaagaaacaaagcccattgagctccctgtcaaagaggaagaaccccctgaaaaaactgttgatgtggcagcagagaagaaagtggtgaaaattacatctgaaataccacagactgagagaatgcagaagagggctgaacgattcaatgtacctgtgagcttggagagtaagaaagctgctcgggcagctaggtttgggatttcttcagttccaacaaaaggtctgtcatctgataacaaacctatggttaacttggataagctgaaggaaagagctcaaagatttggtttgaatgtctcttcaatctccagaaagtctgaagatgatgagaaactgaaaaagaggaaggagcgatttgggattgtcacaagttcagctggaactggaaccacagaggatacagaggcaaagaagaggaaaagagcagagcgctttgggattgcctgatgaaaagttcctgatactttctgttctccagtgttttccatttctctccttcttcttggtcacatatatgcctaaatgcacagtcatgtgcctacgtcctgcctcgcaatgagggagcatgtaccccaggttcaagtgctggattgtgtcatgtgaccatcccaaaactcagagcaccctatggccgtctttgccctctgtcacataacttgaaaactgcctgatggcctttttgcagtggttccctccaggaagccttgatctcagttgaagaagttctttcctggcattccaatgcccctgtcagctccatactcctcagacacccttaacaaaggctgtcatgcacacaatgtgacaaatacacaaaataaatgataattacact

SEQ ID NO: 27171 - DNA, 1163 bp, Homo sapiens
  source 1..1163: mol_type = unassigned DNA
ctagtggagtgaggggtaacaagatggcgaccgagacggtggagctccataagctaaagcttgccgaactaaagcaagaatgtcttgctcgtggtttggagaccaagggaataaagcaagatcttatccacagactccaggcatatcttgaagaacatgctgaagaggaggcaaatgaagaagatgtactgggagatgaaacagaggaagaagaaacaaagcccattgagctccctgtcaaagaggaagaaccccctgaaaaaactgttgatgtggcagcagagaagaaagtggtgaaaattacatctgaaataccacagactgagagaatgcagaagagggctgaacgattcaatgtacctgtgagcttggagagtaagaaagctgctcgggcagctaggtttgggatttcttcagttccaacaaaaggtctgtcatctgataacaaacctatggttaacttggataagctgaaggaaagagctcaaagatttggtttgaatgtctcttcaatctccagaaagtctgaagatgatgagaaactgaaaaagaggaaggagcgatttgggattgtcacaagttcagctggaactggaaccacagaggatacagaggcaaagaagaggaaaagagcagagcgctttgggattgcctgatgaaaagttcctgatactttctgttctccagtgttttccatttctctccttcttcttggtcacatatatgcctaaatgcacagtcatgtgcctacgtcctgcctcgcaatgagggagcatgtaccccaggttcaagtgctggattgtgtcatgtgaccatcccaaaactcagagcaccctatggccgtctttgccctctgtcacataacttgaaaactgcctgatggcctttttgcagtggttccctccaggaagccttgatctcagttgaagaagttctttcctggcattccaatgcccctgtcagctccatactcctcagacacccttaacaaaggctgtcatgcacacaatgtgacaaatacacaaaataaatgataattacactaataatgatatgttcagaggggcactggccaggtccacacacatcataaggtgggagggggtgctaactcccactgggttgctgagctgtgccccccaagtcccttcactctgtgcctc

SEQ ID NO: 27172 - DNA, 1125 bp, Homo sapiens
  source 1..1125: mol_type = unassigned DNA
gtgggaataagatggcggggaagaagaatgttctgtcgtctctcgcagtttacgcggaagattcagagcccgagtctgatggcgaggctggaatcgaggcggtgggcagcgcggctgaggagaaaggcggattggtatctgatgcctatggggaggatgacttttctcgtctagggggtgatgaagatggttatgaagaagaagaagatgagaacagtagacagtcggataatacagaagcagaaaagcgagacccccaggaactcgtggcctccttttctgaaagagttcggaacatgtcgcctgatgaaatcaagatcccgccagaaccccctggcagatgttcaaatcacttgcaagacaagatccagaagctttatgaacgaaagataaaggagggaatggatatgaactacattatccaaaggaagaaagaatttcggaaccctagcatctacgagaagctgatccagttctgtgccattgacgagcttggcaccaactacccaaaggatatgtttgatccccatggctggtctgaggactcctactatgaggcattagccaaggcccagaaaattgagatggacaaattggaaaaggccaaaaaggagcgaacaaaaattgagtttgtgacgggcaccaaaaaaggcaccacgaccaacgccacgtccaccaccactaccactgccagcacagctgttgcagatgctcagaagagaaagagcaagtgggattcggctatcccagtgacaacgatagcccagcccaccatcctcaccaccacagccaccctgccagctgttgtcacggtcaccaccagcgccagcggctccaagaccaccgtcatctctgctgtgggcaccattgtgaagaaggccaagcagtgacctgaggggccaccctaggacttgaaaggaccgtgcagcccagtgaccactgcccagtgggaggcgccactttgtatatttcaggactgggacctactccccagatgccacctgagaggagcttctgtttggcattccagatggaaggacaggcagcacgggagccaggcgctgtggacagggtctgtccacgcaccacctggggtctgccgcctattaaaagtgccgtattctt

SEQ ID NO: 27173 - DNA, 2519 bp, Homo sapiens
  source 1..2519: mol_type = unassigned DNA
gaagtcggcgtcttgagtcataggagtgagccacgcccgggctgtgggaataagatggcggggaagaagaatgttctgtcgtctctcgcagtttacgcggaagattcagagcccgagtctgatggcgaggctggaatcgaggcggtgggcagcgcggctgaggagaaaggcggattggtatctgatgcctatggggaggatgacttttctcgtctagggggtgatgaagatggttatgaagaagaagaagatgagaacagtagacagtcggaagatgacgattcagagactgaaaaacctgaggctgatgacccaaaggataatacagaagcagaaaagcgagacccccaggaactcgtggcctccttttctgaaagagttcggaacatgtcgcctgatgaaatcaagatcccgccagaaccccctggcagatgttcaaatcacttgcaagacaagatccagaagctttatgaacgaaagataaaggagggaatggatatgaactacattatccaaaggaagaaagaatttcggaaccctagcatctacgagaagctgatccagttctgtgccattgacgagcttggcaccaactacccaaaggatatgtttgatccccatggctggtctgaggactcctactatgaggcattagccaaggcccagaaaattgagatggacaaattggaaaaggccaaaaaggagcgaacaaaaattgagtttgtgacgggcaccaaaaaaggcaccacgaccaacgccacgtccaccaccactaccactgccagcacagctgttgcagatgctcagaagagaaagagcaagtgggattcggctatcccagtgacaacgatagcccagcccaccatcctcaccaccacagccaccctgccagctgttgtcacggtcaccaccagcgccagcggctccaagaccaccgtcatctctgctgtgggcaccattgtgaagaaggccaagcagtgacctgaggggccaccctaggacttgaaaggaccgtgcagcccagtgaccactgcccagtgggaggcgccactttgtatatttcaggactgggacctactccccagatgccacctgagaggagcttctgtttggcattccagatggaaggacaggcagcacgggagccaggcgctgtggacagggtctgtccacgcaccacctggggtctgccgcctattaaaagtgccgtattcttacctcttggcatctcagatgcactggcctctcctgcattctgtttgcaggcaaatgcttcagctcacatgtcccccaagactcaatagtcttggttgggactattgcctcagggttgacaacagggtgatggaggcctgggacgctgttcagaggggtgacccaagaagtcaccgttgttatccgtgtatgcctctgggcatggacaggcgggagtccccgagccccacgtatgccccatctgccgccttgatcccaaaacccagccagttctcgggtgatggtggagctgtgctcccttgagtgcacttgagcactccccagaccagatcactttttggacacacccaggaaggcttttgaagtcaagccagtttccagaagggctggggtgagatcctgacctgtgcagagagtggggaggcgtcagcgcctggccagggctgccccagtcctttggtgcccggtgagcgcagccagcaggagctgagcagcgggggagatgaatcacctcctgccttggcgaggcggcagctcattgtttacaggcaagccctgctcctgggagggctcctgccaccccacccttcctctgtgtgttatctctgccccacagcagcccctgggcagcaccagtggccactgggctccccccggggttgaaacgggtttcccagaccaggggttcagaggagactatttacccttcatgatctttggcgattctccactggagcggaagggctgtgtgtcaaaagaaggaagccaggctgtgaagggccgtgttgctttcagtgggtgggcagaggtttagaaaggtggttctgaaatggcacctggtactcttgtgggacctggggaatataaggaactctgtgcatgaggtttcaaaaataaaaattgagtccactctccccgtacacacacactcgggcacttcaggaggtcagttctcaccccttcctcgatggggctttaaagctctggggagaagagctgctccccactcatgccccagagggactgtgaaaaggcttcctgtgacctccgatggcggcccctcattggccaagggcactgtggatgttttgtgggaggcagcatggcaccgtggaaagggcagtagacgtggagccggcacctctggtctggattccacttaaaaccagttgagtggtctcaagcccttaacctctgtaagcctgtttcttctctgaaatcacagtaataaagcgtcgtaagatggttgggaagaaccagaggtgacttatgcaaaagctttataaactgtaaagttcctgcca

SEQ ID NO: 27174 - DNA, 1011 bp, Homo sapiens
  source 1..1011: mol_type = unassigned DNA
cgggctgtgggaataagatggcggggaagaagaatgttctgtcgtctctcgcagtttacgcggaagattcagagcccgagtctgatggcgaggctggaatcgaggcggtgggcagcgcggctgaggagaaaggcggattggtatctgatgcctatggggaggatgacttttctcgtctagggggtgatgaagatggttatgaagaagaagaagatgagaacagtagacagtcggaagatgacgattcagagactgaaaaacctgaggctgatgacccaaaggataatacagaagcagaaaagcgagacccccaggaactcgtggcctccttttctgaaagagttcggaacatgtcgcctgatgaaatcaagatcccgccagaaccccctggcagatgttcaaatcacttgcaagacaagatccagaagctttatgaacgaaagataaaggagggaatggatatgaactacattatccaaaggaagaaagaatttcggaaccctagccaaggcccagaaaattgagatggacaaattggaaaaggccaaaaaggagcgaacaaaaattgagtttgtgacgggcaccaaaaaaggcaccacgaccaacgccacgtccaccaccactaccactgccagcacagctgttgcagatgctcagaagagaaagagcaagtgggattcggctatcccagtgacaacgatagcccagcccaccatcctcaccaccacagccaccctgccagctgttgtcacggtcaccaccagcgccagcggctccaagaccaccgtcatctctgctgtgggcaccattgtgaagaaggccaagcagtgacctgaggggccaccctaggacttgaaaggaccgtgcagcccagtgaccactgcccagtgggaggcgccactttgtatatttcaggactgggacctactccccagatgccacctgagaggagcttctgtttggcattccagatggaaggacaggcagcacgggagccaggcgctgtggaca

SEQ ID NO: 27175 - DNA, 2722 bp, Homo sapiens
  source 1..2722: mol_type = unassigned DNA
cacaaccccaactcagagaagccaaagcgctgggaattcagctttaggcagaacccacgcaatcttatatccgtcgcgcagtgatgacgtagcgcgagcgctggcatgagggcggagccaggcgcaggaaactgccgttttgattggtttccagtgtggcgcgggggtctcctgggatccgaaagaacctgcctttccgcccggaagtcggcgtcttgagtcataggagtgagccacgcccgggctgtgggaataagatggcggggaagaagaatgttctgtcgtctctcgcagtttacgcggaagattcagagcccgagtctgatggcgaggctggaatcgaggcggtgggcagcgcggctgaggagaaaggcggattggtatctgatgcctatggggaggatgacttttctcgtctagggggtgatgaagatggttatgaagaagaagaagatgagaacagtagacagtcggaagatgacgattcagagactgaaaaacctgaggctgatgacccaaaggataatacagaagcagaaaagcgagacccccaggaactcgtggcctccttttctgaaagagttcggaacatgtcgcctgatgaaatcaagatcccgccagaaccccctggcagatgttcaaatcacttgcaagacaagatccagaagctttatgaacgaaagataaaggagggaatggatatgaactacattatccaaaggaagaaagaatttcggaaccctagcatctacgagaagctgatccagttctgtgccattgacgagcttggcaccaactacccaaaggatatgtttgatccccatggctggtctgaggactcctactatgaggcattagccaaggcccagaaaattgagatggacaaattggaaaaggccaaaaaggagcgaacaaaaattgagtttgtgacgggcaccaaaaaaggcaccacgaccaacgccacgtccaccaccactaccactgccagcacagctgttgcagatgctcagaagagaaagagcaagtgggattcggctatcccagtgacaacgatagcccagcccaccatcctcaccaccacagccaccctgccagctgttgtcacggtcaccaccagcgccagcggctccaagaccaccgtcatctctgctgtgggcaccattgtgaagaaggccaagcagtgacctgaggggccaccctaggacttgaaaggaccgtgcagcccagtgaccactgcccagtgggaggcgccactttgtatatttcaggactgggacctactccccagatgccacctgagaggagcttctgtttggcattccagatggaaggacaggcagcacgggagccaggcgctgtggacagggtctgtccacgcaccacctggggtctgccgcctattaaaagtgccgtattcttacctcttggcatctcagatgcactggcctctcctgcattctgtttgcaggcaaatgcttcagctcacatgtcccccaagactcaatagtcttggttgggactattgcctcagggttgacaacagggtgatggaggcctgggacgctgttcagaggggtgacccaagaagtcaccgttgttatccgtgtatgcctctgggcatggacaggcgggagtccccgagccccacgtatgccccatctgccgccttgatcccaaaacccagccagttctcgggtgatggtggagctgtgctcccttgagtgcacttgagcactccccagaccagatcactttttggacacacccaggaaggcttttgaagtcaagccagtttccagaagggctggggtgagatcctgacctgtgcagagagtggggaggcgtcagcgcctggccagggctgccccagtcctttggtgcccggtgagcgcagccagcaggagctgagcagcgggggagatgaatcacctcctgccttggcgaggcggcagctcattgtttacaggcaagccctgctcctgggagggctcctgccaccccacccttcctctgtgtgttatctctgccccacagcagcccctgggcagcaccagtggccactgggctccccccggggttgaaacgggtttcccagaccaggggttcagaggagactatttacccttcatgatctttggcgattctccactggagcggaagggctgtgtgtcaaaagaaggaagccaggctgtgaagggccgtgttgctttcagtgggtgggcagaggtttagaaaggtggttctgaaatggcacctggtactcttgtgggacctggggaatataaggaactctgtgcatgaggtttcaaaaataaaaattgagtccactctccccgtacacacacactcgggcacttcaggaggtcagttctcaccccttcctcgatggggctttaaagctctggggagaagagctgctccccactcatgccccagagggactgtgaaaaggcttcctgtgacctccgatggcggcccctcattggccaagggcactgtggatgttttgtgggaggcagcatggcaccgtggaaagggcagtagacgtggagccggcacctctggtctggattccacttaaaaccagttgagtggtctcaagcccttaacctctgtaagcctgtttcttctctgaaatcacagtaataaagcgtcgtaagatggttgggaagaaccagaggtgacttatgcaaaagctttataaactgtaaagttcctgcca

SEQ ID NO: 27176 - DNA, 437 bp, Homo sapiens
  source 1..437: mol_type = unassigned DNA
atgtctttcatctttgagtggatctacaatggcttcagcagtgtgctccagttcctaggactgtacaagaaatctggaaaacttgtattcttaggtttggataatgcaggcaaaaccactcttcttcacatgctcaaagatgacagattgggccaacatgttccaacactacatccgacatcagaagagctaacaattgctggaatgacctttacaacttttgatcttggtgggcacgagcaagcacgtcgcgtttggaaaaattatctcccagcaattaatgggattgtctttctggtggactgtgcagatcattctcgcctcgtggaatccaaagttgagcttaatgtatgttttgtcctttaatgtgtattttaatgtatattttgttcttttttggcctctatttttttttaaggaatatagctcagtagtgc

SEQ ID NO: 27177 - DNA, 3227 bp, Homo sapiens
  source 1..3227: mol_type = unassigned DNA
cctgttactttcacttggagaatagggaggcttggggtgggggcaggactgtggaggaagtcaagtttgctgtcttctatggttgtggtttgtggcacaacaaaacaattatactagtaataccaaagatcactgatcatagatcatgatgacagatataagaataatgaaaaagtttgaaatattgtgtgagaattaccaaaatgtaacatagagacatgaagggagcacatgctgttagaagatggtactgatacacttactcaactcagggctgcttccaaccttcaatttgtaaaaaaaccagaaaacctcaggatccacaaagtatcatcaaatgaggtagtaagcattaataatgtctttcatctttgagtggatctacaatggcttcagcagtgtgctccagttcctaggactgtacaagaaatctggaaaacttgtattcttaggtttggataatgcaggcaaaaccactcttcttcacatgctcaaagatgacagattgggccaacatgttccaacactacatccgacatcagaagagctaacaattgctggaatgacctttacaacttttgatcttggtgggcacgagcaagcacgtcgcgtttggaaaaattatctcccagcaattaatgggattgtctttctggtggactgtgcagatcattctcgcctcgtggaatccaaagttgagcttaatgctttaatgactgatgaaacaatatccaatgtgccaatccttatcttgggtaacaaaattgacagaacagatgcaatcagtgaagaaaaactccgtgagatatttgggctttatggacagaccacaggaaaggggaatgtgaccctgaaggagctgaatgctcgccccatggaagtgttcatgtgcagtgtgctcaagaggcaaggttacggcgagggtttccgctggctctcccagtatattgactgatgtttggacggtgaaaataaaagagttttacttctctggactgatcctattcacagcttcctcatgaacttttctaatagaacaaggaaagctctccaaccatgtctggcgttgagaagccaagagtctctgtcaactctctcattgcccagtggtgacatgtgctcttctccacactgttgggaggtaatgctgccccacgtgctggtgcaggtcagtatcctgggacttggaagctggcaggatttgccgggtaaagctgtatgccatcatggggcacctgaaaagaaaaacacgtctcaccactgtggttgattcaaaagaaagtgattctattttttaaagaaagcgttgttaatgtaattggtatccctcctaactttttgagttcacaatttacttggtccagagttttctattcttttttttttttaaactaatgaatgacatttagatacttcataaaattatgaacagatatggaggccagagctcatttgggtaaacttactcctgctgagttagcaggttggtgagagaagctcccctgagctcacctgtctctctgactgccttggagtaggtggcataaccttgtgcacagagaactagaaaaggggcagaaccccggccttgcagttgtggcaggtttccactgtggtaagctaggttcattcctcatcaaggaatgtgtagcagattgttcactgtggaggagttaattatagaatgggttattgttgttattcttactcatgaagttacagattttagccagtctttgcttttatacttttgtgaaatttaatttctctctatagcaccttcctttttcgttttcagttatcaaaagtgactttgacctcataaaagagttgagaacatctctcgtgtcacatactgcaggtgcatcagttacttttgcacagattctagggggacatttttctgaataggaagacaggacaaagttaacagcttaagggctcttaattctgtgagttgaggacttaaaagtattgtagcatttgtttggatccatgaaaaatgtattcagtgggctttaaaatttccatttgcagaatttggtctctcaggctgtttgggagctcttttttttacattttttctcctttgacacctattttattggtgtttaaagtaaaggttaacatctgtagcttttccaggtttttttttttttttttttttttttggtatgaaattgtctttctccattgcagaaataagctagggaaacactaacccaaaaactttctgtagagctgttcctttggaggcagcatcacttattggcagtaaagactcagtataaaagcaccggcatccctacttgggtgatggggattaattttatagcattccattttcctagtgccacatgtgaaattggattttgatgatcttaatctatattctacccttataataaaagatcaaaagatatatctcctatgaacagattggagataggagatgaaaagttgggaggatgtctttattctaatgtgagggtagggaaaatgtggataacattactggggtgagggaggcattgttctttagttggagttctcattcttattctccagtactgacttgtggggaaagcatactttttcactgccaggtactgaatgcagaggctcagtgaagtatatatgtgggaagtgcatgcatttcgtttattagcaaacatagctggattaagacaaagttgttggtttggaaaggggttaaagccttaagtgaacaaatctagctaacagtgaatgaactaggtaatataacttgcatatttttaatttcctttggttaaaggtcccccatacttctctgttcggagacatgagaagtatgattacttcagtgttagttttcttaattttttttttcccctatttgtcccttgtcactttgttgcaagctagaaatctgtgggttatacatagggcagctctttgtgaaagtggtttattccactggagaaaggggattgaaaatcagttagaaccaatgtatttcttgccccacggaacactattcctataagatagctgaaagaagctgctgtgaggagctcagctccaaacacaggatcagcaccttgtataggaattcccatgaattatgacttctcattctgttttatcagagtgcatatatgtcctacttcaggaaaagtaaaacagtcatttacgaaagaaagtcaatctgtatcctaagcattttaataaaaagttaaaacaaa

SEQ ID NO: 27178 - DNA, 3185 bp, Homo sapiens
  source 1..3185: mol_type = unassigned DNA
acatccggcgagtagctggcggtcccgggtgctgctggttagtgtgctctgagggagggtccgagccagccgctgttttgccggaggagcccctcaggccgttcaagcgtttctcctgcctcagccttctgcatagctgggattacaagcaagcgctgccgcgcccagctgttcattttattcttcatctggcattctttgaatagatgcaggtctctctatgttacccaggctggtcttgaactcctgaggtcagggaggaatcccccacctcagccttgcaaaatgctgggattacaggtagtaagcattaataatgtctttcatctttgagtggatctacaatggcttcagcagtgtgctccagttcctaggactgtacaagaaatctggaaaacttgtattcttaggtttggataatgcaggcaaaaccactcttcttcacatgctcaaagatgacagattgggccaacatgttccaacactacatccgacatcagaagagctaacaattgctggaatgacctttacaacttttgatcttggtgggcacgagcaagcacgtcgcgtttggaaaaattatctcccagcaattaatgggattgtctttctggtggactgtgcagatcattctcgcctcgtggaatccaaagttgagcttaatgctttaatgactgatgaaacaatatccaatgtgccaatccttatcttgggtaacaaaattgacagaacagatgcaatcagtgaagaaaaactccgtgagatatttgggctttatggacagaccacaggaaaggggaatgtgaccctgaaggagctgaatgctcgccccatggaagtgttcatgtgcagtgtgctcaagaggcaaggttacggcgagggtttccgctggctctcccagtatattgactgatgtttggacggtgaaaataaaagagttttacttctctggactgatcctattcacagcttcctcatgaacttttctaatagaacaaggaaagctctccaaccatgtctggcgttgagaagccaagagtctctgtcaactctctcattgcccagtggtgacatgtgctcttctccacactgttgggaggtaatgctgccccacgtgctggtgcaggtcagtatcctgggacttggaagctggcaggatttgccgggtaaagctgtatgccatcatggggcacctgaaaagaaaaacacgtctcaccactgtggttgattcaaaagaaagtgattctattttttaaagaaagcgttgttaatgtaattggtatccctcctaactttttgagttcacaatttacttggtccagagttttctattcttttttttttttaaactaatgaatgacatttagatacttcataaaattatgaacagatatggaggccagagctcatttgggtaaacttactcctgctgagttagcaggttggtgagagaagctcccctgagctcacctgtctctctgactgccttggagtaggtggcataaccttgtgcacagagaactagaaaaggggcagaaccccggccttgcagttgtggcaggtttccactgtggtaagctaggttcattcctcatcaaggaatgtgtagcagattgttcactgtggaggagttaattatagaatgggttattgttgttattcttactcatgaagttacagattttagccagtctttgcttttatacttttgtgaaatttaatttctctctatagcaccttcctttttcgttttcagttatcaaaagtgactttgacctcataaaagagttgagaacatctctcgtgtcacatactgcaggtgcatcagttacttttgcacagattctagggggacatttttctgaataggaagacaggacaaagttaacagcttaagggctcttaattctgtgagttgaggacttaaaagtattgtagcatttgtttggatccatgaaaaatgtattcagtgggctttaaaatttccatttgcagaatttggtctctcaggctgtttgggagctcttttttttacattttttctcctttgacacctattttattggtgtttaaagtaaaggttaacatctgtagcttttccaggtttttttttttttttttttttttttggtatgaaattgtctttctccattgcagaaataagctagggaaacactaacccaaaaactttctgtagagctgttcctttggaggcagcatcacttattggcagtaaagactcagtataaaagcaccggcatccctacttgggtgatggggattaattttatagcattccattttcctagtgccacatgtgaaattggattttgatgatcttaatctatattctacccttataataaaagatcaaaagatatatctcctatgaacagattggagataggagatgaaaagttgggaggatgtctttattctaatgtgagggtagggaaaatgtggataacattactggggtgagggaggcattgttctttagttggagttctcattcttattctccagtactgacttgtggggaaagcatactttttcactgccaggtactgaatgcagaggctcagtgaagtatatatgtgggaagtgcatgcatttcgtttattagcaaacatagctggattaagacaaagttgttggtttggaaaggggttaaagccttaagtgaacaaatctagctaacagtgaatgaactaggtaatataacttgcatatttttaatttcctttggttaaaggtcccccatacttctctgttcggagacatgagaagtatgattacttcagtgttagttttcttaattttttttttcccctatttgtcccttgtcactttgttgcaagctagaaatctgtgggttatacatagggcagctctttgtgaaagtggtttattccactggagaaaggggattgaaaatcagttagaaccaatgtatttcttgccccacggaacactattcctataagatagctgaaagaagctgctgtgaggagctcagctccaaacacaggatcagcaccttgtataggaattcccatgaattatgacttctcattctgttttatcagagtgcatatatgtcctacttcaggaaaagtaaaacagtcatttacgaaagaaagtcaatctgtatcctaagcattttaataaaaagttaaaacaaa

SEQ ID NO: 27179 - DNA, 2996 bp, Homo sapiens
  source 1..2996: mol_type = unassigned DNA
gggtgtgacgtacatccggcgagtagctggcggtcccgggtgctgctggttagtgtgctctgagggagggtccgagccagccgctgttttgccggaggagcccctcaggccgtagtaagcattaataatgtctttcatctttgagtggatctacaatggcttcagcagtgtgctccagttcctaggactgtacaagaaatctggaaaacttgtattcttaggtttggataatgcaggcaaaaccactcttcttcacatgctcaaagatgacagattgggccaacatgttccaacactacatccgacatcagaagagctaacaattgctggaatgacctttacaacttttgatcttggtgggcacgagcaagcacgtcgcgtttggaaaaattatctcccagcaattaatgggattgtctttctggtggactgtgcagatcattctcgcctcgtggaatccaaagttgagcttaatgctttaatgactgatgaaacaatatccaatgtgccaatccttatcttgggtaacaaaattgacagaacagatgcaatcagtgaagaaaaactccgtgagatatttgggctttatggacagaccacaggaaaggggaatgtgaccctgaaggagctgaatgctcgccccatggaagtgttcatgtgcagtgtgctcaagaggcaaggttacggcgagggtttccgctggctctcccagtatattgactgatgtttggacggtgaaaataaaagagttttacttctctggactgatcctattcacagcttcctcatgaacttttctaatagaacaaggaaagctctccaaccatgtctggcgttgagaagccaagagtctctgtcaactctctcattgcccagtggtgacatgtgctcttctccacactgttgggaggtaatgctgccccacgtgctggtgcaggtcagtatcctgggacttggaagctggcaggatttgccgggtaaagctgtatgccatcatggggcacctgaaaagaaaaacacgtctcaccactgtggttgattcaaaagaaagtgattctattttttaaagaaagcgttgttaatgtaattggtatccctcctaactttttgagttcacaatttacttggtccagagttttctattcttttttttttttaaactaatgaatgacatttagatacttcataaaattatgaacagatatggaggccagagctcatttgggtaaacttactcctgctgagttagcaggttggtgagagaagctcccctgagctcacctgtctctctgactgccttggagtaggtggcataaccttgtgcacagagaactagaaaaggggcagaaccccggccttgcagttgtggcaggtttccactgtggtaagctaggttcattcctcatcaaggaatgtgtagcagattgttcactgtggaggagttaattatagaatgggttattgttgttattcttactcatgaagttacagattttagccagtctttgcttttatacttttgtgaaatttaatttctctctatagcaccttcctttttcgttttcagttatcaaaagtgactttgacctcataaaagagttgagaacatctctcgtgtcacatactgcaggtgcatcagttacttttgcacagattctagggggacatttttctgaataggaagacaggacaaagttaacagcttaagggctcttaattctgtgagttgaggacttaaaagtattgtagcatttgtttggatccatgaaaaatgtattcagtgggctttaaaatttccatttgcagaatttggtctctcaggctgtttgggagctcttttttttacattttttctcctttgacacctattttattggtgtttaaagtaaaggttaacatctgtagcttttccaggtttttttttttttttttttttttttggtatgaaattgtctttctccattgcagaaataagctagggaaacactaacccaaaaactttctgtagagctgttcctttggaggcagcatcacttattggcagtaaagactcagtataaaagcaccggcatccctacttgggtgatggggattaattttatagcattccattttcctagtgccacatgtgaaattggattttgatgatcttaatctatattctacccttataataaaagatcaaaagatatatctcctatgaacagattggagataggagatgaaaagttgggaggatgtctttattctaatgtgagggtagggaaaatgtggataacattactggggtgagggaggcattgttctttagttggagttctcattcttattctccagtactgacttgtggggaaagcatactttttcactgccaggtactgaatgcagaggctcagtgaagtatatatgtgggaagtgcatgcatttcgtttattagcaaacatagctggattaagacaaagttgttggtttggaaaggggttaaagccttaagtgaacaaatctagctaacagtgaatgaactaggtaatataacttgcatatttttaatttcctttggttaaaggtcccccatacttctctgttcggagacatgagaagtatgattacttcagtgttagttttcttaattttttttttcccctatttgtcccttgtcactttgttgcaagctagaaatctgtgggttatacatagggcagctctttgtgaaagtggtttattccactggagaaaggggattgaaaatcagttagaaccaatgtatttcttgccccacggaacactattcctataagatagctgaaagaagctgctgtgaggagctcagctccaaacacaggatcagcaccttgtataggaattcccatgaattatgacttctcattctgttttatcagagtgcatatatgtcctacttcaggaaaagtaaaacagtcatttacgaaagaaagtcaatctgtatcctaagcattttaataaaaagttaaaacaaa

SEQ ID NO: 27180 - DNA, 3066 bp, Homo sapiens
  source 1..3066: mol_type = unassigned DNA
gggtgtgacgtacatccggcgagtagctggcggtcccgggtgctgctggttagtgtgctctgagggagggtccgagccagccgctgttttgccggaggagcccctcaggccggctgcttccaaccttcaatttgtaaaaaaaccagaaaacctcaggatccacaaagtatcatcaaatgaggtagtaagcattaataatgtctttcatctttgagtggatctacaatggcttcagcagtgtgctccagttcctaggactgtacaagaaatctggaaaacttgtattcttaggtttggataatgcaggcaaaaccactcttcttcacatgctcaaagatgacagattgggccaacatgttccaacactacatccgacatcagaagagctaacaattgctggaatgacctttacaacttttgatcttggtgggcacgagcaagcacgtcgcgtttggaaaaattatctcccagcaattaatgggattgtctttctggtggactgtgcagatcattctcgcctcgtggaatccaaagttgagcttaatgctttaatgactgatgaaacaatatccaatgtgccaatccttatcttgggtaacaaaattgacagaacagatgcaatcagtgaagaaaaactccgtgagatatttgggctttatggacagaccacaggaaaggggaatgtgaccctgaaggagctgaatgctcgccccatggaagtgttcatgtgcagtgtgctcaagaggcaaggttacggcgagggtttccgctggctctcccagtatattgactgatgtttggacggtgaaaataaaagagttttacttctctggactgatcctattcacagcttcctcatgaacttttctaatagaacaaggaaagctctccaaccatgtctggcgttgagaagccaagagtctctgtcaactctctcattgcccagtggtgacatgtgctcttctccacactgttgggaggtaatgctgccccacgtgctggtgcaggtcagtatcctgggacttggaagctggcaggatttgccgggtaaagctgtatgccatcatggggcacctgaaaagaaaaacacgtctcaccactgtggttgattcaaaagaaagtgattctattttttaaagaaagcgttgttaatgtaattggtatccctcctaactttttgagttcacaatttacttggtccagagttttctattcttttttttttttaaactaatgaatgacatttagatacttcataaaattatgaacagatatggaggccagagctcatttgggtaaacttactcctgctgagttagcaggttggtgagagaagctcccctgagctcacctgtctctctgactgccttggagtaggtggcataaccttgtgcacagagaactagaaaaggggcagaaccccggccttgcagttgtggcaggtttccactgtggtaagctaggttcattcctcatcaaggaatgtgtagcagattgttcactgtggaggagttaattatagaatgggttattgttgttattcttactcatgaagttacagattttagccagtctttgcttttatacttttgtgaaatttaatttctctctatagcaccttcctttttcgttttcagttatcaaaagtgactttgacctcataaaagagttgagaacatctctcgtgtcacatactgcaggtgcatcagttacttttgcacagattctagggggacatttttctgaataggaagacaggacaaagttaacagcttaagggctcttaattctgtgagttgaggacttaaaagtattgtagcatttgtttggatccatgaaaaatgtattcagtgggctttaaaatttccatttgcagaatttggtctctcaggctgtttgggagctcttttttttacattttttctcctttgacacctattttattggtgtttaaagtaaaggttaacatctgtagcttttccaggtttttttttttttttttttttttttggtatgaaattgtctttctccattgcagaaataagctagggaaacactaacccaaaaactttctgtagagctgttcctttggaggcagcatcacttattggcagtaaagactcagtataaaagcaccggcatccctacttgggtgatggggattaattttatagcattccattttcctagtgccacatgtgaaattggattttgatgatcttaatctatattctacccttataataaaagatcaaaagatatatctcctatgaacagattggagataggagatgaaaagttgggaggatgtctttattctaatgtgagggtagggaaaatgtggataacattactggggtgagggaggcattgttctttagttggagttctcattcttattctccagtactgacttgtggggaaagcatactttttcactgccaggtactgaatgcagaggctcagtgaagtatatatgtgggaagtgcatgcatttcgtttattagcaaacatagctggattaagacaaagttgttggtttggaaaggggttaaagccttaagtgaacaaatctagctaacagtgaatgaactaggtaatataacttgcatatttttaatttcctttggttaaaggtcccccatacttctctgttcggagacatgagaagtatgattacttcagtgttagttttcttaattttttttttcccctatttgtcccttgtcactttgttgcaagctagaaatctgtgggttatacatagggcagctctttgtgaaagtggtttattccactggagaaaggggattgaaaatcagttagaaccaatgtatttcttgccccacggaacactattcctataagatagctgaaagaagctgctgtgaggagctcagctccaaacacaggatcagcaccttgtataggaattcccatgaattatgacttctcattctgttttatcagagtgcatatatgtcctacttcaggaaaagtaaaacagtcatttacgaaagaaagtcaatctgtatcctaagcattttaataaaaagttaaaacaaa

SEQ ID NO: 27181 - DNA, 783 bp, Homo sapiens
  source 1..783: mol_type = unassigned DNA
ctggcggtcccgggtgctgctggttagtgtgctctgagggagggtccgagccagccgctgttttgccggaggagcccctcaggccgtagtaagcattaataatgtctttcatctttgagtggatctacaatggcttcagcagtgtgctccagttcctaggactgtacaagaaatctggaaaacttgtattcttaggtttggataatgcaggcaaaaccactcttcttcacatgctcaaagatgacagattgggccaacatgttccaacactacatccgacatcagaagagctaacaattgctggaatgacctttacaacttttgatcttggtgggcacgagcaagcacgtcgcgtttggaaaaattatctcccagcaattaatgggattgtctttctggtggactgtgcagatcattctcgcctcgtggaatccaaagttgagcttaatgatatattgcagctcacttctcacactggcccctaatgctttaatgactgatgaaacaatatccaatgtgccaatccttatcttgggtaacaaaattgacagaacagatgcaatcagtgaagaaaaactccgtgagatatttgggctttatggacagaccacaggaaaggggaatgtgaccctgaaggagctgaatgctcgccccatggaagtgttcatgtgcagtgtgctcaagaggcaaggttacggcgagggtttccgctggctctcccagtatattgactgatgtttggacggtgaaaataaaagagttttacttctctggactgatcct

SEQ ID NO: 27182 - DNA, 2810 bp, Homo sapiens
  source 1..2810: mol_type = unassigned DNA
atgtctttcatctttgagtggatctacaatggcttcagcagtgtgctccagttcctaggactgtacaagaaatctggaaaacttgtattcttaggtttggataatgcaggcaaaaccactcttcttcacatgctcaaagatgacagattgggccaacatgttccaacactacatccgacatcagaagagctaacaattgctggaatgacctttacaacttttgatcttggtgggcacgagcaagcacgtcgcgtttggaaaaattatctcccagcaattaatgggattgtctttctggtggactgtgcagatcattctcgcctcgtggaatccaaagttgagcttaatgctttaatgactgatgaaacaatatccaatgtgccaatccttatcttgggtaacaaaattgacagaacagatgcaatcagtgaagaaaaactccgtgagatatttgggctttatggacagaccacaggaaaggggaatgtgaccctgaaggagctgaatgctcgccccatggaagtgttcatgtgcagtgtgctcaagaggcaaggttacggcgagggtttccgctggctctcccagtatattgactgatgtttggacggtgaaaataaaagagttttacttctctggactgatcctattcacagcttcctcatgaacttttctaatagaacaaggaaagctctccaaccatgtctggcgttgagaagccaagagtctctgtcaactctctcattgcccagtggtgacatgtgctcttctccacactgttgggaggtaatgctgccccacgtgctggtgcaggtcagtatcctgggacttggaagctggcaggatttgccgggtaaagctgtatgccatcatggggcacctgaaaagaaaaacacgtctcaccactgtggttgattcaaaagaaagtgattctattttttaaagaaagcgttgttaatgtaattggtatccctcctaactttttgagttcacaatttacttggtccagagttttctattcttttttttttttaaactaatgaatgacatttagatacttcataaaattatgaacagatatggaggccagagctcatttgggtaaacttactcctgctgagttagcaggttggtgagagaagctcccctgagctcacctgtctctctgactgccttggagtaggtggcataaccttgtgcacagagaactagaaaaggggcagaaccccggccttgcagttgtggcaggtttccactgtggtaagctaggttcattcctcatcaaggaatgtgtagcagattgttcactgtggaggagttaattatagaatgggttattgttgttattcttactcatgaagttacagattttagccagtctttgcttttatacttttgtgaaatttaatttctctctatagcaccttcctttttcgttttcagttatcaaaagtgactttgacctcataaaagagttgagaacatctctcgtgtcacatactgcaggtgcatcagttacttttgcacagattctagggggacatttttctgaataggaagacaggacaaagttaacagcttaagggctcttaattctgtgagttgaggacttaaaagtattgtagcatttgtttggatccatgaaaaatgtattcaggctgtttgggagctcttttttttacattttttctcctttgacacctattttattggtgtttaaagtaaaggttaacatctgtagcttttccaggtttttttttttttttttttttttttggtatgaaattgtctttctccattgcagaaataagctagggaaacactaacccaaaaactttctgtagagctgttcctttggaggcagcatcacttattggcagtaaagactcagtataaaagcaccggcatccctacttgggtgatggggattaattttatagcattccattttcctagtgccacatgtgaaattggattttgatgatcttaatctatattctacccttataataaaagatcaaaagatatatctcctatgaacagattggagataggagatgaaaagttgggaggatgtctttattctaatgtgagggtagggaaaatgtggataacattactggggtgagggaggcattgttctttagttggagttctcattcttattctccagtactgacttgtggggaaagcatactttttcactgccaggtactgaatgcagaggctcagtgaagtatatatgtgggaagtgcatgcatttcgtttattagcaaacatagctggattaagacaaagttgttggtttggaaaggggttaaagccttaagtgaacaaatctagctaacagtgaatgaactaggtaatataacttgcatatttttaatttcctttggttaaaggtcccccatacttctctgttcggagacatgagaagtatgattacttcagtgttagttttcttaattttttttttcccctatttgtcccttgtcactttgttgcaagctagaaatctgtgggttatacatagggcagctctttgtgaaagtggtttattccactggagaaaggggattgaaaatcagttagaaccaatgtatttcttgccccacggaacactattcctataagatagctgaaagaagctgctgtgaggagctcagctccaaacacaggatcagcaccttgtataggaattcccatgaattatgacttctcattctgttttatcagagtgcatatatgtcctacttcaggaaaagtaaaacagtcatttacgaaagaaagtcaatctgtatcctaagcatttt

SEQ ID NO: 27183 - DNA, 672 bp, Homo sapiens
  source 1..672: mol_type = unassigned DNA
gtctttctggtggactgtgcagatcattctcgcctcgtggaatccaaagttgagcttaatgatatattgcagctcacttctcacactggcccctaatgctttaatgactgatgaaacaatatccaatgtgccaatccttatcttgggtaacaaaattgacagaacagatgcaatcagtgaagaaaaactccgtgagatatttgggctttatggacagaccacaggaaaggggaatgtgaccctgaaggagctgaatgctcgccccatggaagtgttcatgtgcagtgtgctcaagaggcaaggttacggcgagggtttccgctggctctcccagtatattgactgatgtttggacggtgaaaataaaagagttttacttctctggactgatcctattcacagcttcctcatgaacttttctaatagaacaaggaaagctctccaaccatgtctggcgttgagaagccaagagtctctgtcaactctctcattgcccagtggtgacatgtgctcttctccacactgttgggaggtaatgctgccccacgtgctggtgcaggtcagtatcctgggacttggaagctggcaggatttgccgggtaaagctgtatgccatcatggggcacctgaaaagaaaaacacgtctcaccactgtggttgattcaaaagaaa

SEQ ID NO: 27184 - DNA, 1082 bp, Homo sapiens
  source 1..1082: mol_type = unassigned DNA
agtgtgctctgagggagggtccgagccagccgctgttttgccggaggagcccctcaggccgtttggataatgcaggcaaaaccactcttcttcacatgctcaaagatgacagattgggccaacatgttccaacactacatccgacatcagaagagctaacaattgctggaatgacctttacaacttttgatcttggtgggcacgagcaagcacgtcgcgtttggaaaaattatctcccagcaattaatgggattgtctttctggtggactgtgcagatcattctcgcctcgtggaatccaaagttgagcttaatgctttaatgactgatgaaacaatatccaatgtgccaatccttatcttgggtaacaaaattgacagaacagatgcaatcagtgaagaaaaactccgtgagatatttgggctttatggacagaccacaggaaaggggaatgtgaccctgaaggagctgaatgctcgccccatggaagtgttcatgtgcagtgtgctcaagaggcaaggttacggcgagggtttccgctggctctcccagtatattgactgatgtttggacggtgaaaataaaagagttttacttctctggactgatcctattcacagcttcctcatgaacttttctaatagaacaaggaaagctctccaaccatgtctggcgttgagaagccaagagtctctgtcaactctctcattgcccagtggtgacatgtgctcttctccacactgttgggaggtaatgctgccccacgtgctggtgcaggtcagtatcctgggacttggaagctggcaggatttgccgggtaaagctgtatgccatcatggggcacctgaaaagaaaaacacgtctcaccactgtggttgattcaaaagaaagtgattctattttttaaagaaagcgttgttaatgtaattggtatccctcctaactttttgagttcacaatttacttggtccagagttttctattcttttttttttttaaactaatgaatgacatttagatacttcataaaattatgaacagatatggaggccagagctcatttgggtaaacttactcctgctg

SEQ ID NO: 27185 - DNA, 2314 bp, Homo sapiens
  source 1..2314: mol_type = unassigned DNA
gaggtcactctctctatctatgtcgcctcaagcagcagtggcacgcaaaggtcagtcagccctggccaggctgcgccctccccccggacagcactcaccgttggtgtagggagaccccgaggccaaggcggctccgttctgggcctggaggctggctggggcgccgccggaggccggtattcccggctgggacatgatgactgggttggaaggggctggtcggggtcgacaacagcgcacaagaagagagctgaaagaccactgctgaaagcggagggaggaggctaacgacttaagactgaagactgggagaagaggggggggcgcattaagcccgaggcatggcgccgcactctccccaggccaccggcggccacagcctagcctgggagctgaggcttgagagtcgggccggcggggccgcgaacgcccggctagaaggcggcagccaaacctagagagaaggagggaggccctggccggaagtgcctgtcagccgccggccgcgcagccgcaatcaggacacgtggcacttccggctccgggctcgcagcagccgccgccgcgccggcgaactcttctctgccagccgggctgccccgaggccacctgacagctcctggtgccccgaccccgacgaccgtgcccggcctcgccgccacgtcaccgactctcacggccggccggaagtgccgtgtgtcaccgctacggaaattcccgccgttgtgaacgtgacctcgctcgcagagccaggatcgtggggcaatctgagattcagtagccgctttcgtggggtgggactgacagttcctctcctcgggttttgtgaagattacctgagaccatagaagtcatcgtcctctgttgagaccgtaccaccactgggagctggggcggttaatgttcatcgcagtatttcattcacatttcgtcttcgtgtttcagatgtaaattataaggggttttaaaaagaggtggttaaatatgtgtacatgttaatagtgtgatcaagccaagaaggaggcctttgtctttgactggaggactcagaggaattttaattttgaaactcgctgattcacagcatagtcacgctcaagttcattagcacatttaaatggcagttttgtttcctcttctaagagtttacagtaaggaaaaacaacattgctacacatgctaaaagatgacagacttggacaacatgtcccaacattacatcccaatggagtctcgctctgtcacccaggctggagtgcagtggcacgatctcgactcactgcaacctccgcctcccaagttcacaccattctcctgcctcagcttcccgagtagctggaactacagcttccgaagaactgaccattgctggcatgacgtttacaacttttgatctgggtggacatgttcaagctcgaagagtgtggaaaaactaccttcctgctatcaatggcattgtatttctggtggattgtgcagaccacgaaaggctgttagagtcaaaagaagaacttgattcactaatgacagatgaaaccattgctaatgtgcctatactgattcttgggaataagatcgacagacctgaagccatcagtgaagagaggttgcgagagatgtttggtttatatggtcagacaacaggaaaggggagtatatctctgaaagaactgaatgcccgacccttagaagttttcatgtgtagtgtgctcaaaagacaaggttacggagaaggcttccgctggatggcacagtacattgattaacacaaactcacattggttccaggtctcaacgttcaggcttactcagagatttgattgctcaacatgcataacttgaattcaatagacttttgctggttataaaacagatgttttttagattattaatattaaatcaacttaatttgaatgagaattgaaaactgattcaagtaagtttgagtatcacaatgttagctttctaattccataaaagtacttggtttttacagtttataatctgacatcaccccagcgccatttgtaaagagcaactttccagcagtacatttgaagcactttttaacaacatgaaactataaaccatatttaaaagctcatcatgttaaattttttatgtacttttctggaactagtttttaaattttagattatatgtccacctatcttaagtgtacagttaataattagcttattcaatgattgcatgatgccttacagttttcaataactttttttcttatgcaaacgtcatgcaataaaacaaactctaatgtttggcaaaaaaaaaaaaaaaaaaaaaaaaaaaa

SEQ ID NO: 27186 - DNA, 6682 bp, Homo sapiens
  source 1..6682: mol_type = unassigned DNA
gagaccaggcggctgggagacccaggcggtgttaggggttgcgagcagcctcgctcaactggggaattggcggcaagactgccaggaggcggaacctagggcgctcggcgacgcggtcctgcggactgtcgctagtgaggcacccgccggcccggaaggggctgatgcgaactggggccacggcagccatcgcgctttgcagttcggtctcctggtgtacggccaacgccaagtaggggattgcgttccctccagtcgcagaccctatcagatttggatatgtccttcatatttgattggatttacagtggtttcagcagtgtgctacagtttttaggattatataagaaaactggtaaactggtatttcttggattggataatgcaggaaaaacaacattgctacacatgctaaaagatgacagacttggacaacatgtcccaacattacatcccacttccgaagaactgaccattgctggcatgacgtttacaacttttgatctgggtggacatgttcaagctcgaagagtgtggaaaaactaccttcctgctatcaatggcattgtatttctggtggattgtgcagaccacgaaaggctgttagagtcaaaagaagaacttgattcactaatgacagatgaaaccattgctaatgtgcctatactgattcttgggaataagatcgacagacctgaagccatcagtgaagagaggttgcgagagatgtttggtttatatggtcagacaacaggaaaggggagtatatctctgaaagaactgaatgcccgacccttagaagttttcatgtgtagtgtgctcaaaagacaaggttacggagaaggcttccgctggatggcacagtacattgattaacacaaactcacattggttccaggtctcaacgttcaggcttactcagagatttgattgctcaacatgcataacttgaattcaatagacttttgctggttataaaacagatgttttttagattattaatattaaatcaacttaatttgaatgagaattgaaaactgattcaagtaagtttgagtatcacaatgttagctttctaattccataaaagtacttggtttttacagtttataatctgacatcaccccagcgccatttgtaaagagcaactttccagcagtacatttgaagcactttttaacaacatgaaactataaaccatatttaaaagctcatcatgttaaattttttatgtacttttctggaactagtttttaaattttagattatatgtccacctatcttaagtgtacagttaataattagcttattcaatgattgcatgatgccttacagttttcaataactttttttcttatgcaaacgtcatgcaataaaacaaactctaatgtttggcatccttgttgggcaaatgtttcatttaaatgtgtcttatctagctagtatactctgaaaatttgagtatttaatattaggcatatgaagtggttgttgggaaaggagattccttcagaatatttagaatagcgtttaaggctctcaaggcttaggtatttaccatgagatggttgtggtcagttgcacctgataccatgtatccctgaatcatgtgtatttttattagtaatgcagccactaccattgctgatggggtctgtgtcctagtccctgtgggattggccttctgaagaaaagcacatttatggtacacaaggttgattctcagtttggtaggctctatagttccatcccagctgtctaattctgaagtgctccagtcttattggtgcccaatggggtaatctgtgcctcttccccaaaagcaatgacaggcaccagtgtctccacatttagatatattcccagtctctgtacatttaacagtactctctggggcaagcaataagtaggaccttgtgtgcagtttcattgtagagacatgtatatctgaggaataaaacagcttgttctgtgtcagtctgagatatgtggagattttgttcctatcctatagctcttttgtattctttggcatattttatatcctggtagaagaaaacaagtgcttgtttccaattttcttttttcttatttgctctcaggtagttcttactccatacaacaaagactttttgtttgttgggctttttttttttttttttttttgctctgtttcattttgttttagagacggggtttcaccatgttgtccaggctggtctcaaactcctgacctcaagtgatctgcccgccttggcctcccaaagttctgggattataggcgtgagctaccatgcctgacctgacttttgtttttagatattatgcttgccatgtgatagggcctgcaagcctcattgctaggcttactaagaaaattttagtttttcaaaagcattataatttcctaagaaactgaattctttttttatatgtttgagattcccatcattagtaatataagatgaaaggtaagtgccaaaaatgtatttttaaagaccctcaagtttaagatttatcctgattataagccaagttttatagtatatttaaccaattccatcaagaataattttaatatcaaaaattagtgttttctgtagccattgtccatgtcagagttacagtcctttttgtcattgataatataacctatgaagcagataaggattgaggaatatgactggaaggaattactatttagctaagctgacaaggtcgcttcttaagatgacatttggtttcagtaatctgactattctgttttcactttcatcttctttctaaatgaaaacaaaagtgctccctcccttcctggaaacctcagtaacactatgggaaaagtagaacatgacattgcagcctattgatttcttcttccagataggtttaaagtactccttaagttctgactaaatagaactaagccttattaaaaataactgcctcttgttcatgttatctgtaccttcagggacctgcctttcttcaagtatttcctagagtatctattatgatactgaagaagctaattatttgtgttgtaaatgggtataaatgaaaaaaaaacatactggtttctctagccaggaaaaatgctttctggtgtaatatatcttgctccagaaccctcattctaattgtaacactaggatcaaagaaacaaagtcactttgtggaccacagctaaactgtggatattttcccaaagacataagatttttatggcccgagcctctagaaaggaagccatgtttaggagcaaccagctttcctcccagctttagggggcagagttcctgagccagaggacttactgtccagctttgagaacctctccagagtatatgcactgggtactgctctttttcaagagaaccaaattaagaggatggcaagaaacagtagaagcacagaggaaagacaactctgcatgtgcctgtgtgaatgtgtgcatccatggagtatttcccaggtaaatactagtactggggacataggctaattgtgtgtcccacactgcaagatgctagggcgtagttaacactgtggtatacatacaaatcaggcactgtccaaaagattttttaaaatctaaagtctgaaatgtaaaaatataaggtctcaacccacttttacacttttaaagagatcccatacctgtttcactgactgccgttaattacacttttggatcacagctggttaaattgatagatttcagtttatctcagtgaatttttagaatggagattatagcattttttaattggagaacagacatttcctaaagtatatgaaaaaaaattattcactgttggtttaaaccagtatctttgtatgagtgccaaagatatatgaacacagatactgcctgtgcagacctaaattttagttttgtgtacctggatccatatacaaattttttgtggtttatagcataaaagcagaacgttgtttctttcttagttttcaaccggctcatcttttgtttttgttttttgtttttttgttttttgttttttttgagatggagtcttgctttgttgcccaggctagagtgcagtggcacaatctctgcttactgcaacctccacctccggggttcaagtgattctcctgcctcagcctcctgagtagctgggactacaggcgcgcaccaccatgcccggctaatttttgtatttttagtagagatggggtttcactatgttggccaggctggtctcgaactcctgacctcgtgatctgcccacctcagcctcccaaagtgctgggattacaggcgtgagccgccatgcccggccaattttcaactggcccatactttatagtgatggaaagcgcataaactacttgtaaatcattaaaatagggtgataactgtgataatagtgtttcttgcattctagaaaattattttattaactacattcaaaacccagcatttcacaggttccatcattagaaacagtatagttctagttaacatgattggagagtttcaggggaaaggtttacattttctgaaactgtatttggtatgtgactcaatgtggtatttcagtcttgttagtcacttacatgactgacgtttgcaaggatttattgccaagtaaaatttgaccagagtgcactgagaatagctacataaggggaaatctctcaaaattccttctgttcatttaatttggagcatattgtttaaatcattttaaacatatgtaaaaagttgaagcattaaaaaatcttcaagaaacaatgaaaaaatagaaattagcaaacataagtttcttaatgcaaaattaatagtgaataaaatatagcctacattaaaagccagaggctttgctataaatataagagtttagaaaaacagtgtgcttcaattaaggactaaattatcaaaactgcatgtttgttttttcttttcttttcttttttttttgagatgaagtctcactctgttgcccaggctggagtgcagtggtgcgatcttggctcactgcaacctctgcttcccaggttcaagcgattctcgtgcctcaccatcccgagtagctgggattacaggtgcaccacaccatgcccagttaatttttgtatttttagtagagacagggtttcattatttggccaggctggtctcgagctcctgatcttaagtgatccactcgcctcggcctcccaaagtgctgggattatacacatgagccactgtgcccagcctaaaactacatgttgaagcttccggtcatttccattattatccttcttttgaaattcaagttagtgctttttaaccaaataaaagaagaaccagctcttgggatatgtgactctgcctctgtataaagtgactggaattttgttaaaaccgtgtttccacttctgaaccctgttaccattccccctcacaaatccccacccaacacctggattttaaagatcctccagtgtcaagggaagccacagagtctattaaagaggcagttctgaaccaattaatttttgtccttataatttagagcattaaatagctaatatatttaatggcactaattgttgttcacggctttcatcatacttttaaacagaatccaaagtattcaaaggaaagtaagcgaagttatccaaagccaactttgtttcaggtgtgtcccctgccccaaatagattttagggcagaaatagaaaactgagtttacacagaactatttttggaaaagctgcactggagtagatggattcttcttcagcatacttttttgtttgtttgtttgagatggagtcttgctttgtcacccaggctggagtgcagtggtgtgatctccactcactgcaacctccacctcccagcttcaagtgattctcctgcctcaaccttccaagtagcttggattacaggcgtgcgccaccacagctggctaatatttgtattgttagtagagacagggtttcaccatgttgtccaggcttgtcgaacttctgacctcacgtgatccacctgcctcagcctcccaaagtgctagattataggcgtgaaccactgcgcccggccagcatgcattttaaaagtggcttagatttagttttaaatattttggggtgaaaggcaggaacagttctgtttttgacatacaggttttctttgggattgttttcattttcaagtatagattcatgtcagaatggccaacttaacgtgggtttctgtattccctggtgttgctcttaacctgaactcataatcagttgccatactgaggcaagagcactcagggtgaacatagtcaagttactttaaaagtgataaaagtgtttttccatggtgaaaccttcagtatttggctgaatgtaaagtatgttgaagtggtatattgatggtaagttgttaatcactaaccttgtttgcacttttgtacaccactgcttgcactaggatcttggtgtgaattttcaattgttttacagtgtatacagattattaaggataatttatataaagatgtttctgtttaactttgtgtgttttacaacaaagagctataatagatggttaaacgtttttgaattgtgtttatatgttagtttgattatgttctattatcttttcacctgccatgaatttgagtgttaggaagggaaaaataaaatactaatctggtcttgaagaactcta

SEQ ID NO: 27187 - DNA, 929 bp, Homo sapiens
  source 1..929: mol_type = unassigned DNA
gtgtacggccaacgccaagtaggggattgcgttccctccagtcgcagagtttccctcttgtcgcccaggctggagtgaagtggcacgatctcggcttactgcaagctccgcctcccgggttcacgccattctcctgcctcagcctcccgagtagctgggactacagaccctatcagatttggatatgtccttcatatttgattggatttacagtggtttcagcagtgtgctacagtttttaggattatataagaaaactggtaaactggtatttcttggattggataatgcaggaaaaacaacattgctacacatgctaaaagatgacagacttggacaacatgtcccaacattacatcccacttccgaagaactgaccattgctggcatgacgtttacaacttttgatctgggtggacatgttcaagctcgaagagtgtggaaaaactaccttcctgctatcaatggcattgtatttctggtggattgtgcagaccacgaaaggctgttagagtcaaaagaagaacttgattcactaatgacagatgaaaccattgctaatgtgcctatactgattcttgggaataagatcgacagacctgaagccatcagtgaagagaggttgcgagagatgtttggtttatatggtcagacaacaggaaaggggagtatatctctgaaagaactgaatgcccgacccttagaagttttcatgtgtagtgtgctcaaaagacaaggttacggagaaggcttccgctggatggcacagtacattgattaacacaaactcacattggttccaggtctcaacgttcaggcttactcagagatttgattgctcaacatgcataacttgaattcaatagacttttgctggttataaaacagatgttttttagattattaatattaaatcaacttaatttgaa

SEQ ID NO: 27188 - DNA, 548 bp, Homo sapiens
  source 1..548: mol_type = unassigned DNA
gatgcgaactggggccacggcagccatcgcgctttgcagttcggtctcctggtgtacggccaacgccaagtaggggattgcgttccctccagtcgcagacagagtttccctcttgtcgcccaggctggagtgaagtggcacgatctcggcttactgcaagctccgcctcccgggttcacgccattctcctgcctcagcctcccgagtagctgggactacagaccctatcagatttggatatgtccttcatatttgattggatttacagtggtttcagcagtgtgctacagtttttaggattatataagaaaactggtaaactggtatttcttggattggataatgcaggaaaaacaacattgctacacatgctaaaagatgacagacttggacaacatgtcccaacattacatcccacttccgaagaactgaccattgctggcatgacgtttacaacttttgatctgggtggacatgttcaagctcgaagagtgtggaaaaactaccttcctgctatcaatggcattgtatttctggtggattgtgca

SEQ ID NO: 27189 - DNA, 708 bp, Homo sapiens
  source 1..708: mol_type = unassigned DNA
tgctgagaaaggtaaaaacaccttcaaataaggaagaggaacaggctatgacctaatgcttgcttggaccagtgtaacttccgaagaactgaccattgctggcatgacgtttacaacttttgatctgggtggacatgttcaagctcgaagagtgtggaaaaactaccttcctgctatcaatggcattgtatttctggtggattgtgcagaccacgaaaggctgttagagtcaaaagaagaacttgattcactaatgacagatgaaaccattgctaatgtgcctatactgattcttgggaataagatcgacagacctgaagccatcagtgaagagaggttgcgagagatgtttggtttatatggtcagacaacaggaaaggggagtatatctctgaaagaactgaatgcccgacccttagaagttttcatgtgtagtgtgctcaaaagacaaggttacggagaaggcttccgctggatggcacagtacattgattaacacaaactcacattggttccaggtctcaacgttcaggcttactcagagatttgattgctcaacatgcataacttgaattcaatagacttttgctggttataaaacagatgttttttagattattaatattaaatcaacttaatttgaatgagaattgaaaactgattcaagtaagtttgagtatcacaatgttagctttctaattccataaa

SEQ ID NO: 27190 - DNA, 670 bp, Homo sapiens
  source 1..670: mol_type = unassigned DNA
cggccaacgccaagtaggggattgcgttccctccagtcgcaggcttttcaccattctttagctctcacctaccaacaatcatcttcagtgaggactttgccacttgattcacagtctgtatcagtgccctccagtcttccagaccctatcagatttggatatgtccttcatatttgattggatttacagtggtttcagcagtgtgctacagtttttaggattatataagaaaactggtaaactggtatttcttggattggataatgcaggaaaaacaacattgctacacatgctaaaagatgacagacttggacaacatgtcccaacattacatcccacttccgaagaactgaccattgctggcatgacgtttacaacttttgatctgggtggacatgttcaagctcgaagagtgtggaaaaactaccttcctgctatcaatggcattgtatttctggtggattgtgcagaccacgaaaggctgttagagtcaaaagaagaacttgattcactaatgacagatgaaaccattgctaatgtgcctatactgattcttgggaataagatcgacagacctgaagccatcagtgaagagaggttgcgagagatgtttggtttatatggtcagacaacaggaaaggggagtatatctctgaaagaactgaatgcc

SEQ ID NO: 27191 - DNA, 2287 bp, Homo sapiens
  source 1..2287: mol_type = unassigned DNA
gaggtcactctctctatctatgtcgcctcaagcagcagtggcacgcaaaggtcagtcagccctggccaggctgcgccctccccccggacagcactcaccgttggtgtagggagaccccgaggccaaggcggctccgttctgggcctggaggctggctggggcgccgccggaggccggtattcccggctgggacatgatgactgggttggaaggggctggtcggggtcgacaacagcgcacaagaagagagctgaaagaccactgctgaaagcggagggaggaggctaacgacttaagactgaagactgggagaagaggggggggcgcattaagcccgaggcatggcgccgcactctccccaggccaccggcggccacagcctagcctgggagctgaggcttgagagtcgggccggcggggccgcgaacgcccggctagaaggcggcagccaaacctagagagaaggagggaggccctggccggaagtgcctgtcagccgccggccgcgcagccgcaatcaggacacgtggcacttccggctccgggctcgcagcagccgccgccgcgccggcgaactcttctctgccagccgggctgccccgaggccacctgacagctcctggtgccccgaccccgacgaccgtgcccggcctcgccgccacgtcaccgactctcacggccggccggaagtgccgtgtgtcaccgctacggaaattcccgccgttgtgaacgtgacctcgctcgcagagccaggatcgtggggcaatctgagattcagtagccgctttcgtggggtgggactgacagttcctctcctcgggttttgtgaagattacctgagaccatagaagtcatcgtcctctgttgagaccgtaccaccactgggagctggggcggttaatgttcatcgcagtatttcattcacatttcgtcttcgtgtttcagatgtaaattataaggggttttaaaaagaggtggttaaatatgtgtacatgttaatagtgtgatcaagccaagaaggaggcctttgtctttgactggaggactcagaggaattttaattttgaaactcgctgattcacagcatagtcacgctcaagttcattagcacatttaaatggcagttttgtttcctcttctaagagtttacagtaaggaaaaacaacattgctacacatgctaaaagatgacagacttggacaacatgtcccaacattacatcccaatggagtctcgctctgtcacccaggctggagtgcagtggcacgatctcgactcactgcaacctccgcctcccaagttcacaccattctcctgcctcagcttcccgagtagctggaactacagcttccgaagaactgaccattgctggcatgacgtttacaacttttgatctgggtggacatgttcaagctcgaagagtgtggaaaaactaccttcctgctatcaatggcattgtatttctggtggattgtgcagaccacgaaaggctgttagagtcaaaagaagaacttgattcactaatgacagatgaaaccattgctaatgtgcctatactgattcttgggaataagatcgacagacctgaagccatcagtgaagagaggttgcgagagatgtttggtttatatggtcagacaacaggaaaggggagtatatctctgaaagaactgaatgcccgacccttagaagttttcatgtgtagtgtgctcaaaagacaaggttacggagaaggcttccgctggatggcacagtacattgattaacacaaactcacattggttccaggtctcaacgttcaggcttactcagagatttgattgctcaacatgcataacttgaattcaatagacttttgctggttataaaacagatgttttttagattattaatattaaatcaacttaatttgaatgagaattgaaaactgattcaagtaagtttgagtatcacaatgttagctttctaattccataaaagtacttggtttttacagtttataatctgacatcaccccagcgccatttgtaaagagcaactttccagcagtacatttgaagcactttttaacaacatgaaactataaaccatatttaaaagctcatcatgttaaattttttatgtacttttctggaactagtttttaaattttagattatatgtccacctatcttaagtgtacagttaataattagcttattcaatgattgcatgatgccttacagttttcaataactttttttcttatgcaaacgtcatgcaataaaacaaactctaatgtttggca

SEQ ID NO: 27192 - DNA, 455 bp, Homo sapiens
  source 1..455: mol_type = unassigned DNA
ggaaggaggaagtaacttgtggaatgctgagaaagcttccgaagaactgaccattgctggcatgacgtttacaacttttgatctgggtggacatgttcaagctcgaagagtgtggaaaaactaccttcctgctatcaatggcattgtatttctggtggattgtgcagaccacgaaaggctgttagagtcaaaagaagaacttgattcactaatgacagatgaaaccattgctaatgtgcctatactgattcttgggaataagatcgacagacctgaagccatcagtgaagagaggttgcgagagatgtttggtttatatggtcagacaacaggaaaggggagtatatctctgaaagaactgaatgcccgacccttagaagttttcatgtgtagtgtgctcaaaagacaaggttacggagaaggcttccgctggatggcacagtacattgattaac

SEQ ID NO: 27193 - DNA, 5581 bp, Homo sapiens
  source 1..5581: mol_type = unassigned DNA
cagtcaccatgagggcgctggtcctgctcggctgcctcctggcctcgctcctgttctcaggacaagcagaactgcaagtctccgcgtcgggtggcacagaagatgttggcaatttgttggagaatcatttctctgctggagacgcaagtctagaggagaaagaaagggcgctttatgcagacacagcccctcaagacaagaaactgctccttcactacccagatggcagggaggccgagagccccaagaagacccccgcgtctgccgccagcgcgggccccgatcctgaagccagcctctccaatgcctcagccacagagtcacctccacctggggaaagggacgacagggacgctgcggggcctggggaggaaaagaatggcccaccagtggcaagcgccctccctccaggaggggccaaggggcctgtggaagaggagtggccggagcccagttctggagagggacaaggagaggaggagactgggtttgggctccccacggagggaactgccagtggagaggcaggaggacaggctgggggccatgaactccccgaggaagtccaggaggtccaaggggacagcctggtgcagggagcagtagcagggacagcagagccaaaggcagagggggcctctcctcactcagagggtgatggggtcggcccactgaacgcagaggccgagggcagccctgggcctggcgaggagcctgcagtgccagagggagcccctgacgtcgcggctgttgggggagagtcggagccagatattgacacacaagccagtgagggcaccgaggaccagggggagcccggcccagctgcagaggccagtgcagagcctgggggcgcccaaagcgttaaggcaggggacactgaggagaaccagtccccagagatgactgaggaggacgcagatgaagcctcctctgaagaggaaagtggtgatggaagtggaagcgaggaagaaggaggagttccctccgaagaggagtccgaagaggacagcggcgatggggctagctcagaagaagcagagggcgcctccgaggaggccacggagccccaggaggctggggagccccaggaagccagggagccccaggaaggcggggatctgcaggaagccgaggagtcccaggaaggcggggatccccaggaagccgaggagccccaggaaggtggagcgccacaggaaggcggggagccccaggaaggtggggatccccaggaagccagggagccccaggaagccagggaaccccaggaaggtgcagagcttccggaagccacaggaaccacaagtcacagggacagaggggcccagcctggcccggaggaattgaatacagagtccatgggcagtgagaccctggatatgaaggcagaggagcccgaggagggacatcagagggagagtcccatcattgttgcccaggaagagacggaggatgcaaatgaagaagccccattgagggaccgctcccacatcgagaagaccctcatgctgaatgaggacaagccatccgatgactactctgcggtgctgcagcggcttcggaagatctaccactcatccatcaagcctctggagcagtcctacaagtacaatgagctccggcagcatgagatcacagatggagagattacctccaagcccatggtactgttcctgggaccgtggagtgttggtaaatctaccatgataaactacctccttgggctggaaaatactcgctatcagctctatacaggcgctgaacccaccacctctgagttcacggtcctcatgcatgggcctaagctgaaaaccatcgagggcatcgtcatggctgctgacagcgcccgttccttctcaccccttgagaagtttggccagaatttcctagagaagctgattggcattgaggttccccacaaacttctggagagggtcacttttgtggatacaccaggcatcatcgagaaccgcaagcagcaagaaagaggctaccccttcaacgacgtgtgccagtggttcatcgacagagctgacctcatctttgtcgtctttgacccaacaaagctggatgtgggtctagagctggagatgctcttccgccagttgaaggggcgtgaatcccagataaggatcatcctgaacaaggctgacaatctggccacccaaatgctcatgcgggtttacggggccctcttctggagcttggcccctctcatcaatgtcacagagcccccaagggtttacgtcagctccttctggccacaagagtataagccggacacccatcaggaactgttcctccaagaagagatctccctcctagaagacctgaatcaggtgatcgagaacagactggagaacaagattgccttcatccgccagcacgccatccgggtccgcatccacgccctcctggttgaccgctacctgcagacttacaaggacaaaatgaccttcttcagtgatggagaactggtctttaaggacattgtggaagatcccgataaattctacatcttcaagaccatcctggcaaagaccaatgtcagcaaatttgaccttcccaaccgcgaggcctataaggacttcttcggcatcaatcccatttccagtttcaaactgctctcccagcagtgctcctacatgggaggttgctttctggagaagattgagcgggccatcactcaggagcttccgggcctcctgggtagcctcgggctcgggaagaatccaggtgctctcaactgtgacaaaacagggtgtagcgaaacaccaaaaaatcgctacaggaagcactaggtggtggagcggtccttgggttcctgttggtgaatcagcttgtgtcctaactgtctgagaggtcctggtttattaaccctttgagccacactggcaggaattattacacagtggagagttgggagttcattgaggccaggggtcggggcaggtgtgtgggtctagggaggagagtggaaactgtgaattcctgtgtgcttgtcttgttgcttcaatgaggaggcctgattgaggcaagtcagcctccacctgcttttcctgggtcctgtcttggaaggacagagagcagctaaattctagtgtatcttaaatcagtgagggtcaaataagctaaaagcagctgaaattcctttgttccctgtgagctgggaaaacagcgaaggcctgagtcgtagagattgtcaggtccattttggcttctttccacacccacagtctcgcgtttgttccccagccctcggctgcctcttaactttgggttgactttcaacagtgaatagtctcttgggtctgaatatacctgggtttgtttttgtgtttttgagacggagtctcgctctgtcggccaggttggagtgcagtggtgcaatctcagctcactgcaacctccccctcctgggttcaagcgattctcctgcctcagcctcctgagtagctgagattataggcctaccaccatgcccagccaatttttgtatttttagtagaaacgggacttcaccatgttgcccaggctggcctcgaactcctgacctcaagtgatccacccgcctcggcctcccaaagtgctgggattacaggcatgagctgccgcacccggcctccacctgggttttgagccaatcccccggacttgctcctggtttcctcaaggggtggggcagtggtttaggacactcgacaactaagaacaggagttcccaggaaggacaaggatctgcctcccccactgccacttctctgatgtgttcctcaaagctggctcgagggctcgatcccttcatcggacccaggaggggactggttggtgtatccaggtaatttactcttggaagtgactgtagtgaaggtcgtggaagggctcagagggttaattggtttgcagtgcgtctttgtctattgcatgtcttggaaaactcagatcccaaaggcgctgggtttcagagaggacagtggagaccttgctccttttccttaggccgccagtctctcaaatttcagaggaggctgtttccacaactcccctgtggaaacacttggcagcggagttgctcctttgcagtttccacaccatggcttttcctttcctttcttctccattccctgatgcatcaacacttacttggagcaatttcctaggagtcagaaccagcaccagccactcggtgtcggtggccaccaaggcttaacattgaccttcccgcctgaccttgatgcagatgtccactgaacacaccgcaggaaagccagggccttcaataccaataagtgtgaatatgtgtgtatgttgtccaagagagattagggagatcacatagactctagggagtagagaacttgtaacagtcttgcaaggctagcatgcacggctccacagcaggtggtggggagcagaggggcaggacctgcagggaagaagcagcctttggatggtgaaatgtgcatggtgcacagtctgtgcatgcccaggagacccagcccgggctgcctcgaggggctcctttgtacacagccagccgcttctcttgggaacaagctgtcctgggggccttacccacgaggcaggagtcaggatgcaccagctcagcaccaggaagtcatcctggacccaggacagtggaaaggcaggcagagggagaggcactctgaggtcaggcagggtaagccagttggcagtcaggttaggtctatgaggagaacctcgagttaggaattcccggttctcagaattgttatcactctggtgcatgctgtcacaggggccgttgcgtttggctttgtggagggcctggacccttccacaagaacacccgaggttccagggcactcaggacaatgtttccaaggaacgagtcgaccaggaaagaacagtgagttctgcaaggggcatccacggagcctgtgataggggctgatgagatggaatctgtcctggacttttcttctcattaaccaccctccgcaaaccccagaacccctcgcctcatctctgtactgtctgccctcttgggggatgggccctcccactttcccctgcctgctcctccatgctgtgagctgctttggcagatctgtttttctgtgtagtcaggggaaaaacaaaaaaagatgcacaactgtgtgggcattgtcatagctgttggtgtcaccactgctttgggggaaatggctgggatgaggctaatacattcatgcaatatttatattttcagggggctgcgttatcagcatgctctccctgccttgggcttttctttccgtcatgttttccttttcgtgttccttctctgatttctcttgtctctgctgctcacaggcctgcccatcagtcagtacagatactcagtgtctggtttctggccagctccgtggagggggctttaagcagaattctgactctttggggtgggggattaggaactgggggaaacttaatgatccagagattcccccaagaggagtgtctggaaggatctgtgcctggacagtggcagaacctttccagtgttcttttggttctgatttcatcagtctcaataaagttccgatctctcttt

SEQ ID NO: 27194 - DNA, 4212 bp, Homo sapiens
  source 1..4212: mol_type = unassigned DNA
cttggcagtcaccatgagggcgctggtcctgctcggctgcctcctggcctcgctcctgttctcaggacaagcagaagagacggaggatgcaaatgaagaagccccattgagggaccgctcccacatcgagaagaccctcatgctgaatgaggacaagccatccgatgactactctgcggtgctgcagcggcttcggaagatctaccactcatccatcaagcctctggagcagtcctacaagtacaatgagctccggcagcatgagatcacagatggagagattacctccaagcccatggtactgttcctgggaccgtggagtgttggtaaatctaccatgataaactacctccttgggctggaaaatactcgctatcagctctatacaggcgctgaacccaccacctctgagttcacggtcctcatgcatgggcctaagctgaaaaccatcgagggcatcgtcatggctgctgacagcgcccgttccttctcaccccttgagaagtttggccagaatttcctagagaagctgattggcattgaggttccccacaaacttctggagagggtcacttttgtggatacaccaggcatcatcgagaaccgcaagcagcaagaaagaggctaccccttcaacgacgtgtgccagtggttcatcgacagagctgacctcatctttgtcgtctttgacccaacaaagctggatgtgggtctagagctggagatgctcttccgccagttgaaggggcgtgaatcccagataaggatcatcctgaacaaggctgacaatctggccacccaaatgctcatgcgggtttacggggccctcttctggagcttggcccctctcatcaatgtcacagagcccccaagggtttacgtcagctccttctggccacaagagtataagccggacacccatcaggaactgttcctccaagaagagatctccctcctagaagacctgaatcaggtgatcgagaacagactggagaacaagattgccttcatccgccagcacgccatccgggtccgcatccacgccctcctggttgaccgctacctgcagacttacaaggacaaaatgaccttcttcagtgatggagaactggtctttaaggacattgtggaagatcccgataaattctacatcttcaagaccatcctggcaaagaccaatgtcagcaaatttgaccttcccaaccgcgaggcctataaggacttcttcggcatcaatcccatttccagtttcaaactgctctcccagcagtgctcctacatgggaggttgctttctggagaagattgagcgggccatcactcaggagcttccgggcctcctgggtagcctcgggctcgggaagaatccaggtgctctcaactgtgacaaaacagggtgtagcgaaacaccaaaaaatcgctacaggaagcactaggtggtggagcggtccttgggttcctgttggtgaatcagcttgtgtcctaactgtctgagaggtcctggtttattaaccctttgagccacactggcaggaattattacacagtggagagttgggagttcattgaggccaggggtcggggcaggtgtgtgggtctagggaggagagtggaaactgtgaattcctgtgtgcttgtcttgttgcttcaatgaggaggcctgattgaggcaagtcagcctccacctgcttttcctgggtcctgtcttggaaggacagagagcagctaaattctagtgtatcttaaatcagtgagggtcaaataagctaaaagcagctgaaattcctttgttccctgtgagctgggaaaacagcgaaggcctgagtcgtagagattgtcaggtccattttggcttctttccacacccacagtctcgcgtttgttccccagccctcggctgcctcttaactttgggttgactttcaacagtgaatagtctcttgggtctgaatatacctgggtttgtttttgtgtttttgagacggagtctcgctctgtcggccaggttggagtgcagtggtgcaatctcagctcactgcaacctccccctcctgggttcaagcgattctcctgcctcagcctcctgagtagctgagattataggcctaccaccatgcccagccaatttttgtatttttagtagaaacgggacttcaccatgttgcccaggctggcctcgaactcctgacctcaagtgatccacccgcctcggcctcccaaagtgctgggattacaggcatgagctgccgcacccggcctccacctgggttttgagccaatcccccggacttgctcctggtttcctcaaggggtggggcagtggtttaggacactcgacaactaagaacaggagttcccaggaaggacaaggatctgcctcccccactgccacttctctgatgtgttcctcaaagctggctcgagggctcgatcccttcatcggacccaggaggggactggttggtgtatccaggtaatttactcttggaagtgactgtagtgaaggtcgtggaagggctcagagggttaattggtttgcagtgcgtctttgtctattgcatgtcttggaaaactcagatcccaaaggcgctgggtttcagagaggacagtggagaccttgctccttttccttaggccgccagtctctcaaatttcagaggaggctgtttccacaactcccctgtggaaacacttggcagcggagttgctcctttgcagtttccacaccatggcttttcctttcctttcttctccattccctgatgcatcaacacttacttggagcaatttcctaggagtcagaaccagcaccagccactcggtgtcggtggccaccaaggcttaacattgaccttcccgcctgaccttgatgcagatgtccactgaacacaccgcaggaaagccagggccttcaataccaataagtgtgaatatgtgtgtatgttgtccaagagagattagggagatcacatagactctagggagtagagaacttgtaacagtcttgcaaggctagcatgcacggctccacagcaggtggtggggagcagaggggcaggacctgcagggaagaagcagcctttggatggtgaaatgtgcatggtgcacagtctgtgcatgcccaggagacccagcccgggctgcctcgaggggctcctttgtacacagccagccgcttctcttgggaacaagctgtcctgggggccttacccacgaggcaggagtcaggatgcaccagctcagcaccaggaagtcatcctggacccaggacagtggaaaggcaggcagagggagaggcactctgaggtcaggcagggtaagccagttggcagtcaggttaggtctatgaggagaacctcgagttaggaattcccggttctcagaattgttatcactctggtgcatgctgtcacaggggccgttgcgtttggctttgtggagggcctggacccttccacaagaacacccgaggttccagggcactcaggacaatgtttccaaggaacgagtcgaccaggaaagaacagtgagttctgcaaggggcatccacggagcctgtgataggggctgatgagatggaatctgtcctggacttttcttctcattaaccaccctccgcaaaccccagaacccctcgcctcatctctgtactgtctgccctcttgggggatgggccctcccactttcccctgcctgctcctccatgctgtgagctgctttggcagatctgtttttctgtgtagtcaggggaaaaacaaaaaaagatgcacaactgtgtgggcattgtcatagctgttggtgtcaccactgctttgggggaaatggctgggatgaggctaatacattcatgcaatatttatattttcagggggctgcgttatcagcatgctctccctgccttgggcttttctttccgtcatgttttccttttcgtgttccttctctgatttctcttgtctctgctgctcacaggcctgcccatcagtcagtacagatactcagtgtctggtttctggccagctccgtggagggggctttaagcagaattctgactctttggggtgggggattaggaactgggggaaacttaatgatccagagattcccccaagaggagtgtctggaaggatctgtgcctggacagtggcagaacctttccagtgttcttttggttctgatttcatcagtctcaataaagttccgatctctcttt

SEQ ID NO: 27195 - DNA, 1814 bp, Homo sapiens
  source 1..1814: mol_type = unassigned DNA
agacagcgcgtcagtgacaggcacacccgggccagggtcctctcctttcctcagcccgtctctctgtgacagaccctgcctgcactcccaagcccctctctccctgtacgaagagacggaggatgcaaatgaagaagccccattgagggaccgctcccacatcgagaagaccctcatgctgaatgaggacaagccatccgatgactactctgcggtgctgcagcggcttcggaagatctaccactcatccatcaagcctctggagcagtcctacaagtacaatgagctccggcagcatgagatcacagatggagagattacctccaagcccatggtactgttcctgggaccgtggagtgttggtaaatctaccatgataaactacctccttgggctggaaaatactcgctatcagctctatacaggcgctgaacccaccacctctgagttcacggtcctcatgcatgggcctaagctgaaaaccatcgagggcatcgtcatggctgctgacagcgcccgttccttctcaccccttgagaagtttggccagaatttcctagagaagctgattggcattgaggttccccacaaacttctggagagggtcacttttgtggatacaccaggcatcatcgagaaccgcaagcagcaagaaagaggctaccccttcaacgacgtgtgccagtggttcatcgacagagctgacctcatctttgtcgtctttgacccaacaaagctggatgtgggtctagagctggagatgctcttccgccagttgaaggggcgtgaatcccagataaggatcatcctgaacaaggctgacaatctggccacccaaatgctcatgcgggtttacggggccctcttctggagcttggcccctctcatcaatgtcacagagcccccaagggtttacgtcagctccttctggccacaagagtataagccggacacccatcaggaactgttcctccaagaagagatctccctcctagaagacctgaatcaggtgatcgagaacagactggagaacaagattgccttcatccgccagcacgccatccgggtccgcatccacgccctcctggttgaccgctacctgcagacttacaaggacaaaatgaccttcttcagtgatggagaactggtctttaaggacattgtggaagatcccgataaattctacatcttcaagaccatcctggcaaagaccaatgtcagcaaatttgaccttcccaaccgcgaggcctataaggacttcttcggcatcaatcccatttccagtttcaaactgctctcccagcagtgctcctacatgggaggttgctttctggagaagattgagcgggccatcactcaggagcttccgggcctcctgggtagcctcgggctcgggaagaatccaggtgctctcaactgtgacaaaacagggtgtagcgaaacaccaaaaaatcgctacaggaagcactaggtggtggagcggtccttgggttcctgttggtgaatcagcttgtgtcctaactgtctgagaggtcctggtttattaaccctttgagccacactggcaggaattattacacagtggagagttgggagttcattgaggccaggggtcggggcaggtgtgtgggtctagggaggagagtggaaactgtgaattcctgtgtgcttgtcttgttgcttcaatgaggaggcctgattgaggcaagtcagcctccacctgcttttcctgggtcctgtcttggaaggacagagagcagctaaattctagtgtatcttaaatcagtgagggtcaaataagctaaaagcagctg

SEQ ID NO: 27196 - DNA, 1432 bp, Homo sapiens
  source 1..1432: mol_type = unassigned DNA
ctctgtcactcaccgggcgggccaggccgggcagccatggctgagacactcttctggactcctctcctcgtggttctcctggcagggctgggggacaccgaggcccagcagaccacgctacacccacttgtgggccgtgtctttgtgcacaccttggaccatgagacgtttctgagccttcctgagcatgtcgctgtcccacccgctgtccacatcacctaccacgcccacctccagggacacccagacctgccccggtggctccgctacacccagcgcagcccccaccaccctggcttcctctacggctctgccaccccagaagatcgtgggctccaggtcattgaggtcacagcctacaatcgggacagctttgataccactcggcagaggctggtgctggagattggggacccagaaggccccctgctgccataccaagccgagttcctggtgcgcagccacgatgcggaggaggtgctgccctcaacacctgccagccgcttcctctcagccttggggggactctgggagcccggagagcttcagctgctcaacgtcacctctgccttggaccgtgggggccgtgtcccccttcccattgagggccgaaaagaaggggtatacattaaggtgggttctgcctcacctttttctacttgcctgaagatggtggcatcccccgatagccacgcccgctgtgcccagggccagcctccacttctgtcttgctacgacaccttggcaccccacttccgcgttgactggtgcaatgtgaccctggtggataagtcagtgccggagcctgcagatgaggtgcccaccccaggtgatgggatcctggagcatgacccgttcttctgcccacccactgaggccccagaccgtgacttcttggtggatgctctggtcaccctcctggtgcccctgctggtggccctgcttctcaccttgctgctggcctatgtcatgtgctgccggcgggagggaaggctgaagagagacctggctacctccgacatccagatggtccaccactgcaccatccacgggaacacagaggagctgcggcagatggcggccagccgcgaggtgccccggccactctccaccctgcccatgttcaatgtgcacacaggtgagcggctgcctccccgcgtggacagcgcccaggtgcccctcattctggaccagcactgacagcctagccagtggttccaggtccagccctgacttcatcctcccttctctgtccacaccacgagtggcacatcccacctgctgattccagctcctggccctcctggaacccaggctctaaacaagcagggagagggggtggggtggggtgagagtgtgtggagtaaggacattcagaataaatatctgctgctctgctcaccaattgctgctggcagcctctcccgtcctc

SEQ ID NO: 27197 - DNA, 1057 bp, Homo sapiens
  source 1..1057: mol_type = unassigned DNA
ctctgtcactcaccgggcgggccaggccgggcagccatggctgagacactcttctggactcctctcctcgtggttctcctggcagggctgggggacaccgaggcccagcagaccacgctacacccacttgtgggccgtgtctttgtgcacaccttggaccatgagacgtttctgagccttcctgagcatgtcgctgtcccacccgctgtccacatcacctaccacgcccacctccagggacacccagacctgccccggtggctccgctacacccagcgcagcccccaccaccctggcttcctctacggctctgccaccccagaagatcgtgggctccaggtcattgaggtcacagcctacaatcgggacagctttgataccactcggcagaggctggtgctggagattggggacccagaaggccccctgctgccataccaagccgagttcctggtgcgcagccacgatgcggaggaggtgctgccctcaacacctgccagccgcttcctctcagccttggggggactctgggagcccggagagcttcagctgctcaacgtcacctctgccttggaccgtgggggccgtgtcccccttcccattgagggccgaaaagaagggctgaagagagacctggctacctccgacatccagatggtccaccactgcaccatccacgggaacacagaggagctgcggcagatggcggccagccgcgaggtgccccggccactctccaccctgcccatgttcaatgtgcacacaggtgagcggctgcctccccgcgtggacagcgcccaggtgcccctcattctggaccagcactgacagcctagccagtggttccaggtccagccctgacttcatcctcccttctctgtccacaccacgagtggcacatcccacctgctgattccagctcctggccctcctggaacccaggctctaaacaagcagggagagggggtggggtggggtgagagtgtgtggagtaaggacattcagaataaatatctgctgctctgctcaccaattgctgctggcagcctctcccgtc

SEQ ID NO: 27198 - DNA, 1349 bp, Homo sapiens
  source 1..1349: mol_type = unassigned DNA
gtcactcaccgggcgggccaggccgggcagccatggctgagacactcttctggactcctctcctcgtggttctcctggcagggctgggggacaccgaggcccagcagaccacgctacacccacttgtgggccgtgtctttgtgcacaccttggaccatgagacgtttctgagccttcctgagcatgtcggtcacagcctacaatcgggacagctttgataccactcggcagaggctggtgctggagattggggacccagaaggccccctgctgccataccaagccgagttcctggtgcgcagccacgatgcggaggaggtgctgccctcaacacctgccagccgcttcctctcagccttggggggactctgggagcccggagagcttcagctgctcaacgtcacctctgccttggaccgtgggggccgtgtcccccttcccattgagggccgaaaagaaggggtatacattaaggtgggttctgcctcacctttttctacttgcctgaagatggtggcatcccccgatagccacgcccgctgtgcccagggccagcctccacttctgtcttgctacgacaccttggcaccccacttccgcgttgactggtgcaatgtgaccctggtgaggagggaccctgggtccgggggtggggtggggcatggcccccatcccagtcccccttccctcccatgctgcttcctatctccgtctctctgattgctccagtcaccatttctttccctgatgctctcagtattgcccacaggcttagtctgaggatacacacacacacacacacacacacacacacacccctgaagttctacctttcccccacaagagggcaacagagtccgcaatccgcatgtggggtctccaactcccgcgccccagatctgcccaggtcaacagctatatcacagtccagttcccaaaccctttccctaccaagggcctctgcgtgacagctctgtctgcttttctgtaaggtgccacctagcaaacccacttacaacaaggatctgatagctcttcacactataaaccaaagatgctcacaacagctctttggatactgagctgaggttcacaggatcccacggctggtgtacactgttcctgtgaattgaccaacagagcagggactcattcagggtccacagccagcgactggtaattgacaacattcttgagcacttgctatgtgcttggcactgtcccatcaacatattttatgctcaccaccactccaggagacaggtgctactattatccttctgacattacaggtgatgaaacagaggcacataatcatcctagctaagcacttgtctgagtctggattc

SEQ ID NO: 27199 - DNA, 1060 bp, Homo sapiens
  source 1..1060: mol_type = unassigned DNA
ctctgtcactcaccgggcgggccaggccgggcagccatggctgagacactcttctggactcctctcctcgtggttctcctggcagggctgggggacaccgaggcccagcagaccacgctacacccacttgtgggccgtgtctttgtgcacaccttggaccatgagacgtttctgagccttcctgagcatgtcgctgtcccacccgctgtccacatcacctaccacgcccacctccagggacacccagacctgccccggtggctccgctacacccagcgcagcccccaccaccctggcttcctctacggctctgccaccccagaagatcgtgggctccaggtcattgaggtcacagcctacaatcgggacagctttgataccactcggcagaggctggtgctggagattggggacccagaaggccccctgctgccataccaagccgagttcctggtgcgcagccacgatgcggaggaggtgctgccctcaacacctgccagccgcttcctctcagccttggggggactctgggagcccggagagcttcagctgctcaacgtcacctctgccttggaccgtgggggccgtgtcccccttcccattgagggccgaaaagaagtcttgctacgacaccttggcaccccactcatccagatggtccaccactgcaccatccacgggaacacagaggagctgcggcagatggcggccagccgcgaggtgccccggccactctccaccctgcccatgttcaatgtgcacacaggtgagcggctgcctccccgcgtggacagcgcccaggtgcccctcattctggaccagcactgacagcctagccagtggttccaggtccagccctgacttcatcctcccttctctgtccacaccacgagtggcacatcccacctgctgattccagctcctggccctcctggaacccaggctctaaacaagcagggagagggggtggggtggggtgagagtgtgtggagtaaggacattcagaataaatatctgctgctctgctcaccaattgctgctggcagcctctcccgtcctc

SEQ ID NO: 27200 - DNA, 4431 bp, Homo sapiens
  source 1..4431: mol_type = unassigned DNA
atacaacgcgccccaggccaaggtcctaggtgcaggggccgccgcagagcctgagcccgcagggctgggatgcgggtcgtcagggatgcgggctggggaggggagggtgtgagcagcgggtgcccccagtccccgccagggcgcaagcgcaggcgcgcagggtgcggtcgcggaggggcgggcacagtcgggcggggagctcggcggcggcgggcgcgggaagatggcggcagcggcggcggcggctgcagaacagcaaagttccaatggtcctgtaaagaagtccatgcgtgagaaggctgttgagagaaggagtgtcaataaagagcacaacagtaactttaaagctggatacattccgattgatgaagatcgtctccacaaaacagggttgagaggaagaaagggcaatttagccatctgtgtgattatcctcttgtttatcctggctgtcatcaatttaataataacacttgttatttgggccgtgattcgcattggaccaaatggctgtgatagtatggagtttcatgaaagtggcctgcttcgatttaagcaagtatctgacatgggagtgatccaccctctttataaaagcacagtaggaggaaggcgaaatgaaaatttggtcatcactggcaacaaccagcctattgtttttcagcaagggacaacaaagctcagtgtagaaaacaacaaaacttctattacaagtgacatcggcatgcagttttttgacccgaggactcaaaatatcttattcagcacagactatgaaactcatgagtttcatttgccaagtggagtgaaaagtttgaatgttcaaaaggcatctactgaaaggattaccagcaatgctaccagtgatttaaatataaaagttgatgggcgtgctattgtgcgtggaaatgaaggtgtattcattatgggcaaaaccattgaatttcacatgggtggtaatatggagttaaaggcggaaaacagtatcatcctaaatggatctgtgatggtcagcaccacccgcctacccagttcctccagtggagaccagttgggtagtggtgactgggtacgctacaagctctgcatgtgtgctgatgggacgctcttcaaggtgcaagtaaccagccagaacatgggctgccaaatctcagacaacccctgtggaaacactcattaaaagaaccccagaggtcaccaacatgtttatatcttgacttgacttttttatgcatgcaaatcattgtttttacagagtttgtgataactcataattattttaatggcagagcactgctgtatctgttttatggtctacatagttaaaatcttctcagagagcctaaattctaatacattttattaatttatactaatcttcatatttactgttctctaaaataattatgagaagcaaataaaatcaaaagtcatgtttaaagacgtgtttttaaaattccactatcccttttctaaaggttaaaggtctgaagcagctgtttagattcactgtaagtaaactttggtaactctaatggggatagacccacttaagatatttaaaaaggtatggcatcagcgtttcatgctctgccttttagcttctaaaaggaaagatgcagatttctagtgcattaagcctgagccatattctcacatgcaagtgaagtcattaaagaactttacatatgtgagatagaaacaatggttccttagttttgcactgggaagaaaatattttgtaaaagaatgtttatttgaaataatgataactatcaattgttcacaatgtggtggaaattaaaacaccatctcagctttaacttttaaataataatgataactatctttattgagcatcttctacatcctaggcattgtcctaggcattgcatgtttatatccccaattctcaccacaaccctgcaagtaggtggtattatccaagttttacccattaagaaactgaagatcagagaagttaagaaacttgctcaacatcatatagtaagtagcagagttgggattggaattcaggcatgactcaaacctggatgtacttgattccaaatgccatgttgttttcactctctgcactgactttttaattatttaaaactctagaaagatgaacaaaggttaatttaaacttacctaagaagatgagaatcaaacaaaacagatatgcttactctagttaaaaagaaaataaatctcatgtcagacccagaaaggaccaatcactgtccgattgtaagctatgttgggccaattccaaaatattatacgatggagaggtcaaatttacctacttctgagttacctcagtttcccaacaatggaccttggcacactggagtaacaatacataacagagttgccaagatatttataccctcagcactcggggcaacacagtggaaagtggggaggccatagacccaaacaagttctttgggccaggcatggcctagtaagtacaccatgcctcgaaaataagtccagaagcactggactaaagagtgctaatgcaggaaataatacacataatttttaggtaaggataataatttatctctgctcctaatattactatcccattgtaattatttataaccctcaagccagttgatttttaatatatttgattggaaaagaactctctggtattattaagactcacacagaatcagggacagggcccccaaaggagtttgctgtaaaataggcagtagagttgtggcatgggcccaaccctgcattcaagtgtaacagcattctgtcagggtcactttgaattgtgcacataagaaaaccaatacaaaaaacaatttgtattcaatattgtcacatttctctctggtagaaaaatcaaataccttagagattatgaagtcattaatttatactgaaattggattgacttactacctaacactgagcgctgtttttaaatgaaaagaatgagatttataaccacttgagtgttattgcagtgatatttgaactcatttgaatatattcagtatcatttaatgtctgaattcagaaaaaaatgccgaaatttttattcagatggtccataaattaaattgcatattcattacttatctgctctatttagatttattttaaaagtttatttaagtaaatatttttataaaaaccagaaaacactgtattacaaaatattatttattaaatgtagttcaggaaataatctatttttactcttttttgggaaatacttgtgtttttgatacatctccatgaagttcttttgagaggagaggctattttgatgtttttatacaactgaaggttaacagccatagcattttatgatactttacaggtagtcctggctttttccctgaaacataagcttggaaaatctattagaaagcagaacagggcaaactctccattttacttatggcttttctaatttttaattaattaatttatttttttgagacagagtcttgttctgtcgccaggctggagtgcagtggcacaatctcggctctcggctcactgcaacctctgcctcccaggttcaagcgattctcctgcctcagcctcccgagtacctgggactacaggcatgtgccacagttcccggctaatttttgtatttttagtagagacggggtttcaccatgttggccaggatggtctcaatctcttgacctcgtgatctgcctgccttggcctcccaaagtgctgggattacaggtgtgagccaccacgcctggccggcttatttttatccacagtaaatcttcagcaactcattgtctccaccagatagtatttttctgtaaatgaaatgctgacttcgcctcttcctgctgtatgctcatccctgcactgagcacagatatgacaagcagtagccatgggggaggtgggtgacaaagataggaccccgggagggggcgcaggtacatgctagtttcaattaccacagtattctagagacgggttgcaatgacaaggggggcaaatgaaatcaatgcaagatttcttaataatgggcagacagaaaaatgtaaaaccacacaaaacggactgctgataatattttaaaatatacttatttgtcttctttttgcattgtgaaaaaaacaaaataaattttgtgtgataattttgatgatgaaaggtggaagttctacctagatttgaatgagtgtttttttaagggaatgagaatgtcatggtgctaaacctgacaaataagagatcattgaaatgctgaaaattttaacagtcttcttaaaagtattgagggggcaaaaattaccaattatggtatacaaaaataagcctataaatgtgtttcacattgctaacttgagtttcagttgattcagtttgtaataactagtaatgagcttctgtttacaataaaaattctgtaaattg

SEQ ID NO: 27201 - DNA, 2645 bp, Homo sapiens
  source 1..2645: mol_type = unassigned DNA
atggcggcagcggcggcggcggctgcagaacagataacacttgttatttgggccgtgattcgcattggaccaaatggctgtgatagtatggagtttcatgaaagtggcctgcttcgatttaagcaagtatctgacatgggagtgatccaccctctttataaaagcacagtaggaggaaggcgaaatgaaaatttggtcatcactggcaacaaccagcctattgtttttcagcaagggacaacaaagctcagtgtagaaaacaacaaaacttctattacaagtgacatcggcatgcagttttttgacccgaggactcaaaatatcttattcagcacagactatgaaactcatgagtttcatttgccaagtggagtgaaaagtttgaatgttcaaaaggcatctactgaaaggattaccagcaatgctaccagtgatttaaatataaaagttgatgggcgtgctattgtgcgtggaaatgaaggtgtattcattatgggcaaaaccattgaatttcacatgggtggtaatatggagttaaaggcggaaaacagtatcatcctaaatggatctgtgatggtcagcaccacccgcctacccagttcctccagtggagaccagttgggtagtggtgactgggtacgctacaagctctgcatgtgtgctgatgggacgctcttcaaggtgcaagtaaccagccagaacatgggctgccaaatctcagacaacccctgtggaaacactcattaaaagaaccccagaggtcaccaacatgtttatatcttgacttgacttttttatgcatgcaaatcattgtttttacagagtttgtgataactcataattattttaatggcagagcactgctgtatctgttttatggtctacatagttaaaatcttctcagagagcctaaattctaatacattttattaatttatactaatcttcatatttactgttctctaaaataattatgagaagcaaataaaatcaaaagtcatgtttaaagacgtgtttttaaaattccactatcccttttctaaaggttaaaggtctgaagcagctgtttagattcactgtaagtaaactttggtaactctaatggggatagacccacttaagatatttaaaaaggtatggcatcagcgtttcatgctctgccttttagcttctaaaaggaaagatgcagatttctagtgcattaagcctgagccatattctcacatgcaagtgaagtcattaaagaactttacatatgtgagatagaaacaatggttccttagttttgcactgggaagaaaatattttgtaaaagaatgtttatttgaaataatgataactatcaattgttcacaatgtggtggaaattaaaacaccatctcagctttaacttttaaataataatgataactatctttattgagcatcttctacatcctaggcattgtcctaggcattgcatgtttatatccccaattctcaccacaaccctgcaagtaggtggtattatccaagttttacccattaagaaactgaagatcagagaagttaagaaacttgctcaacatcatatagtaagtagcagagttgggattggaattcaggcatgactcaaacctggatgtacttgattccaaatgccatgttgttttcactctctgcactgactttttaattatttaaaactctagaaagatgaacaaaggttaatttaaacttacctaagaagatgagaatcaaacaaaacagatatgcttactctagttaaaaagaaaataaatctcatgtcagacccagaaaggaccaatcactgtccgattgtaagctatgttgggccaattccaaaatattatacgatggagaggtcaaatttacctacttctgagttacctcagtttcccaacaatggaccttggcacactggagtaacaatacataacagagttgccaagatatttataccctcagcactcggggcaacacagtggaaagtggggaggccatagacccaaacaagttctttgggccaggcatggcctagtaagtacaccatgcctcgaaaataagtccagaagcactggactaaagagtgctaatgcaggaaataatacacataatttttaggtaaggataataatttatctctgctcctaatattactatcccattgtaattatttataaccctcaagccagttgatttttaatatatttgattggaaaagaactctctggtattattaagactcacacagaatcagggacagggcccccaaaggagtttgctgtaaaataggcagtagagttgtggcatgggcccaaccctgcattcaagtgtaacagcattctgtcagggtcactttgaattgtgcacataagaaaaccaatacaaaaaacaatttgtattcaatattgtcacatttctctctggtagaaaaatcaaataccttagagattatgaagtcattaatttatactgaaattggattgacttactacctaacactgagcgctgtttttaaatgaaaagaatgagatttataaccacttgagtgttattgcagtgatatttgaactcatttgaatatattcagtatcatttaatgtctgaattcagaaaaaaatgccgaaatttttattcagatg

SEQ ID NO: 27202 - DNA, 1606 bp, Homo sapiens
  source 1..1606: mol_type = unassigned DNA
agagaggacttatctccagcatctagcactacagagcagaggctgtgtggagaatggctgaaaaatcagaattggttgtagaagcagttttctttctggttgtgagtatgagcccggcagacaccatgagcgctgttgcaggggagtcggcctgtgcttgacacatgtgtttcccattgatagctggagacagcccagtagctgtgagtcggtctgacaaagccatattgaagtacggagtacggtttcaaagcagtcagaaaaagaacgggaatgctgttcaggaaattcttcaggcatgggcagggacttggctgcagttctgcagttggaaaatctgactggggcagcttctgagcgcaggctgggcctgcacacactcagcgggccgagtggccacctccttcagagctgctcagcacgccctgggatcgcgggcggttttcatcggccggtttgtgaaacggacaagagagagacattactgccgggagtgttgagtgaagggaccaggtggagatgatgcctcaggagcagtacactcaccaccggagcaccatgcctggctctgtggggccacaggtatacaaggtggggatttatggctggcggaaacgatgcctgtatttctttgtcctgctcctcatgattttaatactggtgaacttggccatgaccatctggattctcaaagtcatgaacttcacaattgatggaatgggaaacctgaggatcacagaaaaaggtctaaagctagaaggagactctgaattcttacaacctctctacgccaaagaaatccagtcccgaccaggtaatgccctgtacttcaagtctgccagaaatgttacagtgaacattctcaatgaccagactaaagtgctaactcagcttataacaggtccaaaagccgtagaagcttatggtaaaaaatttgaggtaaaaactgtttctggaaaattgctcttctctgcagacaataatgaagtggtagtaggagctgaaagattacgagttttaggagcggagggcacagtgttccctaaatctatagaaacacctaatgtcagggcagaccccttcaaagaactaaggttggagtccccaacccggtctctagtgatggaggccccaaaaggagtggaaatcaatgcagaagctggcaatatggaagccacctgcaggacagagctgagactggaatccaaagatggagagattaagttagatgctgcgaaaatcaggctacctagactgcctcatggatcctacacgcctacaggaacgaggcagaaggtcttcgagatctgcgtctgcgccaatgggagattattcctgtctcaggcaggagctgggtccacttgtcagataaacacaagtgtctgcctctgaaagactatccatagtggacattgttggcagcataaaggccttttttggctttagacactggctgccagctatttttactagaacacagaaagcctatcaaagaccttgtgtgtatgtgtacgtgtgtgtgcgtgcttgagtgtgttcgcgtgtgtgggtggatataaatatatataaatatatataaataaatatatatatcctctgtataaaa

SEQ ID NO: 27203 - DNA, 9455 bp, Homo sapiens
  source 1..9455: mol_type = unassigned DNA
gagcagaagaaagagaggacttatctccagcatctagcactacagagcagaggctgtgtggagaatggctgaaaaatcagaattggttgtagaagcagttttctttctggttgtgagtatgagcccggcagacaccatgagcgctgttgcaggggagtcggcctgtgcttgacacatgtgtttcccattgatagctggagacagcccagtagctgtgagtcggtctgacaaagccatattgaagtacggagtacggtttcaaagcagtcagaaaaagaacgggaatgctgttcaggaaattcttcaggcatgggcagggacttggctgcagttctgcagttggaaaatctgactggggcagcttctgagcgcaggctgggcctgcacacactcagcgggccgagtggccacctccttcagagctgctcagcacgccctgggatcgcgggcggttttcatcggccggtttgtgaaacggacaagagagatgcctcaggagcagtacactcaccaccggagcaccatgcctggctctgtggggccacaggtatacaaggtggggatttatggctggcggaaacgatgcctgtatttctttgtcctgctcctcatgattttaatactggtgaacttggccatgaccatctggattctcaaagtcatgaacttcacaattgatggaatgggaaacctgaggatcacagaaaaaggtctaaagctagaaggagactctgaattcttacaacctctctacgccaaagaaatccagtcccgaccaggtaatgccctgtacttcaagtctgccagaaatgttacagtgaacattctcaatgaccagactaaagtgctaactcagcttataacaggtccaaaagccgtagaagcttatggtaaaaaatttgaggtaaaaactgtttctggaaaattgctcttctctgcagacaataatgaagtggtagtaggagctgaaagattacgagttttaggagcggagggcacagtgttccctaaatctatagaaacacctaatgtcagggcagaccccttcaaagaactaaggttggagtccccaacccggtctctagtgatggaggccccaaaaggagtggaaatcaatgcagaagctggcaatatggaagccacctgcaggacagagctgagactggaatccaaagatggagagattaagttagatgctgcgaaaatcaggctacctagactgcctcatggatcctacacgcctacaggaacgaggcagaaggtcttcgagatctgcgtctgcgccaatgggagattattcctgtctcaggcaggagctgggtccacttgtcagataaacacaagtgtctgcctctgaaagactatccatagtggacattgttggcagcataaaggccttttttggctttagacactggctgccagctatttttactagaacacagaaagcctatcaaagaccttgtgtgtatgtgtacgtgtgtgtgcgtgcttgagtgtgttcgcgtgtgtgggtggatataaatatatataaatatatataaataaatatatatatcctctgtataaaatgaggtttcagtacaaaaggaaccatgggtgaccctgcgatatccactgtcattttccatcccatccccaccacctgagtgacagaaatctaaacacacatccgtcccaacattccccagaccattcagaatcacacagcgtattaaacactgacagaatcttcatctagatattcgagtagcagcatatcttctcttttagtgtcattacgagggagtgatggcgggaatctcagtcgcactcaagctctgagacctttgtatcaaaaataggcatttgatttcctgttttagctttagtaaggctggctaacttccccctcttcaagctaggaactggcaatgctgtagaagtcagccgtaggaattcaaaatggctggcctaccttggctaccagacatattggggtttttgtagttgaatgaatgaggaggatgaatttcagcaaattttgaactgctcacccaacttctgctatcttgctccctccaaactcacagattctcctacagtcaaattaggagctgtaaatcagcacaaaataagataacagctgttcctcagtgagctggaagctacttaatggcctgatgggcaatgaacaaacgggtgatatgtctctgtttaagggaaaaatggcttaaaagctgttctgttctcacttctgactttaaccaaaagatttcaacccacaatgatcaggtcaatcaaaatccctaagagcagaactcctaccccaaaagaagcctggaagtctaattaagagtagcataaggaacctaattatgtttaccatgtttcttgggattggtgggaaatgtcaaaacatgccctttatttttaaaggcattcacaaactctctgactttgttcttcttatatattttttcagtgccgggatattcatattcctaaagccactattgtgttttctctaagaagcactacatgccaccagaattgtgcactgaaagataatacaaactgagtgtctttatgagaatcactgtgtcccctgaggcccagcagtacctgcttccctgtatgtggaagcagcacctcattcccgccatcagctacctctcatcaccccaccttcatcatcatgctccagggtcaccctggccagctcttgtgctgggacaggggattacaccatctctgttcaaagagggggaaatgtgcctatgccttaagtcaatgcactcagcaaggagaagcacatcttatttatcttgttacctatagtttactttgggtgattggaggggaatgacttagttatgactggacatcttaaaagctgatagacaagccaaatggctggcagatgatgtggatttcaaagagcccagaatgaactcatcactggcttagacagtcctggatgccatttggaaagtagtggccctgcaagcctaaatgaagtagtatttgtaggcctgggtggcatttggatttttcttttccctcaacaaggttttactttttcttactttacaagcaagggaagttttgtgataggagagaaataaaagatttgatattttttgagatgacactcaagcatcaggctgagatttgcacacatgggatgtaaaagcaagctgtgtgttgcttagtcacttacttagaagtagatggtgggggacagcggcgtgggtcctagcctggccagtgatgctgctggcgtccagaccccagactcactccaagcactcttgttcaatatctcatgcagaagagttgggctggtcactcttaggggtgagaccccgtgattggttggtttgtagcactaaggtctaaaaaggaaaaccataaaagacatcagattacgctggatcagtataattaatattccatagggccatgttgccagaatctgtatgtatcaatacagggtttttccaagccaggaaacgccctccttggctactaggagcacctatcccatatcattcagataaacaatgatagctacaaagtcatttgtggctagataggttaagacaggtgattttttaaagtagactgtctttgcattttgccatctgaagttcattaatctttagatgacaaaaaagcaaaaagttcccagaacgtttttgcttagattttgttctaatcaccacgtgaaggaatgagattagcaccacaagtttcatgccaataaaagagactggtgtgatcccacatgcaaaatttaatcctaagggtagtgagatcacaaacagaataaaaataagagcaatcaaccatataaatcaagtacctattgggaacagacataacattcaatttttcatttatgctaagtgaccacagtatacaaagtaataagcaggaaatttgatatgggttaaattatgcattttgttcagattttggaaattggtatgcattataagtttctcaatgtacatctttttatcccaacaccctcaaactagaatatttgtcagtggtcaagagaaaaaattttacctgaattcttgggggccggcggggagcttttacattaaaaatctactaacgcctactttttaaaaaatgagattctttctaatctttatatatgacattttctagacaatcgcacctttgggtatattaaacagctggtatcataacaaagaatccaaatgaaccttcaatatactagaagttctagtaggttaatattgttcagaagatttttacaaattaaaaactgatttccaaatatgttcaacatttacttctatttgatatctgctcaagaagtcatagaagtcttgggaaactattcgagtatcacagaggttttcaaaagcccttatggtgacatctacctaggtaaaagcctgacatgtggctttataattgttatgttacccaagggataaacttgaactggctttgaacatcctttaggtcattttctctttggataattttcatcgcatatccagcaactatagaccaaagtttgcttaaggtttgaccctagagcagaggtgggcaaactatgacctggaaaccaaatctgacttaccaccttttcctgtagttaaagttttattgtcacatagccacatacattcatttacatgttttctgattttacactacagcagcaggatggagtagttgtgtcagagactatgtatcccacaaagcatagattacttactatttagtcctttacaggcaaagtttcctcacccctgacctagaggtttttgtggtatgcattggatatagcaggaaagaaagcacatttccaaacagcagggagtaagcttacatttctgtgtaggtttgggaatatagttacttggcaaagtctttcaggaaggaagcccttccttatgttacatgtggaaagcctgccttccaagacatgtggaagtaattgatccacctgccagagaaacacaggctcagaggatgcctgggaacagggaggatgggattagtggaagcttaatggaaaaggaaagttatgatcctccaagacccttaattgatagaccataccaggttctgcaggtcagcatcattgtgtaatgagagtgaagtaggggaccctgtggttcaaccttagaatctgtttcctgtaggctctttctgctgtctatattcattaaagttttccacttcaccctcccatagtctagagggatgcccattccatggtcctccagagaatagttttgacttaacatgtctgtttagcccacatcacgtcagttatcaacaccgccactgtgcttactgttcctacagccacaccaggcttgaagagttagtgagaccaacaaataattggaagtattggaaaaagcaaaatacatggggacaaaaaaaatacagtgaaattctttttatcaaactgatgctgtgagaaaccagatgaatgccagtttggctttatttctaagaatctgggtcttcattctctggtgtagaaggaatgcaaaaaactataacaacaacaacaaaaacatattttgaaaagacatattctgacatctctgcttgtgtgtggtaaggcaggttcctatcagacatttatccctttggtcaagatcccttttgctcatccagggtttcatactcaatatcgcttaaaaaaaaaaaagtatcagctagggatgactctggaagtatgagtatcatggtggggaggaaggaattttttttaaatgtaaatgacccccatttaccagaccctaatcaaagtcacttaagggaatccctcagccttttatttggaaacagttgaaataaactggcagcagctagatcagagtatcttgctttattttataaaggccaaaggtagtatgaagtttggaccaaaaaggtaaatagatccattccagcacctgatactgatttttcaaggctctatgaaaggtcaaaaatttcattaaacaagaccagttctccctcttccccctgtcccaagaaatcttaggcatgaaaaggataaggaaacagctcctggaatgatacatttgcatagtgccctagtagcaggttgggaaaaagttataatataagaaacaaccttcgaaaacaggccttttatctcaaagataaaatgtctttcttgtggtctttcatcactatctccgtggtggaaggttcccctagttccaacatatttccattaaaatagtcaaagccacggcattgggatgtcagatgcctctctttctttgtggtaatcggaatttaaaattatacagttgcctctgaatttctcatgcacaaagccaaaccactgataagagataaagcagtctgaagcctgctgcttcagccagcacagcacaccacacacgctcgcactttcaaaagcaatgtgatttctatggttcttaaaagctttcttcataagggagtccctgaaatttctcaaggcaggtttgaatggcaaagggaaaataattacttgtgggaggtcctccttttgagtattgttagagcatacatgtaaaagaaaataacctttttggggcaactcatgctcacacatgctgttttctttggttctccccctaccttccttttgtagatattgacagaataggaggaaatgagcatccttatttgagaaagagcaagaatgtcatgagcccttgatgcaatagtaagtgtgatgtcatcatacagtgttaatgatgctatcaaatccatcaataaacagtctcaaaccttccaacaacagtgctcactgctgctcctcaacttcagcccagcaagcagtaatatcatcacccattttgagatatgcaggtggaatagaacaaagaaacagccactgtaatcgagaagcatgtttactgtctaaatccacctgttgcagtaggaagccagagtggggttccaaatgcctcattaagtatgtggacagcctcactagtaagtgagtgaatttggcttcatcactgaacattagctaaggtcagcttaataacacaaatatgaggccgacttctttgcgagaagagaaaagaaaacatctgcttgatttaaaatccaccccacatgcctagagttgtctaatagtccctcactttccaatggcttcacatcctacttctacatttggggttttttggtgaaatcagagatagctcaggatttcataaaacgagaaactccaaactggtctattaggttccatgggaacacttgtagccaaaggattgtctgagggcaggaagacgacacttgtcaacaaggaagacagtgtttctttagttcccatattcatctaattcatggggttctaacattttggggggccatagattcttttgacaatctgagccaatctatgaaacttctccccaaaaagaaccaccccacaaaatcttgcaaaacgtaagagattttcctggatctgaagctacccgaagacatgggaagagttgtattctattattcaattttaagaatatttattaatattcactgagctattgctagccactgtgctaaacattttacatacattctcctatttcatcctcaaaacaatcctttgagttgggttttaatatagttccaatattcggatgtgaaaactgaggcttatagtggctaagaaacttgcccaaagccactacctagaaaatggcagagctggaatgtaggtttaactcctgaccactatgctataaagtcaccacatgtcaaactaattttcaagttgttgggacatgtcccctactaggttttaaactagatcttccttggtagatgaagctatagaacttctattttccctgctttctgtagtctctcacagtgacagcatctatactaaagtatagatacctaaggggaaaatatagaaagcctgcctgaataatagaatctagaacaacaacaaaaatattaattttttctgtgtatgcttaggtcaagcttaaaaaaaaaaaaaaaagaccggaaaatacctgggttgttagcctcacatttaggaaaaaattgtaatactcagttatctgtgtgtgtggctaaacaagtcagcatttctgcacacatacatctctttcctttatacttcccttcaaaagacaaatatcttacttttgatctttgacactatttggtcagtattcttctttacctttacttgtggcaaaactcaaggaagcgatcaaatagagggaagctcatttctatcattgtctctgtttccctataagaaagaactaccagggactcactgactgcattaggcatacaatgtcagagctgagctgaccactctggtcctgtaatgtctttggcctcacaccttggcagccatcattaatgggccatacccttccccaggtgcagaattctcctccccagagcactcaggccgttactaccaatttatctgagttggaaataagactcatttgccagttcttatttttaaagtggcaccctttaactttgaacctgtgtattttacactggcatcctagattcagcaatgaggtttggtggtgtttcaactaggaagggagaaaatgagtgcatctgaagttccttacagcttggtttctttggaatgctttcatcttctaagcaaagggatcagggtttgatctgtaagagttaaaaagacaaagtcattttgaagaattaactcagccagggatcatgcaaaaagattagaaaccataatgcccttgttaaagccctgctgtcaacctgccttcacccagagcttagagggccacagcagcaaagaggttggggtccatccctctctgatgtgctttttccacaacacatatctggtcctctggcaggattgtggatagagctcctcaccatacccaaaagactcagccccagtgccagtgctttcctggttcaacaacccaccacaaaaccttagtaaaaggatgagccaaaaatgaaaaagactcgactctacagtaagtcagtcagggatttcctttttaatggtttaagacatccaaatggcaagccaggaatagataccattaaagggtctcataggactaaccttaccagagccagaaatctagctctctggaagagatgcaagattctagaaaagtaaagggaagtgtcggcacatctaaatttagtgaacacaaaattaatttttatctagtctgtgacggagggaataaagtttttcatgtatcaaccacctcccccagtcaggtttctccctttttgagattatgaagaagctgagacatacttcttaaggaggtcgtgttttagaaggaaaaggcagaggctatccatcattatgctggctagatgcgcttctgaagaagccggattctgatgttcttaaccaaaatggtgaggtcatggaagtcccatttgcttggagattttgaaaa

SEQ ID NO: 27204 - DNA, 1571 bp, Homo sapiens
  source 1..1571: mol_type = unassigned DNA
agagaggacttatctccagcatctagcactacagagcagaggctgtgtggagaatggctgaaaaatcagaattggttgtagaagcagttttctttctggttgtgagtatgagcccggcagacaccatgagcgctgttgcaggggagtcggcctgtgcttgacacatgtgtttcccattgatagctggagacagcccagtagctgtgagtcggtctgacaaagccatattgaagtacggagtacggtttcaaagcagtcagaaaaagaacgggaatgctgttcaggaaattcttcaggcatgggcagggacttggctgcagttctgcagttggaaaatctgactggggcagcttctgagcgcaggctgggcctgcacacactcagcgggccgagtggccacctccttcagagctgctcagcacgccctgggatcgcgggcggttttcatcggccggtttgtgaaacggacaagagagagacattactgccgggagtgttgagtgaagggaccaggtggagatgatgcctcaggagcagtacactcaccaccggagcaccatgcctggctctgtggggccacaggtatacaaggtggggatttatggctggcggaaacgatgcctgtatttctttgtcctgctcctcatgattttaatactggtgaacttggccatgaccatctggattctcaaagtcatgaacttcacaattgatggaatgggaaacctgaggatcacagaaaaaggtctaaagctagaaggagactctgaattcttacaacctctctacgccaaagaaatccagtcccgaccaggtaatgccctgtacttcaagtctgccagaaatgttacagtgaacattctcaatgaccagactaaagtgctaactcagcttataacaggtccaaaagccgtagaagcttatggtaaaaaatttgaggtaaaaactgtttctggaaaattgctcttctctgcagacaataatgaagtggtagtaggagctgaaagattacgagttttaggagcggagggcacagtgttccctaaatctatagaaacacctaatgtcagggcagaccccttcaaagaactaaggttggagtccccaacccggtctctagtgatggaggccccaaaaggagtggaaatcaatgcagaagctggcaatatggaagccacctgcaggacagagctgagactggaatccaaagatggagaggtgagggatgagaaggacagaagttcaaagagctacagcttcaacaggccaacccttcccataactggttgacctcggagttggatcctacagtgtatcaacaaaaggagccaagcaggttttatttctgaaacaattaattgagcagcatgattataagccaaacccacaatccatcaaagtgatgatttcttatttgtaaaatgcagagataatggcatgtattccaagtacagaattatatgaccatgaaaatgaatgctattttcaaattctctcttgtcaccttaaaataagattttgttagccaacataattaagctgtatatattatacacatctggctcaagatg

SEQ ID NO: 27205 - DNA, 1412 bp, Homo sapiens
  source 1..1412: mol_type = unassigned DNA
gtgatatctattgaagctgggagggtcacagtatcagtgagtggtcccccaatttcttcttgagcatcgatgaattagcagtggtgtaatattgtggatctgacttcatgtgtcactaagaacaggagatccaagactgctcttctggggatgagacttggaagaaacctccatcctcagggatttgaagaaggttatactggaacctgtgtgaaggctgagacaaccgtcccttttgtggtggcctgaggggattttcttaatcccaatgttgccctgaaatttatgtccaggattcaaaaagtttaggactgctaagagacattactgccgggagtgttgagtgaagggaccaggtggagatgatgcctcaggagcagtacactcaccaccggagcaccatgcctggctctgtggggccacaggtatacaaggtggggatttatggctggcggaaacgatgcctgtatttctttgtcctgctcctcatgattttaatactggtgaacttggccatgaccatctggattctcaaagtcatgaacttcacaattgatggaatgggaaacctgaggatcacagaaaaaggtctaaagctagaaggagactctgaattcttacaacctctctacgccaaagaaatccagtcccgaccaggtaatgccctgtacttcaagtctgccagaaatgttacagtgaacattctcaatgaccagactaaagtgctaactcagcttataacaggtccaaaagccgtagaagcttatggtaaaaaatttgaggtaaaaactgtttctggaaaattgctcttctctgcagacaataatgaagtggtagtaggagctgaaagattacgagttttaggagcggagggcacagtgttccctaaatctatagaaacacctaatgtcagggcagaccccttcaaagaactaaggttggagtccccaacccggtctctagtgatggaggccccaaaaggagtggaaatcaatgcagaagctggcaatatggaagccacctgcaggacagagctgagactggaatccaaagatggagaggtgagggatgagaaggacagaagttcaaagagctacagcttcaacaggccaacccttcccataactggttgacctcggagttggatcctacagtgtatcaacaaaaggagccaagcaggttttatttctgaaacaattaattgagcagcatgattataagccaaacccacaatccatcaaagtgatgatttcttatttgtaaaatgcagagataatggcatgtattccaagtacagaattatatgaccatgaaaatgaatgctattttcaaattctctcttgtcaccttaaaataagattttgttagccaacataattaagctgtatatattatacacatctggctcaaga

SEQ ID NO: 27206 - DNA, 1694 bp, Homo sapiens
  source 1..1694: mol_type = unassigned DNA
cgggattaccgagggggtgcgggatgctgatgctgaactggccaagctgggagggaagaagaaagggaggggaggggagaatcgaggacggacggcctagccaggccaagaatgcaattgccccggtggtgggagctgggagacccctgtgcttggacgggacagggtcgggggacacgcaggatgagccccgcgaccactggcacattcttgctgacagtgtacagtattttctccaaggtacactccgatcggaatgtatacccatcagcaggtgtcctctttgttcatgttttggaaagagaatattttaagggggaatttccaccttacccaaaacctggcgagattagtaatgatcccataacatttaatacaaatttaatgggttacccagaccgacctggatggcttcgatatatccaaaggacaccatatagtgatggagtcctatatgggtccccaacagctgaaaatgtggggaagccaacaatcattgagataactgcctacaacaggcgcacctttgagactgcaaggcataatttgataattaatataatgtctgcagaagacttcccgttgccatatcaagcagaattcttcattaagaatatgaatgtagaagaaatgttggccagtgaggttcttggagactttcttggcgcagtgaaaaatgtgtggcagccagagcgcctgaacgccataaacatcacatcggccctagacaggggtggcagggtgccacttcccattaatgacctgaaggagggcgtttatgtcatggttggtgcagatgtcccgttttcttcttgtttacgagaagttgaaaatccacagaatcaattgagatgtagtcaagaaatggagcctgtaataacatgtgataaaaaatttcgtactcaattttacattgactggtgcaaaatttcattggttgataaaacaaagcaagtgtccacctatcaggaagtgattcgtggagaggggattttacctgatggtggagaatacaaacccccttctgattctttgaaaagcagagactattacacggatttcctaattacactggctgtgccctcggcagtggcactggtcctttttctaatacttgcttatatcatgtgctgccgacgggaaggcgtggaaaagagaaacatgcaaacaccagacatccaactggtccatcacagtgctattcagaaatctaccaaggagcttcgagacatgtccaagaatagagagatagcatggcccctgtcaacgcttcctgtgttccaccctgtgactggggaaatcatacctcctttacacacagacaactatgatagcacaaacatgccattgatgcaaacgcagcagaacttgccacatcagactcagattccccaacagcagactacaggtaaatggtatccctgaagaaagaaaactgactgaagcaatgaatttataatcagacaatatagcagttacatcacatttcttttctcttccaataatgcatgagcttttctggcatatgttatgcatgttggcagtattaagtgtataccaaataatacaacataactttcattttactaatgtatttttttgtacttaaagcatttttgacaatttgtaaaacattgatgactttatatttgttacaataaaagttgatctttaaaataaatattattaatgaa

SEQ ID NO: 27207 - DNA, 1871 bp, Homo sapiens
  source 1..1871: mol_type = unassigned DNA
atgctgatgctgaactggccaagctgggagggaagaagaaagggaggggaggggagaatcgaggacggacggcctagccaggccaagaatgcaattgccccggtggtgggagctgggagacccctgtgcttggacgggacagggtcgggggacacgcaggatgagccccgcgaccactggcacattcttgctgacagcttttttattaagctgtgctgatggcataaatggaacagttaactggaagaccagacaggccaacaattttattatcagcagaaaaatggctgctgggatgaaagatgtgtacagtattttctccaaggtacactccgatcggaatgtatacccatcagcaggtgtcctctttgttcatgttttggaaagagaatattttaagggggaatttccaccttacccaaaacctggcgagattagtaatgatcccataacatttaatacaaatttaatgggttacccagaccgacctggatggcttcgatatatccaaaggacaccatatagtgatggagtcctatatgggtccccaacagctgaaaatgtggggaagccaacaatcattgagataactgcctacaacaggcgcacctttgagactgcaaggcataatttgataattaatataatgtctgcagaagacttcccgttgccatatcaagcagaattcttcattaagaatatgaatgtagaagaaatgttggccagtgaggttcttggagactttcttggcgcagtgaaaaatgtgtggcagccagagcgcctgaacgccataaacatcacatcggccctagacaggggtggcagggtgccacttcccattaatgacctgaaggagggcgtttatgtcatggttggtgcagatgtcccgttttcttcttgtttacgagaagttgaaaatccacagaatcaattgagatgtagtcaagaaatggagcctgtaataacatgtgataaaaaatttcgtactcaattttacattgactggtgcaaaatttcattggttgataaaacaaagcaagtgtccacctatcaggaagtgattcgtggagaggggattttacctgatggtggagaatacaaacccccttctgattctttgaaaagcagagactattacacggatttcctaattacactggctgtgccctcggcagtggcactggtcctttttctaatacttgcttatatcatgtgctgccgacgggaaggcgtggaaaagagaaacatgcaaacaccagacatccaactggtccatcacagtgctattcagaaatctaccaaggagcttcgagacatgtccaagaatagagagatagcatggcccctgtcaacgcttcctgtgttccaccctgtgactggggaaatcatacctcctttacacacagacaactatgatagcacaaacatgccattgatgcaaacgcagcagaacttgccacatcagactcagattccccaacagcagactacaggtgagtgctaagaataataaattaatgtttatgaatgaatctaatagattaaaagataattatggcactatataatttatgaagctttatcttcaccaaataaggcaaaacacttgtgtcattccttaatcagacttaaaacctcagaataatagcttagattattacatagattggcatcagaatgataaacacagggtaaatgatcttagagcaaaagcatccatggaggtcctgtctaattaaggaagactgaatgaaacccctttccttcagtgaagttccctattcttccccttggtatgaaagattcttagcttggatgcatccaggatttgtctcagtaagtgagcagcttgaagtttcaagctctcttac

SEQ ID NO: 27208 - DNA, 1409 bp, Homo sapiens
  source 1..1409: mol_type = unassigned DNA
atgcaattgccccggtggtgggagctgggagacccctgtgcttggacgggacagggtcgggggacacgcaggatgagccccgcgaccactggcacattcttgctgacagtgtacagtattttctccaaggtacactccgatcggaatgtatacccatcagcaggtgtcctctttgttcatgttttggaaagagaatattttaagggggaatttccaccttacccaaaacctggcgagattagtaatgatcccataacatttaatacaaatttaatgggttacccagaccgacctggatggcttcgatatatccaaaggacaccatatagtgatggagtcctatatgggtccccaacagctgaaaatgtggggaagccaacaatcattgagataactgcctacaacaggcgcacctttgagactgcaaggcataatttgataattaatataatgtctgcagaagacttcccgttgccatatcaagcagaattcttcattaagaatatgaatgtagaagaaatgttggccagtgaggttcttggagactttcttggcgcagtgaaaaatgtgtggcagccagagcgcctgaacgccataaacatcacatcggccctagacaggggtggcagggtgccacttcccattaatgacctgaaggagggcgtttatgtcatggttggtgcagatgtcccgttttcttcttgtttacgagaagttgaaaatccacagaatcaattgagatgtagtcaagaaatggagcctgtaataacatgtgataaaaaatttcgtactcaattttacattgactggtgcaaaatttcattggttgataaaacaaagcaagtgtccacctatcaggaagtgattcgtggagaggggattttacctgatggtggagaatacaaacccccttctgattctttgaaaagcagagactattacacggatttcctaattacactggctgtgccctcggcagtggcactggtcctttttctaatacttgcttatatcatgtgctgccgacgggaaggcgtcatccaactggtccatcacagtgctattcagaaatctaccaaggagcttcgagacatgtccaagaatagagagatagcatggcccctgtcaacgcttcctgtgttccaccctgtgactggggaaatcatacctcctttacacacagacaactatgatagcacaaacatgccattgatgcaaacgcagcagaacttgccacatcagactcagattccccaacagcagactacaggagattttcgtttgacaacttttcaaagatttgaggtaaatggtatccctgaagaaagaaaactgactgaagcaatgaatttataatcagacaatatagcagttacatcacatttcttttctcttccaataatgcatga

SEQ ID NO: 27209 - DNA, 1666 bp, Homo sapiens
  source 1..1666: mol_type = unassigned DNA
ggacggacggcctagccaggccaagaatgcaattgccccggtggtgggagctgggagacccctgtgcttggacgggacagggtcgggggacacgcaggatgagccccgcgaccactggcacattcttgctgacagtgtacagtattttctccaaggtacactccgatcggaatgtatacccatcagcaggtgtcctctttgttcatgttttggaaagagaatattttaagggggaatttccaccttacccaaaacctggcgagattagtaatgatcccataacatttaatacaaatttaatgggttacccagaccgacctggatggcttcgatatatccaaaggacaccatatagtgatggagtcctatatgggtccccaacagctgaaaatgtggggaagccaacaatcattgagataactgcctacaacaggcgcacctttgagactgcaaggcataatttgataattaatataatgtctgcagaagacttcccgttgccatatcaagcagaattcttcattaagaatatgaatgtagaagaaatgttggccagtgaggttcttggagactttcttggcgcagtgaaaaatgtgtggcagccagagcgcctgaacgccataaacatcacatcggccctagacaggggtggcagggtgccacttcccattaatgacctgaaggagggcgtttatgtcatggttggtgcagatgtcccgttttcttcttgtttacgagaagttgaaaatccacagaatcaattgagatgtagtcaagaaatggagcctgtaataacatgtgataaaaaatttcgtactcaattttacattgactggtgcaaaatttcattggttgataaaacaaagcaagtgtccacctatcaggaagtgattcgtggagaggggattttacctgatggtggagaatacaaacccccttctgattctttgaaaagcagagactattacacggatttcctaattacactggctgtgccctcggcagtggcactggtcctttttctaatacttgcttatatcatgtgctgccgacgggaaggcgtggaaaagagaaacatgcaaacaccagacatccaactggtccatcacagtgctattcagaaatctaccaaggagcttcgagacatgtccaagaatagagagatagcatggcccctgtcaacgcttcctgtgttccaccctgtgactggggaaatcatacctcctttacacacagacaactatgatagcacaaacatgccattgatgcaaacgcagcaatggagtttcgctcctgttgcccaggctggagtgcaatggagcgatcttggctcactgcagcctccgcctcccaggaacttgccacatcagactcagattccccaacagcagactacaggtaaatggtatccctgaagaaagaaaactgactgaagcaatgaatttataatcagacaatatagcagttacatcacatttcttttctcttccaataatgcatgagcttttctggcatatgttatgcatgttggcagtattaagtgtataccaaataatacaacataactttcattttactaatgtatttttttgtacttaaagcatttttgacaatttgtaaaacattgatgactttatatttgttacaataaaagttgatctttaaa

SEQ ID NO: 27210 - DNA, 1624 bp, Homo sapiens
  source 1..1624: mol_type = unassigned DNA
gttgctgaagcttcatcctttgctctcattctgtaagtcatagaaaagtttgaaacattctgtctgtggtagagctcgggccagctgtagttcattcgccagtgtgcttttcttaatatctaagatggtgcgtgagcagtacactacagccacagaaggcatctgcatagagaggccagagaatcagtatgtctacaaaattggcatttatggctggagaaagcgctgtctctacttgtttgttcttcttttactcatcatcctcgttgtgaatttagctcttacaatttggattcttaaagtgatgtggttttctccagcaggaatgggccacttgtgtgtaacaaaagatggactgcgcttggaaggggaatcagaatttttattcccattgtatgccaaagaaatacactccagagtggactcatctctgcttctacaatcaacccagaatgtgactgtaaatgcgcgcaactcagaaggggaggtcacaggcaggttaaaagtcggtcccaaaatggtagaagtccagaatcaacagtttcagatcaactccaacgacggcaagccactatttactgtagatgagaaggaagttgtggttggtacagataaacttcgagtaactgggcctgaaggggctctttttgaacattcagtggagacaccccttgtcagagccgacccgtttcaagaccttagattagaatcccccactcggagtctaagcatggatgccccaaggggtgtgcatattcaagctcacgctgggaaaattgaggcgctttctcaaatggatattctttttcatagtagtgatggaatgcttgtgcttgatgctgaaactgtgtgcttacccaagctggtgcaggggacgtggggtccctctggcagctcacagagcctctacgaaatctgtgtgtgtccagatgggaagctgtacctgtctgtggccggtgtgagcaccacgtgccaggagcacaaccacatctgcctctgagctgcctgcgtcctctcggtgagctgtgcagtgccggccccagatcctcacacccagggagcagctgcacatcgtgaaagactgaggcagcgtggatgggaagtaaacgcttccagaggaactcagaaaaaattatgtgccagtgaaagtgtttggacaaaaactacatgatctcaaaatgcacgtggatgtgagacacaaaagttgacaaaatggaaaagcaatgtgtttttccactggattaattttcaccggaacaattgcgaattctctctgcctcgcctccccctatcttgtccgtgtgggcacacactgagtgttgagttgccgtgtggagttaatgtatgacgctccactgtggatatctaatgccctgttgagagtagccttgctcagtactaaaatgccccaaagttctatacagcatttcctttatagcattcaaacctcacatcctcccttcagtttaatgcaagtaagtcaggtttcacaagaaaattttcaagttttgaagggaatttgaggttgatctggttttcaagatgtagttaaaggaataaatcactcaaaattaaactttctgtatatagtcaataagcaataaaaacctcatttttcagagtt

SEQ ID NO: 27211 - DNA, 1415 bp, Homo sapiens
  source 1..1415: mol_type = unassigned DNA
atcctttgctctcattctgtaagtcatagaaaagtttgaaacattctgtctgtggtagagctcgggccagctgtagttcattcgccagtgtgcttttcttaatatctaagcacaaagctgtatcatcacaacctgtaggatggtgcgtgagcagtacactacagccacagaaggcatctgcatagagaggccagagaatcagtatgtctacaaaattggcatttatggctggagaaagcgctgtctctacttgtttgttcttcttttactcatcatcctcgttgtgaatttagctcttacaatttggattcttaaagtgatgtggttttctccagcaggaatgggccacttgtgtgtaacaaaagatggactgcgcttggaaggggaatcagaatttttattcccattgtatgccaaagaaatacactccagagtggactcatctctgcttctacaatcaacccagaatgtgactgtaaatgcgcgcaactcagaaggggaggtcacaggcaggttaaaagtcggtcccaaaatggtagaagtccagaatcaacagtttcagatcaactccaacgacggcaagccactatttactgtagatgagaaggaagttgtggttggtacagataaacttcgagtaactgggcctgaaggggctctttttgaacattcagtggagacaccccttgtcagagccgacccgtttcaagaccttagattagaatcccccactcggagtctaagcatggatgccccaaggggtgtgcatattcaagctcacgctgggaaaattgaggcgctttctcaaatggatattctttttcatagtagtgatggaatgcttgtgcttgatgctgaaactgtgtgcttacccaagctggtgcaggggacgtggggtccctctggcagctcacagagcctctacgaaatctgtgtgtgtccagatgggaagctgtacctgtctgtggccggtgtgagcaccacgtgccaggagcacaaccacatctgcctctgagctgcctgcgtcctctcggtgagctgtgcagtgccggccccagatcctcacacccagggagcagctgcacatcgtgaaagactgaggcagcgtggatgggaagtaaacgcttccagaggaactcagaaaaaattatgtgccagtgaaagtgtttggacaaaaactacatgatctcaaaatgcacgtggatgtgagacacaaaagttgacaaaatggaaaagcaatgtgtttttccactggattaattttcaccggaacaattgcgaattctctctgcctcgcctccccctatcttgtccgtgtgggcacacactgagtgttgagttgccgtgtggagttaatgtatgacgctccactgtggatatctaatgccctgttgagagtagccttgctcagtact

SEQ ID NO: 27212 - DNA, 1097 bp, Homo sapiens
  source 1..1097: mol_type = unassigned DNA
acattctgtctgtggtagagctcgggccagctgtagttcattcgccagtgtgcttttcttaatatctaagtcttattttcagaaactatgaataaatcttctacaccatcttcccgagagctttagtaagacctcagactggagtagagttgaaggagggaatgccagtctgaagaaggaaaggaagaggagagacagcaaggagaacttcagttgtcaagatggtgcgtgagcagtacactacagccacagaaggcatctgcatagagaggccagagaatcagtatgtctacaaaattggcatttatggctggagaaagcgctgtctctacttgtttgttcttcttttactcatcatcctcgttgtgaatttagctcttacaatttggattcttaaagtgatgtggttttctccagcaggaatgggccacttgtgtgtaacaaaagatggactgcgcttggaaggggaatcagaatttttattcccattgtatgccaaagaaatacactccagagtggactcatctctgcttctacaatcaacccagaatgtgactgtaaatgcgcgcaactcagaaggggaggtcacaggcaggttaaaagtcggtcccaaaatggtagaagtccagaatcaacagtttcagatcaactccaacgacggcaagccactatttactgtagatgagaaggaagttgtggttggtacagataaacttcgagtaactgggcctgaaggggctctttttgaacattcagtggagacaccccttgtcagagccgacccgtttcaagaccttagattagaatcccccactcggagtctaagcatggatgccccaaggggtgtgcatattcaagctcacgctgggaaaattgaggcgctttctcaaatggatattctttttcatagtagtgatggaatgcttgtgcttgatgctgaaactgtgtgcttacccaagctggtgcaggggacgtggggtccctctggcagctcacagagcctctacgaaatctgtgtgtgtccagatgggaagctgtacctgtctgtggccggtgtgagcaccacgtgccaggagcacaaccacatctgcctctga

SEQ ID NO: 27213 - DNA, 722 bp, Homo sapiens
  source 1..722: mol_type = unassigned DNA
agtccagacagcctgggaggggagaaggagttggagctcaagttggagacagcgaggagaaacctgccatagccagggtgtgtctttgatcctcttcaggaggtgaggagaagccagaggtccttggtgtgccctcagaaatctgcctgcagttctcaccaagccgctgtgaaaatggggataaacacccgggagctgtttctcaacttcactattgtcttgattacggttattcttatgtggctccttgtgaggtcctatcagtactgagaggccatgccatggtcctgggattgactgagatgctccggagctgcctgctctatgccctgagaccccactgctgtcattgtcacaggatgccattctccatccgagggcacctgtgacctgcactcacaatatctgctatgctgtagtgctaggattgattatgtgttctccaaagatgctgctcccaagggctgccaagtgtttgccagggaacggtagatttattccccaactcttaactgaaaatgtgttagacaagccacaaagttaaaattaaactggattcatgatgatgtaggattgttacaagcccctgatctgtctcaccacacatcccttcaacccacacggtctgcaaccaaactctaattcaacctgccagaaggaatgttagaggaagtctttgtcagcccttatagctatcatgtgaataaagttaagtcaacttc

SEQ ID NO: 27214 - DNA, 436 bp, Homo sapiens
  source 1..436: mol_type = unassigned DNA
ctgtctgctgctgaggcctgcagagattaatataaacggcaggaggtgaggagaagccagaggtccttggtgtgccctcagaaatctgcctgcagttctcaccaagccgctgtgaaaatggggataaacacccgggagctgtttctcaacttcactattgtcttgattacggttattcttatgtggctccttgtgaggtcctatcagtactgagaggccatgccatggtcctgggattgactgagatgctccggagctgcctgctctatgccctgagaccccactgctgtcattgtcacaggatgccattctccatccgagggcacctgtgacctgcactcacaatatctgctatgctgtagtgctaggattgattatgtgttctccaaagatgctgctcccaagggctgccaagtgtttgccagggaacggtaga

SEQ ID NO: 27215 - DNA, 906 bp, Homo sapiens
  source 1..906: mol_type = unassigned DNA
attttcttgctcttgagctctggcacttctctgctgctgtctgctgctgaggcctgcagagattaatataaacggcagcctcgaaccttcggagggtgttcctttgagatgtttcatcagtgacatcacagtgattgccagcttccacggactactttaggcgctgcccagagtccaggagtccagacagcctgggaggggagaaggagttggagctcaagttggagacagcgaggagaaacctgccatagccagggtgtgtctttgatcctcttcaggaggtgaggagaagccagaggtccttggtgtgccctcagaaatctgcctgcagttctcaccaagccgctgtgaaaatggggataaacacccgggagctgtttctcaacttcactattgtcttgattacggttattcttatgtggctccttgtgaggtcctatcagtactgagaggccatgccatggtcctgggattgactgagatgctccggagctgcctgctctatgccctgagaccccactgctgtcattgtcacaggatgccattctccatccgagggcacctgtgacctgcactcacaatatctgctatgctgtagtgctaggattgattatgtgttctccaaagatgctgctcccaagggctgccaagtgtttgccagggaacggtagatttattccccaactcttaactgaaaatgtgttagacaagccacaaagttaaaattaaactggattcatgatgatgtaggattgttacaagcccctgatctgtctcaccacacatcccttcaacccacacggtctgcaaccaaactctaattcaacctgccagaaggaatgttagaggaagtctttgtcagcccttatagctatcatgtgaataaagttaagtcaacttcaaaaa

SEQ ID NO: 27216 - DNA, 2788 bp, Homo sapiens
  source 1..2788: mol_type = unassigned DNA
ctctgctgcgggctccccgtggcctttggaggctcggtgagtcggctccaaatgttttccatatttgttcagcctccataattcgaataccagggcaggccgagccagccgtgcgccgcgctccagggcccagggcgccgcacacgcacccacccacccacccagcctcgcagcgccatgggcaagaacaagcagccacgcggccagcagaggcaggggggcccgccggccgcggacgccgctgggcccgacgacatggagccgaagaagggcacgggggcccccaaggagtgcggggaggaggagccccggacctgctgcggctgccggttcccgctgctgctcgccctgctgcagctggccctgggcatcgccgtgaccgtggtgggcttcctcatggcgagcatcagctcctccctgctagtcagggacactccattttgggctgggatcattgtctgcttagtggcctatcttggcttgtttatgctttgtgtctcatatcaggttgacgaacggacatgtattcaattttctatgaaactgttatactttctgctgagtgccctgggcctgacggtctgtgtgctggccgtggcctttgccgcccaccactattcgcagctcacacagtttacctgtgagaccacactcgactcttgccagtgcaaactgccctcctcggagccgctcagcaggacctttgtttaccgggatgtgacggactgtaccagcgtcactggcactttcaaactgttcttactcatccagatgattcttaatttggtctgcggccttgtgtgcttgttggcctgctttgtgatgtggaaacataggtaccaggtcttctatgtgggtgtcaggatatgctccctcacggcttccgaaggcccccagcaaaagatctaacattcttgctcaaagttgcgagagaaagtagcacatggagtagctgaggttaaacaaacaaaaaaaaattttaaacaaagaaaggaaaaaaattgacaataaaagtcactcttctaattgaatatttttatatttttatgaaacaaaagagcatttcttcaggtttctattgtattttttttaacattcttgcagagaaagcaagatccaaattgattttgggatattaaaagttaacagaacactgaacaaggaaagaatggcatagatctatctttacagtctggagttaattcctgttaactcattttatccattccttacataatcttctttcctgttagtccagtttgatggtgtgaatggtgaatttcaggcccagttgctaaattttgtggcatcttcctctagtccttcccacctccagtcatcagccccactctgtcttggagacaggcaggaggtgggggaagagctgaatctctttattttccctggtagagacatcttcaaggcatgaaatagcttaaagagcagagtagaaacggaagaggctttgcaaaaggctagataactaacaacacctgggttggggcggcggcctcttctcttcagctcccttagcttggctccgtaagtggatcacttgccaaatgctttagatgattgcctctcaataattgaaaggtggtggtagttgtattctaaatgatgtagaaggtttaaaaataattacattatgcttctattctatcatctaaaacaaatcattaaaactaatttctagctaattgttaattataattatgctcagaagtctatttaatgagctctgactgtacttacgctgcactgtcggtgttaagagaaattactctcacaagagcagaggcctgaagattctttcttctgaaagccaagcaccacaaggaaaaaaaaaattattaatagctcaggttaaaaacacccatttaaacaaaaacaagagcatttgtaataggaagtgtttatacaaacagcacatttgtgatatgttgaaaagcatctctcttggcaaccaatctatgtttgaggaagattgggtaatgctgatgtgttccattcatgaaactgtatttgatacataatcctattattaattcgtatgcttagtcaacctaggaaatcaaaataatgttttgaagttcttatttgagcaatatggccttgacttggagggtagttttagttgttttgtttttaagtgactgtggtttaaagcacaaatgccccaaggtggggagacttctctctgtgattattgttgctattaaattctgaactgtatccatattttaaggaaggagctaaaaatggaaattcatgaaacataaatggtatcaagaactttatcagtatgctttgttgaaagcagaaattaagataataattgagttcaattcgcctctccgcattgcctattgatacactttactaatcatgaaattctaacctaaaaggaaaacattttcctgcttgtcttagaagaaagtggaataattccactgattgtgataatggtttcaatttctacacaatataaatatccagtataaaggaaagcgttaagtcggtaagctagaggattgtaaatatcttttatgtcctctagataaaacacccgattaacagatgttaaaccttttaatgttttgatttgctttaaaaatggccttcctacacattagctccagctaaaaagacacattggagagcttagaggataagtctctggagcagaatttatcacacacaaaagttacaccaacagaataccaagcagaatgatgaggacctgtaaaataccttgtgccctattaaaaaaaaaaaaaaaaaaaaa

SEQ ID NO: 27217 - DNA, 2503 bp, Homo sapiens
  source 1..2503: mol_type = unassigned DNA
gcacacgcgcgcactcgcagcctgtctgaagtgcagaggttcaggcggccaagggacccgcgccggtttccgcgggcgacctgcaaatcctgcccggggcccggcaggcgctgcgtcccggcgcgttggcagttggcgacccccctcgaatcccccctctgctgcgggctccccgtggcctttggaggctcggtctgcttagtggcctatcttggcttgtttatgctttgtgtctcatatcaggttgacgaacggacatgtattcaattttctatgaaactgttatactttctgctgagtgccctgggcctgacggtctgtgtgctggccgtggcctttgccgcccaccactattcgcagctcacacagtttacctgtgagaccacactcgactcttgccagtgcaaactgccctcctcggagccgctcagcaggacctttgtttaccgggatgtgacggactgtaccagcgtcactggcactttcaaactgttcttactcatccagatgattcttaatttggtctgcggccttgtgtgcttgttggcctgctttgtgatgtggaaacataggtaccaggtcttctatgtgggtgtcaggatatgctccctcacggcttccgaaggcccccagcaaaagatctaacattcttgctcaaagttgcgagagaaagtagcacatggagtagctgaggttaaacaaacaaaaaaaaattttaaacaaagaaaggaaaaaaattgacaataaaagtcactcttctaattgaatatttttatatttttatgaaacaaaagagcatttcttcaggtttctattgtattttttttaacattcttgcagagaaagcaagatccaaattgattttgggatattaaaagttaacagaacactgaacaaggaaagaatggcatagatctatctttacagtctggagttaattcctgttaactcattttatccattccttacataatcttctttcctgttagtccagtttgatggtgtgaatggtgaatttcaggcccagttgctaaattttgtggcatcttcctctagtccttcccacctccagtcatcagccccactctgtcttggagacaggcaggaggtgggggaagagctgaatctctttattttccctggtagagacatcttcaaggcatgaaatagcttaaagagcagagtagaaacggaagaggctttgcaaaaggctagataactaacaacacctgggttggggcggcggcctcttctcttcagctcccttagcttggctccgtaagtggatcacttgccaaatgctttagatgattgcctctcaataattgaaaggtggtggtagttgtattctaaatgatgtagaaggtttaaaaataattacattatgcttctattctatcatctaaaacaaatcattaaaactaatttctagctaattgttaattataattatgctcagaagtctatttaatgagctctgactgtacttacgctgcactgtcggtgttaagagaaattactctcacaagagcagaggcctgaagattctttcttctgaaagccaagcaccacaaggaaaaaaaaaattattaatagctcaggttaaaaacacccatttaaacaaaaacaagagcatttgtaataggaagtgtttatacaaacagcacatttgtgatatgttgaaaagcatctctcttggcaaccaatctatgtttgaggaagattgggtaatgctgatgtgttccattcatgaaactgtatttgatacataatcctattattaattcgtatgcttagtcaacctaggaaatcaaaataatgttttgaagttcttatttgagcaatatggccttgacttggagggtagttttagttgttttgtttttaagtgactgtggtttaaagcacaaatgccccaaggtggggagacttctctctgtgattattgttgctattaaattctgaactgtatccatattttaaggaaggagctaaaaatggaaattcatgaaacataaatggtatcaagaactttatcagtatgctttgttgaaagcagaaattaagataataattgagttcaattcgcctctccgcattgcctattgatacactttactaatcatgaaattctaacctaaaaggaaaacattttcctgcttgtcttagaagaaagtggaataattccactgattgtgataatggtttcaatttctacacaatataaatatccagtataaaggaaagcgttaagtcggtaagctagaggattgtaaatatcttttatgtcctctagataaaacacccgattaacagatgttaaaccttttaatgttttgatttgctttaaaaatggccttcctacacattagctccagctaaaaagacacattggagagcttagaggataagtctctggagcagaatttatcacacacaaaagttacaccaacagaataccaagcagaatgatgaggacctgtaaaataccttgtgccctatt

SEQ ID NO: 27218 - DNA, 1218 bp, Homo sapiens
  source 1..1218: mol_type = unassigned DNA
atatttgttcagcctccataattcgaataccagggcaggccgagccagccgtacgccgctgggcccgacgacatggagccgaagaagggcacgggggcccccaaggagtgcggggaggaggagccccggacctgctgcggctgccggttcccgctgctgctcgccctgctgcagctggccctgggcatcgccgtgaccgtggtgggcttcctcatggcgagcatcagctcctccctgctagtcagggacactccattttgggctgggatcattgtctgcttagtggcctatcttggcttgtttatgctttgtgtctcatatcaggttgacgaacggacatgtattcaattttctatgaaactgttatactttctgctgagtgccctgggcctgacggtctgtgtgctggccgtggcctttgccgcccaccactattcgcagctcacacagtttacctgtgagaccacactcgactcttgccagtgcaaactgccctcctcggagccgctcagcaggacctttgtttaccgggatgtgacggactgtaccagcgtcactggcactttcaaactgttcttactcatccagatgattcttaatttggtctgcggccttgtgtgcttgttggcctgctttgtgatgtggaaacataggtaccaggtcttctatgtgggtgtcaggatatgctccctcacggcttccgaaggcccccagcaaaagatctaacattcttgctcaaagttgcgagagaaagtagcacatggagtagctgaggttaaacaaacaaaaaaaaattttaaacaaagaaaggaaaaaaattgacaataaaagtcactcttctaattgaatatttttatatttttatgaaacaaaagagcatttcttcaggtttctattgtattttttttaacattcttgcagagaaagcaagatccaaattgattttgggatattaaaagttaacagaacactgaacaaggaaagaatggcatagatctatctttacagtctggagttaattcctgttaactcattttatccattccttacataatcttctttcctgttagtccagtttgatggtgtgaatggtgaatttcaggcccagttgctaaattttgtggcatcttcctctagtccttcccacctccagtcatcagccccactctgtcttggagacaggcaggaggtgggggaagagctgaatctctttatttt

SEQ ID NO: 27219 - DNA, 419 bp, Homo sapiens
  source 1..419: mol_type = unassigned DNA
atgggcaagaacaagcagccacgcggccagcagaggcaggggggcccgccggccgcggacgccgctgggcccgacgacatggagccgaagaagggcacgggggcccccaaggagtgcggggaggaggagccccggacctgctgcggctgccggttcccgctgctgctcgccctgctgcagctggccctgggcatcgccgtgaccgtggtgggcttcctcatggcgagcatcagctcctccctgctagtcagggacactccattttgggctgggatcattgtctgcttagtggcctatcttggcttgtttatgctttgtgtctcatatcaggttgacgaacggacatgtattcaattttctatgaaaatccattgtcatgacttctgagctgtttgaaagagaatgttctcagaatcaag

SEQ ID NO: 27220 - DNA, 553 bp, Homo sapiens
  source 1..553: mol_type = unassigned DNA
actctgcttgaacctccttaagggtattttaacttctcactctgcttgaacctccgtccttcgggacgcaaggattcagggagcttcctttcctggctgcgagggatcttcctgagcagagctctccgggttccccggctcgcggggcccggcgaagggcaggtctgcttagtggcctatcttggcttgtttatgctttgtgtctcatatcaggttgacgaacggacatgtattcaattttctatgaaactgttatactttctgctgagtgccctgggcctgacggtctgtgtgctggccgtggcctttgccgcccaccactattcgcagctcacacagtttacctgtgagaccacactcgactcttgccagtgcaaactgccctcctcggagccgctcagcaggacctttgtttaccgggatgtgacggactgtaccagcgtcactggcactttcaaactgttcttactcatccagatgattcttaatttggtctgcggccttgtgtgcttgttggcctgctttgtgatgtggaaacataggtaccaggtct

SEQ ID NO: 27221 - DNA, 587 bp, Homo sapiens
  source 1..587: mol_type = unassigned DNA
attgtaccaggattgatgtgctcggtgcccagaaggcagtaagctctgctccctagcagccttggtctgcttagtggcctatcttggcttgtttatgctttgtgtctcatatcaggttgacgaacggacatgtattcaattttctatgaaactgttatactttctgctgagtgccctgggcctgacggtctgtgtgctggccgtggcctttgccgcccaccactattcgcagctcacacagtttacctgtgagaccacactcgactcttgccagtgcaaactgccctcctcggagccgctcagcaggacctttgtttaccgggatgtgacggactgtaccagcgtcactggcactttcaaactgttcttactcatccagatgattcttaatttggtctgcggccttgtgtgcttgttggcctgctttgtgatgtggaaacataggtaccaggtcttctatgtgggtgtcaggatatgctccctcacggcttccgaaggcccccagcaaaagatctaacattcttgctcaaagttgcgagagaaagtagcacatggagtagctgaggttaaacaaacaaaaaaaaatt

SEQ ID NO: 27222 - DNA, 7825 bp, Homo sapiens
  source 1..7825: mol_type = unassigned DNA
tttctcgctcgctcccgttccccggacgcggcggatgagccggccccgctggggaaggctccgggcggcggcgggcggccgggaggaggctgcgtgctcggggctggggctgcgagcggggtgattttgtattaaaatgaggaggaggaagaagaggcacccacagcggcagcggcggcggcggcggcagcagcagcaggagcagcggcggagagggctgcagcccgggcggacgcgcggagccgagcggggcacggcggcggcagcgacagcggccgggatgagtcaactaataatttaatgggggcagagacggcagcgaggggtagagctagcgagggagagagcgagagaagcagccccgtccggggactcgcgctcacactcacgcacacacacaaacacacacacacctctccctgtgccacccagcaacacccggcctcgtcacaacaacaacagccgcggccgccctctatcctgcccgggggcccagccgaaagccagggcgactctagaggacgctgcccgcccccctctttcatttcgggaaactcctgatcagttttgtcggggtttctgggtttcttttcccccaaagtcctagtgccattgtggtgctcgttgtttacctcggactctggacgagtgagagcttggcgactttttggggggagggggcggggagtttgtcgctgcctaggcggtggaggtggctgggggtgccttctgatcttcctcctcctccccctccccccgaacctcttctctcctcacttgctgggaccccagacgctcacagccccgcgtcaatgggcagggagagggtccttgcggctgttgtcagcgagggcagaatcaaaagtggcattttagtgcctttccggggcttttctcgcgaccccctgccccccaccctcgctgtcccccgctagatgccctcgttgggggtgcgaggctgtggggaaaagtttaaggtttgttaatattagtcgcgattgttggcgaggggggtgggggtgattggaagggaggcgaggtggccttcccaatgcgcgttattcggggttattgaagaataatattgcaagtgacagccagaagtagactttctgtcctcacaccgaagaacccgagtgagcaggagggagggagagacgcgaagagaccttttttcctttttggagaccttgtccgcagtgatttttttttttttaagagaatcctcagtcaccacgtcgtttccccagcaccatcacagtgtacagctcataacgggttttgctttgtttttacgatttccccccaacgaatcacttgtcagatcaattttatcttcttcctcctccctgcttcccactctcccctcctccccatcgcaaaccctgttctctgaggttagacattttacaaacccctatatgttggttttcgaattgtgattttttttttaaacccctttctcatggctactcttctagacgtttatttctgcccttcccccgcttaggggggcgggggtaggggaaaggaaaataatacaatttcaggggaagtcgccttcaggtctgctgcttttttatttttttttttttaattaaaaaaaaaaaggacatagaaaacatcagtcttgaacttctcttcaagaacccgggctgcaaaggaaatctcctttgtttttgttatttatgtgctgtcaagttttgaagtggtgatctttagacagtgactgagtatggatcatttgaacgaggcaactcaggggaaagaacattcagaaatgtctaacaatgtgagtgatccgaagggtccaccagccaagattgcccgcctggagcagaacgggagcccgctaggaagaggaaggcttgggagtacaggtgcaaaaatgcagggagtgcctttaaaacactcgggccatctgatgaaaaccaaccttaggaaaggaaccatgctgccagttttctgtgtggtggaacattatgaaaacgccattgaatatgattgcaaggaggagcatgcagaatttgtgctggtgagaaaggatatgcttttcaaccagctgatcgaaatggcattgctgtctctaggttattcacatagctctgctgcccaggccaaagggctaatccaggttggaaagtggaatccagttccactgtcttacgtgacagatgcccctgatgctacagtagcagatatgcttcaagatgtgtatcatgtggtcacattgaaaattcagttacacagttgccccaaactagaagacttgcctcccgaacaatggtcgcacaccacagtgaggaatgctctgaaggacttactgaaagatatgaatcagagttcattggccaaggagtgccccctttcacagagtatgatttcttccattgtgaacagtacttactatgcaaatgtctcagcagcaaaatgtcaagaatttggaaggtggtacaaacatttcaagaagacaaaagatatgatggttgaaatggatagtctttctgagctatcccagcaaggcgccaatcatgtcaattttggccagcaaccagttccagggaacacagccgagcagcctccatcccctgcgcagctctcccatggcagccagccctctgtccggacacctcttccaaacctgcaccctgggctcgtatcaacacctatcagtcctcaattggtcaaccagcagctggtgatggctcagctgctgaaccagcagtatgcagtgaatagacttttagcccagcagtccttaaaccaacaatacttgaaccaccctccccctgtcagtagatctatgaataagcctttggagcaacaggtttcgaccaacacagaggtgtcttccgaaatctaccagtgggtacgcgatgaactgaaacgagcaggaatctcccaggcggtatttgcacgtgtggcttttaacagaactcagggcttgctttcagaaatcctccgaaaggaagaggaccccaagactgcatcccagtctttgctggtaaaccttcgggctatgcagaatttcttgcagttaccggaagctgaaagagaccgaatataccaggacgaaagggaaaggagcttgaatgctgcctcggccatgggtcctgcccccctcatcagcacaccacccagccgtcctccccaggtgaaaacagctactattgccactgaaaggaatgggaaaccagagaacaataccatgaacattaatgcttccatttatgatgagattcagcaggaaatgaagcgtgctaaagtgtctcaagcactgtttgcaaaggttgcagcaaccaaaagccagggatggttgtgcgagctgttacgctggaaagaagatccttctccagaaaacagaaccctgtgggagaacctctccatgatccgaaggttcctcagtcttcctcagccagaacgtgatgccatttatgaacaggagagcaacgcggtgcatcaccatggcgacaggccgccccacattatccatgttccagcagagcagattcagcaacagcagcagcaacagcaacagcagcagcagcagcagcaggcaccgccgcctccacagccacagcagcagccacagacaggccctcggctccccccacggcaacccacggtggcctctccagcagagtcagatgaggaaaaccgacagaagacccggccacgaacaaaaatttcagtggaagccttgggaatcctccagagtttcatacaagacgtgggcctgtaccctgacgaagaggccatccagactctgtctgcccagctcgaccttcccaagtacaccatcatcaagttctttcagaaccagcggtactatctcaagcaccacggcaaactgaaggacaattccggtttagaggtcgatgtggcagaatataaagaagaggagctgctgaaggatttggaagagagtgtccaagataaaaatactaacacccttttttcagtgaaactagaagaagagctgtcagtggaaggaaacacagacattaatactgatttgaaagactgagataaaagtatttgtttcgttcaacagtgccactggtatttactaacaaaatgaaaagtccaccttgtcttctctcagaaaacctttgttgttcattgtttggccaatgaatcttcaaaaacttgcacaaacagaaaagttggaaaaggataatacagactgcactaaatgttttcctctgttttacaaactgcttggcagccccaggtgaagcatcaaggattgtttggtattaaaatttgtgttcacgggatgcaccaaagtgtgtaccccgtaagcatgaaaccagtgttttttgttttttttttagttcttattccggagcctcaaacaagcattataccttctgtgattatgatttcctctcctataattatttctgtagcactccacactgatctttggaaacttgccccttatttaaaaaaaaaaaagaaaaaaaagagtttgttactctattgtatgttacaaaagaactatagactgtggaatgcagtttaaagatgacatatgccaacaaatgccttgtattatatggcactgccgtaattcaaatttgtttttattttggaaataaaagttcactgtacttttttttcattctcattgttacatgattttttaaaaaaaggaaaagaaaatgtgaaacacaatttagtcctcattatttatttgtagatcctgcagcatcatgttgtaattaattttttggaagtttccgttaaatgtaatattgcttctcttgttaccatactgattcttttctatttataaatgtattttgatgggcagtaaaacaaagtgtcttaaaagttttaaatagagaaaatgtgctttacacagttgcctataaaaagtgctctatgttatccaagcaattcatactataagcttcactcttattgttgtatgcaatttttactatcatgcaaataagcttaggtaaataaaactaatagatcaccttagaaaattatgcaattaatgtgaaaataattgatgtttgcaatgtgtcttcctttggtttacaatcaattttaaagctacatctgtataaaatttctgtataaaggtgtatttcttttttatgagtttatggctatgaaaacagctattttgttacagctggctgtttttataagtgtatcacaattttctttatgcagaaatgttctgactaggagtggttattgactgtaactacacaattaaaattgtttgtatcgtatgacatggtagggtttgtctgcttatgtgaagtaactaaaggagtcaaaggatggccctctcatttaggtgcatgttaataacttgttatttcactgattttaaaaagagcaattgacaagttacttgaaacactgtaaatttaaatcacaaacacatgctcatttttaaataggtatgaaatttcacaatgaaaataacctgtttggttaacattttgcttaataagtagagataggatggtcaaaagactctccgacaaaaacaaatccagtctctagcagttatgttgttagaatggattcatctgtgcttatttcacaatacttcatttatagcaatgcttttccttaagctaatgtataaatatttctaaaggccattaatagtaacaaaataagtaggggaaaaaatggaccttctgtataaaaaccccttagcttttttttttcacaagttataagtggaataagttaataactgagctcgtaagtgtatctcataactataagagctacatgaagaaaataggaataacacacctggtatttaaacacaatcttcaaaattcttgcaacattaaacatagtaaaatgccagaatataaaatgaggtgtgctaatggtcacaggattgaggccagcattacagtttggggtgatttttcttttatttgctccctcactttgtttcctagatgctagtaggggtatctgggttgcttgagataccattttgcaattgccccttctctttctgcctaccatcttctcaggccctgatgagcttattggtaggcaactgggctgctttagtgttgaacttgtactttagaaactgaagtggaatcattgaaaactttcaataaagctttaaagttccatttacttttgaagcacagctaagctcctctgaaggcagctggtttgttgcaaacttaaaattgtactgaaaagttgccactttttatttagtaagaaaacaaacattctggctcactagagttcagaaaagtaataatttgagccaaaggaatttgaattaagaaaatagaaactaggtttcatgtatttaaaaaataggaaataaaatagaaactcaaatgccatgaagttatcttcctcttccttatatcccctaagtttgggttgcaaataactttccaattcctaataacctaaattattttgaaatagtgttttcagtgaaatgatgaatgtttgaatgtttgtttggtaatcaacataacaatgctaacaaaattcccacttagattttttaacttttaaaagtcagcgtggttttgataatttgatattttaaatgcccacacatacacacacacacacacacacacacacacaagcacatgttaataaactgataggatggagtgagcaaaattgttttcagggaagatggcacattttagaaaagacttgcccagatgatcttccatattgctcccccaatgtcatttatcgctcatgccaatcctcctcttgttacctgtggctatggtaaaattcctttaacaagcttcattgtgtccaagtatttcagagacttttaaaagctgggcatgacatagcgttttgtgctgttaagaccttagcagagtcaggtagtttacgggtaatattcaaccttgtgcatctgaatctgtcatggattcccttcactcagcactttgccactaatttgtattacactctgtggccatataatacttgcacattatgcaaaaaaaaatgttgatagtatctccttgccacacaatatgcagagttgacaacctttgaaaaccaaggtaactaatatgtatgtcctagttgtgtggcgcttggtaacaaagtctgtacatattatgtataaaatgtgtattggttagcatttagtactaagaaattctgagtttaaaataagtgatttttttcaaagtagcgatatctatatctgtgtttatctaaaaatactggcttgaatagaaaacattctcagatgattcaagattgagtaaaaatgagaatcccatacattccattattaaattctgccctattcccaattgttagcatctggctgatattaaggtctttgattgtcacaatattctcaataaatgagacattctgaactgcctggtgatattttcaaaaagagcaattaaaatgtgtattccctctaatacagctgatagaactgttgtgttaaagcaagttggaaatttgcatgatagtgtggaaaccaatggaggtccaaaatattaatcatatctaaaatatcagaaaatatcaatactagtcttctttatgcatatttttgactttttaagagggcttatgaattcaatgtttcttctgaggcaatccttttaatgtaaatactaaatacttgcatgtcttttgacaaaggctaaactacaatctattaatatgcacatttttgataaaatataaagtaccctaattaaagaaattgtggtagaaggtgtatgtcctgaatactatacctgtttaacaataccaaatgttaaataaaaatagtttgaaattaatgtttaaaagatga

SEQ ID NO: 27223 - DNA, 583 bp, Homo sapiens
  source 1..583: mol_type = unassigned DNA
atttggggatgtttctgccttgctagcagtgccagagagaacttcatcattgtcacctcatcaaagactactttttcagacatctcctgtagggctagattcagagagcagcttctgatatttggaggatcttgtaacctcgtaatatggctcttaaaaacgcactagtattcccactttctgaagtttgtagaagctgctatatatttctgtgatctttagacagtgactgagtatggatcatttgaacgaggcaactcaggggaaagaacattcagaaatgtctaacaatgtgagtgatccgaagggtccaccagccaagattgcccgcctggagcagaacgggagcccgctaggaagaggaaggcttgggagtacaggtgcaaaaatgcagggagtgcctttaaaacactcgggccatctgatgaaaaccaaccttaggaaaggaaccatgctgccagttttctgtgtggtggaacattatgaaaacgccattgaatatgattgcaaggaggagcatgcagaatttgtgctggtgagaaaggatatgcttttcaaccagctgatcgaaatggcattgctg

SEQ ID NO: 27224 - DNA, 975 bp, Homo sapiens
  source 1..975: mol_type = unassigned DNA
ctccttctcttccttcccttggccccgcgcgctcgctcgctcgctcctcgcctcgctctcccctttaaacgcccacttcgtatggggaaagaggacaacttgaagtcaagttgcaattaacttccgcggcagccgcagctccggcggcggcggcggcggcaggagaggcagaagccgccgcctcggaagtccgacgccggcgcgcccgcccggggagccgttcttggtttcaggcccgcactcgacagccaccgccgcccccaacgtccatgcctgagtgatctttagacagtgactgagtatggatcatttgaacgaggcaactcaggggaaagaacattcagaaatgtctaacaatgtgagtgatccgaagggtccaccagccaagattgcccgcctggagcagaacgggagcccgctaggaagaggaaggcttgggagtacaggtgcaaaaatgcagggagtgcctttaaaacactcgggccatctgatgaaaaccaaccttaggaaaggaaccatgctgccagttttctgtgtggtggaacattatgaaaacgccattgaatatgattgcaaggaggagcatgcagaatttgtgctggtgagaaaggatatgcttttcaaccagctgatcgaaatggcattgctgtctctaggttattcacatagctctgctgcccaggccaaagggctaatccaggttggaaagtggaatccagttccactgtcttacgtgacagatgcccctgatgctacagtagcagatatgcttcaagatgtgtatcatgtggtcacattgaaaattcagttacacagttgccccaaactagaagacttgcctcccgaacaatggtcgcacaccacagtgaggaatgctctgaaggacttactgaaagatatgaatcagagttcattggccaaggagtgccccctttcacagagtatgatttcttccattgtgaacagtacttacta

SEQ ID NO: 27225 - DNA, 579 bp, Homo sapiens
  source 1..579: mol_type = unassigned DNA
tttttgcaccattatgcattcctacttctccctctttctttaagcatggagaagcctacttaaccttattataacaataacagaataggttattaatatttaatatgcacatgattaaaatttctctcccttaaacataggtcagctgtattattactaaccggcatgtaatttttcatttaaaatattggtattctgccccatgccgtttctgaaatgcagtctactttagtagtgatttaatacacaacgtttagaaaattgtggtcggctagtgagaaaagaatttaccagtcatggataatcaattatgcatgaattcagatgtaacagatggaatctggtgatctttagacagtgactgagtatggatcatttgaacgaggcaactcaggggaaagaacattcagaaatgtctaacaatgtgagtgatccgaagggtccaccagccaagattgcccgcctggagcagaacgggagcccgctaggaagaggaaggcttgggagtacaggtgcaaaaatgcagggagtgcctttaaaacactcgggccatctgatgaaaaccaaccttaggaaagg

SEQ ID NO: 27226 - DNA, 464 bp, Homo sapiens
  source 1..464: mol_type = unassigned DNA
tcctcctccgccgccgccgccgccgccgccactttctcgctcgctcccgttccccggacgcggcggatgagccggccccgctggggaaggctccgggcggcggcgggcggccgggaggaggctgcgtgctcggggctggggctgcgagcggggtgattttgtattaaaatgaggaggaggaagaagaggcacccacagcggcagcggcggcggcggcggcagcagcagcaggagcagcggcggagagggctgcagcccgggcggacgcgcggagccgagcggggcacggcggcggcagcgacagcggccgggatgagacatagaaaacatcagtcttgaacttctcttcaagaacccgggctgcaaaggaaatctcctttgtttttgttatttatgtgctgtcaagttttgaagtggtgatctttagacagtgactgagtatggatcatttgaacgaggcaact

SEQ ID NO: 27227 - DNA, 939 bp, Homo sapiens
  source 1..939: mol_type = unassigned DNA
ttattaaagtgtttctgctgtattttgtaatgtgtttctaattgttaaaaattgggactacgtaaatgcaatttgctgttttctttttagctatacttgtaataattcttgttctaaaagtaagcccatttttccccacttagtttttttataggccagttatctttttattcatgtgtattggtacagtttccacagatcattttgttaatttgaataagaatgtaatgctatcatctagaaatatagtaacatctgtatcatatctagataggccattttacaaatacattatatttgtggagagatatctagagctaaaacatttacataggacacatatatacacgtaggtccccgcccaactataacgtgtcttctttttaaattctggcaggtgatctttagacagtgactgagtatggatcatttgaacgaggcaactcaggggaaagaacattcagaaatgtctaacaatgtgagtgatccgaagggtccaccagccaagattgcccgcctggagcagaacgggagcccgctaggaagaggaaggcttgggagtacaggtgcaaaaatgcagggagtgcctttaaaacactcgggccatctgatgaaaaccaaccttaggaaaggaaccatgctgccagttttctgtgtggtggaacattatgaaaacgccattgaatatgattgcaaggaggagcatgcagaatttgtgctggtgagaaaggatatgcttttcaaccagctgatcgaaatggcattgctgtctctaggttattcacatagctctgctgcccaggccaaagggctaatccaggttggaaagtggaatccagttccactgtcttacgtgacagatgcccctgatgctacagtagcagatatgcttcaagatgtgtatcatgtggtcacattgaaaattcagttacacaggtg

SEQ ID NO: 27228 - DNA, 2968 bp, Homo sapiens
  source 1..2968: mol_type = unassigned DNA
agagctatgacctgatttgtgacgcaccctcagaactgcagtaatggtccagctgcttcacaggcaactggtaaccacctcatttggggatgtttctgccttgctagcagtgccagagagaacttcatcattgtcacctcatcaaagactactttttcagacatctcctgtagggctagattcagagagcagcttctgatatttggagggtgatctttagacagtgactgagtatggatcatttgaacgaggcaactcaggggaaagaacattcagaaatgtctaacaatgtgagtgatccgaagggtccaccagccaagattgcccgcctggagcagaacgggagcccgctaggaagaggaaggcttgggagtacaggtgcaaaaatgcagggagtgcctttaaaacactcgggccatctgatgaaaaccaaccttaggaaaggaaccatgctgccagttttctgtgtggtggaacattatgaaaacgccattgaatatgattgcaaggaggagcatgcagaatttgtgctggtgagaaaggatatgcttttcaaccagctgatcgaaatggcattgctgtctctaggttattcacatagctctgctgcccaggccaaagggctaatccaggttggaaagtggaatccagttccactgtcttacgtgacagatgcccctgatgctacagtagcagatatgcttcaagatgtgtatcatgtggtcacattgaaaattcagttacacagttgccccaaactagaagacttgcctcccgaacaatggtcgcacaccacagtgaggaatgctctgaaggacttactgaaagatatgaatcagagttcattggccaaggagtgccccctttcacagagtatgatttcttccattgtgaacagtacttactatgcaaatgtctcagcagcaaaatgtcaagaatttggaaggtggtacaaacatttcaagaagacaaaagatatgatggttgaaatggatagtctttctgagctatcccagcaaggcgccaatcatgtcaattttggccagcaaccagttccagggaacacagccgagcagcctccatcccctgcgcagctctcccatggcagccagccctctgtccggacacctcttccaaacctgcaccctgggctcgtatcaacacctatcagtcctcaattggtcaaccagcagctggtgatggctcagctgctgaaccagcagtatgcagtgaatagacttttagcccagcagtccttaaaccaacaatacttgaaccaccctccccctgtcagtagatctatgaataagcctttggagcaacaggtttcgaccaacacagaggtgtcttccgaaatctaccagtgggtacgcgatgaactgaaacgagcaggaatctcccaggcggtatttgcacgtgtggcttttaacagaactcagggcttgctttcagaaatcctccgaaaggaagaggaccccaagactgcatcccagtctttgctggtaaaccttcgggctatgcagaatttcttgcagttaccggaagctgaaagagaccgaatataccaggacgaaagggaaaggagcttgaatgctgcctcggccatgggtcctgcccccctcatcagcacaccacccagccgtcctccccaggtgaaaacagctactattgccactgaaaggaatgggaaaccagagaacaataccatgaacattaatgcttccatttatgatgagattcagcaggaaatgaagcgtgctaaagtgtctcaagcactgtttgcaaaggttgcagcaaccaaaagccagggatggttgtgcgagctgttacgctggaaagaagatccttctccagaaaacagaaccctgtgggagaacctctccatgatccgaaggttcctcagtcttcctcagccagaacgtgatgccatttatgaacaggagagcaacgcggtgcatcaccatggcgacaggccgccccacattatccatgttccagcagagcagattcagcaacagcagcagcaacagcaacagcagcagcagcagcagcaggcaccgccgcctccacagccacagcagcagccacagacaggccctcggctccccccacggcaacccacggtggcctctccagcagagtcagatgaggaaaaccgacagaagacccggccacgaacaaaaatttcagtggaagccttgggaatcctccagagtttcatacaagacgtgggcctgtaccctgacgaagaggccatccagactctgtctgcccagctcgaccttcccaagtacaccatcatcaagttctttcagaaccagcggtactatctcaagcaccacggcaaactgaaggacaattccggtttagaggtcgatgtggcagaatataaagaagaggagctgctgaaggatttggaagagagtgtccaagataaaaatactaacacccttttttcagtgaaactagaagaagagctgtcagtggaaggaaacacagacattaatactgatttgaaagactgagataaaagtatttgtttcgttcaacagtgccactggtatttactaacaaaatgaaaagtccaccttgtcttctctcagaaaacctttgttgttcattgtttggccaatgaatcttcaaaaacttgcacaaacagaaaagttggaaaaggataatacagactgcactaaatgttttcctctgttttacaaactgcttggcagccccaggtgaagcatcaaggattgtttggtattaaaatttgtgttcacgggatgcaccaaagtgtgtaccccgtaagcatgaaaccagtgttttttgttttttttttagttcttattccggagcctcaaacaagcattataccttctgtgattatgatttcctctcctataattatttctgtagcactccacactgatctttggaaacttgccccttatttaaaaaaaaaaaagaaaaaaaa

SEQ ID NO: 27229 - DNA, 564 bp, Homo sapiens
  source 1..564: mol_type = unassigned DNA
aaagtcctagtgccattgtggtgctcgttgtttacctcggactctggacgagacatagaaaacatcagtcttgaacttctcttcaagaacccgggctgcaaaggaaatctcctttgtttttgttatttatgtgctgtcaagttttgaagtggtgatctttagacagtgactgagtatggatcatttgaacgaggcaactcaggggaaagaacattcagaaatgtctaacaatgtgagtgatccgaagggtccaccagccaagattgcccgcctggagcagaacgggagcccgctaggaagaggaaggcttgggagtacaggtgcaaaaatgcagggagtgcctttaaaacactcgggccatctgatgaaaaccaaccttaggaaaggaaccatgctgccagttttctgtgtggtggaacattatgaaaacgccattgaatatgattgcaaggaggagcatgcagaatttgtgctggtgagaaaggatatgcttttcaaccagctgatcgaaatggcattgctgtctctaggttattcacatagctctgctgcccaggccaaagg

SEQ ID NO: 27230 - DNA, 3781 bp, Homo sapiens
  source 1..3781: mol_type = unassigned DNA
cttctctcctcacttgctgggaccccagacgctcacagccccgcgtcaatgggcagggagagggtccttgcggctgttgtcagcgagggcagaatcaaaagtggcattttagtgcctttccggggcttttctcgcgaccccctgccccccaccctcgctgtcccccgctagatgccctcgttgggggtgcgaggctgtggggaaaagtttaaggtttgttaatattagtcgcgattgttggcgaggggggtgggggtgattggaagggaggcgaggtggccttcccaatgcgcgttattcggggttattgaagaataatattgcaagtgacagccagaagtagactttctgtcctcacaccgaagaacccgagtgagcaggagggagggagagacgcgaagagaccttttttcctttttggagaccttgtccgcagtgatttttttttttttaagagaatcctcagtcaccacgtcgtttccccagcaccatcacagtgtacagctcataacgggttttgctttgtttttacgatttccccccaacgaatcacttgtcagatcaattttatcttcttcctcctccctgcttcccactctcccctcctccccatcgcaaaccctgttctctgaggttagacattttacaaacccctatatgttggttttcgaattgtgattttttttttaaacccctttctcatggctactcttctagacgtttatttctgcccttcccccgcttaggggggcgggggtaggggaaaggaaaataatacaatttcaggggaagtcgccttcaggtctgctgcttttttatttttttttttttaattaaaaaaaaaaaggacatagaaaacatcagtcttgaacttctcttcaagaacccgggctgcaaaggaaatctcctttgtttttgttatttatgtgctgtcaagttttgaagtggtgatctttagacagtgactgagtatggatcatttgaacgaggcaactcaggggaaagaacattcagaaatgtctaacaatgtgagtgatccgaagggtccaccagccaagattgcccgcctggagcagaacgggagcccgctaggaagaggaaggcttgggagtacaggtgcaaaaatgcagggagtgcctttaaaacactcgggccatctgatgaaaaccaaccttaggaaaggaaccatgctgccagttttctgtgtggtggaacattatgaaaacgccattgaatatgattgcaaggaggagcatgcagaatttgtgctggtgagaaaggatatgcttttcaaccagctgatcgaaatggcattgctgtctctaggttattcacatagctctgctgcccaggccaaagggctaatccaggttggaaagtggaatccagttccactgtcttacgtgacagatgcccctgatgctacagtagcagatatgcttcaagatgtgtatcatgtggtcacattgaaaattcagttacacagttgccccaaactagaagacttgcctcccgaacaatggtcgcacaccacagtgaggaatgctctgaaggacttactgaaagatatgaatcagagttcattggccaaggagtgccccctttcacagagtatgatttcttccattgtgaacagtacttactatgcaaatgtctcagcagcaaaatgtcaagaatttggaaggtggtacaaacatttcaagaagacaaaagatatgatggttgaaatggatagtctttctgagctatcccagcaaggcgccaatcatgtcaattttggccagcaaccagttccagggaacacagccgagcagcctccatcccctgcgcagctctcccatggcagccagccctctgtccggacacctcttccaaacctgcaccctgggctcgtatcaacacctatcagtcctcaattggtcaaccagcagctggtgatggctcagctgctgaaccagcagtatgcagtgaatagacttttagcccagcagtccttaaaccaacaatacttgaaccaccctccccctgtcagtagatctatgaataagcctttggagcaacaggtttcgaccaacacagaggtgtcttccgaaatctaccagtgggtacgcgatgaactgaaacgagcaggaatctcccaggcggtatttgcacgtgtggcttttaacagaactcagggcttgctttcagaaatcctccgaaaggaagaggaccccaagactgcatcccagtctttgctggtaaaccttcgggctatgcagaatttcttgcagttaccggaagctgaaagagaccgaatataccaggacgaaagggaaaggagcttgaatgctgcctcggccatgggtcctgcccccctcatcagcacaccacccagccgtcctccccaggtgaaaacagctactattgccactgaaaggaatgggaaaccagagaacaataccatgaacattaatgcttccatttatgatgagattcagcaggaaatgaagcgtgctaaagtgtctcaagcactgtttgcaaaggttgcagcaaccaaaagccagggatggttgtgcgagctgttacgctggaaagaagatccttctccagaaaacagaaccctgtgggagaacctctccatgatccgaaggttcctcagtcttcctcagccagaacgtgatgccatttatgaacaggagagcaacgcggtgcatcaccatggcgacaggccgccccacattatccatgttccagcagagcagattcagagcccctctcccaccacccttgggaaaggagagtctagaggcgttttcttaccaggcctgccgacccctgcaccatggctcggtgctgctcctcagcaacagcagcagcaacagcaacagcagcagcagcagcagcaggcaccgccgcctccacagccacagcagcagccacagacaggccctcggctccccccacggcaacccacggtggcctctccagcagagtcagatgaggaaaaccgacagaagacccggccacgaacaaaaatttcagtggaagccttgggaatcctccagagtttcatacaagacgtgggcctgtaccctgacgaagaggccatccagactctgtctgcccagctcgaccttcccaagtacaccatcatcaagttctttcagaaccagcggtactatctcaagcaccacggcaaactgaaggacaattccggtttagaggtcgatgtggcagaatataaagaagaggagctgctgaaggatttggaagagagtgtccaagataaaaatactaacacccttttttcagtgaaactagaagaagagctgtcagtggaaggaaacacagacattaatactgatttgaaagactgagataaaagtatttgtttcgttcaacagtgccactggtatttactaacaaaatgaaaagtccaccttgtcttctctcagaaaacctttgttgttcattgtttggccaatgaatcttcaaaaacttgcacaaacagaaaagttggaaaaggataatacagactgcactaaatgttttcctctgttttacaaactgcttggcagccccaggtgaagcatcaaggattgtttggtattaaaatttgtgttcacgggatgcaccaaagtgtgtaccccgtaagcatgaaaccagtgttttttgttttttttttagttcttattccggagcctcaaacaagcattataccttctgtgattatgatttcctctcctataattatttctgtagcactccacactgatctttggaaacttgccccttattt

SEQ ID NO: 27231 - DNA, 5318 bp, Homo sapiens
  source 1..5318: mol_type = unassigned DNA
gagagagagagagagagactgagaaagtcgaactcgagcttaggtaaccaacaaacccaattactaggctttattgatactaaaaggaaaagttcccctcgtaaaatttctctgagcttattagttatttaaatcagccccagggttggacgcgtgacgccgaaggcaccttctgtcggctcctggaggtgagcagccagcgtccctgcgccgacccacagcccctcgctccgtcctgggcacttggggcgaaggcgggcgcagcgagccgagaagtactgaactcctaatatcaccaattcttctaagttcctggacattgatccggaggaggattcgcagttcaacatcaaggtccctgtgcgttttattgcgacctgccggtgggaactttgtctccgagtcggagcagcatggagcggcggagcgagagcccgtgtctgcgggacagccccgaccggcggagcggcagcccggacgtcaaggggcctcccccagtgaaggtggcccggctggagcagaacggcagccccatgggagcccgcgggaggcccaacggcgccgtggccaaggccgtgggaggtttgatgattcctgtcttttgtgtcgtggagcagttggacggctctcttgaatatgacaacagagaagaacacgccgagtttgtcctggtgcggaaagatgtgctttttagccagctggtggagactgcgctcctggccctggggtattctcacagctctgcggcccaggcccaaggaataatcaagctgggaaggtggaaccctctccccctcagttatgtgacagatgcacccgacgcgacagtggccgacatgctacaagatgtctatcatgttgtgacgttgaaaatccaattacaaagttgttcaaagttggaagacttgcctgcggagcagtggaaccatgccacagtccgcaatgccttaaaggaactgctcaaagagatgaaccagagcacattagccaaagaatgccctctctcccagagtatgatttcatccattgtaaatagcacatattatgccaatgtgtcagcaaccaagtgccaggagtttgggagatggtataaaaagtacaagaagattaaagtggaaagagtggaacgagaaaacctttcagactattgtgttctgggccagcgtccaatgcatttaccaaatatgaaccagctggcatccctggggaaaaccaacgaacagtctcctcacagccaaattcaccacagtactccaatccgaaaccaagtgcccgcattacagcccatcatgagccctggtcttctttctccccagcttagtccacaacttgtaaggcaacaaatagccatggcccatctgataaaccaacagattgccgttagccggctcctggctcaccagcatcctcaagccatcaaccagcagttcctgaaccatccacccatccccagagcagttaagccagagccaaccaactcttccgtggaagtctctccagatatctaccagcaagtcagagatgagctgaagagggccagtgtgtcccaagctgtctttgcaagagtggcattcaaccgcacacagggattgttgtctgagattctgcgtaaggaagaagaccctcggacagcctctcagtctcttctagtaaacctgagggccatgcagaatttcctcaatctgccagaagtggagcgagatcgcatctaccaggatgagagggagcggagcatgaatcccaatgtgagcatggtctcctcggcctccagcagtcccagctcctcccgaacccctcaggccaaaacctcgacaccgacaacagacctccctattaaggtggacggcgccaacatcaacatcacagctgccatttatgacgagatccaacaggagatgaaaagggccaaggtgtctcaagccctgtttgccaaagtggctgcaaataaaagtcagggctggctgtgtgaactgctccgctggaaggagaacccaagcccagaaaaccgcaccctctgggaaaacctctgtaccatccgtcgcttcctgaaccttccccagcatgagagggatgtcatctatgaggaggagtcaaggcatcaccacagcgaacgcatgcaacacgtggtccagcttccccctgagccggtgcaggtacttcatagacagcagtctcagccagccaaggagagttcccctcccagagaagaagcgcctcccccacctcctccgactgaagacagttgtgccaaaaagccccggtctcgcacaaagatctccttagaagccctggggatcctccaaagctttattcatgatgtaggcctgtacccagaccaggaagccatccacactctttcggctcagctggatctccccaaacacaccatcatcaagttcttccagaaccagcggtaccacgtgaagcaccacgggaagctgaaagagcacctgggctccgcggtggacgtggctgaatataaggacgaggagctgctgaccgagtcagaggagaacgacagcgaggaaggctccgaggagatgtacaaagtggaggctgaggaggaaaatgctgacaaaagcaaggcagcacctgccgaaattgaccagagataatgtgaacttctactaggcaaagcaatacatcggtccaaggattttctgctttcatttctttaaaagttttttgttagtttgttttttgtttttgtttttgggtttttttggctttatttttgtctttttatgtctgttttgtttttcttacccttttggacatttctttgttgcacaggatacacctatagactgaataagttcagtatttccgaatcagacatcgccttggcaaagacactaaagcgttacactttatcccgtctctatgactggatcatagtcattataatcacaggagactctgccttcattatccttgcacttaacggaagttacatcaggcaagtaccaggatgaaaagaactatgaaataaatgaaggaagctacaagtgtgtgtgtatatgtatatgtatatatctctatatttacatatatatattaaaattgcatgggacagagactttgcaatccgaaagaatagactgtgaaatgagttcttaaagaaaagacttgtttatgtattaaaaaaaccacttcacagtgagtcgctttggctttttgataaactgcggcctgctctcagggtggggtgactatttttgaattcctatttattttttgtgtttgtccctgattttttttttttaattctatggcttcctatctggcagcttaatgggtaatttttgaggtatgtatttaacaaaataaacgacactgccgaaaaaaaaaaaagtgaagtgaaaacaatcagggcacattaaaatgatacaagtcaaataaatcttaaagacacaatgcacacttaaaatgactcaataaaatgacttgctacgttccgttattcaatttgtcattactgtagtgaacagatgcatttctgtggaattccaaataagtaaaactgaaattcagtgcagagaaaactttgtccactagtgcaagtcttgatcaaatgacattttgacattggacatatggaattcatagtatgagccacattttgttgtgaaatttatttacctgcttgtggcttcaaatctgaaaattaataagcctgctcgtttaaaagttgtttgttgttgctgtttttttgtctttttgttttttactagaaaatagttcagtgtaatattaagttagaaaagaagttgctgcccagttaaaggggctccctctcaaataaatctccatccttccctctcccaaaagacatttctgatttctgcttcactttgggcttcctcttcttcgtacacattccatctacctaatcaaacattttcagtccctgatctctcctgtcccttttcctgggatgacagccctaacaagaactgtttttgaatcgttgtgcagctccaggcaatagagtatgtgaagcgatttcagtagaatcacttactcatcctaaaagaaaacattatcccagttacctacatcgcaattaccttatgtaaagcagaactaatgctgactggatgtttaatgggatgagcattaaagctgcaatctactatagtactccagatctctttcggcttcctatgagaaacaccagaagcattactttccacttctacttacagtaattgcaagaggagacctcacattcaggactggcctagtgaacgtaatccatgctttaaactggccattaaacagtcccacatggttggattttttttttttttttgagttgtgctttcacaaaaccttgtcaaagacctcatgcaatatcactttgaaagttattttctgtttactacacaaacattgtaatataactgttaatactatttatatatttgaaaggtataaaaggtaggagttaaaaaaaaaacctctatgtgtagatattaactcagaacttacaatatacagggagaagacatgttgcaatacaagctaattctagctgctcagtaacctctggagtttttaaagggacattttcctgtactttttcaaataatgatgtttaaaaattatcttgacataagcgtcatatacctttgcaaaaggatggttgtttgcagttagccctggccccatccttcctatttctgtagtatgctgcagctttaatcagaaagtccatggttgctgcttcctgatctccgagttactctttccaaattgtcttcttacactgttgctgaaggtcactctgtacacgtaatggaaactgattttgccaagctcttacaaggtggttcatctatcgatggcatccgcatttggtatcttttacacttcaaccaaaaatttattaggtatttttcaatgctaagtcttgccttttattttttaatttcactgccaagtttgcagtggttctaagtgaatctgtgggcattttagcctgtggtcttgccagatctttgcgaattacaatgcatatatgtctatttattcaatatctgtcatataatatctatttggaagaagaaactttctcttgtagtgcctcttgacaaagcacaatttcccgcctttttttttttttgtgaaatgaaaaaaacaaattgtgttttattgcggtatcaacaatgtgaataaggattaacatattgtaaatgttcttttttccatgtaaatcaactatctttgttatcactaagtgataattaatttttaacttatgtgcattgttaggctgttagaattttttggttgttaaaataaacgcattcaat

SEQ ID NO: 27232 - DNA, 5730 bp, Homo sapiens
  source 1..5730: mol_type = unassigned DNA
aaattattattttgaaggcgctagatctggggaccgaaagggggagggggagaaatcggaaaccgaggacaacccaaaaggactcactttgcctgatgactcaacgcaactaataatcatctccctctcagtgtgtctctctctgcggcttgtcagtgagtccggctctggctgctggcagaggcggccgagaggggagaggctggaggtgacagcttgggcggccgccgcgtttcctcccgcgcgcggtcccgggtccctgcgtcttctcggctcttggtgttaccggtcccaccgctctggccgcgcctcctcgcgagctagccgccctgcgaaccagcagccccggctcgccgccgccgccgccgcctccgggttctcagccctttctctccagaacgggtctccttcccgaaggtgtgaaaaggctctttcagcctccttctcttcccccctcctccgccgtcccctcccccgctcgctcgggtgtccctttggaggagtcctttccctctcctcctcctccccctcctccctccccccatcatcatcataacaaccatctccgcaccagaagaagacaccctgacccaggaccttaaacattaggacctggggaagagggaaggggaaggagtaaagaggaagactaggagaacactgcaaagccaagcaccagaaactttccaccctggattctctacttttgctccatggacagagccccagtcagccaagtttcagacagaccgtgagcagtccctgtgcgttttattgcgacctgccggtgggaactttgtctccgagtcggagcagcatggagcggcggagcgagagcccgtgtctgcgggacagccccgaccggcggagcggcagcccggacgtcaaggggcctcccccagtgaaggtggcccggctggagcagaacggcagccccatgggagcccgcgggaggcccaacggcgccgtggccaaggccgtgggaggtttgatgattcctgtcttttgtgtcgtggagcagttggacggctctcttgaatatgacaacagagaagaacacgccgagtttgtcctggtgcggaaagatgtgctttttagccagctggtggagactgcgctcctggccctggggtattctcacagctctgcggcccaggcccaaggaataatcaagctgggaaggtggaaccctctccccctcagttatgtgacagatgcacccgacgcgacagtggccgacatgctacaagatgtctatcatgttgtgacgttgaaaatccaattacaaagttgttcaaagttggaagacttgcctgcggagcagtggaaccatgccacagtccgcaatgccttaaaggaactgctcaaagagatgaaccagagcacattagccaaagaatgccctctctcccagagtatgatttcatccattgtaaatagcacatattatgccaatgtgtcagcaaccaagtgccaggagtttgggagatggtataaaaagtacaagaagattaaagtggaaagagtggaacgagaaaacctttcagactattgtgttctgggccagcgtccaatgcatttaccaaatatgaaccagctggcatccctggggaaaaccaacgaacagtctcctcacagccaaattcaccacagtactccaatccgaaaccaagtgcccgcattacagcccatcatgagccctggtcttctttctccccagcttagtccacaacttgtaaggcaacaaatagccatggcccatctgataaaccaacagattgccgttagccggctcctggctcaccagcatcctcaagccatcaaccagcagttcctgaaccatccacccatccccagagcagttaagccagagccaaccaactcttccgtggaagtctctccagatatctaccagcaagtcagagatgagctgaagagggccagtgtgtcccaagctgtctttgcaagagtggcattcaaccgcacacagggattgttgtctgagattctgcgtaaggaagaagaccctcggacagcctctcagtctcttctagtaaacctgagggccatgcagaatttcctcaatctgccagaagtggagcgagatcgcatctaccaggatgagagggagcggagcatgaatcccaatgtgagcatggtctcctcggcctccagcagtcccagctcctcccgaacccctcaggccaaaacctcgacaccgacaacagacctccctattaaggtggacggcgccaacatcaacatcacagctgccatttatgacgagatccaacaggagatgaaaagggccaaggtgtctcaagccctgtttgccaaagtggctgcaaataaaagtcagggctggctgtgtgaactgctccgctggaaggagaacccaagcccagaaaaccgcaccctctgggaaaacctctgtaccatccgtcgcttcctgaaccttccccagcatgagagggatgtcatctatgaggaggagtcaaggcatcaccacagcgaacgcatgcaacacgtggtccagcttccccctgagccggtgcaggtacttcatagacagcagtctcagccagccaaggagagttcccctcccagagaagaagcgcctcccccacctcctccgactgaagacagttgtgccaaaaagccccggtctcgcacaaagatctccttagaagccctggggatcctccaaagctttattcatgatgtaggcctgtacccagaccaggaagccatccacactctttcggctcagctggatctccccaaacacaccatcatcaagttcttccagaaccagcggtaccacgtgaagcaccacgggaagctgaaagagcacctgggctccgcggtggacgtggctgaatataaggacgaggagctgctgaccgagtcagaggagaacgacagcgaggaaggctccgaggagatgtacaaagtggaggctgaggaggaaaatgctgacaaaagcaaggcagcacctgccgaaattgaccagagataatgtgaacttctactaggcaaagcaatacatcggtccaaggattttctgctttcatttctttaaaagttttttgttagtttgttttttgtttttgtttttgggtttttttggctttatttttgtctttttatgtctgttttgtttttcttacccttttggacatttctttgttgcacaggatacacctatagactgaataagttcagtatttccgaatcagacatcgccttggcaaagacactaaagcgttacactttatcccgtctctatgactggatcatagtcattataatcacaggagactctgccttcattatccttgcacttaacggaagttacatcaggcaagtaccaggatgaaaagaactatgaaataaatgaaggaagctacaagtgtgtgtgtatatgtatatgtatatatctctatatttacatatatatattaaaattgcatgggacagagactttgcaatccgaaagaatagactgtgaaatgagttcttaaagaaaagacttgtttatgtattaaaaaaaccacttcacagtgagtcgctttggctttttgataaactgcggcctgctctcagggtggggtgactatttttgaattcctatttattttttgtgtttgtccctgattttttttttttaattctatggcttcctatctggcagcttaatgggtaatttttgaggtatgtatttaacaaaataaacgacactgccgaaaaaaaaaaaagtgaagtgaaaacaatcagggcacattaaaatgatacaagtcaaataaatcttaaagacacaatgcacacttaaaatgactcaataaaatgacttgctacgttccgttattcaatttgtcattactgtagtgaacagatgcatttctgtggaattccaaataagtaaaactgaaattcagtgcagagaaaactttgtccactagtgcaagtcttgatcaaatgacattttgacattggacatatggaattcatagtatgagccacattttgttgtgaaatttatttacctgcttgtggcttcaaatctgaaaattaataagcctgctcgtttaaaagttgtttgttgttgctgtttttttgtctttttgttttttactagaaaatagttcagtgtaatattaagttagaaaagaagttgctgcccagttaaaggggctccctctcaaataaatctccatccttccctctcccaaaagacatttctgatttctgcttcactttgggcttcctcttcttcgtacacattccatctacctaatcaaacattttcagtccctgatctctcctgtcccttttcctgggatgacagccctaacaagaactgtttttgaatcgttgtgcagctccaggcaatagagtatgtgaagcgatttcagtagaatcacttactcatcctaaaagaaaacattatcccagttacctacatcgcaattaccttatgtaaagcagaactaatgctgactggatgtttaatgggatgagcattaaagctgcaatctactatagtactccagatctctttcggcttcctatgagaaacaccagaagcattactttccacttctacttacagtaattgcaagaggagacctcacattcaggactggcctagtgaacgtaatccatgctttaaactggccattaaacagtcccacatggttggattttttttttttttttgagttgtgctttcacaaaaccttgtcaaagacctcatgcaatatcactttgaaagttattttctgtttactacacaaacattgtaatataactgttaatactatttatatatttgaaaggtataaaaggtaggagttaaaaaaaaaacctctatgtgtagatattaactcagaacttacaatatacagggagaagacatgttgcaatacaagctaattctagctgctcagtaacctctggagtttttaaagggacattttcctgtactttttcaaataatgatgtttaaaaattatcttgacataagcgtcatatacctttgcaaaaggatggttgtttgcagttagccctggccccatccttcctatttctgtagtatgctgcagctttaatcagaaagtccatggttgctgcttcctgatctccgagttactctttccaaattgtcttcttacactgttgctgaaggtcactctgtacacgtaatggaaactgattttgccaagctcttacaaggtggttcatctatcgatggcatccgcatttggtatcttttacacttcaaccaaaaatttattaggtatttttcaatgctaagtcttgccttttattttttaatttcactgccaagtttgcagtggttctaagtgaatctgtgggcattttagcctgtggtcttgccagatctttgcgaattacaatgcatatatgtctatttattcaatatctgtcatataatatctatttggaagaagaaactttctcttgtagtgcctcttgacaaagcacaatttcccgcctttttttttttttgtgaaatgaaaaaaacaaattgtgttttattgcggtatcaacaatgtgaataaggattaacatattgtaaatgttcttttttccatgtaaatcaactatctttgttatcactaagtgataattaatttttaacttatgtgcattgttaggctgttagaattttttggttgttaaaataaacgcattcaataaatatga

SEQ ID NO: 27233 - DNA, 2135 bp, Homo sapiens
  source 1..2135: mol_type = unassigned DNA
gcgttttattgcgacctgccggtgggaactttgtctccgagtcggagcagcatggagcggcggagcgagagcccgtgtctgcgggacagccccgaccggcggagcggcagcccggacgtcaaggggcctcccccagtgaaggtggcccggctggagcagaacggcagccccatgggagcccgcgggaggcccaacggcgccgtggccaaggccgtgggaggtttgatgattcctgtcttttgtgtcgtggagcagttggacggctctcttgaatatgacaacagagaagaacacgccgagtttgtcctggtgcggaaagatgtgctttttagccagctggtggagactgcgctcctggccctggggtattctcacagctctgcggcccaggcccaagtggaaagagtggaacgagaaaacctttcagactattgtgttctgggccagcgtccaatgcatttaccaaatatgaaccagctggcatccctggggaaaaccaacgaacagtctcctcacagccaaattcaccacagtactccaatccgaaaccaagtgcccgcattacagcccatcatgagccctggtcttctttctccccagcttagtccacaacttgtaaggcaacaaatagccatggcccatctgataaaccaacagattgccgttagccggctcctggctcaccagcatcctcaagccatcaaccagcagttcctgaaccatccacccatccccagagcagttaagccagagccaaccaactcttccgtggaagtctctccagatatctaccagcaagtcagagatgagctgaagagggccagtgtgtcccaagctgtctttgcaagagtggcattcaaccgcacacagggattgttgtctgagattctgcgtaaggaagaagaccctcggacagcctctcagtctcttctagtaaacctgagggccatgcagaatttcctcaatctgccagaagtggagcgagatcgcatctaccaggatgagagggagcggagcatgaatcccaatgtgagcatggtctcctcggcctccagcagtcccagctcctcccgaacccctcaggccaaaacctcgacaccgacaacagacctccctattaaggtggacggcgccaacatcaacatcacagctgccatttatgacgagatccaacaggagatgaaaagggccaaggtgtctcaagccctgtttgccaaagtggctgcaaataaaagtcagggctggctgtgtgaactgctccgctggaaggagaacccaagcccagaaaaccgcaccctctgggaaaacctctgtaccatccgtcgcttcctgaaccttccccagcatgagagggatgtcatctatgaggaggagtcaaggcatcaccacagcgaacgcatgcaacacgtggtccagcttccccctgagccggtgcaggtacttcatagacagcagtctcagccagccaaggagagttcccctcccagagaagaagcgcctcccccacctcctccgactgaagacagttgtgccaaaaagccccggtctcgcacaaagatctccttagaagccctggggatcctccaaagctttattcatgatgtaggcctgtacccagaccaggaagccatccacactctttcggctcagctggatctccccaaacacaccatcatcaagttcttccagaaccagcggtaccacgtgaagcaccacgggaagctgaaagagcacctgggctccgcggtggacgtggctgaatataaggacgaggagctgctgaccgagtcagaggagaacgacagcgaggaaggctccgaggagatgtacaaagtggaggctgaggaggaaaatgctgacaaaagcaaggcagcacctgccgaaattgaccagagataatgtgaacttctactaggcaaagcaatacatcggtccaaggattttctgctttcatttctttaaaagttttttgttagtttgttttttgtttttgtttttgggtttttttggctttatttttgtctttttatgtctgttttgtttttcttacccttttggacatttctttgttgcacaggatacacctatagactgaataagttcagtatttccgaatcagacatcgccttggcaaa

SEQ ID NO: 27234 - DNA, 2656 bp, Homo sapiens
  source 1..2656: mol_type = unassigned DNA
agaggcgcttaagttaccaagggattagggctgatctcaggagaggtaaacgaccatccttggaacacggagcccttcttccctgcccggtatctgcgcgtgccttgggtagtccgcacaaccctccccagctccggatgccctgggatacccggacccaggagagagcgcgtcagcggggcgcagctactttgcactcgccgattctgacacaacagatagttaattggggccttcgaaatcaaggactaagaagtactgaactcctaatatcaccaattcttctaagttcctggacattgatccggaggaggattcgcagttcaacatcaaggtccctgtgcgttttattgcgacctgccggtgggaactttgtctccgagtcggagcagcatggagcggcggagcgagagcccgtgtctgcgggacagccccgaccggcggagcggcagcccggacgtcaaggggcctcccccagtgaaggtggcccggctggagcagaacggcagccccatgggagcccgcgggaggcccaacggcgccgtggccaaggccgtgggaggtttgatgattcctgtcttttgtgtcgtggagcagttggacggctctcttgaatatgacaacagagaagaacacgccgagtttgtcctggtgcggaaagatgtgctttttagccagctggtggagactgcgctcctggccctggggtattctcacagctctgcggcccaggcccaaggaataatcaagctgggaaggtggaaccctctccccctcagttatgtgacagatgcacccgacgcgacagtggccgacatgctacaagatgtctatcatgttgtgacgttgaaaatccaattacaaagttgttcaaagttggaagacttgcctgcggagcagtggaaccatgccacagtccgcaatgccttaaaggaactgctcaaagagatgaaccagagcacattagccaaagaatgccctctctcccagagtatgatttcatccattgtaaatagcacatattatgccaatgtgtcagcaaccaagtgccaggagtttgggagatggtataaaaagtacaagaagattaaagtggaaagagtggaacgagaaaacctttcagactattgtgttctgggccagcgtccaatgcatttaccaaatatgaaccagctggcatccctggggaaaaccaacgaacagtctcctcacagccaaattcaccacagtactccaatccgaaaccaagtgcccgcattacagcccatcatgagccctggtcttctttctccccagcttagtccacaacttgtaaggcaacaaatagccatggcccatctgataaaccaacagattgccgttagccggctcctggctcaccagcatcctcaagccatcaaccagcagttcctgaaccatccacccatccccagagcagttaagccagagccaaccaactcttccgtggaagtctctccagatatctaccagcaagtcagagatgagctgaagagggccagtgtgtcccaagctgtctttgcaagagtggcattcaaccgcacacagggattgttgtctgagattctgcgtaaggaagaagaccctcggacagcctctcagtctcttctagtaaacctgagggccatgcagaatttcctcaatctgccagaagtggagcgagatcgcatctaccaggatgagagggagcggagcatgaatcccaatgtgagcatggtctcctcggcctccagcagtcccagctcctcccgaacccctcaggccaaaacctcgacaccgacaacagacctccctattaaggtggacggcgccaacatcaacatcacagctgccatttatgacgagatccaacaggagatgaaaagggccaaggtgtctcaagccctgtttgccaaagtggctgcaaataaaagtcagggctggctgtgtgaactgctccgctggaaggagaacccaagcccagaaaaccgcaccctctgggaaaacctctgtaccatccgtcgcttcctgaaccttccccagcatgagagggatgtcatctatgaggaggagtcaaggcatcaccacagcgaacgcatgcaacacgtggtccagcttccccctgagccggtgcaggtacttcatagacagcagtctcagccagccaaggagagttcccctcccagagaagaagcgcctcccccacctcctccgactgaagacagttgtgccaaaaagccccggtctcgcacaaagatctccttagaagccctggggatcctccaaagctttattcatgatgtaggcctgtacccagaccaggaagccatccacactctttcggctcagctggatctccccaaacacaccatcatcaagttcttccagaaccagcggtaccacgtgaagcaccacgggaagctgaaagagcacctgggctccgcggtggacgtggctgaatataaggacgaggagctgctgaccgagtcagaggagaacgacagcgaggaaggctccgaggagatgtacaaagtggaggctgaggaggaaaatgctgacaaaagcaaggcagcacctgccgaaattgaccagagataatgtgaacttctactaggcaaagcaatacatcggtccaaggattttctgctttcatttcttt

SEQ ID NO: 27235 - DNA, 2987 bp, Homo sapiens
  source 1..2987: mol_type = unassigned DNA
ataaaaccggcccggttctgtggaaagtgggcggcggagccagggtccctggaatggcggagactctgtcaggcctaggtgattctggagcggcgggcgcggcggctctgagctccgcctcgtcagagaccgggacgcggcgcctcagcgacctgcgagtgatcgatctgcgggcggagctgaggaaacggaatgtggactcgagcggcaacaagagcgttttgatggagcggctgaagaaggcaattgaagatgaaggtggtaatcctgacgaaattgaaattacctccgagggaaacaagaaaacatcaaagaggtctagcaaagggcgcaaaccagaagaagagggtgtggaagataacgggctggaggaaaactctggggatggacaggaggatgttgagaccagtctggagaacttgcaggacatcgacatcatggatatcagtgtgttggatgaagcagaaattgataatggaagcgttgcagattgtgtcgaagacgatgatgctgataacctccaggagtccctgtcggatagtagagagctagtcgagggggaaatgaaagagcttccggagcagcttcaggaacatgctatagaggacaaagaaactataaacaatttagatacttcatcatctgacttcactatattacaggaaattgaagagccatccctggagccagaaaatgagaaaatactcgacattttgggggaaacttgtaaatctgagccagtaaaagaagaaagttccgagctggagcagccatttgcacaggacacaagtagcgtggggccagacagaaagcttgcggaggaagaggacctatttgacagcgcccatccggaagagggtgatttagatttggccagcgagtcaacagcacacgctcagtcgagcaaggcagacagcctgttagcggtagtgaaaagggagcccgcggagcagccaggcgatggcgagaggacggactgtgagcctgtagggctagagccggcagttgagcagagtagtgcggcctccgagctcgcggaggcctctagcgaggagctcgcagaagcacccacggaagccccaagcccagaagccagagatagcaaagaagacgggaggaagtttgattttgacgcttgtaatgaagtccctccggctcctaaagagtcctcaaccagtgagggcgctgatcagaaaatgagttctcccgaagatgactcggatacaaaaaggctttccaaagaggaaaagggtcgcagcagttgtggtagaaatttctgggttagtggactctcttctacaaccagagctacagatttgaagaatcttttcagcaaatatgggaaggtggtgggcgccaaggttgtgacaaatgcccggagtcctggagctcgctgttacggttttgtcacgatgtccacagcagaagaggccacaaaatgcattaaccacctgcacaagacggagctccacggaaagatgatctccgtggagaaagccaaaaatgaacctgtgggaaagaaaacctctgacaaaagagacagtgacgggaaaaaggagaagtcgagcaacagtgacagatctacaaaccttaagagggatgataaatgtgacagaaaagatgatgctaagaagggtgacgacggaagtggagaaaagagtaaggaccaagatgatcagaaacctggcccctcagagcgatctcgagccacaaagtcaggaagtcgagggaccgaacggactgtagtaatggataaatccaaaggggtgcctgtgattagtgtaaaaacgtccgggtccaaagagagagcttccaaaagccaggatcgcaaatcagccagcagagagaagcggtccgtcgtgtcctttgataaggtcaaggagcctcggaagtcaagagactcagagtcccatagcagggtgcgtgaacgcagtgaacgcgaacaacgcatgcaggcgcagtgggagcgcgaggagcgtgagcggctggagattgcccgagagaggctggccttccagcgccagcggctggagcgggagcgcatggagcgggaacggctggagcgcgaacgcatgcacgtggagcacgagcgcaggcgcgagcaggagcgcatccaccgtgagcgcgaggagctgaggcgccagcaggaactgcgctatgagcaggagcggcggcccgcggtgcggcggccctacgacctggaccggcgagatgatgcctattggccggaagccaagcgggccgccctggatgagcgctaccattctgactttaaccgccaggaccgcttccacgactttgaccacagggaccgcggccgctaccccgaccactcggtggacaggagagaaggttcaaggtcaatgatgggagaacgagaaggacagcattacccagaacgccatggaggaccagagcgccacggccgggactcccgcgatggctgggggggctatggctctgacaagaggatgagcgagggccgggggctgcctcctccccccagacgtgactggggggaccatggccgaagagaggatgaccggtcatggcagggcacggccgacgggggcatgatggacagggatcacaagaggtggcaaggtggcgagagaagcatgtccggtcactccgggcctggccacatgatgaaccgaggaggaatgtcagggcgcggcagctttgccccaggcggggcctcccggggccaccccatcccacacggtggcatgcagggcgggtttggaggccagagccgggggagcaggcccagcgatgcccgcttcactcgccgctactgagtacttggaatcctgtgtcctgtctcgtggcaacaaggctatgttctgttaggagttaccttaaactgtgtaaaaatatttttttttaatctgctgccatattgtagctcaatacaatgtgaatttgtttttcgttttggggttttttttttttgtaataaatgtgtttccgttcacatacccttt

SEQ ID NO: 27236 - DNA, 2996 bp, Homo sapiens
  source 1..2996: mol_type = unassigned DNA
gtgctaggagcctgataaaaccggcccggttctgtggaaagtgggcggcggagccagggtccctggaatggcggagactctgtcaggcctaggtgattctggagcggcgggcgcggcggctctgagctccgcctcgtcagagaccgggacgcggcgcctcagcgacctgcgagtgatcgatctgcgggcggagctgaggaaacggaatgtggactcgagcggcaacaagagcgttttgatggagcggctgaagaaggcaattgaagatgaaggtggtaatcctgacgaaattgaaattacctccgagggaaacaagaaaacatcaaagaggtctagcaaagggcgcaaaccagaagaagagggtgtggaagataacgggctggaggaaaactctggggatggacaggaggatgttgagaccagtctggagaacttgcaggacatcgacatcatggatatcagtgtgttggatgaagcagaaattgataatggaagcgttgcagattgtgtcgaagacgatgatgctgataacctccaggagtccctgtcggatagtagagagctagtcgagggggaaatgaaagagcttccggagcagcttcaggaacatgctatagaggacaaagaaactataaacaatttagatacttcatcatctgacttcactatattacaggaaattgaagagccatccctggagccagaaaatgagaaaatactcgacattttgggggaaacttgtaaatctgagccagtaaaagaagaaagttccgagctggagcagccatttgcacaggacacaagtagcgtggggccagacagaaagcttgcggaggaagaggacctatttgacagcgcccatccggaagagggtgatttagatttggccagcgagtcaacagcacacgctcagtcgagcaaggcagacagcctgttagcggtagtgaaaagggagcccgcggagcagccaggcgatggcgagaggacggactgtgagcctgtagggctagagccggcagttgagcagagtagtgcggcctccgagctcgcggaggcctctagcgaggagctcgcagaagcacccacggaagccccaagcccagaagccagagatagcaaagaagacgggaggaagtttgattttgacgcttgtaatgaagtccctccggctcctaaagagtcctcaaccagtgagggcgctgatcagaaaatgagttctcccgaagatgactcggatacaaaaaggctttccaaagaggaaaagggtcgcagcagttgtggtagaaatttctgggttagtggactctcttctacaaccagagctacagatttgaagaatcttttcagcaaatatgggaaggtggtgggcgccaaggttgtgacaaatgcccggagtcctggagctcgctgttacggttttgtcacgatgtccacagcagaagaggccacaaaatgcattaaccacctgcacaagacggagctccacggaaagatgatctccgtggagaaagccaaaaatgaacctgtgggaaagaaaacctctgacaaaagagacagtgacgggaaaaaggagaagtcgagcaacagtgacagatctacaaaccttaagagggatgataaatgtgacagaaaagatgatgctaagaagggtgacgacggaagtggagaaaagagtaaggaccaagatgatcagaaacctggcccctcagagcgatctcgagccacaaagtcaggaagtcgagggaccgaacggactgtagtaatggataaatccaaaggggtgcctgtgattagtgtaaaaacgtccgggtccaaagagagagcttccaaaagccaggatcgcaaatcagccagcagagagaagcggtccgtcgtgtcctttgataaggtcaaggagcctcggaagtcaagagactcagagtcccatagcagggtgcgtgaacgcagtgaacgcgaacaacgcatgcaggcgcagtgggagcgcgaggagcgtgagcggctggagattgcccgagagaggctggccttccagcgccagcggctggagcgggagcgcatggagcgggaacggctggagcgcgaacgcatgcacgtggagcacgagcgcaggcgcgagcaggagcgcatccaccgtgagcgcgaggagctgaggcgccagcaggaactgcgctatgagcaggagcggcggcccgcggtgcggcggccctacgacctggaccggcgagatgatgcctattggccggaagccaagcgggccgccctggatgagcgctaccattctgactttaaccgccaggaccgcttccacgactttgaccacagggaccgcggccgctaccccgaccactcggtggacaggagagaaggttcaaggtcaatgatgggagaacgagaaggacagcattacccagaacgccatggaggaccagagcgccacggccgggactcccgcgatggctgggggggctatggctctgacaagaggatgagcgagggccgggggctgcctcctccccccaggggcagacgtgactggggggaccatggccgaagagaggatgaccggtcatggcagggcacggccgacgggggcatgatggacagggatcacaagaggtggcaaggtggcgagagaagcatgtccggtcactccgggcctggccacatgatgaaccgaggaggaatgtcagggcgcggcagctttgccccaggcggggcctcccggggccaccccatcccacacggtggcatgcagggcgggtttggaggccagagccgggggagcaggcccagcgatgcccgcttcactcgccgctactgagtacttggaatcctgtgtcctgtctcgtggcaacaaggctatgttctgttaggagttaccttaaactgtgtaaaaatatttttttttaatctgctgccatattgtagctcaatacaatgtgaatttgtttttcgttttggggttttttttttttgtaataaatgtgtttccgttc

SEQ ID NO: 27237 - DNA, 2650 bp, Homo sapiens
  source 1..2650: mol_type = unassigned DNA
gtgctaggagcctgataaaaccggcccggttctgtggaaagtgggcggcggagccagggtccctggaatggcggagactctgtcaggcctaggtgattctggagcggcgggcgcggcggctctgagctccgcctcgtcagagaccgggacgcggcgcctcagcgacctgcgagtgatcgatctgcgggcggagctgaggaaacggaatgtggactcgagcggcaacaagagcgttttgatggagcggctgaagaaggcaattgaagatgaaggtggtaatcctgacgaaattgaaattacctccgagggaaacaagaaaacatcaaagaggtctagcaaagggcgcaaaccagaagaagagggtgtggaagataacgggctggaggaaaactctggggatggacagatagaggacaaagaaactataaacaatttagatacttcatcatctgacttcactatattacaggaaattgaagagccatccctggagccagaaaatgagaaaatactcgacattttgggggaaacttgtaaatctgagccagtaaaagaagaaagttccgagctggagcagccatttgcacaggacacaagtagcgtggggccagacagaaagcttgcggaggaagaggacctatttgacagcgcccatccggaagagggtgatttagatttggccagcgagtcaacagcacacgctcagtcgagcaaggcagacagcctgttagcggtagtgaaaagggagcccgcggagcagccaggcgatggcgagaggacggactgtgagcctgtagggctagagccggcagttgagcagagtagtgcggcctccgagctcgcggaggcctctagcgaggagctcgcagaagcacccacggaagccccaagcccagaagccagagatagcaaagaagacgggaggaagtttgattttgacgcttgtaatgaagtccctccggctcctaaagagtcctcaaccagtgagggcgctgatcagaaaatgagttctcccgaagatgactcggatacaaaaaggctttccaaagaggaaaagggtcgcagcagttgtggtagaaatttctgggttagtggactctcttctacaaccagagctacagatttgaagaatcttttcagcaaatatgggaaggtggtgggcgccaaggttgtgacaaatgcccggagtcctggagctcgctgttacggttttgtcacgatgtccacagcagaagaggccacaaaatgcattaaccacctgcacaagacggagctccacggaaagatgatctccgtggagaaagccaaaaatgaacctgtgggaaagaaaacctctgacaaaagagacagtgacgggaaaaaggagaagtcgagcaacagtgacagatctacaaaccttaagagggatgataaatgtgacagaaaagatgatgctaagaagggtgacgacggaagtggagaaaagagtaaggaccaagatgatcagaaacctggcccctcagagcgatctcgagccacaaagtcaggaagtcgagggaccgaacggactgtagtaatggataaatccaaaggggtgcctgtgattagtgtaaaaacgtccgggtccaaagagagagcttccaaaagccaggatcgcaaatcagccagcagagagaagcggtccgtcgtgtcctttgataaggtcaaggagcctcggaagtcaagagactcagagtcccatagcagggtgcgtgaacgcagtgaacgcgaacaacgcatgcaggcgcagtgggagcgcgaggagcgtgagcggctggagattgcccgagagaggctggccttccagcgccagcggctggagcgggagcgcatggagcgggaacggctggagcgcgaacgcatgcacgtggagcacgagcgcaggcgcgagcaggagcgcatccaccgtgagcgcgaggagctgaggcgccagcaggaactgcgctatgagcaggagcggcggcccgcggtgcggcggccctacgacctggaccggcgagatgatgcctattggccggaagccaagcgggccgccctggatgagcgctaccattctgactttaaccgccaggaccgcttccacgactttgaccacagggaccgcggccgctaccccgaccactcggtggacaggagagaaggttcaaggtcaatgatgggagaacgagaaggacagcattacccagaacgccatggaggaccagagcgccacggccgggactcccgcgatggctgggggggctatggctctgacaagaggatgagcgagggccgggggctgcctcctccccccaggggcagacgtgactggggggaccatggccgaagagaggatgaccggtcatggcagggcacggccgacgggggcatgatggacagggatcacaagaggtggcaaggtggcgagagaagcatgtccggtcactccgggcctggccacatgatgaaccgaggaggaatgtcagggcgcggcagctttgccccaggcggggcctcccggggccaccccatcccacacggtggcatgcagggcgggtttggaggccagagccgggggagcaggcccagcgatgcccgcttcactcgccgctactgagtacttggaatcctgtgtcctgtctcgtggcaacaa

SEQ ID NO: 27238 - DNA, 2433 bp, Homo sapiens
  source 1..2433: mol_type = unassigned DNA
agtgatcgatctgcgggcggagctgaggaaacggaatgtggactcgagcggcaacaagagcgttttgatggagcggctgaagaaggcaattgaagatgaaggtggtaatcctgacgaaattgaaattacctccgagggaaacaagaaaacatcaaagaggtctagcaaagatagaggacaaagaaactataaacaatttagatacttcatcatctgacttcactatattacaggaaattgaagagccatccctggagccagaaaatgagaaaatactcgacattttgggggaaacttgtaaatctgagccagtaaaagaagaaagttccgagctggagcagccatttgcacaggacacaagtagcgtggggccagacagaaagcttgcggaggaagaggacctatttgacagcgcccatccggaagagggtgatttagatttggccagcgagtcaacagcacacgctcagtcgagcaaggcagacagcctgttagcggtagtgaaaagggagcccgcggagcagccaggcgatggcgagaggacggactgtgagcctgtagggctagagccggcagttgagcagagtagtgcggcctccgagctcgcggaggcctctagcgaggagctcgcagaagcacccacggaagccccaagcccagaagccagagatagcaaagaagacgggaggaagtttgattttgacgcttgtaatgaagtccctccggctcctaaagagtcctcaaccagtgagggcgctgatcagaaaatgagttctcccgaagatgactcggatacaaaaaggctttccaaagaggaaaagggtcgcagcagttgtggtagaaatttctgggttagtggactctcttctacaaccagagctacagatttgaagaatcttttcagcaaatatgggaaggtggtgggcgccaaggttgtgacaaatgcccggagtcctggagctcgctgttacggttttgtcacgatgtccacagcagaagaggccacaaaatgcattaaccacctgcacaagacggagctccacggaaagatgatctccgtggagaaagccaaaaatgaacctgtgggaaagaaaacctctgacaaaagagacagtgacgggaaaaaggagaagtcgagcaacagtgacagatctacaaaccttaagagggatgataaatgtgacagaaaagatgatgctaagaagggtgacgacggaagtggagaaaagagtaaggaccaagatgatcagaaacctggcccctcagagcgatctcgagccacaaagtcaggaagtcgagggaccgaacggactgtagtaatggataaatccaaaggggtgcctgtgattagtgtaaaaacgtccgggtccaaagagagagcttccaaaagccaggatcgcaaatcagccagcagagagaagcggtccgtcgtgtcctttgataaggtcaaggagcctcggaagtcaagagactcagagtcccatagggtgcgtgaacgcagtgaacgcgaacaacgcatgcaggcgcagtgggagcgcgaggagcgtgagcggctggagattgcccgagagaggctggccttccagcgccagcggctggagcgggagcgcatggagcgggaacggctggagcgcgaacgcatgcacgtggagcacgagcgcaggcgcgagcaggagcgcatccaccgtgagcgcgaggagctgaggcgccagcaggaactgcgctatgagcaggagcggcggcccgcggtgcggcggccctacgacctggaccggcgagatgatgcctattggccggaagccaagcgggccgccctggatgagcgctaccattctgactttaaccgccaggaccgcttccacgactttgaccacagggaccgcggccgctaccccgaccactcggtggacaggagagaaggttcaaggtcaatgatgggagaacgagaaggacagcattacccagaacgccatggaggaccagagcgccacggccgggactcccgcgatggctgggggggctatggctctgacaagaggatgagcgagggccgggggctgcctcctccccccaggggcagacgtgactggggggaccatggccgaagagaggatgaccggtcatggcagggcacggccgacgggggcatgatggacagggatcacaagaggtggcaaggtggcgagagaagcatgtccggtcactccgggcctggccacatgatgaaccgaggaggaatgtcagggcgcggcagctttgccccaggcggggcctcccggggccaccccatcccacacggtggcatgcagggcgggtttggaggccagagccgggggagcaggcccagcgatgcccgcttcactcgccgctactgagtacttggaatcctgtgtcctgtctcgtggcaacaaggctatgttctgttaggagtta

SEQ ID NO: 27239 - DNA, 2681 bp, Homo sapiens
  source 1..2681: mol_type = unassigned DNA
gtgctaggagcctgataaaaccggcccggttctgtggaaagtgggcggcggagccagggtccctggaatggcggagactctgtcaggcctaggtgattctggagcggcgggcgcggcggctctgagctccgcctcgtcagagaccgggacgcggcgcctcagcgacctgcgagtgatcgatctgcgggcggagctgaggaaacggaatgtggactcgagcggcaacaagagcgttttgatggagcggctgaagaaggcaattgaagatgaaggtggtaatcctgacgaaattgaaattacctccgagggaaacaagaaaacatcaaagaggtctagcaaagggcgcaaaccagaagaagagggtgtggaagataacgggctggagccagaaaatgagaaaatactcgacattttgggggaaacttgtaaatctgagccagtaaaagaagaaagttccgagctggagcagccatttgcacaggacacaagtagcgtggggccagacagaaagcttgcggaggaagaggacctatttgacagcgcccatccggaagagggtgatttagatttggccagcgagtcaacagcacacgctcagtcgagcaaggcagacagcctgttagcggtagtgaaaagggagcccgcggagcagccaggcgatggcgagaggacggactgtgagcctgtagggctagagccggcagttgagcagagtagtgcggcctccgagctcgcggaggcctctagcgaggagctcgcagaagcacccacggaagccccaagcccagaagccagagatagcaaagaagacgggaggaagtttgattttgacgcttgtaatgaagtccctccggctcctaaagagtcctcaaccagtgagggcgctgatcagaaaatgagttctcccgaagatgactcggatacaaaaaggctttccaaagaggaaaagggtcgcagcagttgtggtagaaatttctgggttagtggactctcttctacaaccagagctacagatttgaagaatcttttcagcaaatatgggaaggtggtgggcgccaaggttgtgacaaatgcccggagtcctggagctcgctgttacggttttgtcacgatgtccacagcagaagaggccacaaaatgcattaaccacctgcacaagacggagctccacggaaagatgatctccgtggagaaagccaaaaatgaacctgtgggaaagaaaacctctgacaaaagagacagtgacgggaaaaaggagaagtcgagcaacagtgacagatctacaaaccttaagagggatgataaatgtgacagaaaagatgatgctaagaagggtgacgacggaagtggagaaaagagtaaggaccaagatgatcagaaacctggcccctcagagcgatctcgagccacaaagtcaggaagtcgagggaccgaacggactgtagtaatggataaatccaaaggggtgcctgtgattagtgtaaaaacgtccgggtccaaagagagagcttccaaaagccaggatcgcaaatcagccagcagagagaagcggtccgtcgtgtcctttgataaggtcaaggagcctcggaagtcaagagactcagagtcccatagcagggtgcgtgaacgcagtgaacgcgaacaacgcatgcaggcgcagtgggagcgcgaggagcgtgagcggctggagattgcccgagagaggctggccttccagcgccagcggctggagcgggagcgcatggagcgggaacggctggagcgcgaacgcatgcacgtggagcacgagcgcaggcgcgagcaggagcgcatccaccgtgagcgcgaggagctgaggcgccagcaggaactgcgctatgagcaggagcggcggcccgcggtgcggcggccctacgacctggaccggcgagatgatgcctattggccggaagccaagcgggccgccctggatgagcgctaccattctgactttaaccgccaggaccgcttccacgactttgaccacagggaccgcggccgctaccccgaccactcggtggacaggagagaaggttcaaggtcaatgatgggagaacgagaaggacagcattacccagaacgccatggaggaccagagcgccacggccgggactcccgcgatggctgggggggctatggctctgacaagaggatgagcgagggccgggggctgcctcctccccccaggggcagacgtgactggggggaccatggccgaagagaggatgaccggtcatggcagggcacggccgacgggggcatgatggacagggatcacaagaggtggcaaggtggcgagagaagcatgtccggtcactccgggcctggccacatgatgaaccgaggaggaatgtcagggcgcggcagctttgccccaggcggggcctcccggggccaccccatcccacacggtggcatgcagggcgggtttggaggccagagccgggggagcaggcccagcgatgcccgcttcactcgccgctactgagtacttggaatcctgtgtcctgtctcgtggcaacaaggctatgttctgttaggagttaccttaaactgtgtaaaaatatttttttttaatctgctgccatattgtagctcaatacaatgtgaatttgtttttcgttttggggttttttttttttgtaataaatgtgtttccgttc

SEQ ID NO: 27240 - DNA, 3317 bp, Homo sapiens
  source 1..3317: mol_type = unassigned DNA
gttgtgccggggaacccgcggttggtggacgcgcgagcgtccttgctgctaagtacgctagtgggggcggtgcgcgtgcgcgtgcgcggccgcaaagcggggcgggaggaaacgagtgcgttttcctcttaggcggcgccattttgtgttcagagccgctatagctgccggcggtgtgcgactgagtcggtggcgaagacgggaacgcgacgatggcggagactctgcccgggtcgggcgactcgggccctggcacggcttctctcggcccgggcgttgcggagactgggacgaggcggctcagcgagctgcgggtgatcgatctgcgggcggagctgaagaagcggaacctggacacgggcggcaacaagagcgtcctgatggagcggctcaagaaggcggttaaagaagaggggcaagatcctgatgaaattggcatcgagttagaagccaccagcaagaagtcagccaagagatgtgttaaaggactgaagatggaggaggaaggcacagaagataatggcctggaagacgattccagagacgggcaggaggacatggaagcaagtctggagaacctgcagaatatgggcatgatggacatgagtgtgctagacgaaactgaagtggcgaatagcagtgctccagattttggggaggatggcacggacggccttctcgattccttttgtgatagtaaagaatacgtggctgcacagctgagacagctcccggctcagcccccagagcatgctgtggatggggaaggatttaagaacactttggaaacttcatcgttgaacttcaaagtaactccggacattgaagaatcccttttggagccagaaaatgagaaaatactcgacattttgggggaaacttgtaaatctgagccagtaaaagaagaaagttccgagctggagcagccatttgcacaggacacaagtagcgtggggccagacagaaagcttgcggaggaagaggacctatttgacagcgcccatccggaagagggtgatttagatttggccagcgagtcaacagcacacgctcagtcgagcaaggcagacagcctgttagcggtagtgaaaagggagcccgcggagcagccaggcgatggcgagaggacggactgtgagcctgtagggctagagccggcagttgagcagagtagtgcggcctccgagctcgcggaggcctctagcgaggagctcgcagaagcacccacggaagccccaagcccagaagccagagatagcaaagaagacgggaggaagtttgattttgacgcttgtaatgaagtccctccggctcctaaagagtcctcaaccagtgagggcgctgatcagaaaatgagctcttttaaggaagaaaaagatataaagccaatcattaaagatgaaaaaggtcgggtcggcagcggttctggtcggaacctgtgggtcagcgggctgtcctccacaacacgcgctacggatctcaagaaccttttcagcaagtatgggaaggttgtcggggccaaagtggtaacgaacgcccgcagcccgggggctcgatgctatggattcgtcaccatgtcgacatctgacgaggcgaccaagtgcatcagccatctccacagaactgagctgcatggacgaatgatctccgtagagaaggccaaaaatgagcctgctgggaaaaagctttccgacagaaaagagtgcgaagtgaagaaggaaaaattatcgagtgtcgacagacatcattctgtggagatcaaaattgaaaaaactgtaattaagaaggaagagaagattgagaagaaggaggaaaaaaagcctgaagacattaagaaggaagaaaaagaccaggatgagctgaaacccggacctacaaatcggtctagagtcaccaaatcaggaagcagaggaatggagcggacggtcgtgatggataaatcgaaaggagagcccgtcattagcgtgaaaaccacaagcaggtccaaagagagaagctccaagagtcaggatcgcaagtcagaaagcaaagaaaagagagacatcttgtcgtttgataaaatcaaagaacaaagggagagagagcgccagaggcagcgggaacgggagatccgcgaaacggagaggcggcgggagcgcgagcagcgggagcgggagcaacgcctcgaggccttccatgagcggaaggagaaggcccggctacagcgggaacgcctgcagctcgagtgccagcgccagcggctggagcgggagcgcatggagcgggagcggctggagcgcgagcgcatgcgcgtggagcgtgagcgcaggaaggagcaggagcgcatccaccgcgagcgcgaggagctgcggcgccagcaggagcagctgcgttacgagcaggagcggcggcccgggcggaggccctacgacctggaccgacgagatgatgcctattggccagaaggaaagcgtgtggcaatggaggaccgatatcgtgcagactttccccggccagaccaccgctttcacgacttcgatcatcgagaccggggccagtaccaggaccacgccatcgacaggcgggagggttcgaggccaatgatgggagaccaccgggatgggcagcactatggagatgaccgccatggccacggaggacccccagagcgccacggccgggactcccgtgatggctgggggggctacggctccgacaagaggctgagtgaaggccgggggctgccccctccccccaggggtggccgtgactggggagagcacaaccagcggctagaggagcaccaggcacgcgcctggcagggtgccatggacgcaggcgcggctagccgggagcacgccaggtggcaaggtggcgagaggggcctgtctgggccctcggggccggggcacatggcaagccgcggtggagtggcggggcgaggcggctttgcacaaggtggacattcccagggccacgtggtgccaggtggcggactggaaggtggcggagtggccagccaggaccggggcagcagagtccctcacccacaccctcatccccccccgtacccccacttcacccgccgctactaagtcccactcgctgcgagttttcgggtgggcagacgcactgttgaatctggtagccagggttccctcgaacttgggggatctttttaaaagcaaagtaaatcctgccaccatgttgtagctcaatacaatgtgaactcactttttttttttttttaaataaatgtgttcttgttctgccatttttaaatcaaggtttctgttaacgaggcattccattttccattaataaagtttaccattcgc

SEQ ID NO: 27241 - DNA, 3317 bp, Homo sapiens
  source 1..3317: mol_type = unassigned DNA
gttgtgccggggaacccgcggttggtggacgcgcgagcgtccttgctgctaagtacgctagtgggggcggtgcgcgtgcgcgtgcgcggccgcaaagcggggcgggaggaaacgagtgcgttttcctcttaggcggcgccattttgtgttcagagccgctatagctgccggcggtgtgcgactgagtcggtggcgaagacgggaacgcgacgatggcggagactctgcccgggtcgggcgactcgggccctggcacggcttctctcggcccgggcgttgcggagactgggacgaggcggctcagcgagctgcgggtgatcgatctgcgggcggagctgaagaagcggaacctggacacgggcggcaacaagagcgtcctgatggagcggctcaagaaggcggttaaagaagaggggcaagatcctgatgaaattggcatcgagttagaagccaccagcaagaagtcagccaagagatgtgttaaaggactgaagatggaggaggaaggcacagaagataatggcctggaagacgattccagagacgggcaggaggacatggaagcaagtctggagaacctgcagaatatgggcatgatggacatgagtgtgctagacgaaactgaagtggcgaatagcagtgctccagattttggggaggatggcacggacggccttctcgattccttttgtgatagtaaagaatacgtggctgcacagctgagacagctcccggctcagcccccagagcatgctgtaggtaacttggagacacggcaggatgtgcccactagcagttctcttcgtgttagtgtggcagccgtgccagttccacatttatccgtagaaaatgagaaaatactcgacattttgggggaaacttgtaaatctgagccagtaaaagaagaaagttccgagctggagcagccatttgcacaggacacaagtagcgtggggccagacagaaagcttgcggaggaagaggacctatttgacagcgcccatccggaagagggtgatttagatttggccagcgagtcaacagcacacgctcagtcgagcaaggcagacagcctgttagcggtagtgaaaagggagcccgcggagcagccaggcgatggcgagaggacggactgtgagcctgtagggctagagccggcagttgagcagagtagtgcggcctccgagctcgcggaggcctctagcgaggagctcgcagaagcacccacggaagccccaagcccagaagccagagatagcaaagaagacgggaggaagtttgattttgacgcttgtaatgaagtccctccggctcctaaagagtcctcaaccagtgagggcgctgatcagaaaatgagctcttttaaggaagaaaaagatataaagccaatcattaaagatgaaaaaggtcgggtcggcagcggttctggtcggaacctgtgggtcagcgggctgtcctccacaacacgcgctacggatctcaagaaccttttcagcaagtatgggaaggttgtcggggccaaagtggtaacgaacgcccgcagcccgggggctcgatgctatggattcgtcaccatgtcgacatctgacgaggcgaccaagtgcatcagccatctccacagaactgagctgcatggacgaatgatctccgtagagaaggccaaaaatgagcctgctgggaaaaagctttccgacagaaaagagtgcgaagtgaagaaggaaaaattatcgagtgtcgacagacatcattctgtggagatcaaaattgaaaaaactgtaattaagaaggaagagaagattgagaagaaggaggaaaaaaagcctgaagacattaagaaggaagaaaaagaccaggatgagctgaaacccggacctacaaatcggtctagagtcaccaaatcaggaagcagaggaatggagcggacggtcgtgatggataaatcgaaaggagagcccgtcattagcgtgaaaaccacaagcaggtccaaagagagaagctccaagagtcaggatcgcaagtcagaaagcaaagaaaagagagacatcttgtcgtttgataaaatcaaagaacaaagggagagagagcgccagaggcagcgggaacgggagatccgcgaaacggagaggcggcgggagcgcgagcagcgggagcgggagcaacgcctcgaggccttccatgagcggaaggagaaggcccggctacagcgggaacgcctgcagctcgagtgccagcgccagcggctggagcgggagcgcatggagcgggagcggctggagcgcgagcgcatgcgcgtggagcgtgagcgcaggaaggagcaggagcgcatccaccgcgagcgcgaggagctgcggcgccagcaggagcagctgcgttacgagcaggagcggcggcccgggcggaggccctacgacctggaccgacgagatgatgcctattggccagaaggaaagcgtgtggcaatggaggaccgatatcgtgcagactttccccggccagaccaccgctttcacgacttcgatcatcgagaccggggccagtaccaggaccacgccatcgacaggcgggagggttcgaggccaatgatgggagaccaccgggatgggcagcactatggagatgaccgccatggccacggaggacccccagagcgccacggccgggactcccgtgatggctgggggggctacggctccgacaagaggctgagtgaaggccgggggctgccccctccccccaggggtggccgtgactggggagagcacaaccagcggctagaggagcaccaggcacgcgcctggcagggtgccatggacgcaggcgcggctagccgggagcacgccaggtggcaaggtggcgagaggggcctgtctgggccctcggggccggggcacatggcaagccgcggtggagtggcggggcgaggcggctttgcacaaggtggacattcccagggccacgtggtgccaggtggcggactggaaggtggcggagtggccagccaggaccggggcagcagagtccctcacccacaccctcatccccccccgtacccccacttcacccgccgctactaagtcccactcgctgcgagttttcgggtgggcagacgcactgttgaatctggtagccagggttccctcgaacttgggggatctttttaaaagcaaagtaaatcctgccaccatgttgtagctcaatacaatgtgaactcactttttttttttttttaaataaatgtgttcttgttctgccatttttaaatcaaggtttctgttaacgaggcattccattttccattaataaagtttaccattcgc

SEQ ID NO: 27242 - DNA, 2570 bp, Homo sapiens
  source 1..2570: mol_type = unassigned DNA
gttgtgccggggaacccgcggttggtggacgcgcgagcgtccttgctgctaagtacgctagtgggggcggtgcgcgtgcgcgtgcgcggccgcaaagcggggcgggaggaaacgagtgcgttttcctcttaggcggcgccattttgtgttcagagccgctatagctgccggcggtgtgcgactgagtcggtggcgaagacgggaacgcgacgatggcggagactctgcccgggtcgggcgactcgggccctggcacggcttctctcggcccgggcgttgcggagactgggacgaggcggctcagcgagctgcgggtgatcgatctgcgggcggagctgaagaagcggaacctggacacgggcggcaacaagagcgtcctgatggagcggctcaagaaggcggttaaagaagaggggcaagatcctgatgaaattggcatcgagttagaagccaccagcaagaagtcagccaagagatgtgttaaagccccaagcccagaagccagagatagcaaagaagacgggaggaagtttgattttgacgcttgtaatgaagtccctccggctcctaaagagtcctcaaccagtgagggcgctgatcagaaaatgagctcttttaaggaagaaaaagatataaagccaatcattaaagatgaaaaaggtcgggtcggcagcggttctggtcggaacctgtgggtcagcgggctgtcctccacaacacgcgctacggatctcaagaaccttttcagcaagtatgggaaggttgtcggggccaaagtggtaacgaacgcccgcagcccgggggctcgatgctatggattcgtcaccatgtcgacatctgacgaggcgaccaagtgcatcagccatctccacagaactgagctgcatggacgaatgatctccgtagagaaggccaaaaatgagcctgctgggaaaaagctttccgacagaaaagagtgcgaagtgaagaaggaaaaattatcgagtgtcgacagacatcattctgtggagatcaaaattgaaaaaactgtaattaagaaggaagagaagattgagaagaaggaggaaaaaaagcctgaagacattaagaaggaagaaaaagaccaggatgagctgaaacccggacctacaaatcggtctagagtcaccaaatcaggaagcagaggaatggagcggacggtcgtgatggataaatcgaaaggagagcccgtcattagcgtgaaaaccacaagcaggtccaaagagagaagctccaagagtcaggatcgcaagtcagaaagcaaagaaaagagagacatcttgtcgtttgataaaatcaaagaacaaagggagagagagcgccagaggcagcgggaacgggagatccgcgaaacggagaggcggcgggagcgcgagcagcgggagcgggagcaacgcctcgaggccttccatgagcggaaggagaaggcccggctacagcgggaacgcctgcagctcgagtgccagcgccagcggctggagcgggagcgcatggagcgggagcggctggagcgcgagcgcatgcgcgtggagcgtgagcgcaggaaggagcaggagcgcatccaccgcgagcgcgaggagctgcggcgccagcaggagcagctgcgttacgagcaggagcggcggcccgggcggaggccctacgacctggaccgacgagatgatgcctattggccagaaggaaagcgtgtggcaatggaggaccgatatcgtgcagactttccccggccagaccaccgctttcacgacttcgatcatcgagaccggggccagtaccaggaccacgccatcgacaggcgggagggttcgaggccaatgatgggagaccaccgggatgggcagcactatggagatgaccgccatggccacggaggacccccagagcgccacggccgggactcccgtgatggctgggggggctacggctccgacaagaggctgagtgaaggccgggggctgccccctccccccaggggtggccgtgactggggagagcacaaccagcggctagaggagcaccaggcacgcgcctggcagggtgccatggacgcaggcgcggctagccgggagcacgccaggtggcaaggtggcgagaggggcctgtctgggccctcggggccggggcacatggcaagccgcggtggagtggcggggcgaggcggctttgcacaaggtggacattcccagggccacgtggtgccaggtggcggactggaaggtggcggagtggccagccaggaccggggcagcagagtccctcacccacaccctcatccccccccgtacccccacttcacccgccgctactaagtcccactcgctgcgagttttcgggtgggcagacgcactgttgaatctggtagccagggttccctcgaacttgggggatctttttaaaagcaaagtaaatcctgccaccatgttgtagctcaatacaatgtgaactcactttttttttttttttaaataaatgtgttcttgttctgccatttttaaatcaaggtttctgttaacgaggcattccattttccattaataaagtttaccattcgc

SEQ ID NO: 27243 - DNA, 3005 bp, Homo sapiens
  source 1..3005: mol_type = unassigned DNA
gttgtgccggggaacccgcggttggtggacgcgcgagcgtccttgctgctaagtacgctagtgggggcggtgcgcgtgcgcgtgcgcggccgcaaagcggggcgggaggaaacgagtgcgttttcctcttaggcggcgccattttgtgttcagagccgctatagctgccggcggtgtgcgactgagtcggtggcgaagacgggaacgcgacgatggcggagactctgcccgggtcgggcgactcgggccctggcacggcttctctcggcccgggcgttgcggagactgggacgaggcggctcagcgagctgcgggtgatcgatctgcgggcggagctgaagaagcggaacctggacacgggcggcaacaagagcgtcctgatggagcggctcaagaaggcggttaaagaagaggggcaagatcctgatgaaattggcatcgagttagaagccaccagcaagaagtcagccaagagatgtgttaaaggactgaagatggaggaggaaggcacagaagataatggcctggaagtagaaaatgagaaaatactcgacattttgggggaaacttgtaaatctgagccagtaaaagaagaaagttccgagctggagcagccatttgcacaggacacaagtagcgtggggccagacagaaagcttgcggaggaagaggacctatttgacagcgcccatccggaagagggtgatttagatttggccagcgagtcaacagcacacgctcagtcgagcaaggcagacagcctgttagcggtagtgaaaagggagcccgcggagcagccaggcgatggcgagaggacggactgtgagcctgtagggctagagccggcagttgagcagagtagtgcggcctccgagctcgcggaggcctctagcgaggagctcgcagaagcacccacggaagccccaagcccagaagccagagatagcaaagaagacgggaggaagtttgattttgacgcttgtaatgaagtccctccggctcctaaagagtcctcaaccagtgagggcgctgatcagaaaatgagctcttttaaggaagaaaaagatataaagccaatcattaaagatgaaaaaggtcgggtcggcagcggttctggtcggaacctgtgggtcagcgggctgtcctccacaacacgcgctacggatctcaagaaccttttcagcaagtatgggaaggttgtcggggccaaagtggtaacgaacgcccgcagcccgggggctcgatgctatggattcgtcaccatgtcgacatctgacgaggcgaccaagtgcatcagccatctccacagaactgagctgcatggacgaatgatctccgtagagaaggccaaaaatgagcctgctgggaaaaagctttccgacagaaaagagtgcgaagtgaagaaggaaaaattatcgagtgtcgacagacatcattctgtggagatcaaaattgaaaaaactgtaattaagaaggaagagaagattgagaagaaggaggaaaaaaagcctgaagacattaagaaggaagaaaaagaccaggatgagctgaaacccggacctacaaatcggtctagagtcaccaaatcaggaagcagaggaatggagcggacggtcgtgatggataaatcgaaaggagagcccgtcattagcgtgaaaaccacaagcaggtccaaagagagaagctccaagagtcaggatcgcaagtcagaaagcaaagaaaagagagacatcttgtcgtttgataaaatcaaagaacaaagggagagagagcgccagaggcagcgggaacgggagatccgcgaaacggagaggcggcgggagcgcgagcagcgggagcgggagcaacgcctcgaggccttccatgagcggaaggagaaggcccggctacagcgggaacgcctgcagctcgagtgccagcgccagcggctggagcgggagcgcatggagcgggagcggctggagcgcgagcgcatgcgcgtggagcgtgagcgcaggaaggagcaggagcgcatccaccgcgagcgcgaggagctgcggcgccagcaggagcagctgcgttacgagcaggagcggcggcccgggcggaggccctacgacctggaccgacgagatgatgcctattggccagaaggaaagcgtgtggcaatggaggaccgatatcgtgcagactttccccggccagaccaccgctttcacgacttcgatcatcgagaccggggccagtaccaggaccacgccatcgacaggcgggagggttcgaggccaatgatgggagaccaccgggatgggcagcactatggagatgaccgccatggccacggaggacccccagagcgccacggccgggactcccgtgatggctgggggggctacggctccgacaagaggctgagtgaaggccgggggctgccccctccccccaggggtggccgtgactggggagagcacaaccagcggctagaggagcaccaggcacgcgcctggcagggtgccatggacgcaggcgcggctagccgggagcacgccaggtggcaaggtggcgagaggggcctgtctgggccctcggggccggggcacatggcaagccgcggtggagtggcggggcgaggcggctttgcacaaggtggacattcccagggccacgtggtgccaggtggcggactggaaggtggcggagtggccagccaggaccggggcagcagagtccctcacccacaccctcatccccccccgtacccccacttcacccgccgctactaagtcccactcgctgcgagttttcgggtgggcagacgcactgttgaatctggtagccagggttccctcgaacttgggggatctttttaaaagcaaagtaaatcctgccaccatgttgtagctcaatacaatgtgaactcactttttttttttttttaaataaatgtgttcttgttctgccatttttaaatcaaggtttctgttaacgaggcattccattttccattaataaagtttaccattcgc

SEQ ID NO: 27244 - DNA, 844 bp, Homo sapiens
  source 1..844: mol_type = unassigned DNA
gctatagctgccggcggtgtgcgactgagtcggtggcgaagacgggaacgcgacgatggcggagactgggacgaggcggctcagcgagctgcgggtgatcgatctgcgggcggagctgaagaagcggaacctggacacgggcggcaacaagagcgtcctgatggagcggctcaagaaggcggttaaagaagaggggcaagatcctgatgaaattggcatcgagttagaagccaccagcaagaagtcagccaagagatgtgttaaaggactgaagatggaggaggaaggcacagaagataatggcctggaagacgattccagagacgggcaggaggacatggaagcaagtctggagaacctgcagaatatgggcatgatggacatgagtgtgctagacgaaactgaagtggcgaatagcagtgctccagattttggggaggatggcacggacggccttctcgattccttttgtgatagtaaagaatacgtggctgcacagctgagacagctcccggctcagcccccagagcatgctgtggatggggaaggatttaagaacactttggaaacttcatcgttgaacttcaaagtaactccggacattgaagaatcccttttggagccaggtactgataagagaaacacgacagttatggtttgaaagttttcacactattattttaaagctgtctatattttaagctgtgttatgatcttgtaaattgctctaatggtggacaatccagatcatacaaggatcagagattggaaacccattcgtatcaccagatctgtggaagagccattctggcttcttgaggtcaaatacatttggtgcaatgta

SEQ ID NO: 27245 - DNA, 3510 bp, Homo sapiens
  source 1..3510: mol_type = unassigned DNA
aggccccagaggaagagaccatgaaagtgaggtcggccggcggcgatggagatgccttgtgcgttacagaagaggacctggcgggtgacgacgaggacatgccgaccttcccatgcacccagaagggccggccagggccccgctgcagccgctgccagaagaacctatctttgcacacatcggtgcggattctttacctcttcctggccctgctcctggtggccgtggctgtgttggcctctctggttttcagaaaagtggactctctctccgaagacatctccttgacccagtctatttatgacaagaagcttgtgttaatgcagaaaaatctccagggcctggatccgaaagccctgaacaactgctctttctgccatgaagctgggcagctggggccagagatccgaaaactgcaggaggagctggagggaattcagaagctgcttctggcccaggaggtgcagctggaccagaccttacaggcccaggaggtgctctccaccaccagcagacaaatctcccaggagatgggcagttgctccttctccatccaccaggttaaccagtctctggggctcttcctggcccaggtgagaggctggcaggccaccacagctggcctggacctctctctgaaggacctcacccaggagtgctacgatgtcaaggctgcagtgcaccagatcaacttcaccgtggggcagacttccgagtggatccacgggatccagcggaagacagacgaggagaccctgaccctccagaagattgtcaccgactggcagaactacacacggctcttcagcggcctgcgcaccacctccaccaagactggagaggcggtcaagaacatccaggccaccctgggggcctcctcacagcgcatcagccagaactcagagagcatgcacgacctggtactccaggtcatgggcttgcagctgcagctggataacatctcgtccttcctggatgaccacgaagagaacatgcatgatcttcagtaccatacccactacgcccagaaccgcactgtggagaggtttgagtctctggaaggacgcatggcttctcacgagattgaaattggcaccatcttcaccaacatcaatgccaccgacaaccacgtgcacagcatgctcaagtacctggatgacgtgcggctctcctgcacgctgggcttccacacccatgccgaggagctctactacctgaacaagtctgtctccatcatgctgggcaccacagacctgctccgggagcgcttcagcctgctcagtgcccggctggacctcaacgtccggaacctctccatgatcgtggaggagatgaaggcagtggacacacagcatggagaaatccttcgcaatgtcaccatcctacgaggtgcccccggccctccaggaccaagaggattcaaaggagatatgggcgtgaaagggcctgttggcggcagaggcccgaaaggagaccccggcagcttgggccccctgggaccccagggtcctcaggggcaacctggagaggccgggcctgtgggagaaaggggccctgttggccctcgagggttcccaggcctcaaaggctcaaagggcagctttggaactggagggccgagaggacagccaggcccaaaaggggacatagggcccccagggccagaagggcccccggggtctccagggccctcagggcctcagggaaaaccgggaattgcagggaagacagggtcaccaggccagcggggggccatggggcctaagggtgaaccagggatccagggtccccctggtctcccggggcctccaggtccaccaggaagccagagcttctactgaggagggctgtggcagagccactgtcacacagaatgccggaggggcgcagagcagatccaggccccagaaagcctcacctacagacagctgtggtcctctgattccaatgagggggctccccagggctgaccctgcagctttgggctcccccatagtgactgtgccataggaaagcagcccctcctcacacatacatgtgcacatgcacacacatgcatgcacacacatgcacacatacacgcacatgcacacatacacatgcatgcacacatacacaggcatacatgcatgcacacacacatgcacgcacacacacatgcacacatacacgtgcacacatacacaggcacacatgcatgcacacatacacatgcacacacacatgcacacatatatgcacaggcacacacatgtacgcacacacacatgcactgcacacatatccatgcacacaaacacatatatacacatgcacatacacagatttttctgctggccaggtgggccaactgggtttccctggctgggcaggaggagagggcagaggaagaccccctctcctgtgactgagcctgccagggaggcagctacctcgggaggaaggtctcacatctgtctctgggcacccatgctggccagcagtttcccagggctccctggggttgaaaagccccaaggaaacctttgcgggtggggcgttactgccaaaactccagaggcaaagtggacctggcaaccacaagaccctccccataagcaggggaccagcatacccgggagctgtccctgtctgtcacagcacagtggggccacgaggctgacattctctggccttgcacacagtgccccctgagaagttcaacatttatttcttcacgtgtccagaaaattcctcaattcatccttgcctctgcccttcaggagcagcctggaaggaatccaagcaggagtttcatctgcatgggggcactctgcaggccctggaacattgggcctgagtggagatgggagacagaggcaggccagaaggttctctctgcacagctgcctcccttgctctccctgaggctggcctgccccattccccaagggggctcctctggagtggtggggaggattaggctgcagaagggccaaccccttgcaacagggcagctctcgcctcccgcacacggctctcctgatcacagctgcatgccgaccttgtcccaccgggacccacaatggcccgagccctctttgcatgggcagccagctggactaggagtgggaagggcctggacactcacagaggccccctctgtcatcactccttggcacccaccaacttcctgcacacactggcagagaggggcgctgggaaatcaccccacagggtggaggtctcctgttggctacactctaaagctgctttgccttcatgttcaaacagattcaggcaccaccccctccaccgcccgcaaggttagggcatagagttgtctccttcccaacacggacccagagagcagcccttccctgctcaaagcctttccgcaccctcctgactgtcctggatgtgcaactggtttgcactgcacaccccacggccatgtaactctcctgtccacatatgataataccattctgcatagtattactgactcagtaaagagctatttccaggagt

SEQ ID NO: 27246 - DNA, 1807 bp, Homo sapiens
  source 1..1807: mol_type = unassigned DNA
gggaggaagggtgcgcggggcgaggggcggcggcagacctcgcggggccccagcgggaagcgcgggcggcggcgggatgcgcgctctgggcggcggggcgcggcgctaggcgcccggcggggcttccccaggctgcgaccccgcgggaccctccactcctcccgccgcctccgcagcccgcgcgccggagcatgagtcccggccggagccccacggccgcgggcggcgcctaggacggcgatccgcgccctggaggatccgccggccgcccggctccactacagctccagccgcctgcagcggggccctcctgaggccccagaggaagagaccatgaaagtgaggtcggccggcggcgatggagatgccttgtgcgttacagaagaggacctggcgggtgacgacgaggacatgccgaccttcccatgcacccagaagggccggccagggccccgctgcagccgctgccagaagaacctatctttgcacacatcggtgcggattctttacctcttcctggccctgctcctggtggccgtggctgtgttggcctctctggttttcagaaaagtggactctctctccgaagacatctccttgacccagtctatttatgacaagaagcttgtgttaatgcagaaaaatctccagggcctggatccgaaagccctgaacaactgctctttctgccatgaagctgggcagctggggccagagatccgaaaactgcaggaggagctggagggaattcagaagctgcttctggcccaggaggtgcagctggaccagaccttacaggcccaggaggtgctctccaccaccagcagacaaatctcccaggagatgggcagttgctccttctccatccaccaggttaaccagtctctggggctcttcctggcccaggtgagaggctggcaggccaccacagctggcctggacctctctctgaaggacctcacccaggagtgctacgatgtcaaggctgcagtgcaccagatcaacttcaccgtggggcagacttccgagtggatccacgggatccagcggaagacagacgaggagaccctgaccctccagaagattgtcaccgactggcagaactacacacggctcttcagcggcctgcgcaccacctccaccaagactggagaggcggtcaagaacatccaggccaccctgggggcctcctcacagcgcatcagccagaactcagagagcatgcacgacctggtactccaggtcatgggcttgcagctgcagctggataacatctcgtccttcctggatgaccacgaagagaacatgcatgatcttcagtaccatacccactacgcccagaaccgcactgtggagaggtttgagtctctggaaggacgcatggcttctcacgagattgaaattggcaccatcttcaccaacatcaatgccaccgacaaccacgtgcacagcatgctcaagtacctggatgacgtgcggctctcctgcacgctgggcttccacacccatgccgaggagctctactacctgaacaagtctgtctccatcatgctgggcaccacagacctgctccgggagcgcttcagcctgctcagtgcccggctggacctcaacgtccggaacctctccatgatcgtggaggagatgaaggcagtggacacacagcatggagaaatccttcgcaatgtcaccatcctacgaggtcacactttgttttcacataatcggatatgatatgaagccagccataaagcccaggatgaccaagaatataatttgaaaatgaatttgtttactatccttaatg

SEQ ID NO: 27247 - DNA, 1495 bp, Homo sapiens
  source 1..1495: mol_type = unassigned DNA
ctccttgcagttggatccctggcgggtgcggcccggcccggcccgtgagcggcgcacagaatgggccgatgctgcttctacacggcggggacgttgtccctgctcctgctggtgaccagcgtcacgctgctggtggcccgggtcttccagaaggctgtagaccagagtatcgagaagaaaattgtgttaaggaatggtactgaggcatttgactcctgggagaagccccctctgcctgtgtatactcagttctatttcttcaatgtcaccaatccagaggagatcctcagaggggagacccctcgggtggaagaagtggggccatacacctacaggtcacttgactggtggataacagacaagtgcaatatgattaatggaacagatggagattcttttcacccactaataaccaaagatgaggtcctttatgtcttcccatctgacttttgcaggtcagtgtatattactttcagtgactatgagagtgtacagggactgcctgcctttcggtataaagttcctgcagaaatattagccaatacgtcagacaatgccggcttctgtatacctgagggaaactgcctgggctcaggagttctgaatgtcagcatctgcaagaatggtgcacccatcattatgtctttcccacacttttaccaagcagatgagaggtttgtttctgccatagaaggcatgcacccaaatcaggaagaccatgagacatttgtggacattaatcctttgactggaataatcctaaaagcagccaagaggttccaaatcaacatttatgtcaaaaaattagatgactttgttgaaacgggagacattagaaccatggttttcccagtgatgtacctcaatgagagtgttcacattgataaagagacggcgagtcgactgaagtctatgattaacactactttgatcatcaccaacataccctacatcatcatggcgctgggtgtgttctttggtttggtttttacctggcttgcatgcaaaggacagggatccatggatgagggaacagcggatgaaagagcacccctcattcgaacctaaacattgcctttgcttggtgaagaaactgtgtgagctgtcctgacctggacgatgacgtggggaaaccctccacctccttgcaggcttgttgcctgttgaaagaaggaaaaagacacggcgctggcaagtgataggaacattctggccagaggttaaagagcaggctgacatggctggccattaagctttataaaatcatgtgggctctgaaattgttcttttatgtgtctagcaagtatttaataaacccttgtatagtaattttgttgttgttgggtgctggtagctccagaattttgtgaccactattgtgggtaaaatgtctctgcatcacttgttaatgctactggtctaacttcattcagtatgcttcattcaccgaactttgtgctcaaaatgcgtatataccattttatgttgtattcct

SEQ ID NO: 27248 - DNA, 2611 bp, Homo sapiens
  source 1..2611: mol_type = unassigned DNA
cccggatccaccgtgcctctgcggcctgcgtgcccggagtccccgcctgtgtcgtctctgtcgccgtccccgtctcctgccaggcgcggagccctgcgagccgcgggtgggccccaggcgcgcagacatgggctgctccgccaaagcgcgctgggctgccggggcgctgggcgtcgcggggctactgtgcgctgtgctgggcgctgtcatgatcgtgatggtgccgtcgctcatcaagcagcaggtccttaagaacgtgcgcatcgaccccagtagcctgtccttcaacatgtggaaggagatccctatccccttctatctctccgtctacttctttgacgtcatgaaccccagcgagatcctgaagggcgagaagccgcaggtgcgggagcgcgggccctacgtgtacagggagttcaggcacaaaagcaacatcaccttcaacaacaacgacaccgtgtccttcctcgagtaccgcaccttccagttccagccctccaagtcccacggctcggagagcgactacatcgtcatgcccaacatcctggtcttgggtgcggcggtgatgatggagaataagcccatgaccctgaagctcatcatgaccttggcattcaccaccctcggcgaacgtgccttcatgaaccgcactgtgggtgagatcatgtggggctacaaggacccccttgtgaatctcatcaacaagtactttccaggcatgttccccttcaaggacaagttcggattatttgctgagctcaacaactccgactctgggctcttcacggtgttcacgggggtccagaacatcagcaggatccacctcgtggacaagtggaacgggctgagcaaggttgacttctggcattccgatcagtgcaacatgatcaatggaacttctgggcaaatgtggccgcccttcatgactcctgagtcctcgctggagttctacagcccggaggcctgccgatccatgaagctaatgtacaaggagtcaggggtgtttgaaggcatccccacctatcgcttcgtggctcccaaaaccctgtttgccaacgggtccatctacccacccaacgaaggcttctgcccgtgcctggagtctggaattcagaacgtcagcacctgcaggttcagtgcccccttgtttctctcccatcctcacttcctcaacgctgacccggttctggcagaagcggtgactggcctgcaccctaaccaggaggcacactccttgttcctggacatccacccggtcacgggaatccccatgaactgctctgtgaaactgcagctgagcctctacatgaaatctgtcgcaggcattggacaaactgggaagattgagcctgtggtcctgccgctgctctggtttgcagagagcggggccatggagggggagactcttcacacattctacactcagctggtgttgatgcccaaggtgatgcactatgcccagtacgtcctcctggcgctgggctgcgtcctgctgctggtccctgtcatctgccaaatccggagccaagagaaatgctatttattttggagtagtagtaaaaagggctcaaaggataaggaggccattcaggcctattctgaatccctgatgacatcagctcccaagggctctgtgctgcaggaagcaaaactgtagggtcctgaggacaccgtgagccagccaggcctggccgctgggcctgaccggccccccagcccctacaccccgcttctcccggactctcccagcggacagccccccagccccacagcctgagcctcccagctgccatgtgcctgttgcacacctgcacacacgccctggcacacatacacacatgcgtgcaggcttgtgcagacactcagggatggagctgctgctgaagggacttgtagggagaggctcgtcaacaagcactgttctggaaccttctctccacgtggcccacaggcctgaccacaggggctgtgggtcctgcgtccccttcctcgggtgagcctggcctgtcccgttcagccgttgggcccaggcttcctcccctccaaggtgaaacactgcagtcccggtgtggtggctccccatgcaggacgggccaggctgggagtgccgccttcctgtgccaaattcagtggggactcagtgcccaggccctggccacgagctttggccttggtctacctgccaggccaggcaaagcgcctttacacaggcctcggaaaacaatggagtgagcacaagatgccctgtgcagctgcccgagggtctccgcccaccccggccggactttgatccccccgaagtcttcacaggcactgcatcgggttgtctggcgcccttttcctccagcctaaactgacatcatcctatggactgagccggccactctctggccgaagtggccgcaggctgtgcccccgagctgcccccaccccctcacagggtccctcagattataggtgcccaggctgaggtgaagaggcctgggggccctgccttccgggcgctcctggaccctggggcaaacctgtgacccttttctactggaatagaaatgagttttatcatctttgaaaaataattcactcttgaagtaataaacgtttaaaaaaa

SEQ ID NO: 27249 - DNA, 3125 bp, Homo sapiens
  source 1..3125: mol_type = unassigned DNA
tccggcggcgccggcgatggggcataaaaccactggccacctgccgggctgctcctgcgtgcgctgccgtcccggatccaccgtgcctctgcggcctgcgtgcccggagtccccgcctgtgtcgtctctgtcgccgtccccgtctcctgccaggcgcggagccctgcgagccgcgggtgggccccaggcgcgcagacatgggctgctccgccaaagcgcgctgggctgccggggcgctgggcgtcgcggggctactgtgcgctgtgctgggcgctgtcatgatcgtgatggtgccgtcgctcatcaagcagcaggtccttaagaacgtgcgcatcgaccccagtagcctgtccttcaacatgtggaaggagatccctatccccttctatctctccgtctacttctttgacgtcatgaaccccagcgagatcctgaagggcgagaagccgcaggtgcgggagcgcgggccctacgtgtacagggagttcaggcacaaaagcaacatcaccttcaacaacaacgacaccgtgtccttcctcgagtaccgcaccttccagttccagccctccaagtcccacggctcggagagcgactacatcgtcatgcccaacatcctggtcttgggtgcggcggtgatgatggagaataagcccatgaccctgaagctcatcatgaccttggcattcaccaccctcggcgaacgtgccttcatgaaccgcactgtgggtgagatcatgtggggctacaaggacccccttgtgaatctcatcaacaagtactttccaggcatgttccccttcaaggacaagttcggattatttgctgagctcaacaactccgactctgggctcttcacggtgttcacgggggtccagaacatcagcaggatccacctcgtggacaagtggaacgggctgagcaaggttgacttctggcattccgatcagtgcaacatgatcaatggaacttctgggcaaatgtggccgcccttcatgactcctgagtcctcgctggagttctacagcccggaggcctgccgatccatgaagctaatgtacaaggagtcaggggtgtttgaaggcatccccacctatcgcttcgtggctcccaaaaccctgtttgccaacgggtccatctacccacccaacgaaggcttctgcccgtgcctggagtctggaattcagaacgtcagcacctgcaggttcagtgcccccttgtttctctcccatcctcacttcctcaacgctgacccggttctggcagaagcggtgactggcctgcaccctaaccaggaggcacactccttgttcctggacatccacccggtcacgggaatccccatgaactgctctgtgaaactgcagctgagcctctacatgaaatctgtcgcaggcattggacaaactgggaagattgagcctgtggtcctgccgctgctctggtttgcagagagcggggccatggagggggagactcttcacacattctacactcagctggtgttgatgcccaaggtgatgcactatgcccagtacgtcctcctggcgctgggctgcgtcctgctgctggtccctgtcatctgccaaatccggagccaaggtcctgaggacaccgtgagccagccaggcctggccgctgggcctgaccggccccccagcccctacaccccgcttctcccggactctcccagcggacagccccccagccccacagcctgagcctcccagctgccatgtgcctgttgcacacctgcacacacgccctggcacacatacacacatgcgtgcaggcttgtgcagacactcagggatggagctgctgctgaagggacttgtagggagaggctcgtcaacaagcactgttctggaaccttctctccacgtggcccacaggcctgaccacaggggctgtgggtcctgcgtccccttcctcgggtgagcctggcctgtcccgttcagccgttgggcccaggcttcctcccctccaaggtgaaacactgcagtcccggtgtggtggctccccatgcaggacgggccaggctgggagtgccgccttcctgtgccaaattcagtggggactcagtgcccaggccctggccacgagctttggccttggtctacctgccaggccaggcaaagcgcctttacacaggcctcggaaaacaatggagtgagcacaagatgccctgtgcagctgcccgagggtctccgcccaccccggccggactttgatccccccgaagtcttcacaggcactgcatcgggttgtctggcgcccttttcctccagcctaaactgacatcatcctatggactgagccggccactctctggccgaagtggccgcaggctgtgcccccgagctgcccccaccccctcacagggtccctcagattataggtgcccaggctgaggtgaagaggcctgggggccctgccttccgggcgctcctggaccctggggcaaacctgtgacccttttctactggaatagaaatgagttttatcatctttgaaaaataattcactcttgaagtaataaacgtttaaaaaaatgggatgcctgcctctgtgacagccttgtttgctgaggtcgtgggggtgggggcctctgggaagttccgggctcctcttctcttggtcaatagctcctttctggtggctgccaagagcgtctctcccagggccgggctgctggcttaccttcctgttgttttcaaatttcaaccttgtgcaatgttgagtttcatagaaatactgcatgagtacgcccttgtttagaagcagcagggtctgagtcccatcccacagcccccagtgcagacgcttttgccacttttgcatggggccccctggatgtgtttctgtgcatttatctacaaatcctggtgcccataggacatgccccgtgttgttctaggcctttgctttctgctcgttacataaatggtgaagaagagaagcgggtaagagaacagattggagccatctaaaagttctcatcttaagtgtagatcattgcaaaggatggaattttctccgattgtcatcatcgttgatgtttgaatatgagaccatttcatcagtatttaagtgtgcccgctgggatctaactaggagaggagagg

SEQ ID NO: 27250 - DNA, 2304 bp, Homo sapiens
  source 1..2304: mol_type = unassigned DNA
cccggatccaccgtgcctctgcggcctgcgtgcccggagtccccgcctgtgtcgtctctgtcgccgtccccgtctcctgccaggcgcggagccctgcgagccgcgggtgggccccaggcgcgcagacatgggctgctccgccaaagcgcgctgggctgccggggcgctgggcgtcgcggggctactgtgcgctgtgctgggcgctgtcatgatcgtgatggtgccgtcgctcatcaagcagcaggtccttaagggtgcggcggtgatgatggagaataagcccatgaccctgaagctcatcatgaccttggcattcaccaccctcggcgaacgtgccttcatgaaccgcactgtgggtgagatcatgtggggctacaaggacccccttgtgaatctcatcaacaagtactttccaggcatgttccccttcaaggacaagttcggattatttgctgagctcaacaactccgactctgggctcttcacggtgttcacgggggtccagaacatcagcaggatccacctcgtggacaagtggaacgggctgagcaaggttgacttctggcattccgatcagtgcaacatgatcaatggaacttctgggcaaatgtggccgcccttcatgactcctgagtcctcgctggagttctacagcccggaggcctgccgatccatgaagctaatgtacaaggagtcaggggtgtttgaaggcatccccacctatcgcttcgtggctcccaaaaccctgtttgccaacgggtccatctacccacccaacgaaggcttctgcccgtgcctggagtctggaattcagaacgtcagcacctgcaggttcagtgcccccttgtttctctcccatcctcacttcctcaacgctgacccggttctggcagaagcggtgactggcctgcaccctaaccaggaggcacactccttgttcctggacatccacccggtcacgggaatccccatgaactgctctgtgaaactgcagctgagcctctacatgaaatctgtcgcaggcattggacaaactgggaagattgagcctgtggtcctgccgctgctctggtttgcagagagcggggccatggagggggagactcttcacacattctacactcagctggtgttgatgcccaaggtgatgcactatgcccagtacgtcctcctggcgctgggctgcgtcctgctgctggtccctgtcatctgccaaatccggagccaagagaaatgctatttattttggagtagtagtaaaaagggctcaaaggataaggaggccattcaggcctattctgaatccctgatgacatcagctcccaagggctctgtgctgcaggaagcaaaactgtagggtcctgaggacaccgtgagccagccaggcctggccgctgggcctgaccggccccccagcccctacaccccgcttctcccggactctcccagcggacagccccccagccccacagcctgagcctcccagctgccatgtgcctgttgcacacctgcacacacgccctggcacacatacacacatgcgtgcaggcttgtgcagacactcagggatggagctgctgctgaagggacttgtagggagaggctcgtcaacaagcactgttctggaaccttctctccacgtggcccacaggcctgaccacaggggctgtgggtcctgcgtccccttcctcgggtgagcctggcctgtcccgttcagccgttgggcccaggcttcctcccctccaaggtgaaacactgcagtcccggtgtggtggctccccatgcaggacgggccaggctgggagtgccgccttcctgtgccaaattcagtggggactcagtgcccaggccctggccacgagctttggccttggtctacctgccaggccaggcaaagcgcctttacacaggcctcggaaaacaatggagtgagcacaagatgccctgtgcagctgcccgagggtctccgcccaccccggccggactttgatccccccgaagtcttcacaggcactgcatcgggttgtctggcgcccttttcctccagcctaaactgacatcatcctatggactgagccggccactctctggccgaagtggccgcaggctgtgcccccgagctgcccccaccccctcacagggtccctcagattataggtgcccaggctgaggtgaagaggcctgggggccctgccttccgggcgctcctggaccctggggcaaacctgtgacccttttctactggaatagaaatgagttttatcatctttgaaaaataattcactcttgaagtaataaacgttt

SEQ ID NO: 27251 - DNA, 2731 bp, Homo sapiens
  source 1..2731: mol_type = unassigned DNA
ccggatccaccgtgcctctgcggcctgcgtgcccggagtccccgcctgtgtcgtctctgtcgccgtccccgtctcctgccaggcgcggagccctgcgagccgcgggtgggccccaggcgcgcagacatgggctgctccgccaaagcgcgctgggctgccggggcgctgggcgtcgcggggctactgtgcgctgtgctgggcgctgtcatgatcgtgatggtgccgtcgctcatcaagcagcaggtccttaagaacgtgcgcatcgaccccagtagcctgtccttcaacatgtggaaggagatccctatccccttctatctctccgtctacttctttgacgtcatgaaccccagcgagatcctgaagggcgagaagccgcaggtgcgggagcgcgggccctacgtgtacagggagttcaggcacaaaagcaacatcaccttcaacaacaacgacaccgtgtccttcctcgagtaccgcaccttccagttccagccctccaagtcccacggctcggagagcgactacatcgtcatgcccaacatcctggtcttgggtgcggcggtgatgatggagaataagcccatgaccctgaagctcatcatgaccttggcattcaccaccctcggcgaacgtgccttcatgaaccgcactgtgggtgagatcatgtggggctacaaggacccccttgtgaatctcatcaacaagtactttccaggcatgttccccttcaaggacaagttcggattatttgctgagctcaacaactccgactctgggctcttcacggtgttcacgggggtccagaacatcagcaggatccacctcgtggacaagtggaacgggctgagcaaggttgacttctggcattccgatcagtgcaacatgatcaatggaacttctgggcaaatgtggccgcccttcatgactcctgagtcctcgctggagttctacagcccggaggcctgccgatccatgaagctaatgtacaaggagtcaggggtgtttgaaggcatccccacctatcgcttcgtggctcccaaaaccctgtttgccaacgggtccatctacccacccaacgaaggcttctgcccgtgcctggagtctggaattcagaacgtcagcacctgcaggttcagtgcccccttgtttctctcccatcctcacttcctcaacgctgacccggttctggcagaagcggtgactggcctgcaccctaaccaggaggcacactccttgttcctggacatccacccggtcacgggaatccccatgaactgctctgtgaaactgcagctgagcctctacatgaaatctgtcgcaggcattggacaaactgggaagattgagcctgtggtcctgccgctgctctggtttgcagagagcggggccatggagggggagactcttcacacattctacactcagctggtgttgatgcccaaggtgatgcactatgcccagtacgtcctcctggcgctgggctgcgtcctgctgctggtccctgtcatctgccaaatccggagccaagtaggtgctggccagagggcagcccgggctgacagccattcgcttgcctgctgggggaaaggggcctcagatcggaccctctggccaaccgcagcctggagcccacctccagcagcagtcctgcgtctctgccggagtgggagcggtcactgctgggggctgcgcagcacgcttgcgtcttttgcatgccgcgttgccactactctgcctgttctggaaggcctgggaccctcccttggagggggcacagggtcctgaggacaccgtgagccagccaggcctggccgctgggcctgaccggccccccagcccctacaccccgcttctcccggactctcccagcggacagccccccagccccacagcctgagcctcccagctgccatgtgcctgttgcacacctgcacacacgccctggcacacatacacacatgcgtgcaggcttgtgcagacactcagggatggagctgctgctgaagggacttgtagggagaggctcgtcaacaagcactgttctggaaccttctctccacgtggcccacaggcctgaccacaggggctgtgggtcctgcgtccccttcctcgggtgagcctggcctgtcccgttcagccgttgggcccaggcttcctcccctccaaggtgaaacactgcagtcccggtgtggtggctccccatgcaggacgggccaggctgggagtgccgccttcctgtgccaaattcagtggggactcagtgcccaggccctggccacgagctttggccttggtctacctgccaggccaggcaaagcgcctttacacaggcctcggaaaacaatggagtgagcacaagatgccctgtgcagctgcccgagggtctccgcccaccccggccggactttgatccccccgaagtcttcacaggcactgcatcgggttgtctggcgcccttttcctccagcctaaactgacatcatcctatggactgagccggccactctctggccgaagtggccgcaggctgtgcccccgagctgcccccaccccctcacagggtccctcagattataggtgcccaggctgaggtgaagaggcctgggggccctgccttccgggcgctcctggaccctggggcaaacctgtgacccttttctactggaatagaaatgagttttatcatctttgaaaaataattcactcttgaagtaataaacgtttaaaaaaa

SEQ ID NO: 27252 - DNA, 1883 bp, Homo sapiens
  source 1..1883: mol_type = unassigned DNA
gagaaatcggggcccatgtgtgccgttggggtgagggtgcggagaaatcggggcccatgtgtgccgttgggaacgtgcgcatcgaccccagtagcctgtccttcaacatgtggaaggagatccctatccccttctatctctccgtctacttctttgacgtcatgaaccccagcgagatcctgaagggcgagaagccgcaggtgcgggagcgcgggccctacgtgtacagggagttcaggcacaaaagcaacatcaccttcaacaacaacgacaccgtgtccttcctcgagtaccgcaccttccagttccagccctccaagtcccacggctcggagagcgactacatcgtcatgcccaacatcctggtcttgggtgcggcggtgatgatggagaataagcccatgaccctgaagctcatcatgaccttggcattcaccaccctcggcgaacgtgccttcatgaaccgcactgtgggtgagatcatgtggggctacaaggacccccttgtgaatctcatcaacaagtactttccaggcatgttccccttcaaggacaagttcggattatttgctgagctcaacaactccgactctgggctcttcacggtgttcacgggggtccagaacatcagcaggatccacctcgtggacaagtggaacgggctgagcaaggttgacttctggcattccgatcagtgcaacatgatcaatggaacttctgggcaaatgtggccgcccttcatgactcctgagtcctcgctggagttctacagcccggaggcctgccgatccatgaagctaatgtacaaggagtcaggggtgtttgaaggcatccccacctatcgcttcgtggctcccaaaaccctgtttgccaacgggtccatctacccacccaacgaaggcttctgcccgtgcctggagtctggaattcagaacgtcagcacctgcaggttcagtgcccccttgtttctctcccatcctcacttcctcaacgctgacccggttctggcagaagcggtgactggcctgcaccctaaccaggaggcacactccttgttcctggacatccacccggtcacgggaatccccatgaactgctctgtgaaactgcagctgagcctctacatgaaatctgtcgcaggcattggacaaactgggaagattgagcctgtggtcctgccgctgctctggtttgcagagagcggggccatggagggggagactcttcacacattctacactcagctggtgttgatgcccaaggtgatgcactatgcccagtacgtcctcctggcgctgggctgcgtcctgctgctggtccctgtcatctgccaaatccggagccaagtaggtgctggccagagggcagcccgggctgacagccattcgcttgcctgctgggggaaaggggcctcagatcggaccctctggccaaccgcagcctggagcccacctccagcagcagtcctgcgtctctgccggagtgggagcggtcactgctgggggctgcgcagcacgcttgcgtcttttgcatgccgcgttgccactactctgcctgttctggaaggcctgggaccctcccttggagggggcacaggtgggctttgagtaatgagacctggtacttgcatcatccattcatcaagtcagcacccggggatgccaggttctgttaggggcgaggggacgtacagcagtagaggagacagctgagatccctgctcagggggattgaggggggctggcatcccagccggggagacagatgaaaaccaagtaaatcagcagaaaagataatttcactcatgataggagctgtgaggggttagagccaaatagaaatacagcgtgagccacgtgtgaggttttcagtttaaattttct

SEQ ID NO: 27253 - DNA, 2347 bp, Homo sapiens
  source 1..2347: mol_type = unassigned DNA
aaatcggggcccatgtgtgccgttgggaatgtaggatggtgcagctgctgtgtggaggcccccccaaaatttaacatagaattaccatatggtggggcaaccccacttctgggtatcaaagaaatggaagtgggaacttgaagaggaatctggccaccgcgttcattgcagcgctgttcacgatggcccaacggtgggagcaacccgagtgtccgctgatgggtggtgggtaagaagctggggcccatccacacgttggaataggattcagcctggaaaaggaaggacgtttggacgcacgctgcgacatgcacgggccttgaggaagttatgcgagtgaaataagccacaacaggacaaataccgtacgattccatttgcatgagctccctagagtagccagatccacagagacagaaaagagaatgaacgtgcgcatcgaccccagtagcctgtccttcaacatgtggaaggagatccctatccccttctatctctccgtctacttctttgacgtcatgaaccccagcgagatcctgaagggcgagaagccgcaggtgcgggagcgcgggccctacgtgtacagggagttcaggcacaaaagcaacatcaccttcaacaacaacgacaccgtgtccttcctcgagtaccgcaccttccagttccagccctccaagtcccacggctcggagagcgactacatcgtcatgcccaacatcctggtcttgggtgcggcggtgatgatggagaataagcccatgaccctgaagctcatcatgaccttggcattcaccaccctcggcgaacgtgccttcatgaaccgcactgtgggtgagatcatgtggggctacaaggacccccttgtgaatctcatcaacaagtactttccaggcatgttccccttcaaggacaagttcggattatttgctgagctcaacaactccgactctgggctcttcacggtgttcacgggggtccagaacatcagcaggatccacctcgtggacaagtggaacgggctgagcaaggttgacttctggcattccgatcagtgcaacatgatcaatggaacttctgggcaaatgtggccgcccttcatgactcctgagtcctcgctggagttctacagcccggaggcctgccgatccatgaagctaatgtacaaggagtcaggggtgtttgaaggcatccccacctatcgcttcgtggctcccaaaaccctgtttgccaacgggtccatctacccacccaacgaaggcttctgcccgtgcctggagtctggaattcagaacgtcagcacctgcaggttcagtgcccccttgtttctctcccatcctcacttcctcaacgctgacccggttctggcagaagcggtgactggcctgcaccctaaccaggaggcacactccttgttcctggacatccacccggtcacgggaatccccatgaactgctctgtgaaactgcagctgagcctctacatgaaatctgtcgcaggcattggacaaactgggaagattgagcctgtggtcctgccgctgctctggtttgcagagagcggggccatggagggggagactcttcacacattctacactcagctggtgttgatgcccaaggtgatgcactatgcccagtacgtcctcctggcgctgggctgcgtcctgctgctggtccctgtcatctgccaaatccggagccaagtaggtgctggccagagggcagcccgggctgacagccattcgcttgcctgctgggggaaaggggcctcagatcggaccctctggccaaccgcagcctggagcccacctccagcagcagtcctgcgtctctgccggagtgggagcggtcactgctgggggctgcgcagcacgcttgcgtcttttgcatgccgcgttgccactactctgcctgttctggaaggcctgggaccctcccttggagggggcacaggtgggctttgagtaatgagacctggtacttgcatcatccattcatcaagtcagcacccggggatgccaggttctgttaggggcgaggggacgtacagcagtagaggagacagctgagatccctgctcagggggattgaggggggctggcatcccagccggggagacagatgaaaaccaagtaaatcagcagaaaagataatttcactcatgataggagctgtgaggggttagagccaaatagaaatacagcgtgagccacgtgtgaggttttcagtttaaattttctaatagccacttaacagtcaaaggaaacaggtggaattaattttaatcttatttaacccaaatatatgcaaagtattatcacttcaacatgtaatcagtataaacggc

SEQ ID NO: 27254 - DNA, 581 bp, Homo sapiens
  source 1..581: mol_type = unassigned DNA
ctgcgtgcgctgccgtcccggatccaccgtgcctctgcggcctgcgtgcccggagtccccgcctgtgtcgtctctgtcgccgtccccgtctcctgccaggcgcggagccctgcgagccgcgggtgggccccaggcgcgcagacatgggctgctccgccaaagcgcgctgggctgccggggcgctgggcgtcgcggggctactgtgcgctgtgctgggcgctgtcatgatcgtgatggtgccgtcgctcatcaagcagcaggtccttaagaacgtgcgcatcgaccccagtagcctgtccttcaacatgtggaaggagatccctatccccttctatctctccgtctacttctttgacgtcatgaaccccagcgagatcctgaagggcgagaagccgcaggtgcgggagcgcgggccctacgtgtacagggagttcaggcacaaaagcaacatcaccttcaacaacaacgacaccgtgtccttcctcgagtaccgcaccttccagttccagccctccaagtcccacggctcggagagcgactacatcgtcatgcccaacatcctggtcttggtgaggctgccc

SEQ ID NO: 27255 - DNA, 1597 bp, Homo sapiens
  source 1..1597: mol_type = unassigned DNA
cgtccccgtctcctgccaggcgcggagccctgcgagccgcgggtgggccccaggcgcgcagacatgggctgctccgccaaagcgcgctgggctgccggggcgctgggcgtcgcggggctactgtgcgctgtgctgggcgctgtcatgatcgtgatggtgccgtcgctcatcaagcagcaggtccttaagaacgtgcgcatcgaccccagtagcctgtccttcaacatgtggaaggagatccctatccccttctatctctccgtctacttctttgacgtcatgaaccccagcgagatcctgaagggcgagaagccgcaggtgcgggagcgcgggccctacgtgtacagggagttcaggcacaaaagcaacatcaccttcaacaacaacgacaccgtgtccttcctcgagtaccgcaccttccagttccagccctccaagtcccacggctcggagagcgactacatcgtcatgcccaacatcctggtcttgggtgcggcggtgatgatggagaataagcccatgaccctgaagctcatcatgaccttggcattcaccaccctcggcgaacgtgccttcatgaaccgcactgtgggtgagatcatgtggggctacaaggacccccttgtgaatctcatcaacaagtactttccaggcatgttccccttcaaggacaagttcggattatttgctgagctcaacaactccgactctgggctcttcacggtgttcacgggggtccagaacatcagcaggatccacctcgtggacaagtggaacgggctgagcaaggttgacttctggcattccgatcagtgcaacatgatcaatggaacttctgggcaaatgtggccgcccttcatgactcctgagtcctcgctggagttctacagcccggaggcctgccgatccatgaagctaatgtacaaggagtcaggggtgtttgaaggcatccccacctatcgcttcgtggctcccaaaaccctgtttgccaacgggtccatctacccacccaacgaaggcttctgcccgtgcctggagtctggaattcagaacgtcagcacctgcaggttcagtgcccccttgtttctctcccatcctcacttcctcaacgctgacccggttctggcagaagcggtgactggcctgcaccctaaccaggaggcacactccttgttcctggacatccacccggtcacgggaatccccatgaactgctctgtgaaactgcagctgagcctctacatgaaatctgtcgcaggcattggacaaactgggaagattgagcctgtggtcctgccgctgctctggtttgcagagagcggggccatggagggggagactcttcacacattctacactcagctggtgttgatgcccaaggagaaatgctatttattttggagtagtagtaaaaagggctcaaaggataaggaggccattcaggcctattctgaatccctgatgacatcagctcccaagggctctgtgctgcaggaagcaaaactgtagggtcctgaggacaccgtgagccagccaggcctggccgctgggcctgaccggccccccagcccctacaccccgcttctcccggactctc

SEQ ID NO: 27256 - DNA, 4763 bp, Homo sapiens
  source 1..4763: mol_type = unassigned DNA
gccggcggttgcctcgcggggttgcggcgagcccggcccgcgaacgtcacgtccctgcgcgctccctgcactctcccgagctgcgctaggcgggcgccacggctgcccggcgaaggaaaccgaaaccgagtccgggcccgtccctccgcggccccatccgcccggtgcacccggggccgcgctcgccaggccgcggagcccagagctgcgcgcacgaaccgtgcgccgggagggcgtgggcgtggcgccgaagggtcccgggtcttcgacgcctctgcggcggctcctccctccttgcagttggatccctggcgggtgcggcccggcccggcccgtgagcggcgcacagaatgggccgatgctgcttctacacggcggggacgttgtccctgctcctgctggtgaccagcgtcacgctgctggtggcccgggtcttccagaaggctgtagaccagagtatcgagaagaaaattgtgttaaggaatggtactgaggcatttgactcctgggagaagccccctctgcctgtgtatactcagttctatttcttcaatgtcaccaatccagaggagatcctcagaggggagacccctcgggtggaagaagtggggccatacacctacagggaactcagaaacaaagcaaatattcaatttggagataatggaacaacaatatctgctgttagcaacaaggcctatgtttttgaacgagaccaatctgttggagaccctaaaattgacttaattagaacattaaatattcctgtattgactgtcatagagtggtcccaggtgcacttcctcagggagatcatcgaggccatgttgaaagcctatcagcagaagctctttgtgactcacacagttgacgaattgctctggggctacaaagatgaaatcttgtcccttatccatgttttcaggcccgatatctctccctattttggcctattctatgagaaaaatgggactaatgatggagactatgtttttctaactggagaagacagttaccttaactttacaaaaattgtggaatggaatgggaaaacgtcacttgactggtggataacagacaagtgcaatatgattaatggaacagatggagattcttttcacccactaataaccaaagatgaggtcctttatgtcttcccatctgacttttgcaggtcagtgtatattactttcagtgactatgagagtgtacagggactgcctgcctttcggtataaagttcctgcagaaatattagccaatacgtcagacaatgccggcttctgtatacctgagggaaactgcctgggctcaggagttctgaatgtcagcatctgcaagaatggtgcacccatcattatgtctttcccacacttttaccaagcagatgagaggtttgtttctgccatagaaggcatgcacccaaatcaggaagaccatgagacatttgtggacattaatcctttgactggaataatcctaaaagcagccaagaggttccaaatcaacatttatgtcaaaaaattagatgactttgttgaaacgggagacattagaaccatggttttcccagtgatgtacctcaatgagagtgttcacattgataaagagacggcgagtcgactgaagtctatgattaacactactttgatcatcaccaacataccctacatcatcatggcgctgggtgtgttctttggtttggtttttacctggcttgcatgcaaaggacagggatccatggatgagggaacagcggatgaaagagcacccctcattcgaacctaaacattgcctttgcttggtgaagaaactgtgtgagctgtcctgacctggacgatgacgtggggaaaccctccacctccttgcaggcttgttgcctgttgaaagaaggaaaaagacacggcgctggcaagtgataggaacattctggccagaggttaaagagcaggctgacatggctggccattaagctttataaaatcatgtgggctctgaaattgttcttttatgtgtctagcaagtatttaataaacccttgtatagtaattttgttgttgttgggtgctggtagctccagaattttgtgaccactattgtgggtaaaatgtctctgcatcacttgttaatgctactggtctaacttcattcagtatgcttcattcaccgaactttgtgctcaaaatgcgtatataccattttatgttgtattcctccatttcacttgcaaaacagaagtaaataagagttcgggacccagggtaaaatggtagcttcatccaatatatcattcaaatgcatctgatttctaaaacatattacattttatgctgatcttcagttcataattcttccaggaaaactcagtcttccaactgcaataaaatactgggtagaatcaaatgggaaaggggttgggtggggcaatacccatgagttgatagtgataagctcctaaggatttttaacttgtacttttgtgaacgaagagaatgcataaataatgttggtgaggataaagtacagatatttcatgtagaattaattgctagttatgatgcttgtggatagttaactgttttttttttagtcaaaatgatcatgctacgaaaagatgcttctgagagaatgtaatgagtaactgatttttcttcctgagtcgcccttgccaaatatgttactgtattaattaatctaatattgagtgattatttgtaaaattatgaatatgggaaatccatctatctacagcctaagttacacataagtttcagaaagtctgattagactaaagagatatttcttctgggacagccgccttcttggtaattttgaagttctttttacaagttccttcctcagtttcagttctttccagtgttttgtagctcactgtcactcactgaatagagaaacgtgtgccctatacttcctgtgacaatcattttgctgacagaatgatggatgtttaaaatattgcacaaagtactttaaagaaaggtctgttaggaccagaagcagagacaccacttttcaaaggacttcttggtttcagcataacctaagacagggaattgggagccatcatatgtcacagtgttcagaattcaagcatatttaagggcattttctttgattctcaaagttcagcattcattttgaattgagaagcctatacatttagctgacaaagtgcttatagaatttcttaacaactgaaccattcaaaaggattttttttgtttaaaactggatttcaatgtaagcaaatgaagaaaaaaatatagatttcatttccatagcttcttatccctgtattgaggtaataaattgttttactgacaatttttcctttttctacactaaaacaatatgtgatatatttcccctcttgaagaggcaattcattaaactctcaaattttctatagaatcaagatagaacctttagatactccaactcaccaaaatgtaaaaaaactaacaaaaatatttggtcttcaataatgctaaatatctacatttttagaatttatcaacatttaactagataattgggcatgtcttaattatgcatgtacttatccatactaataaaattgacaatgctagtgcatacttattggtttagtcctattatcaggatataatcatctgtgaggaggatattttaaatactgtaaatgataacagttaatgatatacacatttagactgagttgcacactggcagggagaccaaaaacattacttccatacttgtgtcatgattcttttttttttgagagagtctcactctgtcgccaggctggagtacagtggcatgatctcggctcactgcaacctctgcctcccgggttcaagcaattctcctgcctcagccacccaagtagctgggactacaggtgcgtgccaccacgcccagctaaattttgtatttttagtggagacggggtttcaccatgttggccaggatggtctcaatctcctgaccctgcgatctgcccacctcagcctcccaaagtgctgggattacaggcgtaagccaccgggcctggcctgttttatgattcttaatagttacttggtttaaatcacatttgatactatccttctgaaaagtctgagacagatctacaaactacagtcaaaattatagattaagaggaatgaatgcacctatttggctttaagttgaagatgaattatttctcatgctcattttcttgcggcagttatcttagaaagacccccaaaggctttgtgattgtaagcactgtcatgatcacagaatgcaagcttctggtaccatgatcctcaacttagagaggaagaaaccaagacagagagcttaactcacttctctcagggaaaattaggagttgagcacaggacaggaaatgggctttgccacttttagctccaggcttttctaaccagacttgatttcctcatgttctagaaagatcactaatggtcaagtggaacaagcactacacgactaacccctattggggtttttaacttaagggaggctaatttttaatttaaactgctcgagatatgagttctgcaaaaggtggtccgcatccttggccctctggacattatcactaaattgcttgtgcctgttaacaagaatactgaccagaatgctcttcatgtagcttatacagttggttcacttcatgcggttcttgacatgtttatttctacccttaatgcaatgaaatgtttcattaataaaaaaccactttatataaaa

SEQ ID NO: 27257 - DNA, 2871 bp, Homo sapiens
  source 1..2871: mol_type = unassigned DNA
gctgtgggggccagacgaacccgagcgctcccaccgagctgcctgccatggggctggggctgctgctcccgctgctgctgctctggactcgggggactcaggggtccgagctggaccccaaagggcagcacgtctgtgtggccagcagcccctctgctgagctgcagtgctgcgcaggctggaggcagaaggatcaagaatgcaccatccccatctgtgaggggccggacgcctgccagaaagacgaggtgtgtgtgaagccgggcctctgtcgatgcaagcctggattctttggggcccactgcagctcccgctgcccgggccagtactggggccccgactgccgtgagagctgcccctgccacccgcacggccagtgcgagccagccacgggcgcgtgccagtgccaggccgaccgctggggagcccgctgcgagttcccgtgcgcctgcggcccccacgggcgctgcgaccccgcgaccggcgtgtgccactgcgaacccggctggtggtcgtccacgtgccgccgcccgtgccagtgcaacaccgcggcggcgcgctgcgagcaggccacgggcgcctgcgtgtgcaagccgggctggtgggggcgccgctgcagcttccgctgcaactgccacggctccccgtgcgagcaggactccggccgctgcgcctgccggccgggctggtggggtcccgaatgccagcagcagtgcgagtgtgtgcggggccgctgcagcgccgcctccggcgagtgcacctgcccgcccggcttccgcggagcgcgctgcgagctgccctgcccggcaggcagccacggggtgcagtgcgcacacagctgtggccgctgcaaacacaatgagccgtgctctccagacacaggcagctgtgagtcctgcgagccgggctggaacgggacccagtgccagcagccctgcctgcctggcacctttggcgagagctgcgaacagcagtgccctcactgccgacatggggaggcctgtgagccagatactggccactgtcagcgctgtgaccctggctggctggggcccaggtgtgaagacccctgccccactggtacctttggggaagactgtggctctacctgccccacctgtgttcaggggtcctgtgatactgtgacaggggactgtgtctgcagtgccggctactgggggcccagctgcaacgcctcctgcccagccggtttccatggaaacaactgctcagttccttgtgaatgcccagagggactctgccaccctgtctctgggtcctgccagccaggctctggcagtcgggacactgccctcatcgcgggcagccttgtgcctctgctgctgctcttcctgggccttgcctgctgtgcctgctgctgctgggccccccgatcagacctcaaggacaggccagcgagagatggagctaccgtgtccaggatgaagctgcaggtctgggggacactgaccagcttgggctccacgctgccctgccgttccctcagctcccacaagctaccctgggtgacagcttcatcgagccgccctctgccggctgggccactgatgactccttctcatccgatcctgagtctggagaggcagatgaggttcctgcctactgtgtgccaccccaagaagggatggtccctgtggcccaggcagggtcgtcagaggccagcctggctgcaggtgctttcccgccccctgaggacgcctccacgccattcgccatcccgcgcacctccagcctagctcgggccaagcggccatcggtctccttcgcggaaggtaccaagtttgcaccacagagtcgccgaagctcaggggagctctccagcccgctccgaaagcccaagaggctctcccggggggcgcagtcgggtcctgagggccgggaagccgaagagtccacaggcccagaggaagcagaagcccccgagtcctttccggcggctgccagtcccggggattcagccactggccaccggcggcccccacttggtggccggacagtggctgagcacgtggaagccattgagggcagcgtccaggagagctcgggccctgtgaccacgatctacatgctggcagggaagccccgcggatccgaaggccctgtccgctctgtcttccgccattttggtagcttccagaaaggccaggcggaagccaaggtcaagagggccatccctaagcctccgcgccaggccctgaatcggaaaaagggcagccctggccttgcctctggctctgtcggccagagccccaactcagccccaaaagctgggcttcctggggccacagggcctatggcagtcagaccagaggaagcggtccgggggctgggggctggcaccgagagttcaaggagagcccaggagccagtctctggctgtggctccccagaacaggatccccagaagcaggctgaagaggaaaggcaggaggaacctgagtatgagaatgttgtacccatctccaggccaccagaaccctgatgaccttgaatttggggagtggggagagtggatggactagactgtgctgtgtgctggaaaatgatcccggggccaggacagacaaaccagagcctctgcgcctccacagggaaaaggcaaggcttccaggccagttggcccaggcccctggcagtgctcccggaggggcccaggaaggcctgggcagagaccctgtaggatggggtcaggaagggttgcctgcagggacttttgctctgctgtcctggaccctgtgtgcctcataagggctattctttctttcacgtgcaaaacatttttctgaaatagcaaacaacctacatgtttgctgataaaagattggctaaacaaatttttttttttttttt

SEQ ID NO: 27258 - DNA, 3278 bp, Homo sapiens
  source 1..3278: mol_type = unassigned DNA
ggcgcccctcctgccgccccccgcccggcctcgcactccgcttccggccgctctcgctgcggccgcacccgcgcccgtgcccgccccgcgcctgccccgcgcctcatggagggcgcagggccccggggggccgggccggcgcggcgccggggagccggggggccgccgtcaccgctgctgccgtcgctgctgctgctgctgctgctctggatgctgccggacaccgtggcgcctcaggaactgaaccctcgcggccgcaacgtgtgccgtgctcccggctcccaggtgcccacgtgctgcgctggctggaggcagcaaggggacgagtgtgggattgcggtgtgcgaaggcaactccacgtgctcagagaacgaggtgtgcgtgaggcctggcgagtgccgctgccgccacggctacttcggtgccaactgcgacaccaagtgcccgcgccagttctggggccccgactgcaaggagctgtgtagctgccacccacacgggcagtgcgaggacgtgacaggccagtgtacttgtcacgcgcggcgctggggcgcgcgctgcgagcatgcgtgccagtgccagcacggcacgtgccacccgcggagcggcgcgtgccgctgtgagcccggctggtggggcgcgcagtgcgccagcgcgtgctactgcagcgccacgtcgcgctgcgacccacagaccggcgcctgcctgtgccacgcaggctggtggggccgcagctgcaacaaccagtgcgcctgcaactcgtctccctgcgagcagcagagcggccgctgtcagtgccgcgagcgtacgttcggcgcgcgctgcgatcgctactgccagtgcttccgcggccgctgccaccctgtggacggcacgtgtgcctgcgagccgggctaccgcggcaagtactgtcgcgagccgtgccccgccggcttctacggcttgggctgtcgccgccggtgtggccagtgcaagggccagcagccgtgcacggtggccgagggccgctgcttgacgtgcgagcccggctggaacggaaccaagtgcgaccagccttgcgccaccggtttctatggcgagggctgcagccaccgctgtccgccatgccgcgacgggcatgcctgtaaccatgtcaccggcaagtgtacgcgctgcaacgcgggctggatcggcgaccggtgcgagaccaagtgtagcaatggcacttacggcgaggactgcgccttcgtgtgcgccgactgcggcagcggacactgcgacttccagtcggggcgctgcctgtgcagccctggcgtccacgggccccactgtaacgtgacgtgcccgcccggactccacggcgcggactgtgctcaggcctgcagctgccacgaggacacgtgcgacccggtcactggtgcctgccacctagaaaccaaccagcgcaagggcgtgatgggcgcgggcgcgctgctcgtcctgctcgtctgcctgctgctctcgctgctcggctgctgctgcgcttgccgcggcaaggaccctacgcgccgaccccgcccccgcagggagctttcgcttgggaggaagaaggcgccgcaccgactatgcgggcgcttcagtcgcatcagcatgaagctgccccggatcccgctccggaggcagaaactacccaaagtcgtagtggcccaccacgacctggataacacactcaactgcagcttcctggagccaccctcagggctggagcagccctcaccatcctggtcctctcgggcctccttctcctcgtttgacaccactgatgaaggccctgtgtactgtgtaccccatgaggaggcaccagcggagagccgggaccccgaagtccccactgtccctgccgaggcgccggcgccgtcccctgtgcccttgaccacgccagcctccgccgaggaggcgatacccctccccgcgtcctccgacagcgagcggtcggcgtccagcgtggaggggcccggaggggctctgtacgcgcgcgtggcccgacgcgaggcccggccggcccgggcccggggcgagattgggggcctgtcgctgtcgccatcgcccgagcgcaggaaaccgccgccacctgaccccgccaccaagcctaaggtgtcctggatccacggcaagcacagcgccgctgcagctggccgtgcgccctcaccaccgccgccaggctccgaggccgcgcccagccccagcaagaggaaacggacgcccagcgacaaatcggcgcatacggtcgaacacggcagcccccggacccgcgacccaacgccgcgccccccggggctgcccgaggaggcgacagccctcgctgcgccctcgccgcccagggcccgagcgcgcgccgcgccccggcctcttggagcccacggacgccggcggtcccccgcgaagcgcgccgaggctgcctccatgttggccgctgacgtgcgcggcaagactcgcagcctgggccgcgccgaggtggccctgggcgcgcagggccccagggaaaagccggcgcccccacagaaagccaagcgctccgtgccgccagcctcgcccgcccgcgcgcccccagcgaccgaaaccccggggcctgagaaggcggcgaccgacttgcccgcgcctgagaccccccggaagaagacccccatccagaagccgccgcgcaagaagagccgggaggcggcgggcgagctgggcagggcgggcgcacccaccctgtagcaggctgtggctcgtccgcgcgcagctccctcagcttcgcagcgccgcccgccaccccacacctcccacgctaccgggcacgggcggcctcctattggccgggcaccgcgcggctagcggaggttgcgtctcattggctcaggtcctgcagccgctcctggattggagcagtgtgctctggcgggaagggcccatcccgttggtcgaggcctgacaggcgcttagcgggcgactccctccccattggccgagttatggagcgctccgaccagacagcgtctcattggccaaagatgggagggttccgcttaaagaccgcctcttactggccaggagtggacttggttagggctaccttctcattggttgcagccagaggcacttctgcccgggctgcctctcccccgctagggcctggtgcctctggctggaggctccctcccttggccgtcccaatagagcccggggctacttccactggccaggctcccgggcatctggttgaccccagcctggggaggagggctggtctccgctcctcaggggcttagtccgtccca

SEQ ID NO: 27259 - DNA, 3444 bp, Homo sapiens
  source 1..3444: mol_type = unassigned DNA
gggagctgtgggggccagacgaacccgagcgctcccaccgagctgcctgccatggggctggggctgctgctcccgctgctgctgctctggactcgggggactcaggggtccgagctggaccccaaagggcagcacgtctgtgtggccagcagcccctctgctgagctgcagtgctgcgcaggctggaggcagaaggatcaagaatgcaccatccccatctgtgaggggccggacgcctgccagaaagacgaggtgtgtgtgaagccgggcctctgtcgatgcaagcctggattctttggggcccactgcagctcccgctgcccgggccagtactggggccccgactgccgtgagagctgcccctgccacccgcacggccagtgcgagccagccacgggcgcgtgccagtgccaggccgaccgctggggagcccgctgcgagttcccgtgcgcctgcggcccccacgggcgctgcgaccccgcgaccggcgtgtgccactgcgaacccggctggtggtcgtccacgtgccgccgcccgtgccagtgcaacaccgcggcggcgcgctgcgagcaggccacgggcgcctgcgtgtgcaagccgggctggtgggggcgccgctgcagcttccgctgcaactgccacggctccccgtgcgagcaggactccggccgctgcgcctgccggccgggctggtggggtcccgaatgccagcagcagtgcgagtgtgtgcggggccgctgcagcgccgcctccggcgagtgcacctgcccgcccggcttccgcggagcgcgctgcgagctgccctgcccggcaggcagccacggggtgcagtgcgcacacagctgtggccgctgcaaacacaatgagccgtgctctccagacacaggcagctgtgagtcctgcgagccgggctggaacgggacccagtgccagcagccctgcctgcctggcacctttggcgagagctgcgaacagcagtgccctcactgccgacatggggaggcctgtgagccagatactggccactgtcagcgctgtgaccctggctggctggggcccaggtgtgaagacccctgccccactggtacctttggggaagactgtggctctacctgccccacctgtgttcaggggtcctgtgatactgtgacaggggactgtgtctgcagtgccggctactgggggcccagctgcaacgcctcctgcccagccggtttccatggaaacaactgctcagttccttgtgaatgcccagagggactctgccaccctgtctctgggtcctgccagccaggctctggcagtcgggacactgccctcatcgcgggcagccttgtgcctctgctgctgctcttcctgggccttgcctgctgtgcctgctgctgctgggccccccgatcagacctcaaggacaggccagcgagagatggagctaccgtgtccaggatgaagctgcaggtctgggggacactgaccagcttgggctccacgctgccctgccgttccctcagctcccacaagctaccctgggtgacagtctcacatcacgacccggaggtccccttcaaccacagcttcatcgagccgccctctgccggctgggccactgatgactccttctcatccgatcctgagtctggagaggcagatgaggttcctgcctactgtgtgccaccccaagaagggatggtccctgtggcccaggcagggtcgtcagaggccagcctggctgcaggtgctttcccgccccctgaggacgcctccacgccattcgccatcccgcgcacctccagcctagctcgggccaagcggccatcggtctccttcgcggaaggtaccaagtttgcaccacagagtcgccgaagctcaggggagctctccagcccgctccgaaagcccaagaggctctcccggggggcgcagtcgggtcctgagggccgggaagccgaagagtccacaggcccagaggaagcagaagcccccgagtcctttccggcggctgccagtcccggggattcagccactggccaccggcggcccccacttggtggccggacagtggctgagcacgtggaagccattgagggcagcgtccaggagagctcgggccctgtgaccacgatctacatgctggcagggaagccccgcggatccgaaggccctgtccgctctgtcttccgccattttggtagcttccagaaaggccaggcggaagccaaggtcaagagggccatccctaagcctccgcgccaggccctgaatcggaaaaagggcagccctggccttgcctctggctctgtcggccagagccccaactcagccccaaaagctgggcttcctggggccacagggcctatggcagtcagaccagaggaagcggtccgggggctgggggctggcaccgagagttcaaggagagcccaggagccagtctctggctgtggctccccagaacaggatccccagaagcaggctgaagaggaaaggcaggaggaacctgagtatgagaatgttgtacccatctccaggccaccagaaccctgatgaccttgaatttggggagtggggagagtggatggactagactgtgctgtgtgctggaaaatgatcccggggccaggacagacaaaccagagcctctgcgcctccacagggaaaaggcaaggcttccaggccagttggcccaggcccctggcagtgctcccggaggggcccaggaaggcctgggcagagaccctgtaggatggggtcaggaagggttgcctgcagggacttttgctctgctgtcctggaccctgtgtgcctcataagggctattctttctttcacgtgcaaaacatttttctgaaatagcaaacaacctacatgtttgctgataaaagattggctaaacaaatttttttttttttttttgagacagaatctccctctgtcccccaggctggagtgcagtggtgcgatctcggctcactgcaagctctgcctcccgggttcacgcccttctcctgcctcagcctcccgagtagctgggactacaggtgccctccaccacgcttggctaatttttttgtatatttaatagagacagggtttcaccatgttagccaggatggtctcgatctcctgacctcgtgatccacctgcctcggcctcccaaagtgctgggatgacaggcatgagccaccacgcctggtctatgaactttttaaaaaggatgtatgtgtataaaaacagattcaagggaaaggcactaaatggttttttcctctggaagatgagattgtaggtgatatttattttcttctgaaacttttgtatagtttgcaaattttctacagtgaacattcttttttacttttgttactagattgaatttgataaagtataataaaaagcaatgatctttgttaaaaaaataaaaagtactaacattacagacatgta

SEQ ID NO: 27260 - DNA, 3185 bp, Homo sapiens
  source 1..3185: mol_type = unassigned DNA
ggagctgtgggggccagacgaacccgagcgctcccaccgagctgcctgccatggggctggggctgctgctcccgctgctgctgctctggactcgggggactcaggggtccgagctggaccccaaagggcagcacgtctgtgtggccagcagcccctctgctgagctgcagtgctgcgcaggctggaggcagaaggatcaagaatgcaccatccccatctgtgaggggccggacgcctgccagaaagacgaggtgtgtgtgaagccgggcctctgtcgatgcaagcctggattctttggggcccactgcagctcccgctgcccgggccagtactggggccccgactgccgtgagagctgcccctgccacccgcacggccagtgcgagccagccacgggcgcgtgccagtgccaggccgaccgctggggagcccgctgcgagttcccgtgcgcctgcggcccccacgggcgctgcgaccccgcgaccggcgtgtgccactgcgaacccggctggtggtcgtccacgtgccgccgcccgtgccagtgcaacaccgcggcggcgcgctgcgagcaggccacgggcgcctgcgtgtgcaagccgggctggtgggggcgccgctgcagcttccgctgcaactgccacggctccccgtgcgagcaggactccggccgctgcgcctgccggccgggctggtggggtcccgaatgccagcagcagtgcgagtgtgtgcggggccgctgcagcgccgcctccggcgagtgcacctgcccgcccggcttccgcggagcgcgctgcgagctgccctgcccggcaggcagccacggggtgcagtgcgcacacagctgtggccgctgcaaacacaatgagccgtgctctccagacacaggcagctgtgagtcctgcgagccgggctggaacgggacccagtgccagcagccctgcctgcctggcacctttggcgagagctgcgaacagcagtgccctcactgccgacatggggaggcctgtgagccagatactggccactgtcagcgctgctctggcagtcgggacactgccctcatcgcgggcagccttgtgcctctgctgctgctcttcctgggccttgcctgctgtgcctgctgctgctgggccccccgatcagacctcaaggacaggccagcgagagatggagctaccgtgtccaggatgaagctgcaggtctgggggacactgaccagcttgggctccacgctgccctgccgttccctcagctcccacaagctaccctgggtgacagtctcacatcacgacccggaggtccccttcaaccacagcttcatcgagccgccctctgccggctgggccactgatgactccttctcatccgatcctgagtctggagaggcagatgaggttcctgcctactgtgtgccaccccaagaagggatggtccctgtggcccaggcagggtcgtcagaggccagcctggctgcaggtgctttcccgccccctgaggacgcctccacgccattcgccatcccgcgcacctccagcctagctcgggccaagcggccatcggtctccttcgcggaaggtaccaagtttgcaccacagagtcgccgaagctcaggggagctctccagcccgctccgaaagcccaagaggctctcccggggggcgcagtcgggtcctgagggccgggaagccgaagagtccacaggcccagaggaagcagaagcccccgagtcctttccggcggctgccagtcccggggattcagccactggccaccggcggcccccacttggtggccggacagtggctgagcacgtggaagccattgagggcagcgtccaggagagctcgggccctgtgaccacgatctacatgctggcagggaagccccgcggatccgaaggccctgtccgctctgtcttccgccattttggtagcttccagaaaggccaggcggaagccaaggtcaagagggccatccctaagcctccgcgccaggccctgaatcggaaaaagggcagccctggccttgcctctggctctgtcggccagagccccaactcagccccaaaagctgggcttcctggggccacagggcctatggcagtcagaccagaggaagcggtccgggggctgggggctggcaccgagagttcaaggagagcccaggagccagtctctggctgtggctccccagaacaggatccccagaagcaggctgaagaggaaaggcaggaggaacctgagtatgagaatgttgtacccatctccaggccaccagaaccctgatgaccttgaatttggggagtggggagagtggatggactagactgtgctgtgtgctggaaaatgatcccggggccaggacagacaaaccagagcctctgcgcctccacagggaaaaggcaaggcttccaggccagttggcccaggcccctggcagtgctcccggaggggcccaggaaggcctgggcagagaccctgtaggatggggtcaggaagggttgcctgcagggacttttgctctgctgtcctggaccctgtgtgcctcataagggctattctttctttcacgtgcaaaacatttttctgaaatagcaaacaacctacatgtttgctgataaaagattggctaaacaaatttttttttttttttttgagacagaatctccctctgtcccccaggctggagtgcagtggtgcgatctcggctcactgcaagctctgcctcccgggttcacgcccttctcctgcctcagcctcccgagtagctgggactacaggtgccctccaccacgcttggctaatttttttgtatatttaatagagacagggtttcaccatgttagccaggatggtctcgatctcctgacctcgtgatccacctgcctcggcctcccaaagtgctgggatgacaggcatgagccaccacgcctggtctatgaactttttaaaaaggatgtatgtgtataaaaacagattcaagggaaaggcactaaatggttttttcctctggaagatgagattgtaggtgatatttattttcttctgaaacttttgtatagtttgcaaattttctacagtgaacattcttttttacttttgttactagattgaatttgataaagtataataaaaagcaatgatctttgttaaaaaaataaaaagtactaacattacagacatgta

SEQ ID NO: 27261 - DNA, 3405 bp, Homo sapiens
  source 1..3405: mol_type = unassigned DNA
ggagctgtgggggccagacgaacccgagcgctcccaccgagctgcctgccatggggctggggctgctgctcccgctgctgctgctctggactcgggggactcaggggtccgagctggaccccaaagggcagcacgtctgtgtggccagcagcccctctgctgagctgcagtgctgcgcaggctggaggcagaaggatcaagaatgcaccatccccatctgtgaggggccggacgcctgccagaaagacgaggtgtgtgtgaagccgggcctctgtcgatgcaagcctggattctttggggcccactgcagctcccgctgcccgggccagtactggggccccgactgccgtgagagctgcccctgccacccgcacggccagtgcgagccagccacgggcgcgtgccagtgccaggccgaccgctggggagcccgctgcgagttcccgtgcgcctgcggcccccacgggcgctgcgaccccgcgaccggcgtgtgccactgcgaacccggctggtggtcgtccacgtgccgccgcccgtgccagtgcaacaccgcggcggcgcgctgcgagcaggccacgggcgcctgcgtgtgcaagccgggctggtgggggcgccgctgcagcttccgctgcaactgccacggctccccgtgcgagcaggactccggccgctgcgcctgccggccgggctggtggggtcccgaatgccagcagcagtgcgagtgtgtgcggggccgctgcagcgccgcctccggcgagtgcacctgcccgcccggcttccgcggagcgcgctgcgagctgccctgcccggcaggcagccacggggtgcagtgcgcacacagctgtggccgctgcaaacacaatgagccgtgctctccagacacaggcagctgtgagtcctgcgagccgggctggaacgggacccagtgccagcagccctgcctgcctggcacctttggcgagagctgcgaacagcagtgccctcactgccgacatggggaggcctgtgagccagatactggccactgtcagcgctgtgaccctggctggctggggcccaggtgtgaagacccctgccccactggtacctttggggaagactgtggctctacctgccccacctgtgttcaggggtcctgtgatactgtgacaggggactgtgtctgcagtgccggctactgggggcccagctgcaacgcctcctgcccagccggtttccatggaaacaactgctcagttccttgtgaatgcccagagggactctgccaccctgtctctgggtcctgccagccaggctctggcagtcgggacactgccctcatcgcgggcagccttgtgcctctgctgctgctcttcctgggccttgcctgctgtgcctgctgctgctgggccccccgatcagacctcaaggacaggccagcgagagatggagctaccgtgtccaggatgaagctgcaggtctgggggacactgaccagcttgggctccacgctgccctgccgttccctcagctcccacaagctaccctgggtgacagcttcatcgagccgccctctgccggctgggccactgatgactccttctcatccgatcctgagtctggagaggcagatgaggttcctgcctactgtgtgccaccccaagaagggatggtccctgtggcccaggcagggtcgtcagaggccagcctggctgcaggtgctttcccgccccctgaggacgcctccacgccattcgccatcccgcgcacctccagcctagctcgggccaagcggccatcggtctccttcgcggaaggtaccaagtttgcaccacagagtcgccgaagctcaggggagctctccagcccgctccgaaagcccaagaggctctcccggggggcgcagtcgggtcctgagggccgggaagccgaagagtccacaggcccagaggaagcagaagcccccgagtcctttccggcggctgccagtcccggggattcagccactggccaccggcggcccccacttggtggccggacagtggctgagcacgtggaagccattgagggcagcgtccaggagagctcgggccctgtgaccacgatctacatgctggcagggaagccccgcggatccgaaggccctgtccgctctgtcttccgccattttggtagcttccagaaaggccaggcggaagccaaggtcaagagggccatccctaagcctccgcgccaggccctgaatcggaaaaagggcagccctggccttgcctctggctctgtcggccagagccccaactcagccccaaaagctgggcttcctggggccacagggcctatggcagtcagaccagaggaagcggtccgggggctgggggctggcaccgagagttcaaggagagcccaggagccagtctctggctgtggctccccagaacaggatccccagaagcaggctgaagaggaaaggcaggaggaacctgagtatgagaatgttgtacccatctccaggccaccagaaccctgatgaccttgaatttggggagtggggagagtggatggactagactgtgctgtgtgctggaaaatgatcccggggccaggacagacaaaccagagcctctgcgcctccacagggaaaaggcaaggcttccaggccagttggcccaggcccctggcagtgctcccggaggggcccaggaaggcctgggcagagaccctgtaggatggggtcaggaagggttgcctgcagggacttttgctctgctgtcctggaccctgtgtgcctcataagggctattctttctttcacgtgcaaaacatttttctgaaatagcaaacaacctacatgtttgctgataaaagattggctaaacaaatttttttttttttttttgagacagaatctccctctgtcccccaggctggagtgcagtggtgcgatctcggctcactgcaagctctgcctcccgggttcacgcccttctcctgcctcagcctcccgagtagctgggactacaggtgccctccaccacgcttggctaatttttttgtatatttaatagagacagggtttcaccatgttagccaggatggtctcgatctcctgacctcgtgatccacctgcctcggcctcccaaagtgctgggatgacaggcatgagccaccacgcctggtctatgaactttttaaaaaggatgtatgtgtataaaaacagattcaagggaaaggcactaaatggttttttcctctggaagatgagattgtaggtgatatttattttcttctgaaacttttgtatagtttgcaaattttctacagtgaacattcttttttacttttgttactagattgaatttgataaagtataataaaaagcaatgatctttgttaaaaaaataaaaagtactaacattacagacatgt

SEQ ID NO: 27262 - DNA, 3456 bp, Homo sapiens
  source 1..3456: mol_type = unassigned DNA
actccgcttccggccgctctcgctgcggccgcacccgcgcccgtgcccgccccgcgcctgccccgcgcctcatggagggcgcagggccccggggggccgggccggcgcggcgccggggagccggggggccgccgtcaccgctgctgccgtcgctgctgctgctgctgctgctctggatgctgccggacaccgtggcgcctcaggaactgaaccctcgcggccgcaacgtgtgccgtgctcccggctcccaggtgcccacgtgctgcgctggctggaggcagcaaggggacgagtgtgggattgcggtgtgcgaaggcaactccacgtgctcagagaacgaggtgtgcgtgaggcctggcgagtgccgctgccgccacggctacttcggtgccaactgcgacaccaagtgcccgcgccagttctggggccccgactgcaaggagctgtgtagctgccacccacacgggcagtgcgaggacgtgacaggccagtgtacttgtcacgcgcggcgctggggcgcgcgctgcgagcatgcgtgccagtgccagcacggcacgtgccacccgcggagcggcgcgtgccgctgtgagcccggctggtggggcgcgcagtgcgccagcgcgtgctactgcagcgccacgtcgcgctgcgacccacagaccggcgcctgcctgtgccacgcaggctggtggggccgcagctgcaacaaccagtgcgcctgcaactcgtctccctgcgagcagcagagcggccgctgtcagtgccgcgagcgtacgttcggcgcgcgctgcgatcgctactgccagtgcttccgcggccgctgccaccctgtggacggcacgtgtgcctgcgagccgggctaccgcggcaagtactgtcgcgagccgtgccccgccggcttctacggcttgggctgtcgccgccggtgtggccagtgcaagggccagcagccgtgcacggtggccgagggccgctgcttgacgtgcgagcccggctggaacggaaccaagtgcgaccagccttgcgccaccggtttctatggcgagggctgcagccaccgctgtccgccatgccgcgacgggcatgcctgtaaccatgtcaccggcaagtgtacgcgctgcaacgcgggctggatcggcgaccggtgcgagaccaagtgtagcaatggcacttacggcgaggactgcgccttcgtgtgcgccgactgcggcagcggacactgcgacttccagtcggggcgctgcctgtgcagccctggcgtccacgggccccactgtaacgtgacgtgcccgcccggactccacggcgcggactgtgctcaggcctgcagctgccacgaggacacgtgcgacccggtcactggtgcctgccacctagaaaccaaccagcgcaagggcgtgatgggcgcgggcgcgctgctcgtcctgctcgtctgcctgctgctctcgctgctcggctgctgctgcgcttgccgcggcaaggaccctacgcgccgggagctttcgcttgggaggaagaaggcgccgcaccgactatgcgggcgcttcagtcgcatcagcatgaagctgccccggatcccgctccggaggcagaaactacccaaagtcgtagtggcccaccacgacctggataacacactcaactgcagcttcctggagccaccctcagggctggagcagccctcaccatcctggtcctctcgggcctccttctcctcgtttgacaccactgatgaaggccctgtgtactgtgtaccccatgaggaggcaccagcggagagccgggaccccgaagtccccactgtccctgccgaggcgccggcgccgtcccctgtgcccttgaccacgccagcctccgccgaggaggcgatacccctccccgcgtcctccgacagcgagcggtcggcgtccagcgtggaggggcccggaggggctctgtacgcgcgcgtggcccgacgcgaggcccggccggcccgggcccggggcgagattgggggcctgtcgctgtcgccatcgcccgagcgcaggaaaccgccgccacctgaccccgccaccaagcctaaggtgtcctggatccacggcaagcacagcgccgctgcagctggccgtgcgccctcaccaccgccgccaggctccgaggccgcgcccagccccagcaagaggaaacggacgcccagcgacaaatcggcgcatacggtcgaacacggcagcccccggacccgcgacccaacgccgcgccccccggggctgcccgaggaggcgacagccctcgctgcgccctcgccgcccagggcccgagcgcgcgcccgccccggcctcttggagcccacggacgccggcggtcccccgcgaagcgcgccggctgcctccatgttggccgctgacgtgcgcggcaagactcgcagcctgggccgcgccgaggtggccctgggcgcgcagggccccagggaaaagccggcgcccccacagaaagccaagcgctccgtgccgccagcctcgcccgcccgcgcgcccccagcgaccgaaaccccggggcctgagaaggcggcgaccgacttgcccgcgcctgagaccccccggaagaagacccccatccagaagccgccgcgcaagaagagccgggaggcggcgggcgagctgggcagggcgggcgcacccaccctgtagcaggctgtggctcgtccgcgcgcagctccctcagcttcgcagcgccgcccgccaccccacacctcccacgctaccgggcacgggcggcctcctattggccgggcaccgcgcggctagcggaggttgcgtctcattggctcaggtcctgcagccgctcctggattggagcagtgtgctctggcgggaagggcccatcccgttggtcgaggcctgacaggcgcttagcgggcgactccctccccattggccgagttatggagcgctccgaccagacagcgtctcattggccaaagatgggagggttccgcttaaagaccgcctcttactggccaggagtggacttggttagggctaccttctcattggttgcagccagaggcacttctgcccgggctgcctctcccccgctagggcctggtgcctctggctggaggctccctcccttggccgtcccaatagagcccggggctacttccactggccaggctcccgggcatctggttgaccccagcctggggaggagggctggtctccgctcctcaggggcttagtccgtcccaccccttcccttccctggcgccccgggcccaggcccctcagctgtcagctggttttgatggcctcccactgccccacacgccgcgggacctccaggggcgactctagtggcctgaggagatgtatttataggcccccagcagggctgctcccccctcggccggtgccccaggatgggctcctcccggcgggggcttggccaaagctttcttaataaaatgcctttcccctc

SEQ ID NO: 27263 - DNA, 3460 bp, Homo sapiens
  source 1..3460: mol_type = unassigned DNA
actccgcttccggccgctctcgctgcggccgcacccgcgcccgtgcccgccccgcgcctgccccgcgcctcatggagggcgcagggccccggggggccgggccggcgcggcgccggggagccggggggccgccgtcaccgctgctgccgtcgctgctgctgctgctgctgctctggatgctgccggacaccgtggcgcctcaggaactgaaccctcgcggccgcaacgtgtgccgtgctcccggctcccaggtgcccacgtgctgcgctggctggaggcagcaaggggacgagtgtgggattgcggtgtgcgaaggcaactccacgtgctcagagaacgaggtgtgcgtgaggcctggcgagtgccgctgccgccacggctacttcggtgccaactgcgacaccaagtgcccgcgccagttctggggccccgactgcaaggagctgtgtagctgccacccacacgggcagtgcgaggacgtgacaggccagtgtacttgtcacgcgcggcgctggggcgcgcgctgcgagcatgcgtgccagtgccagcacggcacgtgccacccgcggagcggcgcgtgccgctgtgagcccggctggtggggcgcgcagtgcgccagcgcgtgctactgcagcgccacgtcgcgctgcgacccacagaccggcgcctgcctgtgccacgcaggctggtggggccgcagctgcaacaaccagtgcgcctgcaactcgtctccctgcgagcagcagagcggccgctgtcagtgccgcgagcgtacgttcggcgcgcgctgcgatcgctactgccagtgcttccgcggccgctgccaccctgtggacggcacgtgtgcctgcgagccgggctaccgcggcaagtactgtcgcgagccgtgccccgccggcttctacggcttgggctgtcgccgccggtgtggccagtgcaagggccagcagccgtgcacggtggccgagggccgctgcttgacgtgcgagcccggctggaacggaaccaagtgcgaccagccttgcgccaccggtttctatggcgagggctgcagccaccgctgtccgccatgccgcgacgggcatgcctgtaaccatgtcaccggcaagtgtacgcgctgcaacgcgggctggatcggcgaccggtgcgagaccaagtgtagcaatggcacttacggcgaggactgcgccttcgtgtgcgccgactgcggcagcggacactgcgacttccagtcggggcgctgcctgtgcagccctggcgtccacgggccccactgtaacgtgacgtgcccgcccggactccacggcgcggactgtgctcaggcctgcagctgccacgaggacacgtgcgacccggtcactggtgcctgccacctagaaaccaaccagcgcaagggcgtgatgggcgcgggcgcgctgctcgtcctgctcgtctgcctgctgctctcgctgctcggctgctgctgcgcttgccgcggcaaggaccctacgcgccgggagctttcgcttgggaggaagaaggcgccgcaccgactatgcgggcgcttcagtcgcatcagcatgaagctgccccggatcccgctccggaggcagaaactacccaaagtcgtagtggcccaccacgacctggataacacactcaactgcagcttcctggagccaccctcagggctggagcagccctcaccatcctggtcctctcgggcctccttctcctcgtttgacaccactgatgaaggccctgtgtactgtgtaccccatgaggaggcaccagcggagagccgggaccccgaagtccccactgtccctgccgaggcgccggcgccgtcccctgtgcccttgaccacgccagcctccgccgaggaggcgatacccctccccgcgtcctccgacagcgagcggtcggcgtccagcgtggaggggcccggaggggctctgtacgcgcgcgtggcccgacgcgaggcccggccggcccgggcccggggcgagattgggggcctgtcgctgtcgccatcgcccgagcgcaggaaaccgccgccacctgaccccgccaccaagcctaaggtgtcctggatccacggcaagcacagcgccgctgcagctggccgtgcgccctcaccaccgccgccaggctccgaggccgcgcccagccccagcaagaggaaacggacgcccagcgacaaatcggcgcatacggtcgaacacggcagcccccggacccgcgacccaacgccgcgccccccggggctgcccgaggaggcgacagccctcgctgcgccctcgccgcccagggcccgagcgcgcgccgcgccccggcctcttggagcccacggacgccggcggtcccccgcgaagcgcgccgaggctgcctccatgttggccgctgacgtgcgcggcaagactcgcagcctgggccgcgccgaggtggccctgggcgcgcagggccccagggaaaagccggcgcccccacagaaagccaagcgctccgtgccgccagcctcgcccgcccgcgcgcccccagcgaccgaaaccccggggcctgagaaggcggcgaccgacttgcccgcgcctgagaccccccggaagaagacccccatccagaagccgccgcgcaagaagagccgggaggcggcgggcgagctgggcagggcgggcgcacccaccctgtagcaggctgtggctcgtccgcgcgcagctccctcagcttcgcagcgccgcccgccaccccacacctcccacgctaccgggcacgggcggcctcctattggccgggcaccgcgcggctagcggaggttgcgtctcattggctcaggtcctgcagccgctcctggattggagcagtgtgctctggcgggaagggcccatcccgttggtcgaggcctgacaggcgcttagcgggcgactccctccccattggccgagttatggagcgctccgaccagacagcgtctcattggccaaagatgggagggttccgcttaaagaccgcctcttactggccaggagtggacttggttagggctaccttctcattggttgcagccagaggcacttctgcccgggctgcctctcccccgctagggcctggtgcctctggctggaggctccctcccttggccgtcccaatagagcccggggctacttccactggccaggctcccgggcatctggttgaccccagcctggggaggagggctggtctccgctcctcaggggcttagtccgtcccaccccttcccttccctggcgccccgggcccaggcccctcagctgtcagctggttttgatggcctcccactgccccacacgccgcgggacctccaggggcgactctagtggcctgaggagatgtatttataggcccccagcagggctgctcccccctcggccggtgccccaggatgggctcctcccggcgggggcttggccaaagctttcttaataaaatgcctttcccctca

SEQ ID NO: 27264 - DNA, 2801 bp, Homo sapiens
  source 1..2801: mol_type = unassigned DNA
ttttctggggccgctccagctggtgccggccacctccactcccctttgcttcttgctgtccctaaggtcggatggggacaggctggggccaccagccagctccatggacagggactttgcctctgctcaccttccagctgtggaaagaaaagaagaaacgcctgtgttgatttccatttggaagatccttcctcctcctaaacttccaggggcagacaaagtgattcgatcttggattgactgtagaagaagggacagaaagagcccagaacattcccccagatgttccaactgtgacttctccctggcgccttgatgggagcatctgaaacacccttcaccatctagatgcacaaggaagcagagatgctaattggtccccagctggatgagaagcgctgggggtggaggttgggagatgggagtgctgcccctcccttcctcccccaagccctgtctttccttctcctcctgccactggccagcgccctacagcccactccactgccctttcaagagctgaggctggtggggggccccagccgctgccggggccgcctggaagtcatgcacggtggctcctggggcagcgtctgtgatgacgactgggacgtggtggacgccaacgtagtgtgtcgccagctgggctgtggcctggcactgcccgtgccacggccccttgcctttggccaaggccgaggccccatcctgctggacaacgtggagtgccgcgggcaggaagctgcgctgagcgagtgcggcagccgcggctggggcgtccacaattgctttcactacgaggatgtggctgtcctgtgtgatgaattcttgccaacgcagcccccaacaaggaagatgttaaccagtagagcacctcctacgacactgccgaatggaaaaagtgagggcagcgtacgcctggtagggggcgcgaacctgtgtcagggccgagtggagatcctgcacagtggcctgtggggcaccgtgtgtgacgacgactgggggctgccggatgccgctgtggtctgtcgtcagctgggctgcggggcggccatggccgccaccaccaacgccttcttcggctatggcaccggacacatcctgctggacaacgtgcactgcgaaggcggcgagccccgcctggcagcctgccagagcctgggctggggtgtgcacaactgcggccaccacgaggacgcgggcgcgctctgcgcaggcctgggtcccccaacgctcacagcactgccatcctcagccacaagagaggactgggcttggcagacagatccgtccgctacaggagttggcccccagccttcccgggagacagcactgctcaccaccgccgcctgggccgcggggaagaaaagtggacggctgcgactggtgggcggcccgggtccgtgccgcggccgcgtggaggtgttgcacgccgggggctggggcaccgtgtgcgacgatgactgggactttgcggacgcgcgcgtggcctgccgcgaagcgggctgcgggcctgcgctgggcgctacgggactgggccacttcggctacggccgcggccccgtgctgctggacaacgtgggctgcgccggcaccgaggctcgcctgagcgactgcttccacctgggctggggccagcacaactgcggccaccacgaggacgcgggagcgctctgcgcaggcccagaggagctgggactgcaagtccagcaggatggttctgagaccacgcgggtgcccactcctcggcccagggacgggcatctacgtctggtcaatggagcccaccgatgcgagggacgtgtagagctctacctagggcaacggtggggcactgtctgtgatgatgcttgggacctgcgggcagccggtgtcctgtgccgccagctgggctgtggccaggccctcgcagcccctggcgaggctcactttggcccaggccgaggccccattctcctggacaatgtcaagtgccgtggggaagaaagtgctctgctgctctgctctcatatccgctgggatgcccacaactgtgaccacagcgaggatgccagtgtcctgtgccagccttcatgacccagcccgctctgcagaccacctcttcttctgggagctgtgacctcccttcctcctccaggaagccctcctcttgtgatgactacagttcactttgcccctccttcccttgcctgggagagagcctacctagacagtgcagtcctgcttgggggagcctggctgtacccccgtccacttactgcgtgacctcagcctgtcatcgactgttgtgagcccaattcagtgaaagctcctgtggttttgctcagccaaaaccaaaacgaggggaagaggatgattcctaactcttctgtttggtggggctctttttatagcaccagactctgccttccttgacctagatccaggaggctcaggggctctttaaatggggtatctcctcttcccccaacccatcttgggatccccaagaagagggaaggcaggaggggcctacagctcctaccttgggccctcaggggctgcagaggaacctgggtccctgtcctgccctgctccgcgagggcctggactaactcagatggtgctcggctggacaaggggactgggggaggggccaaagcagggacagtggcccctccctgcagctggaaccagcatctctgatttatgccgtctccaccacagagcctccactttgcaggagtgaagaaccctgggggcctgtagccaccagttcataggtgccaagtcaataaagcattgtcccccgtctcttataa

SEQ ID NO: 27265 - DNA, 3093 bp, Homo sapiens
  source 1..3093: mol_type = unassigned DNA
aagaaacctctgaactgttcactaatacagtcaggtagaggttgagactccactgaataaactctaggttcccatttctttcagccagatcctcccagggaatcactacaggctggttagccaaaaagtcctgattttctgctcaatagaggtccttactggaaggcagcatgtccaatgttaccttgagaaaaatgtctcccacaggaaatgagatgaagagcaccactcagggaaccacacggaagcagcaggattttcacgaggtgaacaaaagaagaactttcttacaggataacagttggataaagaaacgccctgaagaagaaaaagatgaaaattacggtagggtggtgctcaaccgacataattcccatgatgcattggacaggaaagtaaatgagagagatgtgccaaaagctacaattagtcggtacagttctgatgacactttggacaggagcatgtccatgtttagatcactggaagtaacaaagttgcaacctggcggttcattgaatgccaacacctccaacaccatagcatccacttctgctactactcctgtaaagaagaagaggcagtcctggtttccaccgccccctccaggttacaatgcctcctcgagcacaggaaccaggagacgggaaccaggtgttcaccctccaatacctccaaagcccagttctcctgtttcttctcctaaccagctgagacaggataataggcagatacatccacctaaaccaggtgtatatacagaaaccaacagatctgctgaaagaaatataagtgaagaattggataatctcatcaaaatgaacaaaagcttgaataggaatcaaggtcttgatagtctcttcagagcaaatccaaaggtagaagaaagagagaaaagagccaaaagccttgaaagtctcatctatatgagtacccggacagataaagatggcaaaggaatccaaagccttggaagtccgattaaagttaatcaaaggactgacaaaaatgagaaaggaagacaaaatctcgaatctgttgctaaagtgaatgccaggatgaataaaacgagcagaagaagtgaagaccttgataatgctactgaagtaaatcccaaaggacatgaaaataccactggaaaaaaagaccttgatgggcttattaaagtggatcctgaaacaaataaaaatattacgaggggccagagccttgataatctcatcaaagtgacccctgaagtaaagagaagtaaccaaggttccaaagaccttaataacttcatcaaagtgtatccaggaacagaaaaaagtactgaagggggccaaagtctcgacagcctcattaaagtgactcctgaaagaaacagaactaaccaagggaaccaagacttggaaaatcttatcaaagtgatcccttcagcaaacaaaagcagtgaacaaggtcttgatgaacatattaatgtcagccccaaagctgtcaaaaacactgatggaaaacaagatcttgataaactcatcaaggtgaatcctgaaattttcacaaacaaccaaagaaaccaagatcttgctaacctcatcaaagtaaatcctgcagtaatcagaaacaatcagagccaagacttggacaatcttattaaagtgaaaccttcagctcttagaaacactaatcgagaccagaacctggaaaatttaattgaagtaaattctcatgtgtctgaaaacaagaatggaagctctaacactggagccaagcaggcaggaccacaggatactgttgtgtacacaaggacatatgtggagaatagtaaatcacccaaggatggatatcaggagaatatctctggaaaatacatacaaactgtttattcaacttctgataggtctgtcattgaaagagatatgtgcacttactgccgaaaacccttgggtgtagaaactaaaatgattttagatgaattacaaatttgctgccattctacttgctttaagtgtgaaatatgcaagcagcctttggaaaatctacaagcgggtgatagtatttggatttatagacagacaatacactgtgaaccttgctactctaaaattatggcaaagtggattccataactctggcacaaggaaatcaagatgaaaagcactcattaaggaattaaagttacaagttttatcttaataatatgtaatctagaaaagctttcacattgaagatcaactcttgtacaaaattaacaattctgttattgcataagtaatctaattgtcttcaataaggtcacacacataaaaagagccatctggtctctggctagagttagcaataaaaagttcaaatggttccagattccagtgtcaaaggagtgatgcattacactccagccaggtccatccctgctccgtatgttggctgtgagtggtggtttccatttaaaccaagtttctcatttcttcacctttttttctctaagaatttggattcgtagacattgacatcccgaagaactgtcaaggaagcaagatatgctttcttcatctgcaaaagaaatactaacaacaattttcttatacagtttggcagaaagatgttaacataaaaagtttatatacctcaaaaatcactaaactttccagatctctgtcctattatttgtaacacaaggggcattggataaaatgatttctagggttccttttgcttcccaaattctctgattctaaagcagtttttagaatcattagctctttggaaacatatatgcatacatgtttgttaagcctattgaactaggtaggacatataaacaatttaattttagtgtcattgtttaatcacagacttagtgtttgaaaactgtgttttaaaaacagaaacagattgatgggtaacaggtaaaatatgacatgtatagcttacatgttattatttgttaaattttctttgtatacatttcaaaatctgggtatacttataatccattagaagtaatggttatggactaaaaagatatgttctttagtatgttatatatactcatattacatagcagtatgtttacaaaaggcttataaaaataaaatgaactatcagttacat

SEQ ID NO: 27266 - DNA, 2386 bp, Homo sapiens
  source 1..2386: mol_type = unassigned DNA
agatcctcccagggaatcactacaggctggttagccaaaaagtcctgattttctgctcaatagaggtccttactggaaggcagcatgtccaatgttaccttgagaaaaatgtctcccacaggaaatgagatgaagagcaccactcagggaaccacacggaagcagcaggattttcacgaggtgaacaaaagaagaactttcttacaggataacagttggataaagaaacgccctgaagaagaaaaagatgaaaattacggtagggtggtgctcaaccgacataattcccatgatgcattggacaggaaagtaaatgagagagatgtgccaaaagctacaattagtcggtacagttctgatgacactttggacaggatctcagacagaaatgatgctgctaaaacatataaggccaataccttggataaccaactaaccaataggagcatgtccatgtttagatcactggaagtaacaaagttgcaacctggcggttcattgaatgccaacacctccaacaccatagcatccacttctgctactactcctgtaaagaagaagaggcagtcctggtttccaccgccccctccaggttacaatgcctcctcgagcacaggaaccaggagacgggaaccaggtgttcaccctccaatacctccaaagcccagttctcctgtttcttctcctaaccagctgagacaggataataggcagatacatccacctaaaccaggtgtatatacagaaaccaacagatctgctgaaagaaatataaggagtcaggatcttgataacatcgtcaaagtggccacttcacttcagagaagtgacaaaggtgaagaattggataatctcatcaaaatgaacaaaagcttgaataggaatcaaggtcttgatagtctcttcagagcaaatccaaaggtagaagaaagagagaaaagagccaaaagccttgaaagtctcatctatatgagtacccggacagataaagatggcaaaggaatccaaagccttggaagtccgattaaagttaatcaaaggactgacaaaaatgagaaaggaagacaaaatctcgaatctgttgctaaagtgaatgccaggatgaataaaacgagcagaagaagtgaagaccttgataatgctactgaagtaaatcccaaaggacatgaaaataccactggaaaaaaagaccttgatgggcttattaaagtggatcctgaaacaaataaaaatattacgaggggccagagccttgataatctcatcaaagtgacccctgaagtaaagagaagtaaccaaggttccaaagaccttaataacttcatcaaagtgtatccaggaacagaaaaaagtactgaagggggccaaagtctcgacagcctcattaaagtgactcctgaaagaaacagaactaaccaagggaaccaagacttggaaaatcttatcaaagtgatcccttcagcaaacaaaagcagtgaacaaggtcttgatgaacatattaatgtcagccccaaagctgtcaaaaacactgatggaaaacaagatcttgataaactcatcaaggtgaatcctgaaattttcacaaacaaccaaagaaaccaagatcttgctaacctcatcaaagtaaatcctgcagtaatcagaaacaatcagagccaagacttggacaatcttattaaagtgaaaccttcagctcttagaaacactaatcgagaccagaacctggaaaatttaattgaagtaaattctcatgtgtctgaaaacaagaatggaagctctaacactggagccaagcaggcaggaccacaggatactgttgtgtacacaaggacatatgtggagaatagtaaatcacccaaggatggatatcaggagaatatctctggaaaatacatacaaactgtttattcaacttctgataggtctgtcattgaaagagatatgtgcacttactgccgaaaacccttgggtgtagaaactaaaatgattttagatgaattacaaatttgctgccattctacttgctttaagtgtgaaatatgcaagcagcctttggaaaatctacaagcgggtgatagtatttggatttatagacagacaatacactgtgaaccttgctactctaaaattatggcaaagtggattccataactctggcacaaggaaatcaagatgaaaagcactcattaaggaattaaagttacaagttttatcttaataatatgtaatctagaaaagctttcacattgaagatcaactcttgtacaaaattaacaattctgttattgcataagtaatctaattgtcttcaataaggtcacacacataaaaagagccatctggtctctggctagagttagcaataaaaagttcaaatggttccaga

SEQ ID NO: 27267 - DNA, 3081 bp, Homo sapiens
  source 1..3081: mol_type = unassigned DNA
cagatcctcccagggaatcactacaggctggttagccaaaaagtcctgattttctgctcaatagaggtccttactggaaggcagcatgtccaatgttaccttgagaaaaatgtctcccacaggaaatgagatgaagagcaccactcagggaaccacacggaagcagcaggattttcacgaggtgaacaaaagaagaactttcttacaggataacagttggataaagaaacgccctgaagaagaaaaagatgaaaattacggtagggtggtgctcaaccgacataattcccatgatgcattggacaggaaagtaaatgagagagatgtgccaaaagctacaattagtcggtacagttctgatgacactttggacaggatctcagacagaaatgatgctgctaaaacatataaggccaataccttggataaccaactaaccaataggagcatgtccatgtttagatcactggaagtaacaaagttgcaacctggcggttcattgaatgccaacacctccaacaccatagcatccacttctgctactactcctgtaaagaagaagaggcagtcctggtttccaccgccccctccaggttacaatgcctcctcgagcacaggaaccaggagacgggaaccaggtgttcaccctccaatacctccaaagcccagttctcctgtttcttctcctaaccagctgagacaggataataggcagatacatccacctaaaccaggtgtatatacagaaaccaacagatctgctgaaagaaatataagtgaagaattggataatctcatcaaaatgaacaaaagcttgaataggaatcaaggtcttgatagtctcttcagagcaaatccaaaggtagaagaaagagagaaaagagccaaaagccttgaaagtctcatctatatgagtacccggacagataaagatggcaaaggaatccaaagccttggaagtccgattaaagttaatcaaaggactgacaaaaatgagaaaggaagacaaaatctcgaatctgttgctaaagtgaatgccaggatgaataaaacgagcagaagaagtgaagaccttgataatgctactgaagtaaatcccaaaggacatgaaaataccactggaaaaaaagaccttgatgggcttattaaagtggatcctgaaacaaataaaaatattacgaggggccagagccttgataatctcatcaaagtgacccctgaagtaaagagaagtaaccaaggttccaaagaccttaataacttcatcaaagtgtatccaggaacagaaaaaagtactgaagggggccaaagtctcgacagcctcattaaagtgactcctgaaagaaacagaactaaccaagggaaccaagacttggaaaatcttatcaaagtgatcccttcagcaaacaaaagcagtgaacaaggtcttgatgaacatattaatgtcagccccaaagctgtcaaaaacactgatggaaaacaagatcttgataaactcatcaaggtgaatcctgaaattttcacaaacaaccaaagaaaccaagatcttgctaacctcatcaaagtaaatcctgcagtaatcagaaacaatcagagccaagacttggacaatcttattaaagtgaaaccttcagctcttagaaacactaatcgagaccagaacctggaaaatttaattgaagtaaattctcatgtgtctgaaaacaagaatggaagctctaacactggagccaagcaggcaggaccacaggatactgttgtgtacacaaggacatatgtggagaatagtaaatcacccaaggatggatatcaggagaatatctctggaaaatacatacaaactgtttattcaacttctgataggtctgtcattgaaagagatatgtgcacttactgccgaaaacccttgggtgtagaaactaaaatgattttagatgaattacaaatttgctgccattctacttgctttaagtgtgaaatatgcaagcagcctttggaaaatctacaagcgggtgatagtatttggatttatagacagacaatacactgtgaaccttgctactctaaaattatggcaaagtggattccataactctggcacaaggaaatcaagatgaaaagcactcattaaggaattaaagttacaagttttatcttaataatatgtaatctagaaaagctttcacattgaagatcaactcttgtacaaaattaacaattctgttattgcataagtaatctaattgtcttcaataaggtcacacacataaaaagagccatctggtctctggctagagttagcaataaaaagttcaaatggttccagattccagtgtcaaaggagtgatgcattacactccagccaggtccatccctgctccgtatgttggctgtgagtggtggtttccatttaaaccaagtttctcatttcttcacctttttttctctaagaatttggattcgtagacattgacatcccgaagaactgtcaaggaagcaagatatgctttcttcatctgcaaaagaaatactaacaacaattttcttatacagtttggcagaaagatgttaacataaaaagtttatatacctcaaaaatcactaaactttccagatctctgtcctattatttgtaacacaaggggcattggataaaatgatttctagggttccttttgcttcccaaattctctgattctaaagcagtttttagaatcattagctctttggaaacatatatgcatacatgtttgttaagcctattgaactaggtaggacatataaacaatttaattttagtgtcattgtttaatcacagacttagtgtttgaaaactgtgttttaaaaacagaaacagattgatgggtaacaggtaaaatatgacatgtatagcttacatgttattatttgttaaattttctttgtatacatttcaaaatctgggtatacttataatccattagaagtaatggttatggactaaaaagatatgttctttagtatgttatatatactcatattacatagcagtatgtttacaaaaggcttataaaaataaaatgaactatcagttacatagaa

SEQ ID NO: 27268 - DNA, 3096 bp, Homo sapiens
  source 1..3096: mol_type = unassigned DNA
aagaaacctctgaactgttcactaatacagtcaggtagaggttgagactccactgaataaactctaggttcccatttctttcagccagatcctcccagggaatcactacaggctggttagccaaaaagtcctgattttctgctcaatagaggtccttactggaaggcagcatgtccaatgttaccttgagaaaaatgtctcccacaggaaatgagatgaagagcaccactcagggaaccacacggaagcagcaggattttcacgaggtgaacaaaagaagaactttcttacaggataacagttggataaagaaacgccctgaagaagaaaaagatgaaaattacggtagggtggtgctcaaccgacataattcccatgatgcattggacaggaaagtaaatgagagagatgtgccaaaagctacaattagtcggtacagttctgatgacactttggacaggatctcagacagaaatgatgctgctaaaacatataaggccaataccttggataaccaactaaccaataggagcatgtccatgtttagatcactggaagtaacaaagttgcaacctggcggttcattgaatgccaacacctccaacaccatagcatccacttctgctactactcctgtaaagaagaagagggaaccaggtgttcaccctccaatacctccaaagcccagttctcctgtttcttctcctaaccagctgagacaggataataggcagatacatccacctaaaccaggtgtatatacagaaaccaacagatctgctgaaagaaatataaggagtcaggatcttgataacatcgtcaaagtggccacttcacttcagagaagtgacaaaggtgaagaattggataatctcatcaaaatgaacaaaagcttgaataggaatcaaggtcttgatagtctcttcagagcaaatccaaaggtagaagaaagagagaaaagagccaaaagccttgaaagtctcatctatatgagtacccggacagataaagatggcaaaggaatccaaagccttggaagtccgattaaagttaatcaaaggactgacaaaaatgagaaaggaagacaaaatctcgaatctgttgctaaagtgaatgccaggatgaataaaacgagcagaagaagtgaagaccttgataatgctactgaagtaaatcccaaaggacatgaaaataccactgggggccagagccttgataatctcatcaaagtgacccctgaagtaaagagaagtaaccaaggttccaaagaccttaataacttcatcaaagtgtatccaggaacagaaaaaagtactgaagggggccaaagtctcgacagcctcattaaagtgactcctgaaagaaacagaactaaccaagggaaccaagacttggaaaatcttatcaaagtgatcccttcagcaaacaaaagcagtgaacaaggtcttgatgaacatattaatgtcagccccaaagctgtcaaaaacactgatggaaaacaagatcttgataaactcatcaaggtgaatcctgaaattttcacaaacaaccaaagaaaccaagatcttgctaacctcatcaaagtaaatcctgcagtaatcagaaacaatcagagccaagacttggacaatcttattaaagtgaaaccttcagctcttagaaacactaatcgagaccagaacctggaaaatttaattgaagtaaattctcatgtgtctgaaaacaagaatggaagctctaacactggagccaagcaggcaggaccacaggatactgttgtgtacacaaggacatatgtggagaatagtaaatcacccaaggatggatatcaggagaatatctctggaaaatacatacaaactgtttattcaacttctgataggtctgtcattgaaagagatatgtgcacttactgccgaaaacccttgggtgtagaaactaaaatgattttagatgaattacaaatttgctgccattctacttgctttaagtgtgaaatatgcaagcagcctttggaaaatctacaagcgggtgatagtatttggatttatagacagacaatacactgtgaaccttgctactctaaaattatggcaaagtggattccataactctggcacaaggaaatcaagatgaaaagcactcattaaggaattaaagttacaagttttatcttaataatatgtaatctagaaaagctttcacattgaagatcaactcttgtacaaaattaacaattctgttattgcataagtaatctaattgtcttcaataaggtcacacacataaaaagagccatctggtctctggctagagttagcaataaaaagttcaaatggttccagattccagtgtcaaaggagtgatgcattacactccagccaggtccatccctgctccgtatgttggctgtgagtggtggtttccatttaaaccaagtttctcatttcttcacctttttttctctaagaatttggattcgtagacattgacatcccgaagaactgtcaaggaagcaagatatgctttcttcatctgcaaaagaaatactaacaacaattttcttatacagtttggcagaaagatgttaacataaaaagtttatatacctcaaaaatcactaaactttccagatctctgtcctattatttgtaacacaaggggcattggataaaatgatttctagggttccttttgcttcccaaattctctgattctaaagcagtttttagaatcattagctctttggaaacatatatgcatacatgtttgttaagcctattgaactaggtaggacatataaacaatttaattttagtgtcattgtttaatcacagacttagtgtttgaaaactgtgttttaaaaacagaaacagattgatgggtaacaggtaaaatatgacatgtatagcttacatgttattatttgttaaattttctttgtatacatttcaaaatctgggtatacttataatccattagaagtaatggttatggactaaaaagatatgttctttagtatgttatatatactcatattacatagcagtatgtttacaaaaggcttataaaaataaaatgaactatcagttacat

SEQ ID NO: 27269 - DNA, 3137 bp, Homo sapiens
  source 1..3137: mol_type = unassigned DNA
aacactataaagtggcggcgaataaggttcctcctgctgctctcggtttagtccaagatcagcgatatcacgcgtcccccggagcatcgcgtgcaggagccatggcgcgggagctataccacgaagagttcgcccgggcgggcaagcaggcggggctgcaggtctggaggattgagaagctggagctggtgcccgtgccccagagcgctcacggcgacttctacgtcggggatgcctacctggtgctgcacacggccaagacgagccgaggcttcacctaccacctgcacttctggctcggaaaggagtgttcccaggatgaaagcacagctgctgccatcttcactgttcagatggatgactatttgggtggcaagccagtgcagaatagagaacttcaaggatatgagtctaatgactttgttagctatttcaaaggcggtctgaaatacaaggctggaggcgtggcatctggattaaatcatgttcttacgaacgacctgacagccaagaggctcctacatgtgaagggtcgtagagtggtgagagccacagaagttccccttagctgggacagtttcaacaagggtgactgcttcatcattgaccttggcaccgaaatttatcagtggtgtggttcctcgtgcaacaaatatgaacgtctgaaggcaaaccaggtagctactggcattcggtacaatgaaaggaaaggaaggtctgaactaattgtcgtggaagaaggaagtgaaccctcagaacttataaaggtcttaggggaaaagccagagcttccagatggaggtgatgatgatgacattatagcagacataagtaacaggaaaatggctaaactatacatggtttcagatgcaagtggctccatgagagtgactgtggtggcagaagaaaaccccttctcaatggcaatgctgctgtctgaagaatgctttattttggaccacggggctgccaaacaaattttcgtatggaaaggtaaagatgctaatccccaagagaggaaggctgcaatgaagacagctgaagaatttctacagcaaatgaattattccaagaatacccaaattcaagttcttccagaaggaggtgaaacaccaatcttcaaacagttttttaaggactggagagataaagatcagagtgatggcttcgggaaagtttatgtcacagagaaagtggctcaaataaaacaaattccctttgatgcctcaaaattacacagttctccgcagatggcagcccagcacaatatggtggatgatggttctggcaaagtggagatttggcgtgtagaaaacaatggtaggatccaagttgaccaaaactcatatggtgaattctatggtggtgactgctacatcatactctacacctatcccagaggacagattatctacacgtggcaaggagcaaatgccacacgagatgagctgacaacatctgcgttcctgactgttcagttggatcggtcccttggaggacaggctgtgcagatccgagtctcccaaggcaaagagcctgttcacctactgagtttgttcaaagacaaaccgctcattatttacaagaatggaacatcaaagaaaggaggtcaggcacctgctccccctacacgcctctttcaagtccggagaaacctggcatctatcaccagaattgtggaggttgatgttgatgcaaattcactgaattctaacgatgtttttgtcctgaaactgccacaaaatagtggctacatctgggtaggaaaaggtgctagccaggaggaggagaaaggagcagagtatgtagcaagtgtcctaaagtgcaaaaccttaaggatccaagaaggcgaggagccagaggagttctggaattcccttggagggaaaaaagactaccagacctcaccactactggaaacccaggctgaagaccatccacctcggctttacggctgctctaacaaaactggaagatttgttattgaagagattccaggagagttcacccaggatgatttagctgaagatgatgtcatgttactagatgcttgggaacagatatttatttggattggcaaagatgctaatgaagttgagaaaaaagaatctctgaagtctgccaaaatgtaccttgagacagacccttctggaagagacaagaggacaccaattgtcatcataaaacagggccatgagccacccacattcacaggctggttcctgggctgggattccagcaagtggtaaattggtatttgtaaaaagcaaacaaacattacaaggcagttatctcattgctgttttgggagaggaacgggaaaagctttttgcttatttgtcttttgaaaattaaggctgggcgcggtggctcacacctgtaatcccagcactttgagaggatgaggtaggcggatcactggggtcaggatttcgagaccagcctggccaacatggcgaaacctcgcctctactaaaaatacaaaaaaattagctgcgcgtggtggtgcacgcctgtagtccctgctacttggaaggctgagacaggaaaattgcttgaacccaggaggctgaggttgcagtgagccaggattgcgccaccacactccagcctgggcaacagagactctgtctcaaaaaaaaaaaaaaaaaaaattaacctcaaccaaacgcctattttttaatgcttagttttggcttgaaattcttcttcacctggagttttcttacgttaatacattaaaataacctgaaggaaactttcgttatgggccaatattagctcttatggaaactgatttatatcttttttatgacctttcaaaagtaaaatactatgcataatctagaaagatttgtcagataggaaattttataatgcattagccattagtcagagttgttttttaacatgccagagaaaaagttgtaatgccttggaagttattctcttttctatagattgtgttcaaaagatgtgtatacttgcaataaggtttatgttaaggtggctttaacaattggttgctattttccttctttagtcaatatgactttgatgtcattaactgctaagtgttattttctaagaggaattttatcttttttttaaccttattaaaagcctttgaaaacaca

SEQ ID NO: 27270 - DNA, 2518 bp, Homo sapiens
  source 1..2518: mol_type = unassigned DNA
ggaaatttatcagtggtgtggttcctcgtgcaacaaatatgaacgtctgaaggcaaaccaggtagctactggcattcggtacaatgaaaggaaaggaaggtctgaactaattgtcgtggaagaaggaagtgaaccctcagaacttataaaggtcttaggggaaaagccagagcttccagatggaggtgatgatgatgacattatagcagacataagtaacaggaaaatggctaaactatacatggtttcagatgcaagtggctccatgagagtgactgtggtggcagaagaaaaccccttctcaatggcaatgctgctgtctgaagaatgctttattttggaccacggggctgccaaacaaattttcgtatggaaaggtaaagatgctaatccccaagagaggaaggctgcaatgaagacagctgaagaatttctacagcaaatgaattattccaagaatacccaaattcaagttcttccagaaggaggtgaaacaccaatcttcaaacagttttttaaggactggagagataaagatcagagtgatggcttcgggaaagtttatgtcacagagaaagtggctcaaataaaacaaattccctttgatgcctcaaaattacacagttctccgcagatggcagcccagcacaatatggtggatgatggttctggcaaagtggagatttggcgtgtagaaaacaatggtaggatccaagttgaccaaaactcatatggtgaattctatggtggtgactgctacatcatactctacacctatcccagaggacagattatctacacgtggcaaggagcaaatgccacacgagatgagctgacaacatctgcgttcctgactgttcagttggatcggtcccttggaggacaggctgtgcagatccgagtctcccaaggcaaagagcctgttcacctactgagtttgttcaaagacaaaccgctcattatttacaagaatggaacatcaaagaaaggaggtcaggcacctgctccccctacacgcctctttcaagtccggagaaacctggcatctatcaccagaattgtggaggttgatgttgatgcaaattcactgaattctaacgatgtttttgtcctgaaactgccacaaaatagtggctacatctgggtaggaaaaggtgctagccaggaggaggagaaaggagcagagtatgtagcaagtgtcctaaagtgcaaaaccttaaggatccaagaaggcgaggagccagaggagttctggaattcccttggagggaaaaaagactaccagacctcaccactactggaaacccaggctgaagaccatccacctcggctttacggctgctctaacaaaactggaagatttgttattgaagagattccaggagagttcacccaggatgatttagctgaagatgatgtcatgttactagatgcttgggaacagatatttatttggattggcaaagatgctaatgaagttgagaaaaaagaatctctgaagtctgccaaaatgtaccttgagacagacccttctggaagagacaagaggacaccaattgtcatcataaaacagggccatgagccacccacattcacaggctggttcctgggctgggattccagcaagtggtaaattggtatttgtaaaaagcaaacaaacattacaaggcagttatctcattgctgttttgggagaggaacgggaaaagctttttgcttatttgtcttttgaaaattaaggctgggcgcggtggctcacacctgtaatcccagcactttgagaggatgaggtaggcggatcactggggtcaggatttcgagaccagcctggccaacatggcgaaacctcgcctctactaaaaatacaaaaaaattagctgcgcgtggtggtgcacgcctgtagtccctgctacttggaaggctgagacaggaaaattgcttgaacccaggaggctgaggttgcagtgagccaggattgcgccaccacactccagcctgggcaacagagactctgtctcaaaaaaaaaaaaaaaaaaaattaacctcaaccaaacgcctattttttaatgcttagttttggcttgaaattcttcttcacctggagttttcttacgttaatacattaaaataacctgaaggaaactttcgttatgggccaatattagctcttatggaaactgatttatatcttttttatgacctttcaaaagtaaaatactatgcataatctagaaagatttgtcagataggaaattttataatgcattagccattagtcagagttgttttttaacatgccagagaaaaagttgtaatgccttggaagttattctcttttctatagattgtgttcaaaagatgtgtatacttgcaataaggtttatgttaaggtggctttaacaattggttgctattttccttctttagtcaatatgactttgatgtcattaactgctaagtgttattttctaagaggaattttatcttttttttaaccttattaaaagcctttgaaaac

SEQ ID NO: 27271 - DNA, 2660 bp, Homo sapiens
  source 1..2660: mol_type = unassigned DNA
caagatggtctcgatctcctgacctcgtgatccgcccgcctcagcctcccaaagatctgggattacaggcgtgagccactgcacccggccagaagctttttcatttattcgtccagcagcatcttgtactagtcctgactggaaatttatcagtggtgtggttcctcgtgcaacaaatatgaacgtctgaaggcaaaccaggtagctactggcattcggtacaatgaaaggaaaggaaggtctgaactaattgtcgtggaagaaggaagtgaaccctcagaacttataaaggtcttaggggaaaagccagagcttccagatggaggtgatgatgatgacattatagcagacataagtaacaggaaaatggctaaactatacatggtttcagatgcaagtggctccatgagagtgactgtggtggcagaagaaaaccccttctcaatggcaatgctgctgtctgaagaatgctttattttggaccacggggctgccaaacaaattttcgtatggaaaggtaaagatgctaatccccaagagaggaaggctgcaatgaagacagctgaagaatttctacagcaaatgaattattccaagaatacccaaattcaagttcttccagaaggaggtgaaacaccaatcttcaaacagttttttaaggactggagagataaagatcagagtgatggcttcgggaaagtttatgtcacagagaaagtggctcaaataaaacaaattccctttgatgcctcaaaattacacagttctccgcagatggcagcccagcacaatatggtggatgatggttctggcaaagtggagatttggcgtgtagaaaacaatggtaggatccaagttgaccaaaactcatatggtgaattctatggtggtgactgctacatcatactctacacctatcccagaggacagattatctacacgtggcaaggagcaaatgccacacgagatgagctgacaacatctgcgttcctgactgttcagttggatcggtcccttggaggacaggctgtgcagatccgagtctcccaaggcaaagagcctgttcacctactgagtttgttcaaagacaaaccgctcattatttacaagaatggaacatcaaagaaaggaggtcaggcacctgctccccctacacgcctctttcaagtccggagaaacctggcatctatcaccagaattgtggaggttgatgttgatgcaaattcactgaattctaacgatgtttttgtcctgaaactgccacaaaatagtggctacatctgggtaggaaaaggtgctagccaggaggaggagaaaggagcagagtatgtagcaagtgtcctaaagtgcaaaaccttaaggatccaagaaggcgaggagccagaggagttctggaattcccttggagggaaaaaagactaccagacctcaccactactggaaacccaggctgaagaccatccacctcggctttacggctgctctaacaaaactggaagatttgttattgaagagattccaggagagttcacccaggatgatttagctgaagatgatgtcatgttactagatgcttgggaacagatatttatttggattggcaaagatgctaatgaagttgagaaaaaagaatctctgaagtctgccaaaatgtaccttgagacagacccttctggaagagacaagaggacaccaattgtcatcataaaacagggccatgagccacccacattcacaggctggttcctgggctgggattccagcaagtggtaaattggtatttgtaaaaagcaaacaaacattacaaggcagttatctcattgctgttttgggagaggaacgggaaaagctttttgcttatttgtcttttgaaaattaaggctgggcgcggtggctcacacctgtaatcccagcactttgagaggatgaggtaggcggatcactggggtcaggatttcgagaccagcctggccaacatggcgaaacctcgcctctactaaaaatacaaaaaaattagctgcgcgtggtggtgcacgcctgtagtccctgctacttggaaggctgagacaggaaaattgcttgaacccaggaggctgaggttgcagtgagccaggattgcgccaccacactccagcctgggcaacagagactctgtctcaaaaaaaaaaaaaaaaaaaattaacctcaaccaaacgcctattttttaatgcttagttttggcttgaaattcttcttcacctggagttttcttacgttaatacattaaaataacctgaaggaaactttcgttatgggccaatattagctcttatggaaactgatttatatcttttttatgacctttcaaaagtaaaatactatgcataatctagaaagatttgtcagataggaaattttataatgcattagccattagtcagagttgttttttaacatgccagagaaaaagttgtaatgccttggaagttattctcttttctatagattgtgttcaaaagatgtgtatacttgcaataaggtttatgttaaggtggctttaacaattggttgctattttccttctttagtcaatatgactttgatgtcattaactgctaagtgttattttctaagaggaattttatcttttttttaaccttattaaaagcctttgaaaacac

SEQ ID NO: 27272 - DNA, 4609 bp, Homo sapiens
  source 1..4609: mol_type = unassigned DNA
gtcgggctggtctggaaatcctgacttcaggtgatccacccgcctcggcctcccaaaatgctgggattacaagcgtgagccaccgcccctgacatgagccattgacttttaaagcaggagaataatttgatcagatttatatggaaacactcttctagcagcattatggggacttttccataagtctggatactgaggatttggaattaaagaaatcattcaccagacatcatggagcctatatatccttttgcacggccccagatgaataccaggtttccttcaagcaggatggtacctttccactttcctccatcaaaatgtgcactttggaacccaacgccaactggagatttcatctacttacatctcagttactacagaaatccaaagcttgtggtgactgagaagaccatccgacttgcttatcgtcatgctaagcagaataaaaaaaattcgtcatgctttttacttggttctctgacagcagacgaagatgaagaaggtgtaacattgacagtagatcgctttgatcctggtcgagaagtacctgaatgcctagaaataacccctactgcttctcttcctggggactttttgattccatgcaaagttcatactcaagaactttgttcaagagaaatgatagttcacagtgtagatgacttcagttcagctttaaaggctctacagtgccatatatgtagcaaagattccttggactgtggtaagctgctttccctaagagttcatatcacttccagggagagtttggacagtgtggaatttgacttgcattgggcagcagtaactctagcaaataactttaaatgcacacctgtgaagcccatccccattattccaacagctctggcaagaaacttgagcagtaatctgaatatttctcaagttcaagggacttataaatatggatatcttaccatggatgaaacacgcaaattgttacttttgttggaatctgatcccaaggtttattctctaccattggtgggaatttggctgtctggaattacacatatctatagtcctcaggtatgggcttgctgtttgcgatacatattcaattcttctgttcaagaaagggttttttcagaatctggaaatttcatcatagttctctattctatgacacataaggaacctgagttttatgaatgcttcccttgtgatggcaagatacctgactttcggtttcagttgctaaccagtaaggaaacattacatcttttcaaaaatgttgaacctcctgacaaaaatccaatccgttgtgaactgagcgctgaaagccaaaatgcagaaacagagtttttcagtaaggcttccaagaatttttcaattaagaggtcttcccaaaagttatcttctgggaagatgccaatacatgatcacgactctggtgttgaagatgaagatttttctccaagaccaattcctagtcctcatccagtgagtcagaagatttctaagatccaaccatcagttcctgaactttcacttgtgttggatggcaatttcatagaatcaaaccctctgcctactccattggaaatggtgaataatgaaaatcctcctttgattaaccacttggaacacttgaagccattgcaaccccagctttatgatgagaaacacagtccagaagttgaagctggagagccttccttgagaggaataccaaatcagttaaaccaggataaaccagctcttttgagacactgcaaagtaagacagccacctgcctataagaaagggaacccccataccaggaacagtattaaaccatcttctcataatgggccatctcatgatatatttgaaaagctccaaacagtttctgctggaaatgtacaaaacgaagagtatcctataagaccctccacacttaattctaggcagtcttctcttgccccgcagtcccaaccacacgattttgttttttcaccccataattcaggaagaccaatggaacttcagatacctactcccccactgccatcttactgttccacaaacgtttgcaggtgttgtcagcatcatagtcatattcaatatagtccgctaaattcttggcaaggagcaaacacagttggatccattcaagatgtccagtctgaagcccttcaaaagcattcattatttcacccaagtggatgtccagccctgtactgtaatgcattctgttcttcaagtagtcctatagccttgagacctcagggagatatgggcagttgttctccccacagcaatattgaaccatcgcctgtggcaagaccgccttcacatatggacttatgtaacccacagccttgcacagtgtgcatgcacacacccaagactgagtcagataatggaatgatgggactatctccagatgcatatcggttcctcacagaacaagacagacagctaagactacttcaggcacagattcagcgtttgttggaagcacagtctctgatgccctgttcccctaagacaactgctgttgaagacacagtgcaagctggaagacaaatggagttggtttctgtggaagcacagtcttcccctggcttgcacatgagaaaaggtgtaagcattgctgtgagcacaggtgctagcttgttttggaatgcagcaggtgaggatcaagagcctgactctcaaatgaagcaagatgataccaaaatttccagtgaggacatgaatttttctgtcgatattaataatgaagtcacaagtcttccaggtagtgcatcttcattaaaagcagttgatattcccagttttgaagagagcaacattgctgtggaagaagaatttaaccagccactttctgtatccaactcttctctagttgtgagaaaagaacctgatgtacctgtgttctttccaagtggccagctggcagaaagtgtaagcatgtgtttacagactggaccaacagggggtgccagtaacaattctgaaacatcagaggaaccaaaaattgagcatgtaatgcaacccttgcttcatcaaccatcagataaccagaaaatttaccaggatttattgggtcaagtaaaccacctattaaatagttcctccaaggaaactgagcagccgtctaccaaagcagtaattatcagtcatgaatgcaccagaacccaaaacgtttaccatacaaagaaaaaaacacatcattcaagactggtggacaaagattgtgtccttaatgcaactcttaagcaactaagaagccttggagtaaaaattgattctcccactaaagtgaagaaaaatgcacataacgtggatcacgccagtgtgttggcatgcatcagcccagaagcagtgatctctggattaaactgcatgtcatttgctaatgttggcatgagcggcttaagccccaatggtgtggatttgagcatggaggcaaatgctatagctctgaaatatttaaatgaaaatcagctgtcacaactgtctgtcactcgatcgaaccaaaataattgtgacccattcagccttctccatattaatacagacagaagcacagtggggcttagtttaatttcaccaaacaacatgtcatttgcaaccaaaaaatatatgaagagatatggactcctacaaagcagtgacaatagtgaagatgaagaggaacctcccgacaatgcagatagcaagagtgaatatttattgaatcagaaccttaggtccatacctgaacagcttggtggtcagaaagagccttctaagaatgaccatgaaataattaattgttctaactgtgaatctgtggggaccaacgcagatacgccagtattgagaaatattacaaatgaagttttgcagacaaaagcaaaacagcagttgactgaaaagccagctttcttagtaaagaaccttaaaccaagtcctgcagtgaaccttcgaaccgggaaagcagagttcactcaacatcctgagaaagaaaatgaaggggacattacaatttttcctgaaagtttgcaaccttctgaaacgctaaagcagatgaatagcatgaattcagtaggcaccttcttagatgtaaaacgtctcagacagttaccaaaattattttaaccttttaactccctgcccttttaatacagggacagggtgtctcctgaagatacttagggaaaacaggagcctaccacaaggctcctgatcattctggagtcactgtttcttggtagcagccaattgggaagagtgacttctgtgagatggctggctggtgataggactaagttctcattgttcaaatagagctgttcaacatcactgaaacctttaagaaaagccctgagatcagttattcctacaagtttaagtagtagacagatactatccagctctaagtctcaactgctcttttatactgtacttttttttttgagacggagttttgctcttgtagcccaggctggagtgcaatggcaggatctcagatcactgcaacctctgcctcctgggttcaagcgattttcctgcttcatcttcccaggtagctgggattacaggcatgtgccacaacgcctggctaattttgtatttttagtagagactggtttctccatgttggtcaggctgg

SEQ ID NO: 27273 - DNA, 5016 bp, Homo sapiens
  source 1..5016: mol_type = unassigned DNA
agttcccgcgaccccaacgtcccagaggcggggccggagtcggcggtggcgctccttggagccggctcccgctcctaccctgcaaacagacctcagctccgcggaagttgcggatactgaggatttggaattaaagaaatcattcaccagacatcatggagcctatatatccttttgcacggccccagatgaataccaggtttccttcaagcaggatggtacctttccactttcctccatcaaaatgtgcactttggaacccaacgccaactggagatttcatctacttacatctcagttactacagaaatccaaagcttgtggtgactgagaagaccatccgacttgcttatcgtcatgctaagcagaataaaaaaaattcgtcatgctttttacttggttctctgacagcagacgaagatgaagaaggtgtaacattgacagtagatcgctttgatcctggtcgagaagtacctgaatgcctagaaataacccctactgcttctcttcctggggactttttgattccatgcaaagttcatactcaagaactttgttcaagagaaatgatagttcacagtgtagatgacttcagttcagctttaaaggctctacagtgccatatatgtagcaaagattccttggactgtggtaagctgctttccctaagagttcatatcacttccagggagagtttggacagtgtggaatttgacttgcattgggcagcagtaactctagcaaataactttaaatgcacacctgtgaagcccatccccattattccaacagctctggcaagaaacttgagcagtaatctgaatatttctcaagttcaagggacttataaatatggatatcttaccatggatgaaacacgcaaattgttacttttgttggaatctgatcccaaggtttattctctaccattggtgggaatttggctgtctggaattacacatatctatagtcctcaggtatgggcttgctgtttgcgatacatattcaattcttctgttcaagaaagggttttttcagaatctggaaatttcatcatagttctctattctatgacacataaggaacctgagttttatgaatgcttcccttgtgatggcaagatacctgactttcggtttcagttgctaaccagtaaggaaacattacatcttttcaaaaatgttgaacctcctgacaaaaatccaatccgttgtgaactgagcgctgaaagccaaaatgcagaaacagagtttttcagtaaggcttccaagaatttttcaattaagaggtcttcccaaaagttatcttctgggaagatgccaatacatgatcacgactctggtgttgaagatgaagatttttctccaagaccaattcctagtcctcatccagtgagtcagaagatttctaagatccaaccatcagttcctgaactttcacttgtgttggatggcaatttcatagaatcaaaccctctgcctactccattggaaatggtgaataatgaaaatcctcctttgattaaccacttggaacacttgaagccattgcaaccccagctttatgatgagaaacacagtccagaagttgaagctggagagccttccttgagaggaataccaaatcagttaaaccaggataaaccagctcttttgagacactgcaaagtaagacagccacctgcctataagaaagggaacccccataccaggaacagtattaaaccatcttctcataatgggccatctcatgatatatttgaaaagctccaaacagtttctgctggaaatgtacaaaacgaagagtatcctataagaccctccacacttaattctaggcagtcttctcttgccccgcagtcccaaccacacgattttgttttttcaccccataattcaggaagaccaatggaacttcagatacctactcccccactgccatcttactgttccacaaacgtttgcaggtgttgtcagcatcatagtcatattcaatatagtccgctaaattcttggcaaggagcaaacacagttggatccattcaagatgtccagtctgaagcccttcaaaagcattcattatttcacccaagtggatgtccagccctgtactgtaatgcattctgttcttcaagtagtcctatagccttgagacctcagggagatatgggcagttgttctccccacagcaatattgaaccatcgcctgtggcaagaccgccttcacatatggacttatgtaacccacagccttgcacagtgtgcatgcacacacccaagactgagtcagataatggaatgatgggactatctccagatgcatatcggttcctcacagaacaagacagacagctaagactacttcaggcacagattcagcgtttgttggaagcacagtctctgatgccctgttcccctaagacaactgctgttgaagacacagtgcaagctggaagacaaatggagttggtttctgtggaagcacagtcttcccctggcttgcacatgagaaaaggtgtaagcattgctgtgagcacaggtgctagcttgttttggaatgcagcaggtgaggatcaagagcctgactctcaaatgaagcaagatgataccaaaatttccagtgaggacatgaatttttctgtcgatattaataatgaagtcacaagtcttccaggtagtgcatcttcattaaaagcagttgatattcccagttttgaagagagcaacattgctgtggaagaagaatttaaccagccactttctgtatccaactcttctctagttgtgagaaaagaacctgatgtacctgtgttctttccaagtggccagctggcagaaagtgtaagcatgtgtttacagactggaccaacagggggtgccagtaacaattctgaaacatcagaggaaccaaaaattgagcatgtaatgcaacccttgcttcatcaaccatcagataaccagaaaatttaccaggatttattgggtcaagtaaaccacctattaaatagttcctccaaggaaactgagcagccgtctaccaaagcagtaattatcagtcatgaatgcaccagaacccaaaacgtttaccatacaaagaaaaaaacacatcattcaagactggtggacaaagattgtgtccttaatgcaactcttaagcaactaagaagccttggagtaaaaattgattctcccactaaagtgaagaaaaatgcacataacgtggatcacgccagtgtgttggcatgcatcagcccagaagcagtgatctctggattaaactgcatgtcatttgctaatgttggcatgagcggcttaagccccaatggtgtggatttgagcatggaggcaaatgctatagctctgaaatatttaaatgaaaatcagctgtcacaactgtctgtcactcgatcgaaccaaaataattgtgacccattcagccttctccatattaatacagacagaagcacagtggggcttagtttaatttcaccaaacaacatgtcatttgcaaccaaaaaatatatgaagagatatggactcctacaaagcagtgacaatagtgaagatgaagaggaacctcccgacaatgcagatagcaagagtgaatatttattgaatcagaaccttaggtccatacctgaacagcttggtggtcagaaagagccttctaagaatgaccatgaaataattaattgttctaactgtgaatctgtggggaccaacgcagatacgccagtattgagaaatattacaaatgaagttttgcagacaaaagcaaaacagcagttgactgaaaagccagctttcttagtaaagaaccttaaaccaagtcctgcagtgaaccttcgaaccgggaaagcagagttcactcaacatcctgagaaagaaaatgaaggggacattacaatttttcctgaaagtttgcaaccttctgaaacgctaaagcagatgaatagcatgaattcagtaggcaccttcttagatgtaaaacgtctcagacagttaccaaaattattttaaccttttaactccctgcccttttaatacagggacagggtgtctcctgaagatacttagggaaaacaggagcctaccacaaggctcctgatcattctggagtcactgtttcttggtagcagccaattgggaagagtgacttctgtgagatggctggctggtgataggactaagttctcattgttcaaatagagctgttcaacatcactgaaacctttaagaaaagccctgagatcagttattcctacaagtttaagtagtagacagatactatccagctctaagtctcaactgctcttttatactgtacttttttttttgagacggagttttgctcttgtagcccaggctggagtgcaatggcaggatctcagatcactgcaacctctgcctcctgggttcaagcgattttcctgcttcatcttcccaggtagctgggattacaggcatgtgccacaacgcctggctaattttgtatttttagtagagactggtttctccatgttggtcaggctggtctcaaactcccgacctcaggtgatccgcccgcctcggcctcctaaagtgctgggattacaggcgtgagccactgcgcccagctatactgtatattttaagaagttccagcatgttgcatctctgcatttatcctatatcattaaaagaacataagttatcatggtgttgggtaaattagcgaaatcaacccttcctaagtttaagggaaaagttatttttaaaaacaacttaataaaaacttacactcttttatacaagagtgtatttccccttaattaggatgcatgttgattaaactcgagatacagctttttgcagtatggtgggttggttttggtgtaacatcttcaacatgtcacactggctatcaaagaataagaaaattattgagtatgagtgtgttttataaactttctgagtttttcagatgtcttaatattttttaatagaacttaataaaatgtctagattgactattttc

SEQ ID NO: 27274 - DNA, 5225 bp, Homo sapiens
  source 1..5225: mol_type = unassigned DNA
agttcccgcgaccccaacgtcccagaggcggggccggagtcggcggtggcgctccttggagccggctcccgctcctaccctgcaaacagacctcagctccgcggaagttgcgagacggggtttcaccatgttggtcgggctggtctggaaatcctgacttcaggtgatccacccgcctcggcctcccaaaatgctgggattacaagcgtgagccaccgcccctgacatgagccattgacttttaaagcaggagaataatttgatcagatttatatggaaacactcttctagcagcattatggggacttttccataagtctggatactgaggatttggaattaaagaaatcattcaccagacatcatggagcctatatatccttttgcacggccccagatgaataccaggtttccttcaagcaggatggtacctttccactttcctccatcaaaatgtgcactttggaacccaacgccaactggagatttcatctacttacatctcagttactacagaaatccaaagcttgtggtgactgagaagaccatccgacttgcttatcgtcatgctaagcagaataaaaaaaattcgtcatgctttttacttggttctctgacagcagacgaagatgaagaaggtgtaacattgacagtagatcgctttgatcctggtcgagaagtacctgaatgcctagaaataacccctactgcttctcttcctggggactttttgattccatgcaaagttcatactcaagaactttgttcaagagaaatgatagttcacagtgtagatgacttcagttcagctttaaaggctctacagtgccatatatgtagcaaagattccttggactgtggtaagctgctttccctaagagttcatatcacttccagggagagtttggacagtgtggaatttgacttgcattgggcagcagtaactctagcaaataactttaaatgcacacctgtgaagcccatccccattattccaacagctctggcaagaaacttgagcagtaatctgaatatttctcaagttcaagggacttataaatatggatatcttaccatggatgaaacacgcaaattgttacttttgttggaatctgatcccaaggtttattctctaccattggtgggaatttggctgtctggaattacacatatctatagtcctcaggtatgggcttgctgtttgcgatacatattcaattcttctgttcaagaaagggttttttcagaatctggaaatttcatcatagttctctattctatgacacataaggaacctgagttttatgaatgcttcccttgtgatggcaagatacctgactttcggtttcagttgctaaccagtaaggaaacattacatcttttcaaaaatgttgaacctcctgacaaaaatccaatccgttgtgaactgagcgctgaaagccaaaatgcagaaacagagtttttcagtaaggcttccaagaatttttcaattaagaggtcttcccaaaagttatcttctgggaagatgccaatacatgatcacgactctggtgttgaagatgaagatttttctccaagaccaattcctagtcctcatccagtgagtcagaagatttctaagatccaaccatcagttcctgaactttcacttgtgttggatggcaatttcatagaatcaaaccctctgcctactccattggaaatggtgaataatgaaaatcctcctttgattaaccacttggaacacttgaagccattgcaaccccagctttatgatgagaaacacagtccagaagttgaagctggagagccttccttgagaggaataccaaatcagttaaaccaggataaaccagctcttttgagacactgcaaagtaagacagccacctgcctataagaaagggaacccccataccaggaacagtattaaaccatcttctcataatgggccatctcatgatatatttgaaaagctccaaacagtttctgctggaaatgtacaaaacgaagagtatcctataagaccctccacacttaattctaggcagtcttctcttgccccgcagtcccaaccacacgattttgttttttcaccccataattcaggaagaccaatggaacttcagatacctactcccccactgccatcttactgttccacaaacgtttgcaggtgttgtcagcatcatagtcatattcaatatagtccgctaaattcttggcaaggagcaaacacagttggatccattcaagatgtccagtctgaagcccttcaaaagcattcattatttcacccaagtggatgtccagccctgtactgtaatgcattctgttcttcaagtagtcctatagccttgagacctcagggagatatgggcagttgttctccccacagcaatattgaaccatcgcctgtggcaagaccgccttcacatatggacttatgtaacccacagccttgcacagtgtgcatgcacacacccaagactgagtcagataatggaatgatgggactatctccagatgcatatcggttcctcacagaacaagacagacagctaagactacttcaggcacagattcagcgtttgttggaagcacagtctctgatgccctgttcccctaagacaactgctgttgaagacacagtgcaagctggaagacaaatggagttggtttctgtggaagcacagtcttcccctggcttgcacatgagaaaaggtgtaagcattgctgtgagcacaggtgctagcttgttttggaatgcagcaggtgaggatcaagagcctgactctcaaatgaagcaagatgataccaaaatttccagtgaggacatgaatttttctgtcgatattaataatgaagtcacaagtcttccaggtagtgcatcttcattaaaagcagttgatattcccagttttgaagagagcaacattgctgtggaagaagaatttaaccagccactttctgtatccaactcttctctagttgtgagaaaagaacctgatgtacctgtgttctttccaagtggccagctggcagaaagtgtaagcatgtgtttacagactggaccaacagggggtgccagtaacaattctgaaacatcagaggaaccaaaaattgagcatgtaatgcaacccttgcttcatcaaccatcagataaccagaaaatttaccaggatttattgggtcaagtaaaccacctattaaatagttcctccaaggaaactgagcagccgtctaccaaagcagtaattatcagtcatgaatgcaccagaacccaaaacgtttaccatacaaagaaaaaaacacatcattcaagactggtggacaaagattgtgtccttaatgcaactcttaagcaactaagaagccttggagtaaaaattgattctcccactaaagtgaagaaaaatgcacataacgtggatcacgccagtgtgttggcatgcatcagcccagaagcagtgatctctggattaaactgcatgtcatttgctaatgttggcatgagcggcttaagccccaatggtgtggatttgagcatggaggcaaatgctatagctctgaaatatttaaatgaaaatcagctgtcacaactgtctgtcactcgatcgaaccaaaataattgtgacccattcagccttctccatattaatacagacagaagcacagtggggcttagtttaatttcaccaaacaacatgtcatttgcaaccaaaaaatatatgaagagatatggactcctacaaagcagtgacaatagtgaagatgaagaggaacctcccgacaatgcagatagcaagagtgaatatttattgaatcagaaccttaggtccatacctgaacagcttggtggtcagaaagagccttctaagaatgaccatgaaataattaattgttctaactgtgaatctgtggggaccaacgcagatacgccagtattgagaaatattacaaatgaagttttgcagacaaaagcaaaacagcagttgactgaaaagccagctttcttagtaaagaaccttaaaccaagtcctgcagtgaaccttcgaaccgggaaagcagagttcactcaacatcctgagaaagaaaatgaaggggacattacaatttttcctgaaagtttgcaaccttctgaaacgctaaagcagatgaatagcatgaattcagtaggcaccttcttagatgtaaaacgtctcagacagttaccaaaattattttaaccttttaactccctgcccttttaatacagggacagggtgtctcctgaagatacttagggaaaacaggagcctaccacaaggctcctgatcattctggagtcactgtttcttggtagcagccaattgggaagagtgacttctgtgagatggctggctggtgataggactaagttctcattgttcaaatagagctgttcaacatcactgaaacctttaagaaaagccctgagatcagttattcctacaagtttaagtagtagacagatactatccagctctaagtctcaactgctcttttatactgtacttttttttttgagacggagttttgctcttgtagcccaggctggagtgcaatggcaggatctcagatcactgcaacctctgcctcctgggttcaagcgattttcctgcttcatcttcccaggtagctgggattacaggcatgtgccacaacgcctggctaattttgtatttttagtagagactggtttctccatgttggtcaggctggtctcaaactcccgacctcaggtgatccgcccgcctcggcctcctaaagtgctgggattacaggcgtgagccactgcgcccagctatactgtatattttaagaagttccagcatgttgcatctctgcatttatcctatatcattaaaagaacataagttatcatggtgttgggtaaattagcgaaatcaacccttcctaagtttaagggaaaagttatttttaaaaacaacttaataaaaacttacactcttttatacaagagtgtatttccccttaattaggatgcatgttgattaaactcgagatacagctttttgcagtatggtgggttggttttggtgtaacatcttcaacatgtcacactggctatcaaagaataagaaaattattgagtatgagtgtgttttataaactttctgagtttttcagatgtcttaatattttttaatagaacttaataaaatgtctagattgactattttc

SEQ ID NO: 27275 - DNA, 2881 bp, Homo sapiens
  source 1..2881: mol_type = unassigned DNA
cagctttatgatgagaaacacagtccagaagttgaagctggagagccttccttgagaggaataccaaatcagttaaaccaggataaaccagctcttttgagacactgcaaaccttgcacagtgtgcatgcacacacccaagactgagtcagataatggaatgatgggactatctccagatgcatatcggttcctcacagaacaagacagacagctaagactacttcaggcacagattcagcgtttgttggaagcacagtctctgatgccctgttcccctaagacaactgctgttgaagacacagtgcaagctggaagacaaatggagttggtttctgtggaagcacagtcttcccctggcttgcacatgagaaaaggtgtaagcattgctgtgagcacaggtgctagcttgttttggaatgcagcaggtgaggatcaagagcctgactctcaaatgaagcaagatgataccaaaatttccagtgaggacatgaatttttctgtcgatattaataatgaagtcacaagtcttccaggtagtgcatcttcattaaaagcagttgatattcccagttttgaagagagcaacattgctgtggaagaagaatttaaccagccactttctgtatccaacagctcttctctagttgtgagaaaagaacctgatgtacctgtgttctttccaagtggccagctggcagaaagtgtaagcatgtgtttacagactggaccaacagggggtgccagtaacaattctgaaacatcagaggaaccaaaaattgagcatgtaatgcaacccttgcttcatcaaccatcagataaccagaaaatttaccaggatttattgggtcaagtaaaccacctattaaatagttcctccaaggaaactgagcagccgtctaccaaagcagtaattatcagtcatgaatgcaccagaacccaaaacgtttaccatacaaagaaaaaaacacatcattcaagactggtggacaaagattgtgtccttaatgcaactcttaagcaactaagaagccttggagtaaaaattgattctcccactaaagtgaagaaaaatgcacataacgtggatcacgccagtgtgttggcatgcatcagcccagaagcagtgatctctggattaaactgcatgtcatttgctaatgttggcatgagcggcttaagccccaatggtgtggatttgagcatggaggcaaatgctatagctctgaaatatttaaatgaaaatcagctgtcacaactgtctgtcactcgatcgaaccaaaataattgtgacccattcagccttctccatattaatacagacagaagcacagtggggcttagtttaatttcaccaaacaacatgtcatttgcaaccaaaaaatatatgaagagatatggactcctacaaagcagtgacaatagtgaagatgaagaggaacctcccgacaatgcagatagcaagagtgaatatttattgaatcagaaccttaggtccatacctgaacagcttggtggtcagaaagagccttctaagaatgaccatgaaataattaattgttctaactgtgaatctgtggggaccaacgcagatacgccagtattgagaaatattacaaatgaagttttgcagacaaaagcaaaacagcagttgactgaaaagccagctttcttagtaaagaaccttaaaccaagtcctgcagtgaaccttcgaaccgggaaagcagagttcactcaacatcctgagaaagaaaatgaaggggacattacaatttttcctgaaagtttgcaaccttctgaaacgctaaagcagatgaatagcatgaattcagtaggcaccttcttagatgtaaaacgtctcagacagttaccaaaattattttaaccttttaactccctgcccttttaatacagggacagggtgtctcctgaagatacttagggaaaacaggagcctaccacaaggctcctgatcattctggagtcactgtttcttggtagcagccaattgggaagagtgacttctgtgagatggctggctggtgataggactaagttctcattgttcaaatagagctgttcaacatcactgaaacctttaagaaaagccctgagatcagttattcctacaagtttaagtagtagacagatactatccagctctaagtctcaactgctcttttatactgtacttttttttttgagacggagttttgctcttgtagcccaggctggagtgcaatggcaggatctcagatcactgcaacctctgcctcctgggttcaagcgattttcctgcttcatcttcccaggtagctgggattacaggcatgtgccacaacgcctggctaattttgtatttttagtagagactggtttctccatgttggtcaggctggtctcaaactcccgacctcaggtgatccgcccgcctcggcctcctaaagtgctgggattacaggcgtgagccactgcgcccagctatactgtatattttaagaagttccagcatgttgcatctctgcatttatcctatatcattaaaagaacataagttatcatggtgttgggtaaattagcgaaatcaacccttcctaagtttaagggaaaagttatttttaaaaacaacttaataaaaacttacactcttttatacaagagtgtatttccccttaattaggatgcatgttgattaaactcgagatacagctttttgcagtatggtgggttggttttggtgtaacatcttcaacatgtcacactggctatcaaagaataagaaaattattgagtatgagtgtgttttataaactttctgagtttttcagatgtcttaatattttttaatagaacttaataaaatgtctagattgactattttc

SEQ ID NO: 27276 - DNA, 5009 bp, Homo sapiens
  source 1..5009: mol_type = unassigned DNA
gcgaccccaacgtcccagaggcggggccggagtcggcggtggcgctccttggagccggctcccgctcctaccctgcaaacagacctcagctccgcggaagttgcggatactgaggatttggaattaaagaaatcattcaccagacatcatggagcctatatatccttttgcacggccccagatgaataccaggtttccttcaagcaggatggtacctttccactttcctccatcaaaatgtgcactttggaacccaacgccaactggagatttcatctacttacatctcagttactacagaaatccaaagcttgtggtgactgagaagaccatccgacttgcttatcgtcatgctaagcagaataaaaaaaattcgtcatgctttttacttggttctctgacagcagacgaagatgaagaaggtgtaacattgacagtagatcgctttgatcctggtcgagaagtacctgaatgcctagaaataacccctactgcttctcttcctggggactttttgattccatgcaaagttcatactcaagaactttgttcaagagaaatgatagttcacagtgtagatgacttcagttcagctttaaaggctctacagtgccatatatgtagcaaagattccttggactgtggtaagctgctttccctaagagttcatatcacttccagggagagtttggacagtgtggaatttgacttgcattgggcagcagtaactctagcaaataactttaaatgcacacctgtgaagcccatccccattattccaacagctctggcaagaaacttgagcagtaatctgaatatttctcaagttcaagggacttataaatatggatatcttaccatggatgaaacacgcaaattgttacttttgttggaatctgatcccaaggtttattctctaccattggtgggaatttggctgtctggaattacacatatctatagtcctcaggtatgggcttgctgtttgcgatacatattcaattcttctgttcaagaaagggttttttcagaatctggaaatttcatcatagttctctattctatgacacataaggaacctgagttttatgaatgcttcccttgtgatggcaagatacctgactttcggtttcagttgctaaccagtaaggaaacattacatcttttcaaaaatgttgaacctcctgacaaaaatccaatccgttgtgaactgagcgctgaaagccaaaatgcagaaacagagtttttcagtaaggcttccaagaatttttcaattaagaggtcttcccaaaagttatcttctgggaagatgccaatacatgatcacgactctggtgttgaagatgaagatttttctccaagaccaattcctagtcctcatccagtgagtcagaagatttctaagatccaaccatcagttcctgaactttcacttgtgttggatggcaatttcatagaatcaaaccctctgcctactccattggaaatggtgaataatgaaaatcctcctttgattaaccacttggaacacttgaagccattgcaaccccagctttatgatgagaaacacagtccagaagttgaagctggagagccttccttgagaggaataccaaatcagttaaaccaggataaaccagctcttttgagacactgcaaagtaagacagccacctgcctataagaaagggaacccccataccaggaacagtattaaaccatcttctcataatgggccatctcatgatatatttgaaaagctccaaacagtttctgctggaaatgtacaaaacgaagagtatcctataagaccctccacacttaattctaggcagtcttctcttgccccgcagtcccaaccacacgattttgttttttcaccccataattcaggaagaccaatggaacttcagatacctactcccccactgccatcttactgttccacaaacgtttgcaggtgttgtcagcatcatagtcatattcaatatagtccgctaaattcttggcaaggagcaaacacagttggatccattcaagatgtccagtctgaagcccttcaaaagcattcattatttcacccaagtggatgtccagccctgtactgtaatgcattctgttcttcaagtagtcctatagccttgagacctcagggagatatgggcagttgttctccccacagcaatattgaaccatcgcctgtggcaagaccgccttcacatatggacttatgtaacccacagccttgcacagtgtgcatgcacacacccaagactgagtcagataatggaatgatgggactatctccagatgcatatcggttcctcacagaacaagacagacagctaagactacttcaggcacagattcagcgtttgttggaagcacagtctctgatgccctgttcccctaagacaactgctgttgaagacacagtgcaagctggaagacaaatggagttggtttctgtggaagcacagtcttcccctggcttgcacatgagaaaaggtgtaagcattgctgtgagcacaggtgctagcttgttttggaatgcagcaggtgaggatcaagagcctgactctcaaatgaagcaagatgataccaaaatttccagtgaggacatgaatttttctgtcgatattaataatgaagtcacaagtcttccaggtagtgcatcttcattaaaagcagttgatattcccagttttgaagagagcaacattgctgtggaagaagaatttaaccagccactttctgtatccaacagctcttctctagttgtgagaaaagaacctgatgtacctgtgttctttccaagtggccagctggcagaaagtgtaagcatgtgtttacagactggaccaacagggggtgccagtaacaattctgaaacatcagaggaaccaaaaattgagcatgtaatgcaacccttgcttcatcaaccatcagataaccagaaaatttaccaggatttattgggtcaagtaaaccacctattaaatagttcctccaaggaaactgagcagccgtctaccaaagcagtaattatcagtcatgaatgcaccagaacccaaaacgtttaccatacaaagaaaaaaacacatcattcaagactggtggacaaagattgtgtccttaatgcaactcttaagcaactaagaagccttggagtaaaaattgattctcccactaaagtgaagaaaaatgcacataacgtggatcacgccagtgtgttggcatgcatcagcccagaagcagtgatctctggattaaactgcatgtcatttgctaatgttggcatgagcggcttaagccccaatggtgtggatttgagcatggaggcaaatgctatagctctgaaatatttaaatgaaaatcagctgtcacaactgtctgtcactcgatcgaaccaaaataattgtgacccattcagccttctccatattaatacagacagaagcacagtggggcttagtttaatttcaccaaacaacatgtcatttgcaaccaaaaaatatatgaagagatatggactcctacaaagcagtgacaatagtgaagatgaagaggaacctcccgacaatgcagatagcaagagtgaatatttattgaatcagaaccttaggtccatacctgaacagcttggtggtcagaaagagccttctaagaatgaccatgaaataattaattgttctaactgtgaatctgtggggaccaacgcagatacgccagtattgagaaatattacaaatgaagttttgcagacaaaagcaaaacagcagttgactgaaaagccagctttcttagtaaagaaccttaaaccaagtcctgcagtgaaccttcgaaccgggaaagcagagttcactcaacatcctgagaaagaaaatgaaggggacattacaatttttcctgaaagtttgcaaccttctgaaacgctaaagcagatgaatagcatgaattcagtaggcaccttcttagatgtaaaacgtctcagacagttaccaaaattattttaaccttttaactccctgcccttttaatacagggacagggtgtctcctgaagatacttagggaaaacaggagcctaccacaaggctcctgatcattctggagtcactgtttcttggtagcagccaattgggaagagtgacttctgtgagatggctggctggtgataggactaagttctcattgttcaaatagagctgttcaacatcactgaaacctttaagaaaagccctgagatcagttattcctacaagtttaagtagtagacagatactatccagctctaagtctcaactgctcttttatactgtacttttttttttgagacggagttttgctcttgtagcccaggctggagtgcaatggcaggatctcagatcactgcaacctctgcctcctgggttcaagcgattttcctgcttcatcttcccaggtagctgggattacaggcatgtgccacaacgcctggctaattttgtatttttagtagagactggtttctccatgttggtcaggctggtctcaaactcccgacctcaggtgatccgcccgcctcggcctcctaaagtgctgggattacaggcgtgagccactgcgcccagctatactgtatattttaagaagttccagcatgttgcatctctgcatttatcctatatcattaaaagaacataagttatcatggtgttgggtaaattagcgaaatcaacccttcctaagtttaagggaaaagttatttttaaaaacaacttaataaaaacttacactcttttatacaagagtgtatttccccttaattaggatgcatgttgattaaactcgagatacagctttttgcagtatggtgggttggttttggtgtaacatcttcaacatgtcacactggctatcaaagaataagaaaattattgagtatgagtgtgttttataaactttctgagtttttcagatgtcttaatattttttaatagaacttaataaaatgtctagattgactatt

SEQ ID NO: 27277 - DNA, 999 bp, Homo sapiens
  source 1..999: mol_type = unassigned DNA
ggaggcggcatgagcagcgcgcgacagagctgacgccgcgcccccgccggccccatgtccttcgccacgctgcgcccggcgccgccgggccgctacctgtaccccgaggtgagcccgctgtcggaggacgaggaccgcggcagcgacagctcgggctccgacgagaaaccctgtcgcgtgcacgcggcgcgctgcggcctccagggcgcccggcggagggcggggggccggcgggccgggggcggggggccagggggccggccaggccgtgagccccggcagcggcacacggcgaacgcgcgcgagcgagaccgcaccaacagcgtgaacacggccttcacggcgctgcgcacgctgatccccaccgagcccgccgaccgcaagctctccaagattgagacgctgcgcctggcctccagctacatctcgcacctgggcaacgtgctgctggcgggcgaggcctgcggcgacggacagccctgccactccgggcccgccttcttccacgcggcgcgcgccggcagccccccgccgccgcccccgccgcctcccgcccgcgacggcgagaacacccagcccaaacagatctgcaccttctgcctcagcaaccagagaaagttgagcaaggaccgcgacagaaagacagcgattcgcagttaggaggtggccggcagcagccaggaggcagacgctgctgggggaggtggacgcccggggtgactgcagacagcccccaccttggacctgagctgggcaaggcccaccgcaagcatgcccccaggccagccctggctgcgagcggggccgagggacagacggacgtacagacaggcgccggcagcgggactctgcgctggccccagcacctgcccgggcccactggaactttctgcgctggcttttcttccggccactgtgtgatggcatcttgtgtttttgatatgataatataaagtctgaaaattttgtataattaaaaacaaaacagtatcttccaaa

SEQ ID NO: 27278 - DNA, 2296 bp, Homo sapiens
  source 1..2296: mol_type = unassigned DNA
agagcctgtgctactggaaggtggcgtgccctcctctggctggtaccatgcagctcccactggccctgtgtctcgtctgcctgctggtacacacagccttccgtgtagtggagggccaggggtggcaggcgttcaagaatgatgccacggaaatcatccccgagctcggagagtaccccgagcctccaccggagctggagaacaacaagaccatgaaccgggcggagaacggagggcggcctccccaccacccctttgagaccaaagacgtgtccgagtacagctgccgcgagctgcacttcacccgctacgtgaccgatgggccgtgccgcagcgccaagccggtcaccgagctggtgtgctccggccagtgcggcccggcgcgcctgctgcccaacgccatcggccgcggcaagtggtggcgacctagtgggcccgacttccgctgcatccccgaccgctaccgcgcgcagcgcgtgcagctgctgtgtcccggtggtgaggcgccgcgcgcgcgcaaggtgcgcctggtggcctcgtgcaagtgcaagcgcctcacccgcttccacaaccagtcggagctcaaggacttcgggaccgaggccgctcggccgcagaagggccggaagccgcggccccgcgcccggagcgccaaagccaaccaggccgagctggagaacgcctactagagcccgcccgcgcccctccccaccggcgggcgccccggccctgaacccgcgccccacatttctgtcctctgcgcgtggtttgattgtttatatttcattgtaaatgcctgcaacccagggcagggggctgagaccttccaggccctgaggaatcccgggcgccggcaaggcccccctcagcccgccagctgaggggtcccacggggcaggggagggaattgagagtcacagacactgagccacgcagccccgcctctggggccgcctacctttgctggtcccacttcagaggaggcagaaatggaagcattttcaccgccctggggttttaagggagcggtgtgggagtgggaaagtccagggactggttaagaaagttggataagattcccccttgcacctcgctgcccatcagaaagcctgaggcgtgcccagagcacaagactgggggcaactgtagatgtggtttctagtcctggctctgccactaacttgctgtgtaaccttgaactacacaattctccttcgggacctcaatttccactttgtaaaatgagggtggaggtgggaataggatctcgaggagactattggcatatgattccaaggactccagtgccttttgaatgggcagaggtgagagagagagagagaaagagagagaatgaatgcagttgcattgattcagtgccaaggtcacttccagaattcagagttgtgatgctctcttctgacagccaaagatgaaaaacaaacagaaaaaaaaaagtaaagagtctatttatggctgacatatttacggctgacaaactcctggaagaagctatgctgcttcccagcctggcttccccggatgtttggctacctccacccctccatctcaaagaaataacatcatccattggggtagaaaaggagagggtccgagggtggtgggagggatagaaatcacatccgccccaacttcccaaagagcagcatccctcccccgacccatagccatgttttaaagtcaccttccgaagagaagtgaaaggttcaaggacactggccttgcaggcccgagggagcagccatcacaaactcacagaccagcacatcccttttgagacaccgccttctgcccaccactcacggacacatttctgcctagaaaacagcttcttactgctcttacatgtgatggcatatcttacactaaaagaatattattgggggaaaaactacaagtgctgtacatatgctgagaaactgcagagcataatactgccacccaaaaatctttttgaaaatcatttccagacaacctcttactttctgtgtagtttttaattgttaaaaaaaaaaagttttaaacagaagcacatgacatatgaaagcctgcaggactggtcgtttttttggcaattcttccacgtgggacttgtccacaagaatgaaagtagtggtttttaaagagttaagttacatatttattttctcacttaagttatttatgcaaaagtttttcttgtagagaatgacaatgttaatattgctttatgaattaacagtctgttcttccagagtccagagacattgttaataaagacaatgaatcatgaccg

SEQ ID NO: 27279 - DNA, 1749 bp, Homo sapiens
  source 1..1749: mol_type = unassigned DNA
ggaagcggaacgctaccggaaatcgcggggagggtcaaaggagacccggtctccgaggctcatggcgatgctggtcctagtacccggacgagttatgcggcctctgggtggccaactttggcgcttcttgcctcgcggactcgagttttggggcccagccgaggggactgcgagagtcttgctgaggcagttctgcgcgcggcaagcggaggcgtggcgtgcctcggggcgccctggctattgcctgggaacccggcccctcagcactgcgaggccgccacccccgtggtcgcagaagggccccggagactccacgcgcccctcgaagcccgggcctgtttcctggaagtctttagcaatcacatttgctattggaggagctttactggctggaatgaagcacgtcaagaaagaaaaggcagagaagttagagaaggaacggcagcgacacatcggcaagcctttacttgggggaccgttttccctcacaactcatactggggagcgtaaaactgacaaggactacttgggtcagtggttattgatttattttggcttcactcattgccctgatgtctgtccagaagaactagaaaagatgattcaagtcgtggatgaaatagatagcattacaactctgccagatctaactccacttttcatcagcattgacccagagagggacacaaaagaagccatcgcaaattatgtgaaagaattttctcccaaactggttggcttgactggcacgagagaagaggtcgatcaagtggccagagcatacagagtgtattacagccctggccccaaggacgaagatgaagactacatagtggatcacacaataataatgtacttgattggaccagatggtgagtttctagattattttggccagaacaagaggaagggagaaatagctgcttcaattgccacacacatgaggccatacagaaaaaagagctagccaaagcagtgttgctggatgcagtattctcttgctaagaggaaggaaactgtctcgcataggagcctatataaatataaacatatatacgtgcactctacagaatggccttcataccatgagaacatttctgttttggatggggatgttacccttgcgttcaaccaaaattgattcttggaactgtaaagattacaacccaaagtctcccaggaagctgtggggagaccagaggatcaagctgaagtgaagccagtgaagagcccacctgtggaaggacatggcggggcgaggcacagccagtgcattcctgcctgcggacaggccctcccagcagctttgccgcctctccatcgtcttgggcccttgctcaaatagctgtgggactgaatttcacagaaaagaatataatttccatagtgctcttgcttgcctcttcttgagttctttgctcttctgagttcttggtggctaataacagtcagattagggtctctgccattcagagttgatgcttgaaaactttagttttccttattaatgaatatcactatcagatttgactaatgaagaggaaatctattgtttgggggaaaaaaaacatcagtttgatttctctaggggttcttttatgtgatttttagctaagtggtgtgccaggttttcagtgacataccaaatggaaataagaggatattgatcacgagtgtgatgctgagtacctttctgcatatactggattgtactttgtgtaaagtaaacatactcagttttgctgttca

SEQ ID NO: 27280 - DNA, 1601 bp, Homo sapiens
  source 1..1601: mol_type = unassigned DNA
aggagacccggtctccgaggctcatggcgatgctggtcctagtacccggacgagttatgcggcctctgggtggccaactttggcgcttcttgcctcgcggactcgagttttggggcccagccgaggggactgcgagagtcttgctgaggcagttctgcgcgcggcaagcggaggcgtggcgtgcctcggggcgccctggctattgcctgggaacccggcccctcagcactgcgaggccgccacccccgtggtcgcagaagggccccggagactccacgcgcccctcgaagcccgggcctgtttcctggaagtctttagcaatcacatttgctattggaggagctttactggctggaatgaagcacgtcaagaaagaaaaggcagagaagttagagaaggaacggcagcgacacatcggcaagcctttacttgggggaccgttttccctcacaactcatactggggagcgtaaaactgacaaggactacttggatagcattacaactctgccagatctaactccacttttcatcagcattgacccagagagggacacaaaagaagccatcgcaaattatgtgaaagaattttctcccaaactggttggcttgactggcacgagagaagaggtcgatcaagtggccagagcatacagagtgtattacagccctggccccaaggacgaagatgaagactacatagtggatcacacaataataatgtacttgattggaccagatggtgagtttctagattattttggccagaacaagaggaagggagaaatagctgcttcaattgccacacacatgaggccatacagaaaaaagagctagccaaagcagtgttgctggatgcagtattctcttgctaagaggaaggaaactgtctcgcataggagcctatataaatataaacatatatacgtgcactctacagaatggccttcataccatgagaacatttctgttttggatggggatgttacccttgcgttcaaccaaaattgattcttggaactgtaaagattacaacccaaagtctcccaggaagctgtggggagaccagaggatcaagctgaagtgaagccagtgaagagcccacctgtggaaggacatggcggggcgaggcacagccagtgcattcctgcctgcggacaggccctcccagcagctttgccgcctctccatcgtcttgggcccttgctcaaatagctgtgggactgaatttcacagaaaagaatataatttccatagtgctcttgcttgcctcttcttgagttctttgctcttctgagttcttggtggctaataacagtcagattagggtctctgccattcagagttgatgcttgaaaactttagttttccttattaatgaatatcactatcagatttgactaatgaagaggaaatctattgtttgggggaaaaaaaacatcagtttgatttctctaggggttcttttatgtgatttttagctaagtggtgtgccaggttttcagtgacataccaaatggaaataagaggatattgatcacgagtgtgatgctgagtacctttctgcatatactggattgtactttgtgtaaagtaaacata

SEQ ID NO: 27281 - DNA, 992 bp, Homo sapiens
  source 1..992: mol_type = unassigned DNA
tccggggacgcctgcgccctgcctgtgagcgtgtggcgcccgctttccctgagccggcggggcagagcgcagggagctggaggtcggcgcttcctctcgtgcttggtccactgacgcgcggccccgccgcgaggtgcggacgccggggctgggaggggaggaggagcatcagatccatgctgctgctgactcggagccccacagcttggcacaggctctctcagctcaagcctcgggtcctccctgggaccctgggaggccaggccctgcatctgaggtcctggcttttgtcaaggcagggccctgcagagacaggtgggcagggccagccccagggccctgggcttcgaacccggctgctgatcacaggcctgttcggggctggactcggtggggcctggctggccctgagggctgagaaggagaggctgcagcagcaaaagcgaacagaagccctgcgccaggcagctgtgggccagggcgacttccacctgctggatcacagaggccgggctcgctgcaaggctgacttccggggccagtgggtgctgatgtactttggcttcactcactgccctgacatctgcccagacgagctggagaagctggtgcaggtggtgcggcagctggaagcagagcctggtttgcctccagtgcagcctgtcttcatcactgtggaccccgagcgggacgacgttgaagccatggcccgctacgtccaggacttccacccaagactgttgggtctgaccggctccaccaaacaggttgcccaggctagtcacagttaccgcgtgtactacaatgcaggccccaaggatgaggaccaggactacatcgtggaccactccattgccatctacctgctcaaccctgacggcctcttcacggattactacggccggagcagatcggctgagcagatctcagacagtgtgcggcggcacatggcggctttccgcagtgtcctgtcttgagccactgcagtctgg

SEQ ID NO: 27282 - DNA, 992 bp, Homo sapiens
  source 1..992: mol_type = unassigned DNA
gctccggggacgcctgcgccctgcctgtgagcgtgtggcgcccgctttccctgagccggcggggcagagcgcagggagctggaggtcggcgcttcctctcgtgcttggtccactgacgcgcggccccgccgcgaggagcatcagatccatgctgctgctgactcggagccccacagcttggcacaggctctctcagctcaagcctcgggtcctccctgggaccctgggaggccaggccctgcatctgaggtcctggcttttgtcaaggcagggccctgcagagacaggtgggcagggccagccccagggccctgggcttcgaacccggctgctgatcacaggcctgttcggggctggactcggtggggcctggctggccctgagggctgagaaggagaggctgcagcagcaaaagcgaacagaagccctgcgccaggcagctgtgggccagggcgacttccacctgctggatcacagaggccgggctcgctgcaaggctgacttccggggccagtgggtgctgatgtactttggcttcactcactgccctgacatctgcccagacgagctggagaagctggtgcaggtggtgcggcagctggaagcagagcctggtttgcctccagtgcagcctgtcttcatcactgtggaccccgagcgggacgacgttgaagccatggcccgctacgtccaggacttccacccaagactgttgggtctgaccggctccaccaaacaggttgcccaggctagtcacagttaccgcgtgtactacaatgcaggccccaaggatgaggaccaggactacatcgtggaccactccattgccatctacctgctcaaccctgacggcctcttcacggattactacggccggagcagatcggctgagcagatctcagacagtgtgcggcggcacatggcggctttccgcagtgtcctgtcttgagccactgcagtctgggccccatcattaaacgggctgcgtttaa

SEQ ID NO: 27283 - DNA, 617 bp, Homo sapiens
  source 1..617: mol_type = unassigned DNA
tcaggcccagggcgctgcccgggtggccgcggcgctggacgacggctcggcccttggccgcttcgagcggatgctggcggcgcagggcgtggatcccggtctggcccgagccctgtgctcgggaagtcccgcagaacgccggcagctgctgcctcgcgcccgggagcaggaggagctgctggcgcccgcagatggagcatcagatccatgctgctgctgactcggagccccacagcttggcacaggctctctcagctcaagcctcgggtcctccctgggaccctgggaggccaggccctgcatctgaggtcctggcttttgtcaaggcagggccctgcagagacaggtgggcagggccagccccagggccctgggcttcgaacccggctgctgatcacaggcctgttcggggctggactcggtggggcctggctggccctgagggctgagaaggagaggctgcagcagcaaaagcgaacagaagccctgcgccaggcagctgtgggccagggcgacttccacctgctggatcacagaggccgggctcgctgcaaggctgacttccggggccagtgggtgctgatgtactttggcttcactcactgccctgacatctg

SEQ ID NO: 27284 - DNA, 568 bp, Homo sapiens
  source 1..568: mol_type = unassigned DNA
gcaggcaccgtggagctggtccgggcgctgccgctggcgctggtgctgcacgagctcggggccgggcgcagccgcgctggggagccgctccgcctgggggtgggcgcagagctgctggtcgacgtgggtcagaggctgcgccgtggagcatcagatccatgctgctgctgactcggagccccacagcttggcacaggctctctcagctcaagcctcgggtcctccctgggaccctgggaggccaggccctgcatctgaggtcctggcttttgtcaaggcagggccctgcagagacaggtgggcagggccagccccagggccctgggcttcgaacccggctgctgatcacaggcctgttcggggctggactcggtggggcctggctggccctgagggctgagaaggagaggctgcagcagcaaaagcgaacagaagccctgcgccaggcagctgtgggccagggcgacttccacctgctggatcacagaggccgggctcgctgcaaggctgacttccggggccagtgggtgctgatgtactttggcttcactcactgccctgacatctg

SEQ ID NO: 27285 - DNA, 1002 bp, Homo sapiens
  source 1..1002: mol_type = unassigned DNA
gcaggcaccgtggagctggtccgggcgctgccgctggcgctggtgctgcacgagctcggggccgggcgcagccgcgctggggagccgctccgcctgggggtgggcgcagagctgctggtcgacgtgggtcagaggctgcgccgtggagcatcagatccatgctgctgctgactcggagccccacagcttggcacaggctctctcagctcaagcctcgggtcctccctgggaccctgggaggccaggccctgcatctgaggtcctggcttttgtcaaggcagggccctgcagagacaggtgggcagggccagccccagggccctgggcttcgaacccggctgctgatcacaggcctgttcggggctggactcggtggggcctggctggccctgagggctgagaaggagaggctgcagcagcaaaagcgaacagaagccctgcgccaggcagctgtgggccagggcgacttccacctgctggatcacagaggccgggctcgctgcaaggctgacttccggggccagtgggtgctgatgtactttggcttcactcactgccctgacatctgcccagacgagctggagaagctggtgcaggtggtgcggcagctggaagcagagcctggtttgcctccagtgcagcctgtcttcatcactgtggaccccgagcgggacgacgttgaagccatggcccgctacgtccaggacttccacccaagactgttgggtctgaccggctccaccaaacaggttgcccaggctagtcacagttaccgcgtgtactacaatgcaggccccaaggatgaggaccaggactacatcgtggaccactccattgccatctacctgctcaaccctgacggcctcttcacggattactacggccggagcagatcggctgagcagatctcagacagtgtgcggcggcacatggcggctttccgcagtgtcctgtcttgagccactgcagtctgggccccatcattaaacgggctgcgtttaa

SEQ ID NO: 27286 - DNA, 1051 bp, Homo sapiens
  source 1..1051: mol_type = unassigned DNA
tcaggcccagggcgctgcccgggtggccgcggcgctggacgacggctcggcccttggccgcttcgagcggatgctggcggcgcagggcgtggatcccggtctggcccgagccctgtgctcgggaagtcccgcagaacgccggcagctgctgcctcgcgcccgggagcaggaggagctgctggcgcccgcagatggagcatcagatccatgctgctgctgactcggagccccacagcttggcacaggctctctcagctcaagcctcgggtcctccctgggaccctgggaggccaggccctgcatctgaggtcctggcttttgtcaaggcagggccctgcagagacaggtgggcagggccagccccagggccctgggcttcgaacccggctgctgatcacaggcctgttcggggctggactcggtggggcctggctggccctgagggctgagaaggagaggctgcagcagcaaaagcgaacagaagccctgcgccaggcagctgtgggccagggcgacttccacctgctggatcacagaggccgggctcgctgcaaggctgacttccggggccagtgggtgctgatgtactttggcttcactcactgccctgacatctgcccagacgagctggagaagctggtgcaggtggtgcggcagctggaagcagagcctggtttgcctccagtgcagcctgtcttcatcactgtggaccccgagcgggacgacgttgaagccatggcccgctacgtccaggacttccacccaagactgttgggtctgaccggctccaccaaacaggttgcccaggctagtcacagttaccgcgtgtactacaatgcaggccccaaggatgaggaccaggactacatcgtggaccactccattgccatctacctgctcaaccctgacggcctcttcacggattactacggccggagcagatcggctgagcagatctcagacagtgtgcggcggcacatggcggctttccgcagtgtcctgtcttgagccactgcagtctgggccccatcattaaacgggctgcgtttaa

SEQ ID NO: 27287 - DNA, 1282 bp, Homo sapiens
  source 1..1282: mol_type = unassigned DNA
gtggggacccgcgctgcctccgccgctcctcggatggtgacggggccctgccgccgcagcccccccaagccccggctccgcaggcccacagcgccggagccccgcaggaatcatgcccaggtccttcctggtcaagaaggtcaaacttgacgcgttctcttcggccgacctggagagcgcctacggacgcgcccgcagcgacctcggcgcgccactgcacgataaagggtacctcagcgactacgtggggccctcgtccgtctacgatggcgacgccgaggctgcgctgctcaaagggccgtcgccggagcccatgtacgcagcagctgtgcgtggagagctgggtccggcggctgcagggtctgcgccgccgcccaccccgcgcccggagctggccaccgctgcgggcggctacatcaacggcgacgcggccgtcagcgagggctacgcggcggacgccttcttcatcaccgacgggcgctcgcggcgtaaggcttccaatgccggctctgccgccgctccctccacagcctcggcggcggcccccgacggcgacgccggaggcgggggcggggcgggcgggcgcagcttgggatccgggccggggggccggggcggcacgcgcgcgggggcaggcaccgaggcgcgcgcggggccaggggccgcaggtgctggcggccggcacgcgtgcggcgagtgcggcaaaacatacgccacgtcgtcgaacctgagccgccacaagcagacgcaccgcagcctggacagccagctggcgcggcgctgcccgacgtgcggcaaggtgtacgtgtccatgccggccatggccatgcacctgctcacgcacgacctgcgccacaagtgcggcgtgtgcggcaaagccttctcgcggccctggctgctgcagggccacatgcgctcgcacaccggcgagaaacccttcggctgcgcgcactgcggcaaggccttcgccgaccgctccaacctgcgcgcgcacatgcagacgcattcggccttcaagcacttccagtgcaagcgctgcaagaagagcttcgcgctcaagtcctatctcaacaagcactacgagtcggcctgcttcaagggcggcgccggaggccccgcggctcctgcgccgccacagctcagccctgtgcaggcctagggcggcggggcctcccccagccaggtcggctctcagcaatacggccccccagggaagtcttcgctggcgtccgggtggaggggccggagggcgggcccctcctcacagcaatagggggagggg

SEQ ID NO: 27288 - DNA, 5143 bp, Homo sapiens
  source 1..5143: mol_type = unassigned DNA
ccgcaccatgctcaagtgcatcccgctgtggcgctgcaaccggcacgtggagtcggtggacaagcggcactgttcgctgcaggccgtgccggaggagatctaccgctacagccgcagcctggaggagctgctgctcgacgccaaccagctgcgcgagctgcccaagccttttttccggctgctgaacttgcgcaagctgggcctgagcgacaacgagatccagcggttgcctcccgaggtggccaacttcatgcagctggtggagctggacgtgtcccggaacgatatccctgagatcccggagagcatcaagttctgcaaggctctggagatcgcggacttcagcgggaaccccctctccaggctccctgatggcttcactcagctgcgcagcctggctcacctggccctgaatgatgtgtctctgcaggcactgcccggggacgtgggcaacctcgccaacctggtgaccctggagctccgggagaacctgctcaagtccctgccagcgtccctgtcatttctggtcaagctggaacagctggatctgggaggcaacgatctggaagtgctgccagacactctgggggctctgcccaatcttcgggagctgtggcttgaccggaaccagctgtcagcactgcccccggagctcgggaacctgcggcgcctggtgtgcctggacgtgtcggaaaaccggctggaggagctgcctgctgagctcggcgggctggtgctgctcactgacctgctgctgtcccagaacctgctgcggaggctgcccgacggcatcggtcagctgaagcagctatccatcctaaaggtagaccagaatcggctgtgcgaggtgaccgaggccatcggggactgtgagaacctctctgagctgatcctcacggagaacctgctgatggccctgccccgctccctgggaaagctgactaagctgaccaacctcaacgtggaccggaaccacctcgaggcgctgccgcccgagatcgggggctgtgtggcactcagcgtcctctccttgagggacaaccgcctggccgtcctgccaccagagctggcccacacgacagagctgcacgtgctggacgtggcggggaaccgcctgcagagtctgccgttcgcgctcacccacctcaatctcaaggccctgtggctggcagagaaccaggcgcagcccatgctccggttccagacggaggatgatgcccggaccggcgagaaggtgctcacctgctacttgctgccccagcagcccccacccagcctcgaggatgctgggcagcaggggagcctctcggagacctggagcgatgccccgccgagccgcgtcagcgtcatccagttcctggaggcccccataggtgatgaggacgctgaggaagctgcagctgagaagcggggcctacagcgccgggccacacctcaccccagcgagctcaaggtgatgaagaggagcatcgaggggcggcggagcgaggcctgcccttgccagccagactctgggtcgcccttgcctgcagaggaggagaagcggctgagtgccgagtctggcctgagtgaagactctcgcccatctgccagcacagtctctgaggctgagcccgagggcccgtcggctgaggcacagggtgggagccagcaggaagccacgactgctggcggggaggaagacgccgaagaggactaccaggagcccacggtgcatttcgcagaggacgcactgctgcccggggatgacagggagatcgaggaggggcagcctgaggccccctggaccctgccaggcgggaggcagcggctcatccgcaaggacacacctcactacaaaaagcacttcaagatctccaagctgccccagcccgaggccgttgtggctctgctgcagggcatgcagcctgatggggagggccctgtggctcccgggggctggcacaatggcccccacgcaccctgggctcctcgggcccagaaggaggaggaggaggaggaagagggtagtcctcaggaggaggaggtagaggaggaggaggaaaacagggctgaagaggaagaggccagcactgaggaggaggacaaggagggggccgtggtttctgcgccctctgtcaagggagtgtcgtttgaccaggccaataacctgctgatagagcctgctcgcattgaggaggaagagctgaccctcactatcctgcggcagactgggggcctgggcatcagcattgcgggcggcaagggctccacaccctataagggggacgacgagggcatattcatctctcgggtgtccgaggaaggccctgcggcccgggctggagtccgtgtgggtgacaagctcctggaggtgaatggtgtggctctgcagggcgccgagcaccacgaggccgtggaggcgctccggggggccggcactgccgtgcagatgcgagtgtggcgggagcgcatggtggagcctgagaacgcggtcaccatcacgccgctgcggcccgaggatgattacagcccccgagagcggcggggaggggggctgcgcctgcccctgctcccgcctgagagccccgggcccctccgtcagcgccacgtggcctgcctggcacgcagcgagagggggctgggcttcagcattgctggtgggaaaggctccacaccctacagggctggtgatgcgggcatcttcgtctcccgcattgccgagggcggtgctgctcaccgcgcgggcacactgcaggttggcgaccgcgtcctctctattaatggagtggacgtgactgaggccaggcatgaccacgccgtctccctgctgaccgctgcctcccccaccatcgccctgctgttggagcgggaggctgggggccctcttcctcccagccctctgccacattcctcaccccccaccgctgctgttgccaccaccagcataaccactgccacccccggggtgcctgggttgccgagcctggcccccagcctgctggctgccgcgttggaagggccatacccagtggaggagatccgtctgccaagagctgggggccctctggggcttagtattgtcggaggctccgaccattccagccacccgtttggtgtccaggagcctggtgtgttcatctccaaggtgctcccgcggggcctggccgctcgcagcggcctgcgggttggggaccgcatcctggcagtgaacgggcaagacgtgcgggatgccacgcaccaagaagcagtcagtgccctgctccggccctgcctggagctgtcgctgctggtgcggagggacccggcacccccgggcctacgggaactgtgcatccagaaggcacctggggagaggctgggcatcagcatccgcgggggtgccaggggccacgctggcaacccccgcgaccccacagacgagggcatcttcatctccaaggtgagccccacgggggcagccgggcgcgacggtcggctgcgtgtgggtttgcggctgttggaggtgaaccagcagagcctgctgggcctgacgcacggcgaggcggtgcagctgctccgcagtgtgggcgacaccctcaccgtgctggtctgtgacggctttgaggccagcaccgacgcagccctggaggtgtccccaggtgtcattgccaacccctttgcggcaggcatcggccaccggaacagcctggagagcatctcttccatcgaccgggagctgagccctgagggcccaggcaaggagaaggagctgcctggacagaccctgcactgggggcccgaggccacagaagccgcaggtcggggtctgcagcccctgaagctggactaccgcgccctggccgccgtgcccagcgctggcagcgtgcagagggtaccgtctggagcagctggagggaagatggctgaatctccctgctcccctagtggccagcagccgccctccccgccttctccggatgagctgcccgccaatgtgaagcaggcctacagggccttcgcggccgtgcccacttctcacccgcctgaggatgcccctgcccagccccccacgcctgggcctgcagcctccccggagcagctgtccttccgggagcggcagaagtactttgagctggaggtgcgcgtgccccaggccgagggcccccctaagcgcgtgtccctggtgggtgctgacgacctgcggaagatgcaggaggaggaagccagaaaactacagcagaagagagcgcagatgctgcgggaggcggcagaggctggggccgaagcgaggctcgccctggacggggagacgctgggcgaggaggaacaggaggatgagcagccaccctgggccagcccgagccccacctcaaggcagagcccggcgtcccccccacccctgggaggtggcgccccggtgcggacggccaaagctgaacggcgccaccaggagcggctgcgcgtgcagagtccggagccaccggcacccgagcgtgccctgtcccctgccgagctccgggccctggaggccgagaagcgtgcgctgtggagggcagccaggatgaagtcattggaacaggacgctctccgagcacagatggtcctcagcaggtcccaggaaggccggggcacgcgggggcccctggagcgactggccgaggccccttcccctgcgcccaccccgtcgcccacccctgtggaagacctcggcccccagaccagcacctccccgggacgcctgtcaccggactttgctgaggagttgaggtccctggaaccatctcccagccctggcccgcaggaggaggatggagaagtggctctggtgcttctgggcaggccctcacccggcgctgtgggccctgaagatgtggcactgtgcagcagccgccgccccgtaaggcctgggcgccgtggcctgggccctgtgccctcctagaggagcaggcacctcccccagacttggggtgggggccctgccagctccagcaccacccttgccccaagtcttttaacctgggtgttagcattttaaagagaccccacaggagttctggcctgtgactaactaactgccccaccccagccgagacctcggcgagactgtaactagtgatgtttgtacaaccaaagactctattttgtggtttaaggagaataaagttgactacattttacctcc

SEQ ID NO: 27289 - DNA, 5108 bp, Homo sapiens
  source 1..5108: mol_type = unassigned DNA
gagtgaaacccgtggggattcagggaggtggatggggttagggtggaacttggattcaggtggctgatgagtactagcttcttgggccgctctggaggtgggtccagacctcctctccttttttgctgggtgcagggccttttttccggctgctgaacttgcgcaagctgggcctgagcgacaacgagatccagcggttgcctcccgaggtggccaacttcatgcagctggtggagctggacgtgtcccggaacgatatccctgagatcccggagagcatcaagttctgcaaggctctggagatcgcggacttcagcgggaaccccctctccaggctccctgatggcttcactcagctgcgcagcctggctcacctggccctgaatgatgtgtctctgcaggcactgcccggggacgtgggcaacctcgccaacctggtgaccctggagctccgggagaacctgctcaagtccctgccagcgtccctgtcatttctggtcaagctggaacagctggatctgggaggcaacgatctggaagtgctgccagacactctgggggctctgcccaatcttcgggagctgtggcttgaccggaaccagctgtcagcactgcccccggagctcgggaacctgcggcgcctggtgtgcctggacgtgtcggaaaaccggctggaggagctgcctgctgagctcggcgggctggtgctgctcactgacctgctgctgtcccagaacctgctgcggaggctgcccgacggcatcggtcagctgaagcagctatccatcctaaaggtagaccagaatcggctgtgcgaggtgaccgaggccatcggggactgtgagaacctctctgagctgatcctcacggagaacctgctgatggccctgccccgctccctgggaaagctgactaagctgaccaacctcaacgtggaccggaaccacctcgaggcgctgccgcccgagatcgggggctgtgtggcactcagcgtcctctccttgagggacaaccgcctggccgtcctgccaccagagctggcccacacgacagagctgcacgtgctggacgtggcggggaaccgcctgcagagtctgccgttcgcgctcacccacctcaatctcaaggccctgtggctggcagagaaccaggcgcagcccatgctccggttccagacggaggatgatgcccggaccggcgagaaggtgctcacctgctacttgctgccccagcagcccccacccagcctcgaggatgctgggcagcaggggagcctctcggagacctggagcgatgccccgccgagccgcgtcagcgtcatccagttcctggaggcccccataggtgatgaggacgctgaggaagctgcagctgagaagcggggcctacagcgccgggccacacctcaccccagcgagctcaaggtgatgaagaggagcatcgaggggcggcggagcgaggcctgcccttgccagccagactctgggtcgcccttgcctgcagaggaggagaagcggctgagtgccgagtctggcctgagtgaagactctcgcccatctgccagcacagtctctgaggctgagcccgagggcccgtcggctgaggcacagggtgggagccagcaggaagccacgactgctggcggggaggaagacgccgaagaggactaccaggagcccacggtgcatttcgcagaggacgcactgctgcccggggatgacagggagatcgaggaggggcagcctgaggccccctggaccctgccaggcgggaggcagcggctcatccgcaaggacacacctcactacaaaaagcacttcaagatctccaagctgccccagcccgaggccgttgtggctctgctgcagggcatgcagcctgatggggagggccctgtggctcccgggggctggcacaatggcccccacgcaccctgggctcctcgggcccagaaggaggaggaggaggaggaagagggtagtcctcaggaggaggaggtagaggaggaggaggaaaacagggctgaagaggaagaggccagcactgaggaggaggacaaggagggggccgtggtttctgcgccctctgtcaagggagtgtcgtttgaccaggccaataacctgctgatagagcctgctcgcattgaggaggaagagctgaccctcactatcctgcggcagactgggggcctgggcatcagcattgcgggcggcaagggctccacaccctataagggggacgacgagggcatattcatctctcgggtgtccgaggaaggccctgcggcccgggctggagtccgtgtgggtgacaagctcctggaggtgaatggtgtggctctgcagggcgccgagcaccacgaggccgtggaggcgctccggggggccggcactgccgtgcagatgcgagtgtggcgggagcgcatggtggagcctgagaacgcggtcaccatcacgccgctgcggcccgaggatgattacagcccccgagagcggcggggaggggggctgcgcctgcccctgctcccgcctgagagccccgggcccctccgtcagcgccacgtggcctgcctggcacgcagcgagagggggctgggcttcagcattgctggtgggaaaggctccacaccctacagggctggtgatgcgggcatcttcgtctcccgcattgccgagggcggtgctgctcaccgcgcgggcacactgcaggttggcgaccgcgtcctctctattaatggagtggacgtgactgaggccaggcatgaccacgccgtctccctgctgaccgctgcctcccccaccatcgccctgctgttggagcgggaggctgggggccctcttcctcccagccctctgccacattcctcaccccccaccgctgctgttgccaccaccagcataaccactgccacccccggggtgcctgggttgccgagcctggcccccagcctgctggctgccgcgttggaagggccatacccagtggaggagatccgtctgccaagagctgggggccctctggggcttagtattgtcggaggctccgaccattccagccacccgtttggtgtccaggagcctggtgtgttcatctccaaggtgctcccgcggggcctggccgctcgcagcggcctgcgggttggggaccgcatcctggcagtgaacgggcaagacgtgcgggatgccacgcaccaagaagcagtcagtgccctgctccggccctgcctggagctgtcgctgctggtgcggagggacccggcacccccgggcctacgggaactgtgcatccagaaggcacctggggagaggctgggcatcagcatccgcgggggtgccaggggccacgctggcaacccccgcgaccccacagacgagggcatcttcatctccaaggtgagccccacgggggcagccgggcgcgacggtcggctgcgtgtgggtttgcggctgttggaggtgaaccagcagagcctgctgggcctgacgcacggcgaggcggtgcagctgctccgcagtgtgggcgacaccctcaccgtgctggtctgtgacggctttgaggccagcaccgacgcagccctggaggtgtccccaggtgtcattgccaacccctttgcggcaggcatcggccaccggaacagcctggagagcatctcttccatcgaccgggagctgagccctgagggcccaggcaaggagaaggagctgcctggacagaccctgcactgggggcccgaggccacagaagccgcaggtcggggtctgcagcccctgaagctggactaccgcgccctggccgccgtgcccagcgctggcagcgtgcagagggtaccgtctggagcagctggagggaagatggctgaatctccctgctcccctagtggccagcagccgccctccccgccttctccggatgagctgcccgccaatgtgaagcaggcctacagggccttcgcggccgtgcccacttctcacccgcctgaggatgcccctgcccagccccccacgcctgggcctgcagcctccccggagcagctgtccttccgggagcggcagaagtactttgagctggaggtgcgcgtgccccaggccgagggcccccctaagcgcgtgtccctggtgggtgctgacgacctgcggaagatgcaggaggaggaagccagaaaactacagcagaagagagcgcagatgctgcgggaggcggcagaggctggggccgaagcgaggctcgccctggacggggagacgctgggcgaggaggaacaggaggatgagcagccaccctgggccagcccgagccccacctcaaggcagagcccggcgtcccccccacccctgggaggtggcgccccggtgcggacggccaaagctgaacggcgccaccaggagcggctgcgcgtgcagagtccggagccaccggcacccgagcgtgccctgtcccctgccgagctccgggccctggaggccgagaagcgtgcgctgtggagggcagccaggatgaagtcattggaacaggacgctctccgagcacagatggtcctcagcaggtcccaggaaggccggggcacgcgggggcccctggagcgactggccgaggccccttcccctgcgcccaccccgtcgcccacccctgtggaagacctcggcccccagaccagcacctccccgggacgcctgtcaccggactttgctgaggagttgaggtccctggaaccatctcccagccctggcccgcaggaggaggatggagaagtggctctggtgcttctgggcaggccctcacccggcgctgtgggccctgaagatgtggcactgtgcagcagccgccgccccgtaaggcctgggcgccgtggcctgggccctgtgccctcctagaggagcaggcacctcccccagacttggggtgggggccctgccagctccagcaccacccttgccccaagtcttttaacctgggtgttagcattttaaagagaccccacaggagttctggcctgtgactaactaactgccccaccccagccgagacctcggcgagactgtaactagtgatgtttgtacaaccaaagactctattttgtggtttaaggagaataaagttgactacatttt

SEQ ID NO: 27290 - DNA, 4168 bp, Homo sapiens
  source 1..4168: mol_type = unassigned DNA
ccgcaccatgctcaagtgcatcccgctgtggcgctgcaaccggcacgtggagtcggtggacaagcggcactgttcgctgcaggccgtgccggaggagatctaccgctacagccgcagcctggaggagctgctgctcgacgccaaccagctgcgcgagctgcccaagccttttttccggctgctgaacttgcgcaagctgggcctgagcgacaacgagatccagcggttgcctcccgaggtggccaacttcatgcagctggtggagctggacgtgtcccggaacgatatccctgagatcccggagagcatcaagttctgcaaggctctggagatcgcggacttcagcgggaaccccctctccaggctccctgatggcttcactcagctgcgcagcctggctcacctggccctgaatgatgtgtctctgcaggcactgcccggggacgtgggcaacctcgccaacctggtgaccctggagctccgggagaacctgctcaagtccctgccagcgtccctgtcatttctggtcaagctggaacagctggatctgggaggcaacgatctggaagtgctgccagacactctgggggctctgcccaatcttcgggagctgtggcttgaccggaaccagctgtcagcactgcccccggagctcgggaacctgcggcgcctggtgtgcctggacgtgtcggaaaaccggctggaggagctgcctgctgagctcggcgggctggtgctgctcactgacctgctgctgtcccagaacctgctgcggaggctgcccgacggcatcggtcagctgaagcagctatccatcctaaaggtagaccagaatcggctgtgcgaggtgaccgaggccatcggggactgtgagaacctctctgagctgatcctcacggagaacctgctgatggccctgccccgctccctgggaaagctgactaagctgaccaacctcaacgtggaccggaaccacctcgaggcgctgccgcccgagatcgggggctgtgtggcactcagcgtcctctccttgagggacaaccgcctggccgtcctgccaccagagctggcccacacgacagagctgcacgtgctggacgtggcggggaaccgcctgcagagtctgccgttcgcgctcacccacctcaatctcaaggccctgtggctggcagagaaccaggcgcagcccatgctccggttccagacggaggatgatgcccggaccggcgagaaggtgctcacctgctacttgctgccccagcagcccccacccagcctcgaggatgctgggcagcaggggagcctctcggagacctggagcgatgccccgccgagccgcgtcagcgtcatccagttcctggaggcccccataggtgatgaggacgctgaggaagctgcagctgagaagcggggcctacagcgccgggccacacctcaccccagcgagctcaaggtgatgaagaggagcatcgaggggcggcggagcgaggcctgcccttgccagccagactctgggtcgcccttgcctgcagaggaggagaagcggctgagtgccgagtctggcctgagtgaagactctcgcccatctgccagcacagtctctgaggctgagcccgagggcccgtcggctgaggcacagggtgggagccagcaggaagccacgactgctggcggggaggaagacgccgaagaggactaccaggagcccacggtgcatttcgcagaggacgcactgctgcccggggatgacagggagatcgaggaggggcagcctgaggccccctggaccctgccaggcgggaggcagcggctcatccgcaaggacacacctcactacaaaaagcacttcaagatctccaagctgccccagcccgaggccgttgtggctctgctgcagggcatgcagcctgatggggagggccctgtggctcccgggggctggcacaatggcccccacgcaccctgggctcctcgggcccagaaggaggaggaggaggaggaagagggtagtcctcaggaggaggaggtagaggaggaggaggaaaacagggctgaagaggaagaggccagcactgaggaggaggacaaggagggggccgtggtttctgcgccctctgtcaagggagtgtcgtttgaccaggccaataacctgctgatagagcctgctcgcattgaggaggaagagctgaccctcactatcctgcggcagactgggggcctgggcatcagcattgcgggcggcaagggctccacaccctataagggggacgacgagggcatattcatctctcgggtgtccgaggaaggccctgcggcccgggctggagtccgtgtgggtgacaagctcctggaggtgaatggtgtggctctgcagggcgccgagcaccacgaggccgtggaggcgctccggggggccggcactgccgtgcagatgcgagtgtggcgggagcgcatggtggagcctgagaacgcggtcaccatcacgccgctgcggcccgaggatgattacagcccccgagagcggcggggaggggggctgcgcctgcccctgctcccgcctgagagccccgggcccctccgtcagcgccacgtggcctgcctggcacgcagcgagagggggctgggcttcagcattgctggtgggaaaggctccacaccctacagggctggtgatgcgggcatcttcgtctcccgcattgccgagggcggtgctgctcaccgcgcgggcacactgcaggttggcgaccgcgtcctctctattaatggagtggacgtgactgaggccaggcatgaccacgccgtctccctgctgaccgctgcctcccccaccatcgccctgctgttggagcgggaggctgggggccctcttcctcccagccctctgccacattcctcaccccccaccgctgctgttgccaccaccagcataaccactgccacccccggggtgcctgggttgccgagcctggcccccagcctgctggctgccgcgttggaagggccatacccagtggaggagatccgtctgccaagagctgggggccctctggggcttagtattgtcggaggctccgaccattccagccacccgtttggtgtccaggagcctggtgtgttcatctccaaggtgctcccgcggggcctggccgctcgcagcggcctgcgggttggggaccgcatcctggcagtgaacgggcaagacgtgcgggatgccacgcaccaagaagcagtcagtgccctgctccggccctgcctggagctgtcgctgctggtgcggagggacccggcacccccgggcctacgggaactgtgcatccagaaggcacctggggagaggctgggcatcagcatccgcgggggtgccaggggccacgctggcaacccccgcgaccccacagacgagggcatcttcatctccaaggtgagccccacgggggcagccgggcgcgacggtcggctgcgtgtgggtttgcggctgttggaggtgaaccagcagagcctgctgggcctgacgcacggcgaggcggtgcagctgctccgcagtgtgggcgacaccctcaccgtgctggtctgtgacggctttgaggccagcaccgacgcagccctggaggtgtccccaggtgtcattgccaacccctttgcggcaggcatcggccaccggaacagcctggagagcatctcttccatcgaccgggagctgagccctgagggcccaggcaaggagaaggagctgcctggacagaccctgcactgggggcccgaggccacagaagccgcaggtcggggtctgcagcccctgaagctggactaccgcgccctggccgccgtgcccagcgctggcagcgtgcagagggtaccgtctggagcagctggagggaagatggctgaatctccctgctcccctagtggccagcagccgccctccccgccttctccggatgagctgcccgccaatgtgaagcaggcctacagggccttcgcggccgtgcccacttctcacccgcctgaggatgcccctgcccagccccccacgcctgggcctgcagcctccccggagcagctgtccttccgggagcggcagaagtactttgagctggaggtgcgcgtgccccaggccgagggccccctaaggcctgggcgccgtggcctgggccctgtgccctcctag

SEQ ID NO: 27291 - DNA, 5218 bp, Homo sapiens
  source 1..5218: mol_type = unassigned DNA
ccgcaccatgctcaagtgcatcccgctgtggcgctgcaaccggcacgtggagtcggtggacaagcggcactgttcgctgcaggccgtgccggaggagatctaccgctacagccgcagcctggaggagctgctgctcgacgccaaccagctgcgcgagctgcccaagccttttttccggctgctgaacttgcgcaagctgggcctgagcgacaacgagatccagcggttgcctcccgaggtggccaacttcatgcagctggtggagctggacgtgtcccggaacgatatccctgagatcccggagagcatcaagttctgcaaggctctggagatcgcggacttcagcgggaaccccctctccaggctccctgatggcttcactcagctgcgcagcctggctcacctggccctgaatgatgtgtctctgcaggcactgcccggggacgtgggcaacctcgccaacctggtgaccctggagctccgggagaacctgctcaagtccctgccagcgtccctgtcatttctggtcaagctggaacagctggatctgggaggcaacgatctggaagtgctgccagacactctgggggctctgcccaatcttcgggagctgtggcttgaccggaaccagctgtcagcactgcccccggagctcgggaacctgcggcgcctggtgtgcctggacgtgtcggaaaaccggctggaggagctgcctgctgagctcggcgggctggtgctgctcactgacctgctgctgtcccagaacctgctgcggaggctgcccgacggcatcggtcagctgaagcagctatccatcctaaaggtagaccagaatcggctgtgcgaggtgaccgaggccatcggggactgtgagaacctctctgagctgatcctcacggagaacctgctgatggccctgccccgctccctgggaaagctgactaagctgaccaacctcaacgtggaccggaaccacctcgaggcgctgccgcccgagatcgggggctgtgtggcactcagcgtcctctccttgagggacaaccgcctggccgtcctgccaccagagctggcccacacgacagagctgcacgtgctggacgtggcggggaaccgcctgcagagtctgccgttcgcgctcacccacctcaatctcaaggccctgtggctggcagagaaccaggcgcagcccatgctccggttccagacggaggatgatgcccggaccggcgagaaggtgctcacctgctacttgctgccccagcagcccccacccagcctcgaggatgctgggcagcaggggagcctctcggagacctggagcgatgccccgccgagccgcgtcagcgtcatccagttcctggaggcccccataggtgatgaggacgctgaggaagctgcagctgagaagcggggcctacagcgccgggccacacctcaccccagcgagctcaaggtgatgaagaggagcatcgaggggcggcggagcgaggcctgcccttgccagccagactctgggtcgcccttgcctgcagaggaggagaagcggctgagtgccgagtctggcctgagtgaagactctcgcccatctgccagcacagtctctgaggctgagcccgagggcccgtcggctgaggcacagggtgggagccagcaggaagccacgactgctggcggggaggaagacgccgaagaggactaccaggagcccacggtgcatttcgcagaggacgcactgctgcccggggatgacagggagatcgaggaggggcagcctgaggccccctggaccctgccaggcgggaggcagcggctcatccgcaaggacacacctcactacaaaaagcacttcaagatctccaagctgccccagcccgaggccgttgtggctctgctgcagggcatgcagcctgatggggagggccctgtggctcccgggggctggcacaatggcccccacgcaccctgggctcctcgggcccagaaggaggaggaggaggaggaagagggtagtcctcaggaggaggaggtagaggaggaggaggaaaacagggctgaagaggaagaggccagcactgaggaggaggacaaggagggggccgtggtttctgcgccctctgtcaagggagtgtcgtttgaccaggccaataacctgctgatagagcctgctcgcattgaggaggaagagctgaccctcactatcctgcggcagactgggggcctgggcatcagcattgcgggcggcaagggctccacaccctataagggggacgacgagggcatattcatctctcgggtgtccgaggaaggccctgcggcccgggctggagtccgtgtgggtgacaagctcctggaggtgaatggtgtggctctgcagggcgccgagcaccacgaggccgtggaggcgctccggggggccggcactgccgtgcagatgcgagtgtggcgggagcgcatggtggagcctgagaacgcggtcaccatcacgccgctgcggcccgaggatgattacagcccccgagagcggcggggaggggggctgcgcctgcccctgctcccgcctgagagccccgggcccctccgtcagcgccacgtggcctgcctggcacgcagcgagagggggctgggcttcagcattgctggtgggaaaggctccacaccctacagggctggtgatgcgggcatcttcgtctcccgcattgccgagggcggtgctgctcaccgcgcgggcacactgcaggttggcgaccgcgtcctctctattaatggagtggacgtgactgaggccaggcatgaccacgccgtctccctgctgaccgctgcctcccccaccatcgccctgctgttggagcgggaggctgggggccctcttcctcccagccctctgccacattcctcaccccccaccgctgctgttgccaccaccagcataaccactgccacccccggggtgcctgggttgccgagcctggcccccagcctgctggctgccgcgttggaagggccatacccagtggaggagatccgtctgccaagagctgggggccctctggggcttagtattgtcggaggctccgaccattccagccacccgtttggtgtccaggagcctggtgtgttcatctccaaggtgctcccgcggggcctggccgctcgcagcggcctgcgggttggggaccgcatcctggcagtgaacgggcaagacgtgcgggatgccacgcaccaagaagcagtcagtgccctgctccggccctgcctggagctgtcgctgctggtgcggagggacccggcacccccgggcctacgggaactgtgcatccagaaggcacctggggagaggctgggcatcagcatccgcgggggtgccaggggccacgctggcaacccccgcgaccccacagacgagggcatcttcatctccaaggtgagccccacgggggcagccgggcgcgacggtcggctgcgtgtgggtttgcggctgttggaggtgaaccagcagagcctgctgggcctgacgcacggcgaggcggtgcagctgctccgcagtgtgggcgacaccctcaccgtgctggtctgtgacggctttgaggccagcaccgacgcagccctggaggtgtccccaggtgtcattgccaacccctttgcggcaggcatcggccaccggaacagcctggagagcatctcttccatcgaccgggagctgagccctgagggcccaggcaaggagaaggagctgcctggacagaccctgcactgggggcccgaggccacagaagccgcaggtcggggtctgcagcccctgaagctggactaccgcgccctggccgccgtgcccagcgctggcagcgtgcagagggtaccgtctggagcagctggagggaagatggctgaatctccctgctcccctagtggccagcagccgccctccccgccttctccggatgagctgcccgccaatgtgaagcaggcctacagggccttcgcggccgtgcccacttctcacccgcctgaggatgcccctgcccagccccccacgcctgggcctgcagcctccccggagcagctgtccttccgggagcggcagaagtactttgagctggaggtgcgcgtgccccaggccgagggcccccctaagcgcgtgtccctggtgggtgctgacgacctgcggaagatgcaggaggaggaagccagaaaactacagcagaagagagcgcagatgctgcgggaggcggcagaggctggggccgaagcgaggctcgccctggacggggagacgctgggcgaggaggaacaggaggatgagcagccaccctgggccagcccgagccccacctcaaggcagagcccggcgtcccccccacccctgggaggtggcgccccggtgcggacggccaaagctgaacggcgccaccaggagcggctgcgcgtgcagagtccggagccaccggcacccgagcgtgccctgtcccctgccgagctccgggccctggaggccgagaagcgtgcgctgtggagggcagccaggatgaagtcattggaacaggacgctctccgagcacagatggtcctcagcaggtcccaggaaggccggggcacgcgggggcccctggagcgactggccgaggccccttcccctgcgcccaccccgtcgcccacccctgtggaagacctcggcccccagaccagcacctccccgggacgcctgcccttgtctggaaagaagtttgactacagggcctttgcggccctgccttcttccagacctgtctatgacatccagtcaccggactttgctgaggagttgaggtccctggaaccatctcccagccctggcccgcaggaggaggatggagaagtggctctggtgcttctgggcaggccctcacccggcgctgtgggccctgaagatgtggcactgtgcagcagccgccgccccgtaaggcctgggcgccgtggcctgggccctgtgccctcctagaggagcaggcacctcccccagacttggggtgggggccctgccagctccagcaccacccttgccccaagtcttttaacctgggtgttagcattttaaagagaccccacaggagttctggcctgtgactaactaactgccccaccccagccgagacctcggcgagactgtaactagtgatgtttgtacaaccaaagactctattttgtggtttaaggagaataaagttgactacattttacctcc

SEQ ID NO: 27292 - DNA, 2642 bp, Homo sapiens
  source 1..2642: mol_type = unassigned DNA
ctctccgccccgccccggctcgggcggccggaggacccggagctaaggcgcccgaacccgcggcggcggtggggacgatgtggttctttgcccgggacccggtccgggactttccgttcgagctcatcccggagcccccagagggcggcctgcccgggccctgggccctgcaccgcggccgcaagaaggccacaggcagccccgtgtccatcttcgtctatgatgtgaagcctggcgcggaagagcagacccaggtggccaaagctgccttcaagcgcttcaaaactctacggcaccccaacatcctggcttacatcgatggactggagacagaaaaatgcctccacgtcgtgacagaggctgtgaccccgttgggaatatacctcaaggcgagagtggaggctggtggcctgaaggagctggagatctcctgggggctacaccagatcgtgaaagccctcagcttcctggtcaacgactgcagcctcatccacaacaatgtctgcatggccgccgtgttcgtggaccgagctggcgagtggaagcttgggggcctggactacatgtattcggcccagggcaacggtgggggacctccccgcaaggggatccccgagcttgagcagtatgaccccccggagttggctgacagcagtggcagagtggtcagagagaagtggtcagcagacatgtggcgcttgggctgcctcatttgggaagtcttcaatgggcccctacctcgggcagcagccctacgcaaccctgggaagatccccaaaacgctggtgccccattactgtgagctggtgggagcaaaccccaaggtgcgtcccaacccagcccgcttcctgcagaactgccgggcacctggtggcttcatgagcaaccgctttgtagaaaccaacctcttcctggaggagattcagatcaaagagccagccgagaagcaaaaattcttccaggagctgagcaagagcctggacgcattccctgaggatttctgtcggcacaaggtgctgccccagctgctgaccgccttcgagttcggcaatgctggggccgttgtcctcacgcccctcttcaaggtgggcaagttcctgagcgctgaggagtatcagcagaagatcatccctgtggtggtcaagatgttctcatccactgaccgggccatgcgcatccgcctcctgcagcagatggagcagttcatccagtaccttgacgagccaacagtcaacacccagatcttcccccacgtcgtacatggcttcctggacaccaaccctgccatccgggagcagacggtcaagtccatgctgctcctggccccaaagctgaacgaggccaacctcaatgtggagctgatgaagcactttgcacggctacaggccaaggatgaacagggccccatccgctgcaacaccacagtctgcctgggcaaaatcggctcctacctcagtgctagcaccagacacagggtccttacctctgccttcagccgagccactagggacccgtttgcaccgtcccgggttgcgggtgtcctgggctttgctgccacccacaacctctactcaatgaacgactgtgcccagaagatcctgcctgtgctctgcggtctcactgtagatcctgagaaatccgtgcgagaccaggccttcaaggccattcggagcttcctgtccaaattggagtctgtgtcggaggacccgacccagctggaggaagtggagaaggatgtccatgcagcctccagccctggcatgggaggagccgcagctagctgggcaggctgggccgtgaccggggtctcctcactcacctccaagctgatccgttcgcacccaaccactgccccaacagaaaccaacattccccaaagacccacgcctgaaggagttcctgccccagcccccacccctgttcctgccacccctacaacctcaggccactgggagacgcaggaggaggacaaggacacagcagaggacagcagcactgctgacagatgggacgacgaagactggggcagcctggagcaggaggccgagtctgtgctggcccagcaggacgactggagcaccgggggccaagtgagccgtgctagtcaggtcagcaactccgaccacaaatcctccaaatccccagagtccgactggagcagctgggaagctgagggctcctgggaacagggctggcaggagccaagctcccaggagccacctcctgacggtacacggctggccagcgagtataactggggtggcccagagtccagcgacaagggcgaccccttcgctaccctgtctgcacgtcccagcacccagccgaggccagactcttggggtgaggacaactgggagggcctcgagactgacagtcgacaggtcaaggctgagctggcccggaagaagcgcgaggagcggcggcgggagatggaggccaaacgcgccgagaggaaggtggccaagggccccatgaagctgggagcccggaagctggactgaaccgtggcggtggcccttcccggctgcggagagcccgccccacagatgtatttattgtacaaaccatgtgagcccggccggcccagccaggccatctcacgtgtacataatcagagccacaataaattctatttcaca

SEQ ID NO: 27293 - DNA, 2548 bp, Homo sapiens
  source 1..2548: mol_type = unassigned DNA
ccggagctaaggcgcccgaacccgcggcggcggtggggacgatgtggttctttgcccgggacccggtccgggactttccgttcgagctcatcccggagcccccagagggcggcctgcccgggccctgggccctgcaccgcggccgcaagaaggccacaggcagccccgtgtccatcttcgtctatgatgtgaagcctggcgcggaagagcagacccaggtggccaaagctgccttcaagcgcttcaaaactctacggcaccccaacatcctggcttacatcgatggactggagacagaaaaatgcctccacgtcgtgacagaggctgtgaccccgttgggaatatacctcaaggcgagagtggaggctggtggcctgaaggagctggagatctcctgggggctacaccagatcgtgaaagccctcagcttcctggtcaacgactgcagcctcatccacaacaatgtctgcatggccgccgtgttcgtggaccgagctggcgagtggaagcttgggggcctggactacatgtattcggcccagggcaacggtgggggacctccccgcaaggggatccccgagcttgagcagtatgaccccccggagttggctgacagcagtggcagagtggtcagagagaagtggtcagcagacatgtggcgcttgggctgcctcatttgggaagtcttcaatgggcccctacctcgggcagcagccctacgcaaccctgggaagatccccaaaacgctggtgccccattactgtgagctggtgggagcaaaccccaaggtgcgtcccaacccagcccgcttcctgcagaactgccgggcacctggtggcttcatgagcaaccgctttgtagaaaccaacctcttcctggaggagattcagatcaaagagccagccgagaagcaaaaattcttccaggagctgagcaagagcctggacgcattccctgaggatttctgtcggcacaaggtgctgccccagctgctgaccgccttcgagttcggcaatgctggggccgttgtcctcacgcccctcttcaaggtgggcaagttcctgagcgctgaggagtatcagcagaagatcatccctgtggtggtcaagatgttctcatccactgaccgggccatgcgcatccgcctcctgcagcagatggagcagttcatccagtaccttgacgagccaacagtcaacacccagatcttcccccacgtcgtacatggcttcctggacaccaaccctgccatccgggagcagacggtcaagtccatgctgctcctggccccaaagctgaacgaggccaacctcaatgtggagctgatgaagcactttgcacggctacaggccaaggatgaacagggccccatccgctgcaacaccacagtctgcctgggcaaaatcggctcctacctcagtgctagcaccagacacagggtccttacctctgccttcagccgagccactagggacccgtttgcaccgtcccgggttgcgggtgtcctgggctttgctgccacccacaacctctactcaatgaacgactgtgcccagaagatcctgcctgtgctctgcggtctcactgtagatcctgagaaatccgtgcgagaccaggccttcaaggccattcggagcttcctgtccaaattggagtctgtgtcggaggacccgacccagctggaggaagtggagaaggatgtccatgcagcctccagccctggcatgggaggagccgcagctagctgggcaggctgggccgtgaccggggtctcctcactcacctccaagctgatccgttcgcacccaaccactgccccaacagaaaccaacattccccaaagacccacgcctgaaggagttcctgccccagcccccacccctgttcctgccacccctacaacctcaggccactgggagacgcaggaggaggacaaggacacagcagaggacagcagcactgctgacagatgggacgacgaagactggggcagcctggagcaggaggccgagtctgtgctggcccagcaggacgactggagcaccgggggccaagtgagccgtgctagtcaggtcagcaactccgaccacaaatcctccaaatccccagagtccgactggagcagctgggaagctgagggctcctgggaacagggctggcaggagccaagctcccaggagccacctcctgacggtacacggctggccagcgagtataactggggtggcccagagtccagcgacaagggcgaccccttcgctaccctgtctgcacgtcccagcacccaggacaggtcaaggctgagctggcccggaagaagcgcgaggagcggcggcgggagatggaggccaaacgcgccgagaggaaggtggccaagggccccatgaagctgggagcccggaagctggactgaaccgtggcggtggcccttcccggctgcggagagcccgccccacagatgtatttattgtacaaaccatgtgagcccggccggcccagccaggccatctcacgtgtacataatcagagccacaataaattctatttc

SEQ ID NO: 27294 - DNA, 2300 bp, Homo sapiens
  source 1..2300: mol_type = unassigned DNA
ccggagctaaggcgcccgaacccgcggcggcggtggggacgatgtggttctttgcccgggacccggtccgggactttccgttcgagctcatcccggagcccccagagggcggcctgcccgggccctgggccctgcaccgcggccgcaagaaggccacaggcagccccgtgtccatcttcgtctatgatgtgaagcctggcgcggaagagcagacccaggtggccaaagctgccttcaagcgcttcaaaactctacggcaccccaacatcctggcttacatcgatggactggagacagaaaaatgcctccacgtcgtgacagaggctgtgaccccgttgggaatatacctcaaggcgagagtggaggctggtggcctgaaggagctggagatctcctgggggctacaccagatcgtgaaagccctcagcttcctggtcaacgactgcagcctcatccacaacaatgtctgcatggccgccgtgttcgtggaccgagctggcgagtggaagcttgggggcctggactacatgtattcggcccagggcaacggtgggggacctccccgcaaggggatccccgagcttgagcagtatgaccccccggagttggctgacagcagtggcagagtggtcagagagaagtggtcagcagacatgtggcgcttgggctgcctcatttgggaagtcttcaatgggcccctacctcgggcagcagccctacgcaaccctgggaagatccccaaaacgctggtgccccattactgtgagctggtgggagcaaaccccaaggtgcgtcccaacccagcccgcttcctgcagaactgccgggcacctggtggcttcatgagcaaccgctttgtagaaaccaacctcttcctggaggagattcagatcaaagagccagccgagaagcaaaaattcttccaggagctgagcaagagcctggacgcattccctgaggatttctgtcggcacaaggtgctgccccagctgctgaccgccttcgagttcggcaatgctggggccgttgtcctcacgcccctcttcaaggtgggcaagttcctgagcgctgaggagtatcagcagaagatcatccctgtggtggtcaagatgttctcatccactgaccgggccatgcgcatccgcctcctgcagcagatggagcagttcatccagtaccttgacgagccaacagtcaacacccagatcttcccccacgtcgtacatggcttcctggacaccaaccctgccatccgggagcagacggtcaagtccatgctgctcctggccccaaagctgaacgaggccaacctcaatgtggagctgatgaagcactttgcacggctacaggccaaggatgaacagggccccatccgctgcaacaccacagtctgcctgggcaaaatcggctcctacctcagtgctagcaccagacacagggtccttacctctgccttcagccgagccactagggacccgtttgcaccgtcccgggttgcgggtgtcctgggctttgctgccacccacaacctctactcaatgaacgactgtgcccagaagatcctgcctgtgctctgcggtctcactgtagatcctgagaaatccgtgcgagaccaggccttcaaggccattcggagcttcctgtccaaattggagtctgtgtcggaggacccgacccagctggaggaagtggagaaggatgtccatgcagcctccagccctggcatgggaggagccgcagctagctgggcaggctgggccgtgaccggggtctcctcactcacctccaagctgatccgttcgcacccaaccactgccccaacagaaaccaacattccccaaagacccacgcctgaaggccactgggagacgcaggagccacctcctgacggtacacggctggccagcgagtataactggggtggcccagagtccagcgacaagggcgaccccttcgctaccctgtctgcacgtcccagcacccagccgaggccagactcttggggtgaggacaactgggagggcctcgagactgacagtcgacaggtcaaggctgagctggcccggaagaagcgcgaggagcggcggcgggagatggaggccaaacgcgccgagaggaaggtggccaagggccccatgaagctgggagcccggaagctggactgaaccgtggcggtggcccttcccggctgcggagagcccgccccacagatgtatttattgtacaaaccatgtgagcccggccggcccagccaggccatctcacgtgtacataatcagagccacaataaattctatttc

SEQ ID NO: 27295 - DNA, 1175 bp, Homo sapiens
  source 1..1175: mol_type = unassigned DNA
gaacccgcggcggcggtggggacgatgtggttctttgcccgggacccggtccgggactttccgttcgagctcatcccggagcccccagagggcggcctgcccgggccctgggccctgcaccgcggccgcaagaaggccacaggcagccccgtgtccatcttcgtctatgatgtgaagcctggcgcggaagagcagacccaggtggccaaagctgccttcaagcgcttcaaaactctacggcaccccaacatcctggcttacatcgatggactggagacagaaaaatgcctccacgtcgtgacagaggctgtgaccccgttgggaatatacctcaaggcgagagtggaggctggtggcctgaaggagctggagatctcctgggggctacaccagatcgtgaaagccctcagcttcctggtcaacgactgcagcctcatccacaacaatgtctgcatggccgccgtgttcgtggaccgagctggcgagtggaagcttgggggcctggactacatgtattcggcccagggcaacggtgggggacctccccgcaaggggatccccgagcttgagcagtatgaccccccggagttggctgacagcagtggcagagtggtcagagagaagtggtcagcagacatgtggcgcttgggctgcctcatttgggaagtcttcaatgggcccctacctcgggcagcagccctacgcaaccctgggaagatccccaaaacgctggtgccccattactgtgagctggtgggagcaaaccccaaggtgcgtcccaacccagcccgcttcctgcagaactgccgggcacctggtggcttcatgagcaaccgctttgtagaaaccaacctcttcctggaggagattcagcccaaagacccacgcctgaaggagttcctgccccagcccccacccctgttcctgccacccctacaacctcaggccactgggagacgcaggaggaggacaaggacacagcagaggacagcagcactgctgacagatgggacgacgaagactggggcagcctggagcaggaggccgagtctgtgctggcccagcaggacgactggagcaccgggggccaagtgagccgtgctagtcaggtcagcaactccgaccacaaatcctccaaatccccagagtccgactggagcagctgggaagctgag

SEQ ID NO: 27296 - DNA, 2583 bp, Homo sapiens
  source 1..2583: mol_type = unassigned DNA
cccgccccggctcgggcggccggaggacccggagctaaggcgcccgaacccgcggcggcggtggggacgatgtggttctttgcccgggacccggtccgggactttccgttcgagctcatcccggagcccccagagggcggcctgcccgggccctgggccctgcaccgcggccgcaagaaggccacaggcagccccgtgtccatcttcgtctatgatgtgaagcctggcgcggaagagcagacccaggtggccaaagctgccttcaagcgcttcaaaactctacggcaccccaacatcctggcttacatcgatggactggagacagaaaaatgcctccacgtcgtgacagaggctgtgaccccgttgggaatatacctcaaggcgagagtggaggctggtggcctgaaggagctggagatctcctgggggctacaccagatcgtgaaagccctcagcttcctggtcaacgactgcagcctcatccacaacaatgtctgcatggccgccgtgttcgtggaccgagctggcgagtggaagcttgggggcctggactacatgtattcggcccagggcaacggtgggggacctccccgcaaggggatccccgagcttgagcagtatgaccccccggagttggctgacagcagtggcagagtggtcagagagaagtggtcagcagacatgtggcgcttgggctgcctcatttgggaagtcttcaatgggcccctacctcgggcagcagccctacgcaaccctgggaagatccccaaaacgctggtgccccattactgtgagctggtgggagcaaaccccaaggtgcgtcccaacccagcccgcttcctgcagaactgccgggcacctggtggcttcatgagcaaccgctttgtagaaaccaacctcttcctggaggagattcagatcaaagagccagccgagaagcaaaaattcttccaggagctgagcaagagcctggacgcattccctgaggatttctgtcggcacaaggtgctgccccagctgctgaccgccttcgagttcggcaatgctggggccgttgtcctcacgcccctcttcaaggtgggcaagttcctgagcgctgaggagtatcagcagaagatcatccctgtggtggtcaagatgttctcatccactgaccgggccatgcgcatccgcctcctgcagcagatggagcagttcatccagtaccttgacgagccaacagtcaacacccagatcttcccccacgtcgtacatggcttcctggacaccaaccctgccatccgggagcagacggtcaagtccatgctgctcctggccccaaagctgaacgaggccaacctcaatgtggagctgatgaagcactttgcacggctacaggccaaggatgaacagggccccatccgctgcaacaccacagtctgcctgggcaaaatcggctcctacctcagtgctagcaccagacacagggtccttacctctgccttcagccgagccactagggacccgtttgcaccgtcccgggttgcgggtgtcctgggctttgctgccacccacaacctctactcaatgaacgactgtgcccagaagatcctgcctgtgctctgcggtctcactgtagatcctgagaaatccgtgcgagaccaggccttcaaggccattcggagcttcctgtccaaattggagtctgtgtcggaggacccgacccagctggaggaagtggagaaggatgtccatgcagcctccagccctggcatgggaggagccgcagctagctgggcaggctgggccgtgaccggggtctcctcactcacctccaagctgatccgttcgcacccaaccactgccccaacagaaaccaacattccccaaagacccacgcctgaaggccactgggagacgcaggaggaggacaaggacacagcagaggacagcagcactgctgacagatgggacgacgaagactggggcagcctggagcaggaggccgagtctgtgctggcccagcaggacgactggagcaccgggggccaagtgagccgtgctagtcaggtcagcaactccgaccacaaatcctccaaatccccagagtccgactggagcagctgggaagctgagggctcctgggaacagggctggcaggagccaagctcccaggagccacctcctgacggtacacggctggccagcgagtataactggggtggcccagagtccagcgacaagggcgaccccttcgctaccctgtctgcacgtcccagcacccagccgaggccagactcttggggtgaggacaactgggagggcctcgagactgacagtcgacaggtcaaggctgagctggcccggaagaagcgcgaggagcggcggcgggagatggaggccaaacgcgccgagaggaaggtggccaagggccccatgaagctgggagcccggaagctggactgaaccgtggcggtggcccttcccggctgcggagagcccgccccacagatgtatttattgtacaaaccatgtgagcccggccggcccagccaggccatctcacgtgtacataatcagagccacaataaattctatttcaca

SEQ ID NO: 27297 - DNA, 2584 bp, Homo sapiens
  source 1..2584: mol_type = unassigned DNA
ctctccgccccgccccggctcgggcggccggaggacccggagctaaggcgcccgaacccgcggcggcggtggggacgatgtggttctttgcccgggacccggtccgggactttccgttcgagctcatcccggagcccccagagggcggcctgcccgggccctgggccctgcaccgcggccgcaagaaggccacaggcagccccgtgtccatcttcgtctatgatgtgaagcctggcgcggaagagcagacccaggtggccaaagctgccttcaagcgcttcaaaactctacggcaccccaacatcctggcttacatcgatggactggagacagaaaaatgcctccacgtcgtgacagaggctgtgaccccgttgggaatatacctcaaggcgagagtggaggctggtggcctgaaggagctggagatctcctgggggctacaccagatcgtgaaagccctcagcttcctggtcaacgactgcagcctcatccacaacaatgtctgcatggccgccgtgttcgtggaccgagctggcgagtggaagcttgggggcctggactacatgtattcggcccagggcaacggtgggggacctccccgcaaggggatccccgagcttgagcagtatgaccccccggagttggctgacagcagtggcagagtggtcagagagaagtggtcagcagacatgtggcgcttgggctgcctcatttgggaagtcttcaatgggcccctacctcgggcagcagccctacgcaaccctgggaagatccccaaaacgctggtgccccattactgtgagctggtgggagcaaaccccaaggtgcgtcccaacccagcccgcttcctgcagaactgccgggcacctggtggcttcatgagcaaccgctttgtagaaaccaacctcttcctggaggagattcagatcaaagagccagccgagaagcaaaaattcttccaggagctgagcaagagcctggacgcattccctgaggatttctgtcggcacaaggtgctgccccagctgctgaccgccttcgagttcggcaatgctggggccgttgtcctcacgcccctcttcaaggtgggcaagttcctgagcgctgaggagtatcagcagaagatcatccctgtggtggtcaagatgttctcatccactgaccgggccatgcgcatccgcctcctgcagcagatggagcagttcatccagtaccttgacgagccaacagtcaacacccagatcttcccccacgtcgtacatggcttcctggacaccaaccctgccatccgggagcagacggtcaagtccatgctgctcctggccccaaagctgaacgaggccaacctcaatgtggagctgatgaagcactttgcacggctacaggccaaggatgaacagggccccatccgctgcaacaccacagtctgcctgggcaaaatcggctcctacctcagtgctagcaccagacacagggtccttacctctgccttcagccgagccactagggacccgtttgcaccgtcccgggttgcgggtgtcctgggctttgctgccacccacaacctctactcaatgaacgactgtgcccagaagatcctgcctgtgctctgcggtctcactgtagatcctgagaaatccgtgcgagaccaggccttcaaggccattcggagcttcctgtccaaattggagtctgtgtcggaggacccgacccagctggaggaagtggagaaggatgtccatgcagcctccagccctggcatgggaggagccgcagctagctgggcaggctgggccgtgaccggggtctcctcactcacctccaagctgatccgttcgcacccaaccactgccccaacagaaaccaacattccccaaagacccacgcctgaaggagttcctgccccagcccccacccctgttcctgccacccctacaacctcaggccactgggagacgcaggaggaggacaaggacacagcagaggacagcagcactgctgacagatgggacgacgaagactggggcagcctggaggaggccgagtctgtgctggcccagcaggacgactggagcaccgggggccaagtgagccgtgctagtcaggtcagcaactccgaccacaaatcctccaaatccccagagtccgactggagcagctgggaagctgagggctcctgggaacagggctggcaggagccaagctcccaggagccacctcctgacggtacacggctggccagcgagtataactggggtggcccagagtccagcgacaagggcgaccccttcgctaccctgtctgcacgtcccagcacccaggacaggtcaaggctgagctggcccggaagaagcgcgaggagcggcggcgggagatggaggccaaacgcgccgagaggaaggtggccaagggccccatgaagctgggagcccggaagctggactgaaccgtggcggtggcccttcccggctgcggagagcccgccccacagatgtatttattgtacaaaccatgtgagcccggccggcccagccaggccatctcacgtgtacataatcagagccacaataaattctatttcaca

SEQ ID NO: 27298 - DNA, 2303 bp, Homo sapiens
  source 1..2303: mol_type = unassigned DNA
ccggagctaaggcgcccgaacccgcggcggcggtggggacgatgtggttctttgcccgggacccggtccgggactttccgttcgagctcatcccggagcccccagagggcggcctgcccgggccctgggccctgcaccgcggccgcaagaaggccacaggcagccccgtgtccatcttcgtctatgatgtgaagcctggcgcggaagagcagacccaggtggccaaagctgccttcaagcgcttcaaaactctacggcaccccaacatcctggcttacatcgatggactggagacagaaaaatgcctccacgtcgtgacagaggctgtgaccccgttgggaatatacctcaaggcgagagtggaggctggtggcctgaaggagctggagatctcctgggggctacaccagatcgtgaaagccctcagcttcctggtcaacgactgcagcctcatccacaacaatgtctgcatggccgccgtgttcgtggaccgagctggcgagtggaagcttgggggcctggactacatgtattcggcccagggcaacggtgggggacctccccgcaaggggatccccgagcttgagcagtatgaccccccggagttggctgacagcagtggcagagtggtcagagagaagtggtcagcagacatgtggcgcttgggctgcctcatttgggaagtcttcaatgggcccctacctcgggcagcagccctacgcaaccctgggaagatccccaaaacgctggtgccccattactgtgagctggtgggagcaaaccccaaggtgcgtcccaacccagcccgcttcctgcagaactgccgggcacctggtggcttcatgagcaaccgctttgtagaaaccaacctcttcctggaggagattcagatcaaagagccagccgagaagcaaaaattcttccaggagctgagcaagagcctggacgcattccctgaggatttctgtcggcacaaggtgctgccccagctgctgaccgccttcgagttcggcaatgctggggccgttgtcctcacgcccctcttcaaggtgggcaagttcctgagcgctgaggagtatcagcagaagatcatccctgtggtggtcaagatgttctcatccactgaccgggccatgcgcatccgcctcctgcagcagatggagcagttcatccagtaccttgacgagccaacagtcaacacccagatcttcccccacgtcgtacatggcttcctggacaccaaccctgccatccgggagcagacggtcaagtccatgctgctcctggccccaaagctgaacgaggccaacctcaatgtggagctgatgaagcactttgcacggctacaggccaaggatgaacagggccccatccgctgcaacaccacagtctgcctgggcaaaatcggctcctacctcagtgctagcaccagacacagggtccttacctctgccttcagccgagccactagggacccgtttgcaccgtcccgggttgcgggtgtcctgggctttgctgccacccacaacctctactcaatgaacgactgtgcccagaagatcctgcctgtgctctgcggtctcactgtagatcctgagaaatccgtgcgagaccaggccttcaaggccattcggagcttcctgtccaaattggagtctgtgtcggaggacccgacccagctggaggaagtggagaaggatgtccatgcagcctccagccctggcatgggaggagccgcagctagctgggcaggctgggccgtgaccggggtctcctcactcacctccaagctgatccgttcgcacccaaccactgccccaacagaaaccaacattccccaaagacccacgcctgaaggccactgggagacgcaggagccacctcctgacggtacacggctggccagcgagtataactggggtggcccagagtccagcgacaagggcgaccccttcgctaccctgtctgcacgtcccagcacccagccgaggccagactcttggggtgaggacaactgggagggcctcgagactgacagtcgacaggtcaaggctgagctggcccggaagaagcgcgaggagcggcggcgggagatggaggccaaacgcgccgagaggaaggtggccaagggccccatgaagctgggagcccggaagctggactgaaccgtggcggtggcccttcccggctgcggagagcccgccccacagatgtatttattgtacaaaccatgtgagcccggccggcccagccaggccatctcacgtgtacataatcagagccacaataaattctatttcaca

SEQ ID NO: 27299 - DNA, 2570 bp, Homo sapiens
  source 1..2570: mol_type = unassigned DNA
cccggagctaaggcgcccgaacccgcggcggcggtggggacgatgtggttctttgcccgggacccggtccgggactttccgttcgagctcatcccggagcccccagagggcggcctgcccgggccctgggccctgcaccgcggccgcaagaaggccacaggcagccccgtgtccatcttcgtctatgatgtgaagcctggcgcggaagagcagacccaggtggccaaagctgccttcaagcgcttcaaaactctacggcaccccaacatcctggcttacatcgatggactggagacagaaaaatgcctccacgtcgtgacagaggctgtgaccccgttgggaatatacctcaaggcgagagtggaggctggtggcctgaaggagctggagatctcctgggggctacaccagatcgtgaaagccctcagcttcctggtcaacgactgcagcctcatccacaacaatgtctgcatggccgccgtgttcgtggaccgagctggcgagtggaagcttgggggcctggactacatgtattcggcccagggcaacggtgggggacctccccgcaaggggatccccgagcttgagcagtatgaccccccggagttggctgacagcagtggcagagtggtcagagagaagtggtcagcagacatgtggcgcttgggctgcctcatttgggaagtcttcaatgggcccctacctcgggcagcagccctacgcaaccctgggaagatccccaaaacgctggtgccccattactgtgagctggtgggagcaaaccccaaggtgcgtcccaacccagcccgcttcctgcagaactgccgggcacctggtggcttcatgagcaaccgctttgtagaaaccaacctcttcctggaggagattcagatcaaagagccagccgagaagcaaaaattcttccaggagctgagcaagagcctggacgcattccctgaggatttctgtcggcacaaggtgctgccccagctgctgaccgccttcgagttcggcaatgctggggccgttgtcctcacgcccctcttcaaggtgggcaagttcctgagcgctgaggagtatcagcagaagatcatccctgtggtggtcaagatgttctcatccactgaccgggccatgcgcatccgcctcctgcagcagatggagcagttcatccagtaccttgacgagccaacagtcaacacccagatcttcccccacgtcgtacatggcttcctggacaccaaccctgccatccgggagcagacggtcaagtccatgctgctcctggccccaaagctgaacgaggccaacctcaatgtggagctgatgaagcactttgcacggctacaggccaaggatgaacagggccccatccgctgcaacaccacagtctgcctgggcaaaatcggctcctacctcagtgctagcaccagacacagggtccttacctctgccttcagccgagccactagggacccgtttgcaccgtcccgggttgcgggtgtcctgggctttgctgccacccacaacctctactcaatgaacgactgtgcccagaagatcctgcctgtgctctgcggtctcactgtagatcctgagaaatccgtgcgagaccaggccttcaaggccattcggagcttcctgtccaaattggagtctgtgtcggaggacccgacccagctggaggaagtggagaaggatgtccatgcagcctccagccctggcatgggaggagccgcagctagctgggcaggctgggccgtgaccggggtctcctcactcacctccaagctgatccgttcgcacccaaccactgccccaacagaaaccaacattccccaaagacccacgcctgaaggagttcctgccccagcccccacccctgttcctgccacccctacaacctcaggccactgggagacgcaggaggaggacaaggacacagcagaggacagcagcactgctgacagatgggacgacgaagactggggcagcctggagcaggaggccgagtctgtgctggcccagcaggacgactggagcaccgggggccaagtgagccgtgctagtcagagtccgactggagcagctgggaagctgagggctcctgggaacagggctggcaggagccaagctcccaggagccacctcctgacggtacacggctggccagcgagtataactggggtggcccagagtccagcgacaagggcgaccccttcgctaccctgtctgcacgtcccagcacccagccgaggccagactcttggggtgaggacaactgggagggcctcgagactgacagtcgacaggtcaaggctgagctggcccggaagaagcgcgaggagcggcggcgggagatggaggccaaacgcgccgagaggaaggtggccaagggccccatgaagctgggagcccggaagctggactgaaccgtggcggtggcccttcccggctgcggagagcccgccccacagatgtatttattgtacaaaccatgtgagcccggccggcccagccaggccatctcacgtgtacataatcagagccacaataaattctatttcaca

SEQ ID NO: 27300 - DNA, 663 bp, Homo sapiens
  source 1..663: mol_type = unassigned DNA
atgataaaacccaaatgggggggtctggtgtgggcacagtggcatggccctctggcacggccctctggcaccttaccctttgccagctccatgcccagccctgtggatgcatcctcagcagacggtggcagcgggttgggttcccaccggagaaagcggaccaccttcagcaaagggcagctactggagctggagagggcgtttgcagcatggccctaccccaacatcagcacccatgagcacctggcctgggtcacttgccttcctgaggccaaggtacaggtgtggttccagaagcgctgggccaaaataatcaagaacaggaagtcaggaattctaagccctgggtctgagtgcccccagagctcctgttctcttccagacaccctccagcagccctgggatccccaaatgccaggccaacctccaccctccagcggcacacctcagcgcacctcagtgtgtcgacatagctcctgtccagctcctggcttgagtccacggcagggctgggaaggggctaaagctgtagccccatggggatcagctggggcttcagaggtccacccttctttagagcgagctactccccagacttcactaggcagcctgtctgacctcatctatgccttggccattgtcgtcaatgtggaccactcctag

SEQ ID NO: 27301 - DNA, 665 bp, Homo sapiens
  source 1..665: mol_type = unassigned DNA
atgataaaacccaaatgggggggtctggtgtgggcacagcctggcatggccctctggcacggccctctggcaccttaccctttgccagctccatgcccagccctgtggatgcatcctcagcagacggtggcagcgggttgggttcccaccggagaaagcggaccaccttcagcaaagggcagctactggagctggagagggcgtttgcagcatggccctaccccaacatcagcacccatgagcacctggcctgggtcacttgccttcctgaggccaaggtacaggtgtggttccagaagcgctgggccaaaataatcaagaacaggaagtcaggaattctaagccctgggtctgagtgcccccagagctcctgttctcttccagacaccctccagcagccctgggatccccaaatgccaggccaacctccaccctccagcggcacacctcagcgcacctcagtgtgtcgacatagctcctgtccagctcctggcttgagtccacggcagggctgggaaggggctaaagctgtagccccatggggatcagctggggcttcagaggtccacccttctttagagcgagctactccccagacttcactaggcagcctgtctgacctcatctatgccttggccattgtcgtcaatgtggaccactcctag

SEQ ID NO: 27302 - DNA, 825 bp, Homo sapiens
  source 1..825: mol_type = unassigned DNA
gcatggcaccccgcccctccttggccaagaaacaaaggtttaggcatcgcaaccgcaaaggctaccgttcacaacgaggccacagccgtggccgcaaccagaactcccgccggccatcccgcgccacgtggctgtccttgttctccagtgaggagagcaacttgggagccaacaactatgatgactacaggatggactggcttgtgcctgccacctgtgaacccatccagagtgtcttcttcttctctggagacaagtactaccgagtcaatcttcgcacacgacggtggcagcgggttgggttcccaccggagaaagcggaccaccttcagcaaagggcagctactggagctggagagggcgtttgcagcatggccctaccccaacatcagcacccatgagcacctggcctgggtcacttgccttcctgaggccaaggtacaggtgtggttccagaagcgctgggccaaaataatcaagaacaggaagtcaggaattctaagccctgggtctgagtgcccccagagctcctgttctcttccagacaccctccagcagccctgggatccccaaatgccaggccaacctccaccctccagcggcacacctcagcgcacctcagtgtgtcgacatagctcctgtccagctcctggcttgagtccacggcagggctgggaaggggctaaagctgtagccccatggggatcagctggggcttcagaggtccacccttctttagagcgagctactccccagacttcactaggcagcctgtctgacctcatctatgccttggccattgtcgtcaatgtggaccactcctag

SEQ ID NO: 27303 - DNA, 2046 bp, Homo sapiens
  source 1..2046: mol_type = unassigned DNA
gagcaaacagagcagcagaaaaggcagttcctcttctccagtgccctccttccctgtctctgcctctccctcccttcctcaggcatcagagcggagacttcagggagaccagagcccagcttgccaggcactgagctagaagccctgccatggcacccctgagaccccttctcatactggccctgctggcatgggttgctctggctgaccaagagtcatgcaagggccgctgcactgagggcttcaacgtggacaagaagtgccagtgtgacgagctctgctcttactaccagagctgctgcacagactatacggctgagtgcaagccccaagtgactcgcggggatgtgttcactatgccggaggatgagtacacggtctatgacgatggcgaggagaaaaacaatgccactgtccatgaacaggtggggggcccctccctgacctctgacctccaggcccagtccaaagggaatcctgagcagacacctgttctgaaacctgaggaagaggcccctgcgcctgaggtgggcgcctctaagcctgaggggatagactcaaggcctgagacccttcatccagggagacctcagcccccagcagaggaggagctgtgcagtgggaagcccttcgacgccttcaccgacctcaagaacggttccctctttgccttccgagggcagtactgctatgaactggacgaaaaggcagtgaggcctgggtaccccaagctcatccgagatgtctggggcatcgagggccccatcgatgccgccttcacccgcatcaactgtcaggggaagacctacctcttcaagggtagtcagtactggcgctttgaggatggtgtcctggaccctgattacccccgaaatatctctgacggcttcgatggcatcccggacaacgtggatgcagccttggccctccctgcccatagctacagtggccgggagcgggtctacttcttcaaggggaaacagtactgggagtaccagttccagcaccagcccagtcaggaggagtgtgaaggcagctccctgtcggctgtgtttgaacactttgccatgatgcagcgggacagctgggaggacatcttcgagcttctcttctggggcagaacctctgctggtaccagacagccccagttcattagccgggactggcacggtgtgccagggcaagtggacgcagccatggctggccgcatctacatctcaggcatggcaccccgcccctccttggccaagaaacaaaggtttaggcatcgcaaccgcaaaggctaccgttcacaacgaggccacagccgtggccgcaaccagaactcccgccggccatcccgcgccacgtggctgtccttgttctccagtgaggagagcaacttgggagccaacaactatgatgactacaggatggactggcttgtgcctgccacctgtgaacccatccagagtgtcttcttcttctctggagacaagtactaccgagtcaatcttcgcacacgacggtggcagcgggttgggttcccaccggagaaagcggaccaccttcagcaaagggcagctactggagctggagagggcgtttgcagcatggccctaccccaacatcagcacccatgagcacctggcctgggtcacttgccttcctgaggccaaggtacaggtgtggttccagaagcgctgggccaaaataatcaagaacaggaagtcaggaattctaagccctgggtctgagtgcccccagagctcctgttctcttccagacaccctccagcagccctgggatccccaaatgccaggccaacctccaccctccagcggcacacctcagcgcacctcagtgtgtcgacatagctcctgtccagctcctggcttgagtccacggcagggctgggaaggggctaaagctgtagccccatggggatcagctggggcttcagaggtccacccttctttagagcgagctactccccagacttcactaggcagcctgtctgacctcatctatgccttggccattgtcgtcaatgtggaccactcctag

SEQ ID NO: 27304 - DNA, 3679 bp, Homo sapiens
  source 1..3679: mol_type = unassigned DNA
acacttgctcgcctcctgcctgggtctctgacttcaggagggcggagggggcccgtgtcagagccttccgcgccccagcgcatcgctccctactccgcctctcgggatcctttaagaggcggggcttggctgccagctccgcggcccgggcaaaaggctgggactttactccgggtggcggcgaggacgagtctgtgctccatcagctgccgcacccgccgcctcccgcccccaaaccccatccccgcggttgagccacgatgagcggcagagtcggcgatctgagccccaggcagaaggaggcattggccaagtttcgggagaatgtccaggatgtgctgccggccctgccgaatccagatgactattttctcctgcgttggctccgagccagaagcttcgacctgcagaagtcggaggccatgctccggaagcatgtggagttccgaaagcaaaaggacattgacaacatcattagctggcagcctccagaggtgatccaacagtatctgtcagggggtatgtgtggctatgacctggatggctgcccagtctggtacgacataattggacctctggatgccaagggtctgctgttctcagcctccaaacaggacctgctgaggaccaagatgcgggagtgtgagctgcttctgcaagagtgtgcccaccagaccacaaagttggggaggaaggtggagaccatcaccataatttatgactgcgaggggcttggcctcaagcatctctggaagcctgctgtggaggcctatggagagtttctctgcatgtttgaggaaaattatcccgaaacactgaagcgtctttttgttgttaaagcccccaaactgtttcctgtggcctataacctcatcaaacccttcctgagtgaggacactcgtaagaagatcatggtcctgggagcaaattggaaggaggttttactgaaacatatcagccctgaccaggtgcctgtggagtatgggggcaccatgactgaccctgatggaaaccccaagtgcaaatccaagatcaactacgggggtgacatccccaggaagtattatgtgcgagaccaggtgaaacagcagtatgaacacagcgtgcagatttcccgtggctcctcccaccaagtggagtatgagatcctcttccctggctgtgtcctcaggtggcagtttatgtcagatggagcggatgttggttttgggattttcctgaagaccaagatgggagagaggcagcgggcaggggagatgacagaggtgctgcccaaccagaggtacaactcccacctggtccctgaagatgggaccctcacctgcagtgatcctggcatctatgtcctgcggtttgacaacacctacagcttcattcatgccaagaaggtcaatttcactgtggaggtcctgcttccagacaaagcctcagaagagaagatgaaacagctgggggcaggcaccccgaaataacaccttctcctatagcaggcctggccccctcagtgtctccctgtcaatttctaccccttgtagcagtcattttcgcacaaccctgaagcccaaagaaactgggctggaggacagacctcaggagctttcatttcagttaggcagaggaagagcgactgcagtgggtctccgtgtctatcaaatacctaaggagtccccaggagctggctggccatcgtgataggatctgtctgtcctgtaaactgtgccaacttcacctgtccagggacagcgaagctgggggtggcggggggcatgtaccacagggtggcagcagggaaaaaaattagaaaagggtgaaagattgggacttaacacttcagggaagtcagctgccggggagaaacttgctcctaaatgaacacataagtttagatcgcaatgaggagtagcagggtagctggttgctagagttacggtggggatcagaaactcttccaaacattttagcactgaggctggggtagcttttggcttttcccaggtctcaggaggtggcctgagtcagcacacatcttcccactcggtagacaggctggcctctccctcactttgagactttggcaactcctgggccacacggcctgcctctttgattactaatgattgtcagtgactcagagcttcctgggacttcgggtacccacccgctgttctccatgcaaacaaagcgccagggaaatgacccacagggatcgcagctgcagggagggccagggaggttgggggtgggagtgaatgctaaaagcagatcgtccagtgcccttttcagtgctaccggcctctcaccaagcagtcctccatgtgagcaaccccgagacaaaaatgctaagtgggatcaagagagcagcactcggagagggtgtttgccagtctgagtgtcccgcggtgcccgccaacccgcttcctgactgacctgagcaaggtcttactaagcagtcccatctctgtgggaggcatgcaacgcgtgcagggagttcaggtgccggtcggcgtagccaggcctggaggccccccaggcaggaggccgcccaaaggcggggccggcgtctcgcagactaggggctgggggcggccacagacggcctcgaaaccacagcccttaccccaatcccacgagccccgccaacgaaccacaggtgctgggctttagagaacatgggaaggcggccccagacctgcgggaacgcctttccctcagagccaggccccggccccgtctgggaagctcatcttgcgaagctgagggagctcagggcaaaggccaggctagcgcggaccggaaggggccgaggctgcacgggcctctgccagaacgctcaggacatcccggcctgggtttacaacgctgttaggaaaattaaccaatgaataaagcaacgttcagtgcgcagggagtgaaattcaatgcccaccgctaggctcctcgctgcctctcactcaagaggcccaaactcagacggcgtcagggacccggacccagcagccgtttcacgccaatagatagggcgcatgcgcagaaatcctcctcggctctctagcgtgagctttcccaaggggccacgcccagcttgccttctgattggtccagctggtgggttgtcttccgccatctttgatcagggcactaaggatgctccccacggccttcacagtgacggcggagaccctgccccgccagctgctcagtacgtgccgcgtagcccgtgcgagccaagtgtgagtccgggcgagcgcctgcggagctagcactgggcccagaatgagagggaggcggaggagcagcgatcacgtggttttagggactgtctaataattccacgccagcattgccggtgtttcagggggtgggaaccgctgcgttccccatcaacttttctcccacccaccaccctccccaacctacaagcccagctcagcttgaggtaactgctgaccggactgtcctatacagccctacaagacagaggcgcctagggctgaaagcgggggcctccgtagggagccagcgggggcctcaatagttactcattttctctacctttgatgaaaataagagctaattcttaataaggcctaccgggtatcacgcaaaaaccctgtgcttactattacactttgggttgttgcaaagattaaaggaaataagccgtgcaaagcgcttaaga

SEQ ID NO: 27305 - DNA, 1229 bp, Homo sapiens
  source 1..1229: mol_type = unassigned DNA
gagtctgtgctccatcagctgccgcacccgccgcctcccgcccccaaaccccatccccgcggttgagccacgatgagcggcagagtcggcgatctgagccccaggcagaaggaggcattggccaagtttcgggagaatgtccaggatgtgctgccggccctgccgaatccagatgactattttctcctgcgttggctccgagccagaagcttcgacctgcagaagtcggaggccatgctccggaagttggggaggaaggtggagaccatcaccataatttatgactgcgaggggcttggcctcaagcatctctggaagcctgctgtggaggcctatggagagtttctctgcatgtttgaggaaaattatcccgaaacactgaagcgtctttttgttgttaaagcccccaaactgtttcctgtggcctataacctcatcaaacccttcctgagtgaggacactcgtaagaagatcatggtcctgggagcaaattggaaggaggttttactgaaacatatcagccctgaccaggtgcctgtggagtatgggggcaccatgactgaccctgatggaaaccccaagtgcaaatccaagatcaactacgggggtgacatccccaggaagtattatgtgcgagaccaggtgaaacagcagtatgaacacagcgtgcagatttcccgtggctcctcccaccaagtggagtatgagatcctcttccctggctgtgtcctcaggtggcagtttatgtcagatggagcggatgttggttttgggattttcctgaagaccaagatgggagagaggcagcgggcaggggagatgacagaggtgctgcccaaccagaggtacaactcccacctggtccctgaagatgggaccctcacctgcagtgatcctggcatctatgtcctgcggtttgacaacacctacagcttcattcatgccaagaaggtcaatttcactgtggaggtcctgcttccagacaaagcctcagaagagaagatgaaacagctgggggcaggcaccccgaaataacaccttctcctatagcaggcctggccccctcagtgtctccctgtcaatttctaccccttgtagcagtcattttcgcacaaccctgaagcccaaagaaactgggctggaggacagacctcaggagctttcatttcagttaggcagaggaagagcgactgcagtgggtctccgtgtctatcaaatacctaaggagt

SEQ ID NO: 27306 - DNA, 2631 bp, Homo sapiens
  source 1..2631: mol_type = unassigned DNA
gctccgcggcccgggcaaaaggctgggactttactccgggtggcggcgaggacgagtctgtgctccatcagctgccgcacccgccgcctcccgcccccaaaccccatccccgcggttgagccacgatgagcggcagagtcggcgatctgagccccaggcagaaggaggcattggccaagccagaagcttcgacctgcagaagtcggaggccatgctccggaaggtgatccaacagtatctgtcagggggtatgtgtggctatgacctggatggctgcccagtctggtacgacataattggacctctggatgccaagggtctgctgttctcagcctccaaacaggacctgctgaggaccaagatgcgggagtgtgagctgcttctgcaagagtgtgcccaccagaccacaaagttggggaggaaggtggagaccatcaccataatttatgactgcgaggggcttggcctcaagcatctctggaagcctgctgtggaggcctatggagagtttctctgcatgtttgaggaaaattatcccgaaacactgaagcgtctttttgttgttaaagcccccaaactgtttcctgtggcctataacctcatcaaacccttcctgagtgaggacactcgtaagaagatcatggtcctgggagcaaattggaaggaggttttactgaaacatatcagccctgaccaggtgcctgtggagtatgggggcaccatgactgaccctgatggaaaccccaagtgcaaatccaagatcaactacgggggtgacatccccaggaagtattatgtgcgagaccaggtgaaacagcagtatgaacacagcgtgcagatttcccgtggctcctcccaccaagtggagtatgagatcctcttccctggctgtgtcctcaggtggcagtttatgtcagatggagcggatgttggttttgggattttcctgaagaccaagatgggagagaggcagcgggcaggggagatgacagaggtgctgcccaaccagaggtacaactcccacctggtccctgaagatgggaccctcacctgcagtgatcctggcatctatgtcctgcggtttgacaacacctacagcttcattcatgccaagaaggtcaatttcactgtggaggtcctgcttccagacaaagcctcagaagagaagatgaaacagctgggggcaggcaccccgaaataacaccttctcctatagcaggcctggccccctcagtgtctccctgtcaatttctaccccttgtagcagtcattttcgcacaaccctgaagcccaaagaaactgggctggaggacagacctcaggagctttcatttcagttaggcagaggaagagcgactgcagtgggtctccgtgtctatcaaatacctaaggagtccccaggagctggctggccatcgtgataggatctgtctgtcctgtaaactgtgccaacttcacctgtccagggacagcgaagctgggggtggcggggggcatgtaccacagggtggcagcagggaaaaaaattagaaaagggtgaaagattgggacttaacacttcagggaagtcagctgccggggagaaacttgctcctaaatgaacacataagtttagatcgcaatgaggagtagcagggtagctggttgctagagttacggtggggatcagaaactcttccaaacattttagcactgaggctggggtagcttttggcttttcccaggtctcaggaggtggcctgagtcagcacacatcttcccactcggtagacaggctggcctctccctcactttgagactttggcaactcctgggccacacggcctgcctctttgattactaatgattgtcagtgactcagagcttcctgggacttcgggtacccacccgctgttctccatgcaaacaaagcgccagggaaatgacccacagggatcgcagctgcagggagggccagggaggttgggggtgggagtgaatgctaaaagcagatcgtccagtgcccttttcagtgctaccggcctctcaccaagcagtcctccatgtgagcaaccccgagacaaaaatgctaagtgggatcaagagagcagcactcggagagggtgtttgccagtctgagtgtcccgcggtgcccgccaacccgcttcctgactgacctgagcaaggtcttactaagcagtcccatctctgtgggaggcatgcaacgcgtgcagggagttcaggtgccggtcggcgtagccaggcctggaggccccccaggcaggaggccgcccaaaggcggggccggcgtctcgcagactaggggctgggggcggccacagacggcctcgaaaccacagcccttaccccaatcccacgagccccgccaacgaaccacaggtgctgggctttagagaacatgggaaggcggccccagacctgcgggaacgcctttccctcagagccaggccccggccccgtctgggaagctcatcttgcgaagctgagggagctcagggcaaaggccaggctagcgcggaccggaaggggccgaggctgcacgggcctctgccagaacgctcaggacatcccggcctgggtttacaacgctgttaggaaaattaaccaatgaataaagcaacgttcagtgcg

SEQ ID NO: 27307 - DNA, 1733 bp, Homo sapiens
  source 1..1733: mol_type = unassigned DNA
gcgaggacgagtctgtgctccatcagctgccgcacccgccgcctcccgcccccaaaccccatccccgcggttgagccacgatgagcggcagagtcggcgatctgagccccaggcagaaggaggcattggccaagtttcgggagaatgtccaggatgtgctgccggccctgccgaatccagatgactattttctcctgcgttggctccgagccagaagcttcgacctgcagaagtcggaggccatgctccggaagcatgtggagttccgaaagcaaaaggacattgacaacatcattagctggcagcctccagaggtgatccaacagtatctgtcagggggtatgtgtggctatgacctggatggctgcccagtctggtacgacataattggacctctggatgccaagggtctgctgttctcagcctccaaacaggacctgctgaggaccaagatgcgggagtgtgagctgcttctgcaagagtgtgcccaccagaccacaaagttggggaggaaggtggagaccatcaccataatttatgactgcgaggggcttggcctcaagcatctctggaagcctgctgtggaggcctatggagagtttctctgcatgtttgaggaaaattatcccgaaacactgaagcgtctttttgttgttaaagcccccaaactgtttcctgtggcctataacctcatcaaacccttcctgagtgaggacactcgtaagaagatcatggtcctgggagcaaattggaaggaggttttactgaaacatatcagccctgaccaggtgcctgtggagtatgggggcaccatgactgaccctgatggaaaccccaagtgcaaatccaagatcaactacgggggtgacatccccaggaagtattatgtgcgagaccaggtgaaacagcagtatgaacacagcgtgcagatttcccgtggctcctcccaccaagtggagtatgagatcctcttccctggctgtgtcctcaggtggcagtttatgtcagatggagcggatgttggttttgggattttcctgaagaccaagatgggagagaggcagcgggcaggggagatgacagaggtgctgcccaaccagaggtacaactcccacctggtccctgaagatgggaccctcacctgcagtgatcctggcatctgtaagtatctctgccttggcaatgccttgaagccccatgtccagctttctgcctgtgaggttcctcttcctccatggatttttggctctgagtgttagaactagaagtggaatgccatcagttcaatcctctccttgtatagatgaagaaatctagccttggagacttgtttatggtgacccaactggttaacagcagggtgggactttgatctcatactcctaggtatgggtgagtcacagtcctaggcgatcacaggggttcaacacgtctgctttctggtccaggtctaactgggtctgtgactggacagatatttcttggggatgctccttcccagaggtcacagagacagaactggctgggtgggcatgggatcacaaggtaagcagatgctcaaaagtgcagccttcacccctgagtttcactcatctcccagctgaccaaagaatggacacagactatgagcaggcagtttacacaagaatataagaatgggaaacagacatttgaaaaggtgcttaatctctcttaactttgtaataccattaaaattccccttgactcagcaa

SEQ ID NO: 27308 - DNA, 2086 bp, Homo sapiens
  source 1..2086: mol_type = unassigned DNA
gggcaaaaggacccagctgggtcagggctgacaaactaggcttggcctcttgcctatagtggccaccactcctcaagccccagccagcaccatgagcggccgagttggagacctgagccccaaacaggcagagaccctggccaagttccgagaaaacgtccaggatgtgcttcctgccctgcccaaccctgatgattatttccttctacgctggctccgagctcggaattttgacttgcagaagtcggaggctttgctccgcaagtacatggagttccggaagaccatggatattgaccatatccttgattggcagcccccagaggtgatccagaagtacatgcctgggggcctgtgtggctatgaccgtgatggctgccccgtgtggtatgacatcattgggccacttgatcccaaggggttgctcttctcagtcaccaagcaggacctgctcaagaccaagatgagggactgtgagcgcatcctgcatgagtgtgacctgcagacagagaggctagggaagaagattgagaccatcgtgatgatatttgactgtgagggcctgggactgaaacacttctggaaacctctggtagaagtgtaccaggagttctttggcctccttgaagagaattacccagagaccctgaagttcatgctcatcgtgaaagctaccaaactgttccctgtgggctacaacctcatgaagccattcctgagtgaggacactcgcaggaaaattattgtgttgggaaataactggaaggaaggtttgctgaaactcatcagtcctgaggaactgcctgcccagtttgggggcaccctgactgacccagatgggaaccccaaatgtttaaccaagattaactatggcggggagatccccaagtccatgtacgtgcgggaccaggtgaagactcagtacgagcactcggtgcagatcaaccgcggctcatcacaccaagtggaatacgagatcctatttccaggctgcgttctcaggtggcagttctcatctgatggtgcggacatcggcttcggagttttcctgaagaccaagatgggggagcgacagcgggcaggggagatgacagatgttctacccagccagcgctataacgcccacatggtgcccgaggatgggaacctcacctgctcagaggccggcgtctatgtcctacgcttcgacaacacctatagctttgtccacgccaagaaggtcagcttcacagtggaggtcctgctccctgacgagggcatgcagaaatatgataaggagctcacccctgtctaggtggctccctcatttctcagagacctcctaaccctttgatttctctgtttatatcctacactccctccctccctgaaattgattgttagtcctcctgactctgtgacgttagtgagtacagaaagagatgccctggggaaaactcatctactgtggtcagatcaagaaaggtatgagaggcacaaccttggagggtaccaaggttgcagaagaggaaaaagcaagggtaaaggcaagaagtgggtgtcatgaaactcaataaatagcaaaatgaatcccctagcctttgtcctcacctaccctaaggcaggtgtgtatgcttgaattccttccgtatggctgtgagcaacttgggttggagacatatctaaatcctttttacttccactccctatatatagtagatgctcagtgtatatttgtggcattgaatggaggaccagaaggtagggtgcaggtgactcaacagctgtacatgattaggaggagcctatgtggggtggatttcagcaccttggacaggagcagatgtgtggtggggttggactctcttctggagacccagacaattcagtctccagatttctggcagtggctgtcttttgagggccccagccacaaaggccacatgcctctgataggagctgcctacatcaggctttgtctgacttgcacgctcagcttcccaccctaacccacttcccttgttgcacatagcttatgttttagggactttcctggaagcaaaggcagtcacatctggcataatcataataaagaaaacaactatca

SEQ ID NO: 27309 - DNA, 2316 bp, Homo sapiens
  source 1..2316: mol_type = unassigned DNA
cagttccgagaaaacgtccaggatgtgcttcctgccctgcccaaccctgatgattatttccttctacgctggctccgagctcggaattttgacttgcagaagtcggaggctttgctccgcaagtacatggagttccggaagaccatggatattgaccatatccttgattggcagcccccagaggtgatccagaagtacatgcctgggggcctgtgtggctatgaccgtgatggctgccccgtgtggtatgacatcattgggccacttgatcccaaggggttgctcttctcagtcaccaagcaggacctgctcaagaccaagatgagggactgtgagcgcatcctgcatgagtgtgacctgcagacagagaggctagggaagaagattgagaccatcgtgatgatatttgactgtgagggcctgggactgaaacacttctggaaacctctggtagaagtgtaccaggagttctttggcctccttgaagagaattacccagagaccctgaagttcatgctcatcgtgaaagctaccaaactgttccctgtgggctacaacctcatgaagccattcctgagtgaggacactcgcaggaaaattattgtgttgggaaataactggaaggaaggtttgctgaaactcatcagtcctgaggaactgcctgcccagtttgggggcaccctgactgacccagatgggaaccccaaatgtttaaccaagattaactatggcggggagatccccaagtccatgtacgtgcgggaccaggtgaagactcagtacgagcactcggtgcagatcaaccgcggctcatcacaccaagtggaatacgagatcctatttccaggctgcgttctcaggtggcagttctcatctgatggtgcggacatcggcttcggagttttcctgaagaccaagatgggggagcgacagcgggcaggggagatgacagatgttctacccagccagcgctataacgcccacatggtgcccgaggatgggaacctcacctgctcagaggccggcgtctatgtggaaagtgagtctgggaagtcttgctgtcatctgcccgtgattatatgcagccatgagctacagaactcacactcaaactcgcaagtgatggcataccaaatggtacgaaaatgcaagctaagtaggcctttacccctccctgccagtaactaatttttgtctgtgtgagtaactggcctgtgtgtaagaggactcaccccctacgtggtctccagttaattctttttcccatttgggctcctgaccgccttgccatgctgcttctaagaggggttatctatactcagagggcctagggcagaccaaggaagggaaagaagttttggaggtttgtttgtttgttttttagagacagggctttgctttgtggcccaggctggagtgcagtggtgcgatcatagctcactgcaaccttgagctcttgggctcaagtgattctcccctctcagcctcctgagtggctgagaccacaggtacacatcaccatgcctgggttttttttctttctttctttctttcttttttttttttggtagagatgaggtattgttacattgcccaggctggtctcaaattcctgacctcaagcaatcctcctaccttggcctcccagtgctaggattacatgtgtgagccaccactcctggtctgggctttttttttttttttttttaggagaatgtaaggcatttgtttagtgtttactgagcatctactgcatgccaagctctgctcaggaggccaagagagcaggataggagtgagccctgcacctggggtttggcctggctggggagccctagcctcaggaagcaggactgccctggaccccaggaggcccctgctcaacctgcgacaagactgaaaggctccccagatgcactgtgacggtcaagggagagaaatgggtgacctgggatcctggtggcttcagatctcattgggggaaggagcaagggaccccaggggtcagaggcattgggggggtagggctgtcagagggcacccagcagagtgactcacaggctatgaggaaagaagtctcctcttgcttgtatcttcaggatgccaagacctgcagcccaggcctggggtggtggttatcccggagcggccttaccaggtgcacagctggccaagggaggcttggtcatgggcagagagggcaggaggaaggcccttgctccaccaccccctctcccaagggagtcctatgcccagaacttaccaagtagcaagactagagcaaccagcagaagacccttgggggcagccatcatg

SEQ ID NO: 27310 - DNA, 1864 bp, Homo sapiens
  source 1..1864: mol_type = unassigned DNA
caccactcctcaagccccagccagcaccatgagcggccgagttggagacctgagccccaaacaggcagagaccctggccaagatggagtctctgtcatccaggctggagtgctgtggagcgatctcagctcactgcagcctctgtctcccaggttcaagcaattctcctgcctcagcctcctgagtagctgggattacagttccgagaaaacgtccaggatgtgcttcctgccctgcccaaccctgatgattatttccttctacgctggctccgagctcggaattttgacttgcagaagtcggaggctttgctccgcaagtacatggagttccggaagaccatggatattgaccatatccttgattggcagcccccagaggtgatccagaagtacatgcctgggggcctgtgtggctatgaccgtgatggctgccccgtgtggtatgacatcattgggccacttgatcccaaggggttgctcttctcagtcaccaagcaggacctgctcaagaccaagatgagggactgtgagcgcatcctgcatgagtgtgacctgcagacagagaggctagggaagaagattgagaccatcgtgatgatatttgactgtgagggcctgggactgaaacacttctggaaacctctggtagaagtgtaccaggagttctttggcctccttgaagagaattacccagagaccctgaagttcatgctcatcgtgaaagctaccaaactgttccctgtgggctacaacctcatgaagccattcctgagtgaggacactcgcaggaaaattattgtgttgggaaataactggaaggaaggtttgctgaaactcatcagtcctgaggaactgcctgcccagtttgggggcaccctgactgacccagatgggaaccccaaatgtttaaccaagattaactatggcggggagatccccaagtccatgtacgtgcgggaccaggtgaagactcagtacgagcactcggtgcagatcaaccgcggctcatcacaccaagtggaatacgagatcctatttccaggctgcgttctcaggtggcagttctcatctgatggtgcggacatcggcttcggagttttcctgaagaccaagatgggggagcgacagcgggcaggggagatgacagatgttctacccagccagcgctataacgcccacatggtgcccgaggatgggaacctcacctgctcagaggccggcgtctatgtcctacgcttcgacaacacctatagctttgtccacgccaagaaggtcagcttcacagtggaggtcctgctccctgacgagggcatgcagaaatatgataaggagctcacccctgtctaggtggctccctcatttctcagagacctcctaaccctttgatttctctgtttatatcctacactccctccctccctgaaattgattgttagtcctcctgactctgtgacgttagtgagtacagaaagagatgccctggggaaaactcatctactgtggtcagatcaagaaaggtatgagaggcacaaccttggagggtaccaaggttgcagaagaggaaaaagcaagggtaaaggcaagaagtgggtgtcatgaaactcaataaatagcaaaatgaatcccctagcctttgtcctcacctaccctaaggcaggtgtgtatgcttgaattccttccgtatggctgtgagcaacttgggttggagacatatctaaatcctttttacttccactccctatatatagtagatgctcagtgtatatttgtggcattgaatggaggaccagaaggtagggtgcaggtgactcaacagctgtacatgattaggaggagcctatgtggggtggatttcagcacct

SEQ ID NO: 27311 - DNA, 1837 bp, Homo sapiens
  source 1..1837: mol_type = unassigned DNA
cagttccgagaaaacgtccaggatgtgcttcctgccctgcccaaccctgatgattatttccttctacgctggctccgagctcggaattttgacttgcagaagtcggaggctttgctccgcaagtacatggagttccggaagaccatggatattgaccatatccttgattggcagcccccagagaaagggacacgggagacatcaggggcagacctaagaagtccaagggcctgctgagacctggctttgccatttaccctctgtgagcaaggccctcccctgcaggacctcagctttctcacctgagacaatagcactgtcttccagggagggacagtgctttttataccatggtgatccagaagtacatgcctgggggcctgtgtggctatgaccgtgatggctgccccgtgtggtatgacatcattgggccacttgatcccaaggggttgctcttctcagtcaccaagcaggacctgctcaagaccaagatgagggactgtgagcgcatcctgcatgagtgtgacctgcagacagagaggctagggaagaagattgagaccatcgtgatgatatttgactgtgagggcctgggactgaaacacttctggaaacctctggtagaagtgtaccaggagttctttggcctccttgaagagaattacccagagaccctgaagttcatgctcatcgtgaaagctaccaaactgttccctgtgggctacaacctcatgaagccattcctgagtgaggacactcgcaggaaaattattgtgttgggaaataactggaaggaaggtttgctgaaactcatcagtcctgaggaactgcctgcccagtttgggggcaccctgactgacccagatgggaaccccaaatgtttaaccaagattaactatggcggggagatccccaagtccatgtacgtgcgggaccaggtgaagactcagtacgagcactcggtgcagatcaaccgcggctcatcacaccaagtggaatacgagatcctatttccaggctgcgttctcaggtggcagttctcatctgatggtgcggacatcggcttcggagttttcctgaagaccaagatgggggagcgacagcgggcaggggagatgacagatgttctacccagccagcgctataacgcccacatggtgcccgaggatgggaacctcacctgctcagaggccggcgtctatgtcctacgcttcgacaacacctatagctttgtccacgccaagaaggtcagcttcacagtggaggtcctgctccctgacgagggcatgcagaaatatgataaggagctcacccctgtctaggtggctccctcatttctcagagacctcctaaccctttgatttctctgtttatatcctacactccctccctccctgaaattgattgttagtcctcctgactctgtgacgttagtgagtacagaaagagatgccctggggaaaactcatctactgtggtcagatcaagaaaggtatgagaggcacaaccttggagggtaccaaggttgcagaagaggaaaaagcaagggtaaaggcaagaagtgggtgtcatgaaactcaataaatagcaaaatgaatcccctagcctttgtcctcacctaccctaaggcaggtgtgtatgcttgaattccttccgtatggctgtgagcaacttgggttggagacatatctaaatcctttttacttccactccctatatatagtagatgctcagtgtatatttgtggcattgaatggaggaccagaaggtagggtgcaggtgactcaacagctgtacatgattaggaggagcctatgtggggtggatttcagcacct

SEQ ID NO: 27312 - DNA, 1964 bp, Homo sapiens
  source 1..1964: mol_type = unassigned DNA
caccactcctcaagccccagccagcaccatgagcggccgagttggagacctgagccccaaacaggcagagaccctggccaaggttcaagcaattctcctgcctcagcctcctgagtagctgggattacagttccgagaaaacgtccaggatgtgcttcctgccctgcccaaccctgatgattatttccttctacgctggctccgagctcggaattttgacttgcagaagtcggaggctttgctccgcaagtacatggagttccggaagaccatggatattgaccatatccttgattggcagcccccagagaaagggacacgggagacatcaggggcagacctaagaagtccaagggcctgctgagacctggctttgccatttaccctctgtgagcaaggccctcccctgcaggacctcagctttctcacctgagacaatagcactgtcttccagggagggacagtgctttttataccatggtgatccagaagtacatgcctgggggcctgtgtggctatgaccgtgatggctgccccgtgtggtatgacatcattgggccacttgatcccaaggggttgctcttctcagtcaccaagcaggacctgctcaagaccaagatgagggactgtgagcgcatcctgcatgagtgtgacctgcagacagagaggctagggaagaagattgagaccatcgtgatgatatttgactgtgagggcctgggactgaaacacttctggaaacctctggtagaagtgtaccaggagttctttggcctccttgaagagaattacccagagaccctgaagttcatgctcatcgtgaaagctaccaaactgttccctgtgggctacaacctcatgaagccattcctgagtgaggacactcgcaggaaaattattgtgttgggaaataactggaaggaaggtttgctgaaactcatcagtcctgaggaactgcctgcccagtttgggggcaccctgactgacccagatgggaaccccaaatgtttaaccaagattaactatggcggggagatccccaagtccatgtacgtgcgggaccaggtgaagactcagtacgagcactcggtgcagatcaaccgcggctcatcacaccaagtggaatacgagatcctatttccaggctgcgttctcaggtggcagttctcatctgatggtgcggacatcggcttcggagttttcctgaagaccaagatgggggagcgacagcgggcaggggagatgacagatgttctacccagccagcgctataacgcccacatggtgcccgaggatgggaacctcacctgctcagaggccggcgtctatgtcctacgcttcgacaacacctatagctttgtccacgccaagaaggtcagcttcacagtggaggtcctgctccctgacgagggcatgcagaaatatgataaggagctcacccctgtctaggtggctccctcatttctcagagacctcctaaccctttgatttctctgtttatatcctacactccctccctccctgaaattgattgttagtcctcctgactctgtgacgttagtgagtacagaaagagatgccctggggaaaactcatctactgtggtcagatcaagaaaggtatgagaggcacaaccttggagggtaccaaggttgcagaagaggaaaaagcaagggtaaaggcaagaagtgggtgtcatgaaactcaataaatagcaaaatgaatcccctagcctttgtcctcacctaccctaaggcaggtgtgtatgcttgaattccttccgtatggctgtgagcaacttgggttggagacatatctaaatcctttttacttccactccctatatatagtagatgctcagtgtatatttgtggcattgaatggaggaccagaaggtagggtgcaggtgactcaacagctgtacatgattaggaggagcctatgtggggtggatttcagcacct

SEQ ID NO: 27313 - DNA, 2499 bp, Homo sapiens
  source 1..2499: mol_type = unassigned DNA
acaaccaggcggcagcggatacaaggccaggcggcggcgggcgggcggacctgcgccctgagcctttctgcgcccgcgggcaccatgagcagccgagtcggggacctgagcccccagcagcaggaagcgctggccaggttccgggagaacctccaggacctgctgcccatactgcccaatgctgatgactacttcctcctgcgctggctgcgagctcgaaactttgacctgcagaaatccgaagacatgctccgaaggcacatggagttccggaagcaacaagacctggacaacattgtcacatggcagccccctgaggtcatccagctgtatgactcgggtggtctttgtggctacgactacgaaggctgccctgtgtacttcaacatcattgggtccctcgaccccaagggtctcctgctgtcagcctccaagcaggatatgatccggaagcgcatcaaagtctgtgagctgctgttgcatgagtgtgagctgcaaactcagaagctgggcaggaagatcgagatggcgctgatggtgtttgacatggaggggctgagcctgaaacacctgtggaagccagctgtggaggtctaccagcagttttttagcatcctggaagcaaattatcctgagaccctgaagaatttaattgttattcgagccccaaaactgttccccgtggccttcaacttggtcaagtcgttcatgagtgaggagacacgcaggaagattgtgattctgggagacaactggaagcaggagctgacaaaattcatcagccccgaccagctgcctgtggagtttggggggaccatgactgaccccgatggcaaccccaagtgcctgaccaagatcaactatgggggtgaggtgcccaagagctactacctgtgcgagcaggtgaggctgcagtatgagcacacgaggtccgtgggccgcggctcctccctgcaggtggagaacgagatcctgttcccgggctgtgtgctcaggtggcagtttgcttcagatggtggggacatcggctttggggttttcctgaagaccaagatgggggagcagcagagtgctagggagatgacggaggtgctgcccagccagcgctacaatgcccacatggtgcctgaggatgggagcctcacctgcctccaggctggcgtctatgtcctgcgcttcgacaacacctacagccggatgcatgccaagaagctcagctacactgtggaggtgctgcttcccgacaaggcctctgaggagacgctgcagagtctcaaggcgatgagaccctccccaacacagtgaagaccccagccacctctacctgtgcactccaaccccttcacacccacccctctgacccctgccttcccaggcagggtggtgctggaggtggctgcagagagccacttgtcccacgtcaccatttcatctcattgtaggctcacctggcacagtggccaagcaggaaggggccaccagtgcatagcccatgctgaagattcagacaggaacctctttccctgttcccagagaatgcggctgagaatgagaacgctgaagatgatccagtccactgaggatgggtcctgcttgcagaagctgccctttcacccatcttgacaagatccagccacccaggactcacccatgcctggtgttccagcttcagggggtgtgcgtggttcctaggtcctgtggacatcacagcttcaggcctgaagagcagagaagccctgttctctgcatgtaggaggtcagcaggggtgggcaggcccagctggaggcagctgggtgagggtcctggttccagcagagcactggggcccatccaagtttgttctgccaccactggatggaaaattggaaatggactgggcgtggtggctcacgcctataatcccagcagtttgggaggctgagttgggcagatcacctgagatcaggagttcgggaccagcctgggcaacatggtgaaaccctgtctctactaaaaatacaaaaattagccgggcatggtggcgtgcacctgtaatcccagctactcaggaggctgaggcaggagaatcgcttgtacccaggaggcggaggttgtagtgagctgagatcgtgccactgcactccagcctgggcaacagagccagactccgtctctaaacaaacaaacaaacaaacaaacaaataaagaaagaacattggacatggagaggtggggcctggcatgggtaaccatcagaggaaaaagccatgctcagccttccagttgagtgggtaacgactgagtctccagggaattcccagtgacctcccctccacacctgctgtgatcctgccaacatttagctttggttctcttggcagctgcaccattcatgggtgcatatacgtagagtctgaacaggtgctctgctgctagaaacagcaaaccatctagattaaactcctaaagccagtgccacgaggcattcctgttccaactgggtgtttgagcagattggc

SEQ ID NO: 27314 - DNA, 1603 bp, Homo sapiens
  source 1..1603: mol_type = unassigned DNA
cggacctgcgccctgagcctttctgcgcccgcgggcaccatgagcagccgagtcggggacctgagcccccagcagcaggaagcgctggccaggttccgggagaacctccaggacctgctgcccatactgcccaatgctgatgactacttcctcctgcgctggctgcgagctcgaaactttgacctgcagaaatccgaagacatgctccgaaggcacatggagttccggaagcaacaagacctggacaacattgtcacatggcagccccctgaggtcatccagctgtatgactcgggtggtctttgtggctacgactacgaaggctgccctgtgtacttcaacatcattgggtccctcgaccccaagggtctcctgctgtcagcctccaagcaggatatgatccggaagcgcatcaaagtctgtgagctgctgttgcatgagtgtgagctgcaaactcagaagctgggcaggaagatcgagatggcgctgatggtgtttgacatggaggggctgagcctgaaacacctgtggaagccagctgtggaggtctaccagcagttttttagcatcctggaagcaaattatcctgagaccctgaagaatttaattgttattcgagccccaaaactgttccccgtggccttcaacttggtcaagtcgttcatgagtgaggagacacgcaggaagattgtgattctgggagacaactggaagcaggagctgacaaaattcatcagccccgaccagctgcctgtggagtttggggggaccatgactgaccccgatggcaaccccaagtgcctgaccaagatcaactatgggggtgaggtgcccaagagctactacctgtgcgagcaggtgaggctgcagtatgagcacacgaggtccgtgggccgcggctcctccctgcaggtggagaacgagatcctgttcccgggctgtgtgctcaggtggcagtttgcttcagatggtggggacatcggctttggggttttcctgaagaccaagatgggggagcagcagagtgctagggagatgacggaggtgctgcccagccagcgctacaatgcccacatggtgcctgaggatgggagcctcacctgcctccaggctggcgtctagaatgcggctgagaatgagaacgctgaagatgatccagtccactgaggatgggtcctgcttgcagaagctgccctttcacccatcttgacaagatccagccacccaggactcacccatgcctggtgttccagcttcagggggtgtgcgtggttcctaggtcctgtggacatcacagcttcaggcctgaagagcagagaagccctgttctctgcatgtaggaggtcagcaggggtgggcaggcccagctggaggcagctgggtgagggtcctggttccagcagagcactggggcccatccaagtttgttctgccaccactggatggaaaattggaaatggactgggcgtggtggctcacgcctataatcccagcagtttgggaggctgagttgggcagatcacctgagatcaggagttcgggaccagcctgggcaacatggtgaaaccctgtctctactaaaaatacaaaaattagccgggca

SEQ ID NO: 27315 - DNA, 2575 bp, Homo sapiens
  source 1..2575: mol_type = unassigned DNA
atctggcccaggaggcacaaccaggcggcagcggatacaaggccaggcggcggcgggcgggcggacctgcgccctgagcctttctgcgcccgcgggcaccatgagcagccgagtcggggacctgagcccccagcagcaggaagcgctggccaggatcctcctccgctcagttccgggagaacctccaggacctgctgcccatactgcccaatgctgatgactacttcctcctgcgctggctgcgagctcgaaactttgacctgcagaaatccgaagacatgctccgaaggcacatggagttccggaagcaacaagacctggacaacattgtcacatggcagccccctgaggtcatccagctgtatgactcgggtggtctttgtggctacgactacgaaggctgccctgtgtacttcaacatcattgggtccctcgaccccaagggtctcctgctgtcagcctccaagcaggatatgatccggaagcgcatcaaagtctgtgagctgctgttgcatgagtgtgagctgcaaactcagaagctgggcaggaagatcgagatggcgctgatggtgtttgacatggaggggctgagcctgaaacacctgtggaagccagctgtggaggtctaccagcagttttttagcatcctggaagcaaattatcctgagaccctgaagaatttaattgttattcgagccccaaaactgttccccgtggccttcaacttggtcaagtcgttcatgagtgaggagacacgcaggaagattgtgattctgggagacaactggaagcaggagctgacaaaattcatcagccccgaccagctgcctgtggagtttggggggaccatgactgaccccgatggcaaccccaagtgcctgaccaagatcaactatgggggtgaggtgcccaagagctactacctgtgcgagcaggtgaggctgcagtatgagcacacgaggtccgtgggccgcggctcctccctgcaggtggagaacgagatcctgttcccgggctgtgtgctcaggtggcagtttgcttcagatggtggggacatcggctttggggttttcctgaagaccaagatgggggagcagcagagtgctagggagatgacggaggtgctgcccagccagcgctacaatgcccacatggtgcctgaggatgggagcctcacctgcctccaggctggcgtctatgtgcggggtttgtgctccctgatcacctctccatcactgcagatgtcctgcgcttcgacaacacctacagccggatgcatgccaagaagctcagctacactgtggaggtgctgcttcccgacaaggcctctgaggagacgctgcagagtctcaaggcgatgagaccctccccaacacagtgaagaccccagccacctctacctgtgcactccaaccccttcacacccacccctctgacccctgccttcccaggcagggtggtgctggaggtggctgcagagagccacttgtcccacgtcaccatttcatctcattgtaggctcacctggcacagtggccaagcaggaaggggccaccagtgcatagcccatgctgaagattcagacaggaacctctttccctgttcccagagaatgcggctgagaatgagaacgctgaagatgatccagtccactgaggatgggtcctgcttgcagaagctgccctttcacccatcttgacaagatccagccacccaggactcacccatgcctggtgttccagcttcagggggtgtgcgtggttcctaggtcctgtggacatcacagcttcaggcctgaagagcagagaagccctgttctctgcatgtaggaggtcagcaggggtgggcaggcccagctggaggcagctgggtgagggtcctggttccagcagagcactggggcccatccaagtttgttctgccaccactggatggaaaattggaaatggactgggcgtggtggctcacgcctataatcccagcagtttgggaggctgagttgggcagatcacctgagatcaggagttcgggaccagcctgggcaacatggtgaaaccctgtctctactaaaaatacaaaaattagccgggcatggtggcgtgcacctgtaatcccagctactcaggaggctgaggcaggagaatcgcttgtacccaggaggcggaggttgtagtgagctgagatcgtgccactgcactccagcctgggcaacagagccagactccgtctctaaacaaacaaacaaacaaacaaacaaataaagaaagaacattggacatggagaggtggggcctggcatgggtaaccatcagaggaaaaagccatgctcagccttccagttgagtgggtaacgactgagtctccagggaattcccagtgacctcccctccacacctgctgtgatcctgccaacatttagctttggttctcttggcagctgcaccattcatgggtgcatatacgtagagtctgaacaggtgctctgctgctagaaacagcaaaccatctagattaaactcctaaagccagtgccacgaggcattcctgttccaactgggtgtttgagcagattggc

SEQ ID NO: 27316 - DNA, 2564 bp, Homo sapiens
  source 1..2564: mol_type = unassigned DNA
atctggcccaggaggcacaaccaggcggcagcggatacaaggccaggcggcggcgggcgggcggacctgcgccctgagcctttctgcgcccgcgggcaccatgagcagccgagtcggggacctgagcccccagcagcaggaagcgctggccaggttccgggagaacctccaggacctgctgcccatactgcccaatgctgatgactacttcctcctgcgctggctgcgagctcgaaactttgacctgcagaaatccgaagacatgctccgaaggacccaagtccccccagcccacctcctgtccccacgctctgagagcctggcacatggagttccggaagcaacaagacctggacaacattgtcacatggcagccccctgaggtcatccagctgtatgactcgggtggtctttgtggctacgactacgaaggctgccctgtgtacttcaacatcattgggtccctcgaccccaagggtctcctgctgtcagcctccaagcaggatatgatccggaagcgcatcaaagtctgtgagctgctgttgcatgagtgtgagctgcaaactcagaagctgggcaggaagatcgagatggcgctgatggtgtttgacatggaggggctgagcctgaaacacctgtggaagccagctgtggaggtctaccagcagttttttagcatcctggaagcaaattatcctgagaccctgaagaatttaattgttattcgagccccaaaactgttccccgtggccttcaacttggtcaagtcgttcatgagtgaggagacacgcaggaagattgtgattctgggagacaactggaagcaggagctgacaaaattcatcagccccgaccagctgcctgtggagtttggggggaccatgactgaccccgatggcaaccccaagtgcctgaccaagatcaactatgggggtgaggtgcccaagagctactacctgtgcgagcaggtgaggctgcagtatgagcacacgaggtccgtgggccgcggctcctccctgcaggtggagaacgagatcctgttcccgggctgtgtgctcaggtggcagtttgcttcagatggtggggacatcggctttggggttttcctgaagaccaagatgggggagcagcagagtgctagggagatgacggaggtgctgcccagccagcgctacaatgcccacatggtgcctgaggatgggagcctcacctgcctccaggctggcgtctatgtcctgcgcttcgacaacacctacagccggatgcatgccaagaagctcagctacactgtggaggtgctgcttcccgacaaggcctctgaggagacgctgcagagtctcaaggcgatgagaccctccccaacacagtgaagaccccagccacctctacctgtgcactccaaccccttcacacccacccctctgacccctgccttcccaggcagggtggtgctggaggtggctgcagagagccacttgtcccacgtcaccatttcatctcattgtaggctcacctggcacagtggccaagcaggaaggggccaccagtgcatagcccatgctgaagattcagacaggaacctctttccctgttcccagagaatgcggctgagaatgagaacgctgaagatgatccagtccactgaggatgggtcctgcttgcagaagctgccctttcacccatcttgacaagatccagccacccaggactcacccatgcctggtgttccagcttcagggggtgtgcgtggttcctaggtcctgtggacatcacagcttcaggcctgaagagcagagaagccctgttctctgcatgtaggaggtcagcaggggtgggcaggcccagctggaggcagctgggtgagggtcctggttccagcagagcactggggcccatccaagtttgttctgccaccactggatggaaaattggaaatggactgggcgtggtggctcacgcctataatcccagcagtttgggaggctgagttgggcagatcacctgagatcaggagttcgggaccagcctgggcaacatggtgaaaccctgtctctactaaaaatacaaaaattagccgggcatggtggcgtgcacctgtaatcccagctactcaggaggctgaggcaggagaatcgcttgtacccaggaggcggaggttgtagtgagctgagatcgtgccactgcactccagcctgggcaacagagccagactccgtctctaaacaaacaaacaaacaaacaaacaaataaagaaagaacattggacatggagaggtggggcctggcatgggtaaccatcagaggaaaaagccatgctcagccttccagttgagtgggtaacgactgagtctccagggaattcccagtgacctcccctccacacctgctgtgatcctgccaacatttagctttggttctcttggcagctgcaccattcatgggtgcatatacgtagagtctgaacaggtgctctgctgctagaaacagcaaaccatctagattaaactcctaaagccagtgccacgaggcattcctgttccaactgggtgtttgagcagattggc

SEQ ID NO: 27317 - DNA, 3910 bp, Homo sapiens
  source 1..3910: mol_type = unassigned DNA
ccggcggctgccgccagctcgctcgagagagagaccgagaggttcagggagctgttgctgtatggccgtaagaaggatgctttggagtctgcaatgaagaatggcctgtggggtcacgctctgctacttgcaagtaagatggacagccggacacacgcccgagtcatgaccaggtttgctaacagcctcccaatcaacgaccctctgcagacagtctaccagctcatgtccggacggatgcctgccgcgtccacgtgctgtggagacgagaaatggggagattggaggccgcacctcgccatggtcttgtccaacttgaacaacaacatggacgtcgagtccaggacgatggctaccatgggcgacactctggcttcaaggggcctcttggatgcggcccacttctgctacctcatggcccaggcgggatttggtgtttacacgaagaaaactacaaagcttgtcttaatcggatccaatcacagtttgccattcttaaagttcgcaaccaacgaagcaatccagaggacggaagcctatgagtacgcccagtccctgggtgccgagacctgccccctgcctagtttccaggtgtttaagttcatctactcctgccgcctggcggaaatggggctggccacgcaagccttccactactgtgaggccatcgcgaagagcatcctgacgcagccgcacctgtattccccggtgttgatcagccagcttgtgcagatggcttcccagttacgactcttcgatccccagctgaaagagaagccagaagaggagtccttggccgcacccacgtggctggttcacctgcagcaggtggagcggcagattaaggagggggctggagtatggcatcaggatggagccctcccgcagcagtgtcctggcactccgagttccgagatggagcagttggacaggccaggactcagtcagccaggagccctggggatcgccaaccctctgctggcggtgcctgcaccgagccctgagcactcgagcccgagcgtgcggctgctgccctcagctccgcagacgctccctgacggcccattggccagtcctgccagagtgccgatgttcccagtgccactgcccccggggcccctggagccgggtcctggctgtgtgaccccagggcctgcacttggcttcctggagccctccgggcctggcctcccacctggtgtgccacctctgcaggaaaggagacacttgctccaggaagccaggagcccagacccagggatagtgccgcaggaggcgcctgttggaaactcactttccgagctaagcgaagaaaattttgatggaaaatttgctaatctgaccccctcgaggacggtgccagactcggaggcccccccagggtgggatcgtgccgactcgggtcccacgcagccacctctgtctctctcacccgctcccgaaacaaagagacccggacaggcagccaagaaagaaacgaaggaacctaagaagggtgaatcctggttctttcgttggctacctggaaagaaaaagacagaagcttatttgccagatgacaagaacaaatcgattgtttgggatgaaaagaaaaaccagtgggtgaatttaaatgagccagaagaggagaagaaagccccgcccccacctccaacctcgatgcccaagactgtgcaagctgccccgcctgccctcccagggcctcctggagcccccgtgaacatgtactctagaagagcagcaggaaccagagctcgctacgttgacgtcctgaacccaagcgggacccagcggagcgagccggctctcgctcctgcggactttgtcgctccactcgcgccactcccaattccttctaacttgttcgtgccaaccccagatgcagaagaaccacagcttccagacgggactggcagggaagggcctgcagcagctaggggcctggccaatccagagcctgccccagagcccaaggttttaagctctgcagcgtcactccctggctctgaactcccctcctccaggcctgagggttcccagggaggagagctttcgcgctgtagttcaatgagttcattatcacgtgaagtgagccagcattttaatcaggctcctggcgacctccctgctgcagggggccctcccagcggggccatgcccttctacaaccctgctcagctggcacaggcctgcgccacctccgggagctcaaggctagggaggattggccagaggaagcacctggtgctgaactaggcttgccctgctgtgaacttgcacttggagccctgacgctgctgttctccccgaagaacccgaccgacctccgcgatctccgtcccgcccccagggagacacagcagtgactcagagctggtcgcacactgtgcctccctcctcaccgcccatcgtaatgaattattttgaaaattaattccaccatcctttcagattctggatggaaagactgaatctttgactcagaattgtttgccgaaaagaatgatgtgactttcttagtcatttaggatgatttaaggatatagtattcctggtcatttaagaatgttcattcattgaagccggagctgtctctgccacaggagagccacatggtcggtagtaaccagggcctctccaagcccagctgtgagtcactgcccagtgagtcccgcgcttcctttaaggtgctgggagcaaagagagggtgactgaggcagaccccaacccctgctctgcaccatctgggccctcgccgtgtttgaacctggctgaatgagtggagggcgctgtgttctcaatcagcgcctccgaggagccgtggggttccttcggcattagttcacggtttttgagagaggccttagttactgcagtgaatttctttcctgttgcaaagacgcttccagcctcactttactttctgtggcctgatgaggaccatgggtgattttgtgtacccaaagcgctggggactgcccaccgtgtggcccagtcactgggaaggagccccagagagccggctgtctgacatgatggctcagggtggtcatccaggttgaaaactgaccgtgtgatgtttgatttgggcttcatttcgtgtgtaggagcacggttagactcactgttaaggaagctggatgcacttctctaaaaggctgcactttccgtgagcacttttcgtggtacaatccacatgacccactttctcccctgggggacgttggttcagaggttggtagcacttggggagagtatcttaacacagtttcttgacagcagctctggaacttagtatttctgccccgagttttgccacactgagactttgagtagctcctggtggactcaaccctgttcaactcagagacgggcctcctctcactgatgcaaagctttaaggcttctctgactgttctgaaactcttcgtattcttgtcaagtctaaagagactgaagaaaagatttaaatactaataaaaatcagtagataatttctgtaggttctgctggaggaatacaaactgtttggtgttttaaatttaagtgtagaaattgtagaatgtggaattagcacagatccttcctggctttctgtttcacttgatcatttagcccagaccacccaggatgttttccaaaatgttccacaggcgtgtcccgctggatccatttgtccttgtcacttggagaaaggccagtccctgtgacggggcagccctctctgtccctcggtcagctcgtgtgaatcctgggacctcttccggtcggctctgcccgctgttctggggtcgactgccacgacttttgattcaagaagcttcctccaggcgggagcggctatttttcctaaatgagaattgttacattgcaaattgttgaataaaatattttgcgctccttcaagcac

SEQ ID NO: 27318 - DNA, 6556 bp, Homo sapiens
  source 1..6556: mol_type = unassigned DNA
atgcctgggctcgaccgacccctgagcaggcaaaacccacatgacggtgtggtcaccccagcagcatccccttccctccctcagcctggtctgcagatgccaggacagtgggggccagtgcagggaggcccacagccctcggggcaacatcgttcaccctgccctgaaggacctgttcccagcggggtgccctgtgccaccagcgttcctcatttccccaccccgtccatcctacatcagggccctggtcatgagcaacacagccctctggtggctcccccagcagccttgcccagtgacggaagagacgaggtgagccacttgcaaagtggaagccacctggccaataactctgatcctgaaagtacattcaggcaaaatcccagaattgtgaatcactgggcaagcccagagctcaggcagaatccaggagtgaagaatgagcaccggcccgcctctgctcttgtgaaccccctcgcccggggagatagcccagaaaaccgtacgcaccacccactgggggctggggccgggtctggctgtgccccgctagaagcagactcaggagcttcaggagctctggcgatgtttttccaagggggagagacagaaaatgaggagaatctctcatctgaaaaagcaggcttatctggtcaagcggactttgacgatttctgctccagccctgggctaggccgtccgcccgcacctacacacgtgggggcaggcagcctctgccaggcccttctcccaggccccagcaatgaggctgctggtgatgtgtggggtgacacagcgagcacaggggtgccggatgccagcggctcgcagtatgagaatgttgagaacttagaatttgttcagaatcaagaagttctgccaagtgagcccctcaatttggacccttcctccccgagtgaccagttcagatatgggccccttcctgggccagctgtgcccaggcatggtgctgtgtgccacaccggagcccctgatgccacactgcatacagtgcaccctgacagcgtgtcatccagctatagcagcagaagccacggaaggctctcaggctcagccaggccccaggagctggttggcacattcattcagcaagaagttggaaaacccgaggatgaagcttcaggtagtttttttaagcaaatcgattcttctcccgtaggaggtgaaacagacgagaccactgtgagccagaattaccgtggcagcgtgtcccagccctcaaccccgagccccccgaaacctacaggaatatttcagacaagtgcaaatagttctttcgaaccggtaaaatctcacttagttggggtaaaaccatttgaggcagatcgcgccaacgtggttggtgaagtaagggagacctgtgtccgccagaagcagtgcagaccagctgccgccctgcccgatgcttcccctggcaacctggagcagccaccagacaacatggagaccctctgtgcaccccaggtctgtcccctgcctcttaactccaccacggaagctgtgcacatgcttccgcacgcaggggcaccgcccttggatactgtgtatccagcacccgagaagaggccttcagccaggacccaggggcccgtgaagtgtgagagcccagcaacgactctgtgggcgcaaagtgagctgccagattttggaggcaacgtccttctggcccctgcagccccggcgctttatgtgtgtgcaaaacctcagccacctgttgttcagcctccagaagaggcgatgtccgggcagcagtcacggaacccaagctcggcggccccggtgcagagccgaggtggcattggtgcttctgagaaccttgagaatcctcccaaaatgggagaggaggaggcccttcagtcccaggcgagttctggttatgcaagtttattatcctcaccgcccactgagtctctgcagaatcctccagtcttgattgctcagcctgatcacagctataatctggctcagcccattaacttttctgtgtccttatcgaactctcatgagaagaatcagtcctggagagaggctttggtgggggatagacctgcagtcagcagttgggctctcggtggtgattctggggagaacacttctttgtctgggattccaaccagctctgtccttagcttgtctctgcctagcagtgttgcccaaagtaattttccacaaggttctggtgcttccgaaatggtttctaatcagcctgctaatttgctggttcaaccaccatcccagccagttccagagaacttggttccagaaagtcaaaaggatcgtaaggcaggaagtgctcttcccggatttgctaatagccctgctggaagcacaagtgtggtgttagttccacctgcacacggcaccctggtgcctgatggtaataaggcaaaccattccagtcatcaggaagacacttacggagccctagactttaccttaagcaggactttggaaaatcctgtaaacgtgtacaacccgtcccattctgacagcctcgcttctcagcaaagtgttgccagtcatcccagacaatctgggcctggggcgcctaaccttgaccgtttttatcagcaggtcacgaaagatgcccagggccagcctggcctcgaaagagcccagcaggagctggtgccaccccagcaacaggcttctcccccacaactacccaaagccatgttttcggagctgtcaaatccagaaagtctgcccgcacagggacaggcccagaactcagcacagtcaccagcaagtctggttctggtcgacgcgggtcagcagctgccccctcggcctcctcagtcctctagcgtgtctctggtgtccagtggctccggccaggcagctgtgccgtcagagcagccgtggccacagccagtgcctgcacttgcccccggcccaccgcctcaggacctggccgcctactactactaccggcctttgtacgatgcctaccagcctcagtactctttgccgtacccaccggagcctggcgcagcctccctctattaccaggatgtctacagcctctatgagcctcgatacaggccctatgatggtgctgcgtctgcttacgcccagaactaccgctatcccgagcccgagcggcccagctcccgagccagccactcctcggaacggccacctcccaggcaaggatatcctgaaggatactatagttccaaaagtggatggagcagtcagagcgattactatgcaagctattactccagccagtacgattatggagatccaggtcactgggatcgttaccactacagtgctagagtcagggacccccgcacctatgaccggaggtattggtgtgatgcagagtatgacgcatacaggagagagcactctgccttcggggacaggcccgagaaacgtgacaacaactggaggtacgatcctcgcttcacggggagttttgacgatgaccccgatccgcacagagacccttatggggaagaggtggaccggcgcagcgtccacagcgagcactcggcacggagcctgcacagcgcacacagcctggccagccgccgcagcagcctcagctcccactcgcaccagagtcagatttacagaagccacaatgtggctgccggttcctacgaggccccgcttcctccaggctcctttcacggcgattttgcctacggcacctaccgcagcaatttcagcagtggccccggcttcccagagtatggctaccctgccgacaccgtctggcctgccatggagcaagtttcatcaagaccaacttctcctgaaaaattttcagtgcctcatgtctgtgccaggtttggccctggcggtcagcttatcaaagtgattcccaatctgccttcagaaggacagccggccttggtggaggtccacagcatggaggccttgctgcagcacacgtctgagcaggaggagatgcgggcgttcccgggacccctggccaaagacgacacccataaggtggatgtcattaattttgcacagaacaaagctatgaaatgtttgcagaatgaaaacttaattgacaaagagtctgcaagtcttctttggaattttattgttctcttatgcagacaaaatgggaccgtggtagggaccgacattgcggagcttctgttacgagaccacagaacagtgtggcttcctgggaagtcgcccaatgaagcaaacctgattgatttcacgaatgaggcagtggagcaggtggaagaggaggagtctggtgaggcccagctctctttcctcactggtggtccggcggctgccgccagctcgctcgagagagagaccgagaggttcagggagctgttgctgtatggccgtaagaaggatgctttggagtctgcaatgaagaatggcctgtggggtcacgctctgctacttgcaagtaagatggacagccggacacacgcccgagtcatgaccaggtttgctaacagcctcccaatcaacgaccctctgcagacagtctaccagctcatgtccggacggatgcctgccgcgtccacgtgctgtggagacgagaaatggggagattggaggccgcacctcgccatggtcttgtccaacttgaacaacaacatggacgtcgagtccaggacgatggctaccatgggcgacactctggcttcaaggggcctcttggatgcggcccacttctgctacctcatggcccaggcgggatttggtgtttacacgaagaaaactacaaagcttgtcttaatcggatccaatcacagtttgccattcttaaagttcgcaaccaacgaagcaatccagaggacggaagcctatgagtacgcccagtccctgggtgccgagacctgccccctgcctagtttccaggtgtttaagttcatctactcctgccgcctggcggaaatggggctggccacgcaagccttccactactgtgaggccatcgcgaagagcatcctgacgcagccgcacctgtattccccggtgttgatcagccagcttgtgcagatggcttcccagttacgactcttcgatccccagctgaaagagaagccagaagaggagtccttggccgcacccacgtggctggttcacctgcagcaggtggagcggcagattaaggagggggctggagtatggcatcaggatggagccctcccgcagcagtgtcctggcactccgagttccgagatggagcagttggacaggccaggactcagtcagccaggagccctggggatcgccaaccctctgctggcggtgcctgcaccgagccctgagcactcgagcccgagcgtgcggctgctgccctcagctccgcagacgctccctgacggcccattggccagtcctgccagagtgccgatgttcccagtgccactgcccccggggcccctggagccgggtcctggctgtgtgaccccagggcctgcacttggcttcctggagccctccgggcctggcctcccacctggtgtgccacctctgcaggaaaggagacacttgctccaggaagccaggagcccagacccagggatagtgccgcaggaggcgcctgttggaaactcactttccgagctaagcgaagaaaattttgatggaaaatttgctaatctgaccccctcgaggacggtgccagactcggaggcccccccagggtgggatcgtgccgactcgggtcccacgcagccacctctgtctctctcacccgctcccgaaacaaagagacccggacaggcagccaagaaagaaacgaaggaacctaagaagggtgaatcctggttctttcgttggctacctggaaagaaaaagacagaagcttatttgccagatgacaagaacaaatcgattgtttgggatgaaaagaaaaaccagtgggtgaatttaaatgagccagaagaggagaagaaagccccgcccccacctccaacctcgatgcccaagactgtgcaagctgccccgcctgccctcccagggcctcctggagcccccgtgaacatgtactctagaagagcagcaggaaccagagctcgctacgttgacgtcctgaacccaagcgggacccagcggagcgagccggctctcgctcctgcggactttgtcgctccactcgcgccactcccaattccttctaacttgttcgtgccaaccccagatgcagaagaaccacagcttccagacgggactggcagggaagggcctgcagcagctaggggcctggccaatccagagcctgccccagagcccaaggttttaagctctgcagcgtcactccctggctctgaactcccctcctccaggcctgagggttcccagggaggagaggctcctggcgacctccctgctgcagggggccctcccagcggggccatgcccttctacaaccctgctcagctggcacaggcctgcgccacctccgggagctcaaggctagggaggattggccagaggaagcacctggtgctgaactaggcttgccctgctgtgaacttgcacttggagccctgacgctgctgttctccccgaagaacccgaccgacctccgcga

SEQ ID NO: 27319 - DNA, 8806 bp, Homo sapiens
  source 1..8806: mol_type = unassigned DNA
tccagctccaattaaggaacagctatatcctgcttccttctgtaagcagcatcgacttgtgcaagggttcagtcatgcagccaccgccccagacggtcccgtctggcatggctgggccacctccagccgggaatcctcggagcgtgttctgggctagcagcccttacaggagacgggctaataataatgcagcagtggctccgacaacttgcccgttgcagccggtcacggatccatttgcttttagtagacaggcgctccaaagtacaccactgggcagttcgtccaaaagcagtccacctgtcttgcaaggcccagcccccgcagggttttctcagcaccccggtttgcttgttcctcacacacatgccagagatagctctcagggaccctgtgagcccctgcctggacctctgacacagcccagagcacatgccagtccgttttctggtgcattgacaccttcagcacctcctgggcctgagatgaacaggagtgcagaggtcggtcccagttcagagcctgaagttcagactctgccatatcttcctcactacattccaggagtggatcctgaaacgtctcatgggggccaccctcatgggaacatgcctgggctcgaccgacccctgagcaggcaaaacccacatgacggtgtggtcaccccagcagcatccccttccctccctcagcctggtctgcagatgccaggacagtgggggccagtgcagggaggcccacagccctcggggcaacatcgttcaccctgccctgaaggacctgttcccagcggggtgccctgtgccaccagcgttcctcatttccccaccccgtccatcctacatcagggccctggtcatgagcaacacagccctctggtggctcccccagcagccttgcccagtgacggaagagacgaggtgagccacttgcaaagtggaagccacctggccaataactctgatcctgaaagtacattcaggcaaaatcccagaattgtgaatcactgggcaagcccagagctcaggcagaatccaggagtgaagaatgagcaccggcccgcctctgctcttgtgaaccccctcgcccggggagatagcccagaaaaccgtacgcaccacccactgggggctggggccgggtctggctgtgccccgctagaagcagactcaggagcttcaggagctctggcgatgtttttccaagggggagagacagaaaatgaggagaatctctcatctgaaaaagcaggcttatctggtcaagcggactttgacgatttctgctccagccctgggctaggccgtccgcccgcacctacacacgtgggggcaggcagcctctgccaggcccttctcccaggccccagcaatgaggctgctggtgatgtgtggggtgacacagcgagcacaggggtgccggatgccagcggctcgcagtatgagaatgttgagaacttagaatttgttcagaatcaagaagttctgccaagtgagcccctcaatttggacccttcctccccgagtgaccagttcagatatgggccccttcctgggccagctgtgcccaggcatggtgctgtgtgccacaccggagcccctgatgccacactgcatacagtgcaccctgacagcgtgtcatccagctatagcagcagaagccacggaaggctctcaggctcagccaggccccaggagctggttggcacattcattcagcaagaagttggaaaacccgaggatgaagcttcaggtagtttttttaagcaaatcgattcttctcccgtaggaggtgaaacagacgagaccactgtgagccagaattaccgtggcagcgtgtcccagccctcaaccccgagccccccgaaacctacaggaatatttcagacaagtgcaaatagttctttcgaaccggtaaaatctcacttagttggggtaaaaccatttgaggcagatcgcgccaacgtggttggtgaagtaagggagacctgtgtccgccagaagcagtgcagaccagctgccgccctgcccgatgcttcccctggcaacctggagcagccaccagacaacatggagaccctctgtgcaccccaggtctgtcccctgcctcttaactccaccacggaagctgtgcacatgcttccgcacgcaggggcaccgcccttggatactgtgtatccagcacccgagaagaggccttcagccaggacccaggggcccgtgaagtgtgagagcccagcaacgactctgtgggcgcaaagtgagctgccagattttggaggcaacgtccttctggcccctgcagccccggcgctttatgtgtgtgcaaaacctcagccacctgttgttcagcctccagaagaggcgatgtccgggcagcagtcacggaacccaagctcggcggccccggtgcagagccgaggtggcattggtgcttctgagaaccttgagaatcctcccaaaatgggagaggaggaggcccttcagtcccaggcgagttctggttatgcaagtttattatcctcaccgcccactgagtctctgcagaatcctccagtcttgattgctcagcctgatcacagctataatctggctcagcccattaacttttctgtgtccttatcgaactctcatgagaagaatcagtcctggagagaggctttggtgggggatagacctgcagtcagcagttgggctctcggtggtgattctggggagaacacttctttgtctgggattccaaccagctctgtccttagcttgtctctgcctagcagtgttgcccaaagtaattttccacaaggttctggtgcttccgaaatggtttctaatcagcctgctaatttgctggttcaaccaccatcccagccagttccagagaacttggttccagaaagtcaaaaggatcgtaaggcaggaagtgctcttcccggatttgctaatagccctgctggaagcacaagtgtggtgttagttccacctgcacacggcaccctggtgcctgatggtaataaggcaaaccattccagtcatcaggaagacacttacggagccctagactttaccttaagcaggactttggaaaatcctgtaaacgtgtacaacccgtcccattctgacagcctcgcttctcagcaaagtgttgccagtcatcccagacaatctgggcctggggcgcctaaccttgaccgtttttatcagcaggtcacgaaagatgcccagggccagcctggcctcgaaagagcccagcaggagctggtgccaccccagcaacaggcttctcccccacaactacccaaagccatgttttcggagctgtcaaatccagaaagtctgcccgcacagggacaggcccagaactcagcacagtcaccagcaagtctggttctggtcgacgcgggtcagcagctgccccctcggcctcctcagtcctctagcgtgtctctggtgtccagtggctccggccaggcagctgtgccgtcagagcagccgtggccacagccagtgcctgcacttgcccccggcccaccgcctcaggacctggccgcctactactactaccggcctttgtacgatgcctaccagcctcagtactctttgccgtacccaccggagcctggcgcagcctccctctattaccaggatgtctacagcctctatgagcctcgatacaggccctatgatggtgctgcgtctgcttacgcccagaactaccgctatcccgagcccgagcggcccagctcccgagccagccactcctcggaacggccacctcccaggcaaggatatcctgaaggatactatagttccaaaagtggatggagcagtcagagcgattactatgcaagctattactccagccagtacgattatggagatccaggtcactgggatcgttaccactacagtgctagagtcagggacccccgcacctatgaccggaggtattggtgtgatgcagagtatgacgcatacaggagagagcactctgccttcggggacaggcccgagaaacgtgacaacaactggaggtacgatcctcgcttcacggggagttttgacgatgaccccgatccgcacagagacccttatggggaagaggtggaccggcgcagcgtccacagcgagcactcggcacggagcctgcacagcgcacacagcctggccagccgccgcagcagcctcagctcccactcgcaccagagtcagatttacagaagccacaatgtggctgccggttcctacgaggccccgcttcctccaggctcctttcacggcgattttgcctacggcacctaccgcagcaatttcagcagtggccccggcttcccagagtatggctaccctgccgacaccgtctggcctgccatggagcaagtttcatcaagaccaacttctcctgaaaaattttcagtgcctcatgtctgtgccaggtttggccctggcggtcagcttatcaaagtgattcccaatctgccttcagaaggacagccggccttggtggaggtccacagcatggaggccttgctgcagcacacgtctgagcaggaggagatgcgggcgttcccgggacccctggccaaagacgacacccataaggtggatgtcattaattttgcacagaacaaagctatgaaatgtttgcagaatgaaaacttaattgacaaagagtctgcaagtcttctttggaattttattgttctcttatgcagacaaaatgggaccgtggtagggaccgacattgcggagcttctgttacgagaccacagaacagtgtggcttcctgggaagtcgcccaatgaagcaaacctgattgatttcacgaatgaggcagtggagcaggtggaagaggaggagtctggtgaggcccagctctctttcctcactggtggtccggcggctgccgccagctcgctcgagagagagaccgagaggttcagggagctgttgctgtatggccgtaagaaggatgctttggagtctgcaatgaagaatggcctgtggggtcacgctctgctacttgcaagtaagatggacagccggacacacgcccgagtcatgaccaggtttgctaacagcctcccaatcaacgaccctctgcagacagtctaccagctcatgtccggacggatgcctgccgcgtccacgtgctgtggagacgagaaatggggagattggaggccgcacctcgccatggtcttgtccaacttgaacaacaacatggacgtcgagtccaggacgatggctaccatgggcgacactctggcttcaaggggcctcttggatgcggcccacttctgctacctcatggcccaggcgggatttggtgtttacacgaagaaaactacaaagcttgtcttaatcggatccaatcacagtttgccattcttaaagttcgcaaccaacgaagcaatccagaggacggaagcctatgagtacgcccagtccctgggtgccgagacctgccccctgcctagtttccaggtgtttaagttcatctactcctgccgcctggcggaaatggggctggccacgcaagccttccactactgtgaggccatcgcgaagagcatcctgacgcagccgcacctgtattccccggtgttgatcagccagcttgtgcagatggcttcccagttacgactcttcgatccccagctgaaagagaagccagaagaggagtccttggccgcacccacgtggctggttcacctgcagcaggtggagcggcagattaaggagggggctggagtatggcatcaggatggagccctcccgcagcagtgtcctggcactccgagttccgagatggagcagttggacaggccaggactcagtcagccaggagccctggggatcgccaaccctctgctggcggtgcctgcaccgagccctgagcactcgagcccgagcgtgcggctgctgccctcagctccgcagacgctccctgacggcccattggccagtcctgccagagtgccgatgttcccagtgccactgcccccggggcccctggagccgggtcctggctgtgtgaccccagggcctgcacttggcttcctggagccctccgggcctggcctcccacctggtgtgccacctctgcaggaaaggagacacttgctccaggaagccaggagcccagacccagggatagtgccgcaggaggcgcctgttggaaactcactttccgagctaagcgaagaaaattttgatggaaaatttgctaatctgaccccctcgaggacggtgccagactcggaggcccccccagggtgggatcgtgccgactcgggtcccacgcagccacctctgtctctctcacccgctcccgaaacaaagagacccggacaggcagccaagaaagaaacgaaggaacctaagaagggtgaatcctggttctttcgttggctacctggaaagaaaaagacagaagcttatttgccagatgacaagaacaaatcgattgtttgggatgaaaagaaaaaccagtgggtgaatttaaatgagccagaagaggagaagaaagccccgcccccacctccaacctcgatgcccaagactgtgcaagctgccccgcctgccctcccagggcctcctggagcccccgtgaacatgtactctagaagagcagcaggaaccagagctcgctacgttgacgtcctgaacccaagcgggacccagcggagcgagccggctctcgctcctgcggactttgtcgctccactcgcgccactcccaattccttctaacttgttcgtgccaaccccagatgcagaagaaccacagcttccagacgggactggcagggaagggcctgcagcagctaggggcctggccaatccagagcctgccccagagcccaaggttttaagctctgcagcgtcactccctggctctgaactcccctcctccaggcctgagggttcccagggaggagagctttcgcgctgtagttcaatgagttcattatcacgtgaagtgagccagcattttaatcaggctcctggcgacctccctgctgcagggggccctcccagcggggccatgcccttctacaaccctgctcagctggcacaggcctgcgccacctccgggagctcaaggctagggaggattggccagaggaagcacctggtgctgaactaggcttgccctgctgtgaacttgcacttggagccctgacgctgctgttctccccgaagaacccgaccgacctccgcgatctccgtcccgcccccagggagacacagcagtgactcagagctggtcgcacactgtgcctccctcctcaccgcccatcgtaatgaattattttgaaaattaattccaccatcctttcagattctggatggaaagactgaatctttgactcagaattgtttgccgaaaagaatgatgtgactttcttagtcatttaggatgatttaaggatatagtattcctggtcatttaagaatgttcattcattgaagccggagctgtctctgccacaggagagccacatggtcggtagtaaccagggcctctccaagcccagctgtgagtcactgcccagtgagtcccgcgcttcctttaaggtgctgggagcaaagagagggtgactgaggcagaccccaacccctgctctgcaccatctgggccctcgccgtgtttgaacctggctgaatgagtggagggcgctgtgttctcaatcagcgcctccgaggagccgtggggttccttcggcattagttcacggtttttgagagaggccttagttactgcagtgaatttctttcctgttgcaaagacgcttccagcctcactttactttctgtggcctgatgaggaccatgggtgattttgtgtacccaaagcgctggggactgcccaccgtgtggcccagtcactgggaaggagccccagagagccggctgtctgacatgatggctcagggtggtcatccaggttgaaaactgaccgtgtgatgtttgatttgggcttcatttcgtgtgtaggagcacggttagactcactgttaaggaagctggatgcacttctctaaaaggctgcactttccgtgagcacttttcgtggtacaatccacatgacccactttctcccctgggggacgttggttcagaggttggtagcacttggggagagtatcttaacacagtttcttgacagcagctctggaacttagtatttctgccccgagttttgccacactgagactttgagtagctcctggtggactcaaccctgttcaactcagagacgggcctcctctcactgatgcaaagctttaaggcttctctgactgttctgaaactcttcgtattcttgtcaagtctaaagagactgaagaaaagatttaaatactaataaaaatcagtagataatttctgtaggttctgctggaggaatacaaactgtttggtgttttaaatttaagtgtagaaattgtagaatgtggaattagcacagatccttcctggctttctgtttcacttgatcatttagcccagaccacccaggatgttttccaaaatgttccacaggcgtgtcccgctggatccatttgtccttgtcacttggagaaaggccagtccctgtgacggggcagccctctctgtccctcggtcagctcgtgtgaatcctgggacctcttccggtcggctctgcccgctgttctggggtcgactgccacgacttttgattcaagaagcttcctccaggcgggagcggctatttttcctaaatgagaattgttacattgcaaattgttgaataaaatattttgcgctccttcaagcaccttc

SEQ ID NO: 27320 - DNA, 3073 bp, Homo sapiens
  source 1..3073: mol_type = unassigned DNA
gtctctggatctgcttcccacctccatcctcctggtgtctctgtggatctgctccccacctccatcctcctggtgtctctgtggatctgccccccacctccatcctcctggtgtctctgtggatctgcccccgacctccattctcctggtgtctctggatctgctccccacctccatcctcctggtgtctctgtggatctgctccccacctccatcctcctggtgtgtctggatctgctccccacctccatcctggtgtctctatggatctgctccccacctccatcctcctggcgtctctgtggatctgctcccacctccatcctcctggtgtctctgtggatctgccccccacctccatcctcctggtgtctctgtggatctgctcccacctccatcctcctggtgtctctgtggatcgccccccacctccatcctcctggtgtctctgtggatcgccccccacctccatcctcctggtgtctctgtggatctgctccccacctccatcctcctggtgtctctgtggatctgctcccacctccattctcctggtgtctctgtggatctggcgactctggggcctcacagaaggtgaatcctggttctttcgttggctacctggaaagaaaaagacagaagcttatttgccagatgacaagaacaaatcgattgtttgggatgaaaagaaaaaccagtgggtgaatttaaatgagccagaagaggagaagaaagccccgcccccacctccaacctcgatgcccaagactgtgcaagctgccccgcctgccctcccagggcctcctggagcccccgtgaacatgtactctagaagagcagcaggaaccagagctcgctacgttgacgtcctgaacccaagcgggacccagcggagcgagccggctctcgctcctgcggactttgtcgctccactcgcgccactcccaattccttctaacttgttcgtgccaaccccagtgtcttcagtgagaccccagggacgttcgggacggaatgatggcctcctcgctctctcatccccagatgcagaagaaccacagcttccagacgggactggcagggaagggcctgcagcagctaggggcctggccaatccagagcctgccccagagcccaaggttttaagctctgcagcgtcactccctggctctgaactcccctcctccaggcctgagggttcccagggaggagagctttcgcgctgtagttcaatgagttcattatcacgtgaagtgagccagcattttaatcaggctcctggcgacctccctgctgcagggggccctcccagcggggccatgcccttctacaaccctgctcagctggcacaggcctgcgccacctccgggagctcaaggctagggaggattggccagaggaagcacctggtgctgaactaggcttgccctgctgtgaacttgcacttggagccctgacgctgctgttctccccgaagaacccgaccgacctccgcgatctccgtcccgcccccagggagacacagcagtgactcagagctggtcgcacactgtgcctccctcctcaccgcccatcgtaatgaattattttgaaaattaattccaccatcctttcagattctggatggaaagactgaatctttgactcagaattgtttgccgaaaagaatgatgtgactttcttagtcatttaggatgatttaaggatatagtattcctggtcatttaagaatgttcattcattgaagccggagctgtctctgccacaggagagccacatggtcggtagtaaccagggcctctccaagcccagctgtgagtcactgcccagtgagtcccgcgcttcctttaaggtgctgggagcaaagagagggtgactgaggcagaccccaacccctgctctgcaccatctgggccctcgccgtgtttgaacctggctgaatgagtggagggcgctgtgttctcaatcagcgcctccgaggagccgtggggttccttcggcattagttcacggtttttgagagaggccttagttactgcagtgaatttctttcctgttgcaaagacgcttccagcctcactttactttctgtggcctgatgaggaccatgggtgattttgtgtacccaaagcgctggggactgcccaccgtgtggcccagtcactgggaaggagccccagagagccggctgtctgacatgatggctcagggtggtcatccaggttgaaaactgaccgtgtgatgtttgatttgggcttcatttcgtgtgtaggagcacggttagactcactgttaaggaagctggatgcacttctctaaaaggctgcactttccgtgagcacttttcgtggtacaatccacatgacccactttctcccctgggggacgttggttcagaggttggtagcacttggggagagtatcttaacacagtttcttgacagcagctctggaacttagtatttctgccccgagttttgccacactgagactttgagtagctcctggtggactcaaccctgttcaactcagagacgggcctcctctcactgatgcaaagctttaaggcttctctgactgttctgaaactcttcgtattcttgtcaagtctaaagagactgaagaaaagatttaaatactaataaaaatcagtagataatttctgtaggttctgctggaggaatacaaactgtttggtgttttaaatttaagtgtagaaattgtagaatgtggaattagcacagatccttcctggctttctgtttcacttgatcatttagcccagaccacccaggatgttttccaaaatgttccacaggcgtgtcccgctggatccatttgtccttgtcacttggagaaaggccagtccctgtgacggggcagccctctctgtccctcggtcagctcgtgtgaatcctgggacctcttccggtcggctctgcccgctgttctggggtcgactgccacgacttttgattcaagaagcttcctccaggcgggagcggctatttttcctaaatgagaattgttacattgcaaattgttgaataaaatattttgcgctccttcaagc

SEQ ID NO: 27321 - DNA, 8093 bp, Homo sapiens
  source 1..8093: mol_type = unassigned DNA
tgaaacgtctcatgggggccaccctcatgggaacatgcctgggctcgaccgacccctgagcaggcaaaacccacatgacggtgtggtcaccccagcagcatccccttccctccctcagcctggtctgcagatgccaggacagtgggggccagtgcagggaggcccacagccctcggggcaacatcgttcaccctgccctgaaggacctgttcccagcggggtgccctgtgccaccagcgttcctcatttccccaccccgtccatcctacatcagggccctggtcatgagcaacacagccctctggtggctcccccagcagccttgcccagtgacggaagagacgaggtgagccacttgcaaagtggaagccacctggccaataactctgatcctgaaagtacattcaggcaaaatcccagaattgtgaatcactgggcaagcccagagctcaggcagaatccaggagtgaagaatgagcaccggcccgcctctgctcttgtgaaccccctcgcccggggagatagcccagaaaaccgtacgcaccacccactgggggctggggccgggtctggctgtgccccgctagaagcagactcaggagcttcaggagctctggcgatgtttttccaagggggagagacagaaaatgaggagaatctctcatctgaaaaagcaggcttatctggtcaagcggactttgacgatttctgctccagccctgggctaggccgtccgcccgcacctacacacgtgggggcaggcagcctctgccaggcccttctcccaggccccagcaatgaggctgctggtgatgtgtggggtgacacagcgagcacaggggtgccggatgccagcggctcgcagtatgagaatgttgagaacttagaatttgttcagaatcaagaagttctgccaagtgagcccctcaatttggacccttcctccccgagtgaccagttcagatatgggccccttcctgggccagctgtgcccaggcatggtgctgtgtgccacaccggagcccctgatgccacactgcatacagtgcaccctgacagcgtgtcatccagctatagcagcagaagccacggaaggctctcaggctcagccaggccccaggagctggttggcacattcattcagcaagaagttggaaaacccgaggatgaagcttcaggtagtttttttaagcaaatcgattcttctcccgtaggaggtgaaacagacgagaccactgtgagccagaattaccgtggcagcgtgtcccagccctcaaccccgagccccccgaaacctacaggaatatttcagacaagtgcaaatagttctttcgaaccggtaaaatctcacttagttggggtaaaaccatttgaggcagatcgcgccaacgtggttggtgaagtaagggagacctgtgtccgccagaagcagtgcagaccagctgccgccctgcccgatgcttcccctggcaacctggagcagccaccagacaacatggagaccctctgtgcaccccaggtctgtcccctgcctcttaactccaccacggaagctgtgcacatgcttccgcacgcaggggcaccgcccttggatactgtgtatccagcacccgagaagaggccttcagccaggacccaggggcccgtgaagtgtgagagcccagcaacgactctgtgggcgcaaagtgagctgccagattttggaggcaacgtccttctggcccctgcagccccggcgctttatgtgtgtgcaaaacctcagccacctgttgttcagcctccagaagaggcgatgtccgggcagcagtcacggaacccaagctcggcggccccggtgcagagccgaggtggcattggtgcttctgagaaccttgagaatcctcccaaaatgggagaggaggaggcccttcagtcccaggcgagttctggttatgcaagtttattatcctcaccgcccactgagtctctgcagaatcctccagtcttgattgctcagcctgatcacagctataatctggctcagcccattaacttttctgtgtccttatcgaactctcatgagaagaatcagtcctggagagaggctttggtgggggatagacctgcagtcagcagttgggctctcggtggtgattctggggagaacacttctttgtctgggattccaaccagctctgtccttagcttgtctctgcctagcagtgttgcccaaagtaattttccacaaggttctggtgcttccgaaatggtttctaatcagcctgctaatttgctggttcaaccaccatcccagccagttccagagaacttggttccagaaagtcaaaaggatcgtaaggcaggaagtgctcttcccggatttgctaatagccctgctggaagcacaagtgtggtgttagttccacctgcacacggcaccctggtgcctgatggtaataaggcaaaccattccagtcatcaggaagacacttacggagccctagactttaccttaagcaggactttggaaaatcctgtaaacgtgtacaacccgtcccattctgacagcctcgcttctcagcaaagtgttgccagtcatcccagacaatctgggcctggggcgcctaaccttgaccgtttttatcagcaggtcacgaaagatgcccagggccagcctggcctcgaaagagcccagcaggagctggtgccaccccagcaacaggcttctcccccacaactacccaaagccatgttttcggagctgtcaaatccagaaagtctgcccgcacagggacaggcccagaactcagcacagtcaccagcaagtctggttctggtcgacgcgggtcagcagctgccccctcggcctcctcagtcctctagcgtgtctctggtgtccagtggctccggccaggcagctgtgccgtcagagcagccgtggccacagccagtgcctgcacttgcccccggcccaccgcctcaggacctggccgcctactactactaccggcctttgtacgatgcctaccagcctcagtactctttgccgtacccaccggagcctggcgcagcctccctctattaccaggatgtctacagcctctatgagcctcgatacaggccctatgatggtgctgcgtctgcttacgcccagaactaccgctatcccgagcccgagcggcccagctcccgagccagccactcctcggaacggccacctcccaggcaaggatatcctgaaggatactatagttccaaaagtggatggagcagtcagagcgattactatgcaagctattactccagccagtacgattatggagatccaggtcactgggatcgttaccactacagtgctagagtcagggacccccgcacctatgaccggaggtattggtgtgatgcagagtatgacgcatacaggagagagcactctgccttcggggacaggcccgagaaacgtgacaacaactggaggtacgatcctcgcttcacggggagttttgacgatgaccccgatccgcacagagacccttatggggaagaggtggaccggcgcagcgtccacagcgagcactcggcacggagcctgcacagcgcacacagcctggccagccgccgcagcagcctcagctcccactcgcaccagagtcagatttacagaagccacaatgtggctgccggttcctacgaggccccgcttcctccaggctcctttcacggcgattttgcctacggcacctaccgcagcaatttcagcagtggccccggcttcccagagtatggctaccctgccgacaccgtctggcctgccatggagcaagtttcatcaagaccaacttctcctgaaaaattttcagtgcctcatgtctgtgccaggtttggccctggcggtcagcttatcaaagtgattcccaatctgccttcagaaggacagccggccttggtggaggtccacagcatggaggccttgctgcagcacacgtctgagcaggaggagatgcgggcgttcccgggacccctggccaaagacgacacccataaggtggatgtcattaattttgcacagaacaaagctatgaaatgtttgcagaatgaaaacttaattgacaaagagtctgcaagtcttctttggaattttattgttctcttatgcagacaaaatgggaccgtggtagggaccgacattgcggagcttctgttacgagaccacagaacagtgtggcttcctgggaagtcgcccaatgaagcaaacctgattgatttcacgaatgaggcagtggagcaggtggaagaggaggagtctggtgaggcccagctctctttcctcactggtggtccggcggctgccgccagctcgctcgagagagagaccgagaggttcagggagctgttgctgtatggccgtaagaaggatgctttggagtctgcaatgaagaatggcctgtggggtcacgctctgctacttgcaagtaagatggacagccggacacacgcccgagtcatgaccaggtttgctaacagcctcccaatcaacgaccctctgcagacagtctaccagctcatgtccggacggatgcctgccgcgtccacgtgctgtggagacgagaaatggggagattggaggccgcacctcgccatggtcttgtccaacttgaacaacaacatggacgtcgagtccaggacgatggctaccatgggcgacactctggcttcaaggggcctcttggatgcggcccacttctgctacctcatggcccaggcgggatttggtgtttacacgaagaaaactacaaagcttgtcttaatcggatccaatcacagtttgccattcttaaagttcgcaaccaacgaagcaatccagaggacggaagcctatgagtacgcccagtccctgggtgccgagacctgccccctgcctagtttccaggtgtttaagttcatctactcctgccgcctggcggaaatggggctggccacgcaagccttccactactgtgaggccatcgcgaagagcatcctgacgcagccgcacctgtattccccggtgttgatcagccagcttgtgcagatggcttcccagttacgactcttcgatccccagctgaaagagaagccagaagaggagtccttggccgcacccacgtggctggttcacctgcagcaggtggagcggcagattaaggagggggctggagtatggcatcaggatggagccctcccgcagcagtgtcctggcactccgagttccgagatggagcagttggacaggccaggactcagtcagccaggagccctggggatcgccaaccctctgctggcggtgcctgcaccgagccctgagcactcgagcccgagcgtgcggctgctgccctcagctccgcagacgctccctgacggcccattggccagtcctgccagagtgccgatgttcccagtgccactgcccccggggcccctggagccgggtcctggctgtgtgaccccagggcctgcacttggcttcctggagccctccgggcctggcctcccacctggtgtgccacctctgcaggaaaggagacacttgctccaggaagccaggagcccagacccagggatagtgccgcaggaggcgcctgttggaaactcactttccgagctaagcgaagaaaattttgatggaaaatttgctaatctgaccccctcgaggacggtgccagactcggaggcccccccagggtgggatcgtgccgactcgggtcccacgcagccacctctgtctctctcacccgctcccgaaacaaagagacccggacaggcagccaagaaagaaacgaaggaacctaagaagggtgaatcctggttctttcgttggctacctggaaagaaaaagacagaagcttatttgccagatgacaagaacaaatcgattgtttgggatgaaaagaaaaaccagtgggtgaatttaaatgagccagaagaggagaagaaagccccgcccccacctccaacctcgatgcccaagactgtgcaagctgccccgcctgccctcccagggcctcctggagcccccgtgaacatgtactctagaagagcagcaggaaccagagctcgctacgttgacgtcctgaacccaagcgggacccagcggagcgagccggctctcgctcctgcggactttgtcgctccactcgcgccactcccaattccttctaacttgttcgtgccaaccccagatgcagaagaaccacagcttccagacgggactggcagggaagggcctgcagcagctaggggcctggccaatccagagcctgccccagagcccaaggctcctggcgacctccctgctgcagggggccctcccagcggggccatgcccttctacaaccctgctcagctggcacaggcctgcgccacctccgggagctcaaggctagggaggattggccagaggaagcacctggtgctgaactaggcttgccctgctgtgaacttgcacttggagccctgacgctgctgttctccccgaagaacccgaccgacctccgcgatctccgtcccgcccccagggagacacagcagtgactcagagctggtcgcacactgtgcctccctcctcaccgcccatcgtaatgaattattttgaaaattaattccaccatcctttcagattctggatggaaagactgaatctttgactcagaattgtttgccgaaaagaatgatgtgactttcttagtcatttaggatgatttaaggatatagtattcctggtcatttaagaatgttcattcattgaagccggagctgtctctgccacaggagagccacatggtcggtagtaaccagggcctctccaagcccagctgtgagtcactgcccagtgagtcccgcgcttcctttaaggtgctgggagcaaagagagggtgactgaggcagaccccaacccctgctctgcaccatctgggccctcgccgtgtttgaacctggctgaatgagtggagggcgctgtgttctcaatcagcgcctccgaggagccgtggggttccttcggcattagttcacggtttttgagagaggccttagttactgcagtgaatttctttcctgttgcaaagacgcttccagcctcactttactttctgtggcctgatgaggaccatgggtgattttgtgtacccaaagcgctggggactgcccaccgtgtggcccagtcactgggaaggagccccagagagccggctgtctgacatgatggctcagggtggtcatccaggttgaaaactgaccgtgtgatgtttgatttgggcttcatttcgtgtgtaggagcacggttagactcactgttaaggaagctggatgcacttctctaaaaggctgcactttccgtgagcacttttcgtggtacaatccacatgacccactttctcccctgggggacgttggttcagaggttggtagcacttggggagagtatcttaacacagtttcttgacagcagctctggaacttagtatttctgccccgagttttgccacactgagactttgagtagctcctggtggactcaaccctgttcaactcagagacgggcctcctctcactgatgcaaagctttaaggcttctctgactgttctgaaactcttcgtattcttgtcaagtctaaagagactgaagaaaagatttaaatactaataaaaatcagtagataatttctgtaggttctgctggaggaatacaaactgtttggtgttttaaatttaagtgtagaaattgtagaatgtggaattagcacagatccttcctggctttctgtttcacttgatcatttagcccagaccacccaggatgttttccaaaatgttccacaggcgtgtcccgctggatccatttgtccttgtcacttggagaaaggccagtccctgtgacggggcagccctctctgtccctcggtcagctcgtgtgaatcctgggacctcttccggtcggctctgcccgctgttctggggtcgactgccacgacttttgattcaagaagcttcctccaggcgggagcggctatttttcctaaatgagaattgttacattgcaaattgttgaataaaatattttgcgctccttcaagcac

SEQ ID NO: 27322 - DNA, 3517 bp, Homo sapiens
  source 1..3517: mol_type = unassigned DNA
ggtgcgtgccaaggagctgagggtttagctcgcaggatgagcgtgtgttcagctttaggagacactgctgagcagttgtcctaaatggttggttgccccaagtcacacatcctgcagcagaggacaagggccctggatatccctcatcttcaccaatactgggcagtgccggttctttaacttagccattgtgctggggctgatgacatctcattgtgtcttcctctgcatctccacagcgaggtgtgacgctgggcaccttctcgtgtccctgttaccatctcaccactcttttggggcagtgcttgttcaagtctctatccgttgttttttttttcccccataaagatggggtctcactattgcccaggctggtctcaaactcctgggcccaagtgatcctcctgcctcgtagctgggactgcaggtgtagccaccacacctggctttcctttccatttttaatggtgttctcttcaggacttgcaggagtcctttctgtattatggatataagtcctctgttaggtgtatttattgtgatatcttctcccaatctgtagattgcctttttacttgtaatggttttttgtttgtttgtttgtttgtttgttttgagacagggtctcactctgtcagccaggcagaggttgcagtgcgccgagatcgcgccattgcactccagcctgggggacagagcgagactctgtctcagaaaactaacaaaccaaaatgaagtgcatcatgtgaagaataaagtaaagtttcctaataaccgaattctccacacatgggaaacacagagggctgtatctgcctccgacacacactgacttggacagcccgccttccacttctcaaaggggaggacgtcggaagctttgtcagtgtttagacgtaaaaagttcctgaaggcacgttactgttctgacctatttaaatgacagtaaaatacacagaacaaaatgcacatttttaccattttctgagtgcacagttctgtggcaccaagtacattcacactgttgtgttgccatcaccaccatccatctccagaactgtctcaccttcccaaacagaaactctgtctccttgaaacgaaacaactcccggttccctcccacctccatcctcctggtgtctctggatctgcttcccacctccatcctcctggtgtctctgtggatctgctccccacctccatcctcctggtgtctctgtggatctgccccccacctccatcctcctggtgtctctgtggatctgcccccgacctccattctcctggtgtctctggatctgctccccacctccatcctcctggtgtctctgtggatctgctccccacctccatcctcctggtgtgtctggatctgctccccacctccatcctggtgtctctatggatctgctccccacctccatcctcctggcgtctctgtggatctgctcccacctccatcctcctggtgtctctgtggatctgccccccacctccatcctcctggtgtctctgtggatctgctcccacctccatcctcctggtgtctctgtggatcgccccccacctccatcctcctggtgtctctgtggatcgccccccacctccatcctcctggtgtctctgtggatctgctccccacctccatcctcctggtgtctctgtggatctgctcccacctccattctcctggtgtctctgtggatctggcgactctggggcctcacagaagtgggtcatgtagaatttgtctttttgccctggcttatttcatggaacataatgttttcaaagttgttctcgtgttttttatatttagggtgaatcctggttctttcgttggctacctggaaagaaaaagacagaagcttatttgccagatgacaagaacaaatcggtgagtgctgtcaaatacgcacgggacgtccgaagaattgtaatgatttttctgtcactttcagagcagacctgagtaggtgtttcctgaagttttgaagtgtcatcattaatcagatgctaattctgtttaggttcagtctgctgaccttttttctttttaaaatcttggcagattgtttgggatgaaaagaaaaaccagtgggtgaatttaaatgagccagaagaggaggtaaattgtcattctagttcctgttgggtgtgaggtgtgagtggagggaacagcctcatgtggccctgtgatatttgggtggctgttgccccttttggagcctcctgactgtgccatcccagtgggtttctgtgcacacagtgggtgtctgaagctgtgtttccctctgcagaagaaagccccgcccccacctccaacctcgatgcccaagactgtgcaagctgccccgcctgccctcccagggcctcctggagcccccgtgaacatgtactctagaagagcaggtaagggtggccttggagtgggagcttgcttgaacgattaactgtcccagagagagaggccaatgtgtagctgttgtgcgtggggaggaggtggcttcccgcacgtccctgcgtgcttttcctctgacgcagtgagcgcagagcatttggaagctggaggccacctggcgcgttcacctcaatttgcttccctcccctttgcagcaggaaccagagctcgctacgttgacgtcctgaacccaagcgggacccagcggagcgagccggctctcgctcctgcggactttgtcgctccactcgcgccactcccaattccttctaacttgttcgtgccaaccccaggtaggtagcacgagcaccagcccctccaggtcagcccccagtctcctgacctttgatcctctttctatgagtctctcctaaatctcccgttaaaagaatgacctggccagcatgcagagagcctggggttggtttgtggttttttttttgatttgcctgtttctgcatgagtgtgccgcgtgtgcagtgtgaaactctcttcctctcggagtgtcttcagtgagaccccagggacgttcgggacggaatgatggcctcctcgctctctcatccccagatgcagaagaaccacagcttccagacgggactggcagggaagggcctgcagcagctaggggcctggccaatccagagcctgccccagagcccaaggtgagcgggtacggtgggaaaggggaaaggtacccagtgaggaggcacctccccatcctgccagacagggccttgccttctgcaagtcagtatccaatgtgtacgtagagtgttccgccttaaacgcctcacacttatgtatggtagagacggaaggtagaatgcagggtgccgggcgggacagagctgtttgggaagacggagatctggggatagtggcggtgatggttgctcagcacggtgaatgtgcttaaaacttaaaaatgattaaagtggcaaattttacagtatgtatattttacaatttttaaaattggaaaaagtaaaattaattactctaagttacagagaaattacctaccgataataaaagttaagtatattttcatcc

SEQ ID NO: 27323 - DNA, 3671 bp, Homo sapiens
  source 1..3671: mol_type = unassigned DNA
ccaagggggagagacagaaaatgaggagaatctctcatctgaaaaagcaggcttatctggtcaagcggactttgacgatttctgctccagccctgggctaggccgtccgcccgcacctacacacgtgggggcaggcagcctctgccaggcccttctcccaggccccagcaatgaggctgctggtgatgtgtggggtgacacagcgagcacaggggtgccggatgccagcggctcgcagtatgagaatgttgagaacttagaatttgttcagaatcaagaagttctgccaagtgagcccctcaatttggacccttcctccccgagtgaccagttcagatatgggccccttcctgggccagctgtgcccaggcatggtgctgtgtgccacaccggagcccctgatgccacactgcatacagtgcaccctgacagcgtgtcatccagctatagcagcagaagccacggaaggctctcaggctcagccaggccccaggagctggttggcacattcattcagcaagaagttggaaaacccgaggatgaagcttcaggtagtttttttaagcaaatcgattcttctcccgtaggaggtgaaacagacgagaccactgtgagccagaattaccgtggcagcgtgtcccagccctcaaccccgagccccccgaaacctacaggaatatttcagacaagtgcaaatagttctttcgaaccggtaaaatctcacttagttggggtaaaaccatttgaggcagatcgcgccaacgtggttggtgaagtaagggagacctgtgtccgccagaagcagtgcagaccagctgccgccctgcccgatgcttcccctggcaacctggagcagccaccagacaacatggagaccctctgtgcaccccaggtctgtcccctgcctcttaactccaccacggaagctgtgcacatgcttccgcacgcaggggcaccgcccttggatactgtgtatccagcacccgagaagaggccttcagccaggacccaggggcccgtgaagtgtgagagcccagcaacgactctgtgggcgcaaagtgagctgccagattttggaggcaacgtccttctggcccctgcagccccggcgctttatgtgtgtgcaaaacctcagccacctgttgttcagcctccagaagaggcgatgtccgggcagcagtcacggaacccaagctcggcggccccggtgcagagccgaggtggcattggtgcttctgagaaccttgagaatcctcccaaaatgggagaggaggaggcccttcagtcccaggtcacgaaagatgcccagggccagcctggcctcgaaagagcccagcaggagctggtgccaccccagcaacaggcttctcccccacaactacccaaagccatgttttcggagctgtcaaatccagaaagtctgcccgcacagggacaggcccagaactcagcacagtcaccagcaagtctggttctggtcgacgcgggtcagcagctgccccctcggcctcctcagtcctctagcgtgtctctggtgtccagtggctccggccaggcagctgtgccgtcagagcagccgtggccacagccagtgcctgcacttgcccccggcccaccgcctcaggacctggccgcctactactactaccggcctttgtacgatgcctaccagcctcagtactctttgccgtacccaccggagcctggcgcagcctccctctattaccaggatgtctacagcctctatgagcctcgatacaggccctatgatggtgctgcgtctgcttacgcccagaactaccgctatcccgagcccgagcggcccagctcccgagccagccactcctcggaacggccacctcccaggcaaggatatcctgaaggatactatagttccaaaagtggatggagcagtcagagcgattactatgcaagctattactccagccagtacgattatggagatccaggtcactgggatcgttaccactacagtgctagagtcagggacccccgcacctatgaccggaggtattggtgtgatgcagagtatgacgcatacaggagagagcactctgccttcggggacaggcccgagaaacgtgacaacaactggaggtacgatcctcgcttcacggggagttttgacgatgaccccgatccgcacagagacccttatggggaagaggtggaccggcgcagcgtccacagcgagcactcggcacggagcctgcacagcgcacacagcctggccagccgccgcagcagcctcagctcccactcgcaccagagtcagatttacagaagccacaatgtggctgccggttcctacgaggccccgcttcctccaggctcctttcacggcgattttgcctacggcacctaccgcagcaatttcagcagtggccccggcttcccagagtatggctaccggcctgcacttggcttcctggagccctccgggcctggcctcccacctggtgtgccacctctgcaggaaaggagacacttgctccaggaagccaggagcccagacccagggatagtgccgcaggaggcgcctgttggaaactcactttccgagctaagcgaagaaaattttgatggaaaatttgctaatctgaccccctcgaggacggtgccagactcggaggcccccccagggtgggatcgtgccgactcgggtcccacgcagccacctctgtctctctcacccgctcccgaaacaaagagacccggacaggcagccaagaaagaaacgaaggaacctaagaagggtgaatcctggttctttcgttggctacctggaaagaaaaagacagaagcttatttgccagatgacaagaacaaatcgattgtttgggatgaaaagaaaaaccagtgggtgaatttaaatgagccagaagaggagaagaaagccccgcccccacctccaacctcgatgcccaagactgtgcaagctgccccgcctgccctcccagggcctcctggagcccccgtgaacatgtactctagaagagcagcaggaaccagagctcgctacgttgacgtcctgaacccaagcgggacccagcggagcgagccggctctcgctcctgcggactttgtcgctccactcgcgccactcccaattccttctaacttgttcgtgccaaccccagtgagaccccagggacgttcgggacggaatgatggcctcctcgctctctcatccccagatgcagaagaaccacagcttccagacgggactggcagggaagggcctgcagcagctaggggcctggccaatccagagcctgccccagagcccaaggttttaagctctgcagcgtcactccctggctctgaactcccctcctccaggcctgagggttcccagggaggagagctttcgcgctgtagttcaatgagttcattatcacgtgaagtgagccagcattttaatcaggctcctggcgacctccctgctgcagggggccctcccagcggggccatgcccttctacaaccctgctcagctggcacaggcctgcgccacctccgggagctcaaggctagggaggattggccagaggaagcacctggtgctgaactaggcttgccctgctgtgaacttgcacttggagccctgacgctgctgttctccccgaagaacccgaccgacctccgcga

SEQ ID NO: 27324 - DNA, 5260 bp, Homo sapiens
  source 1..5260: mol_type = unassigned DNA
atgtttttccaagggggagagacagaaaatgaggagaatctctcatctgaaaaagcaggcttatctggtcaagcggactttgacgatttctgctccagccctgggctaggccgtccgcccgcacctacacacgtgggggcaggcagcctctgccaggcccttctcccaggccccagcaatgaggctgctggtgatgtgtggggtgacacagcgagcacaggggtgccggatgccagcggctcgcagtatgagaatgttgagaacttagaatttgttcagaatcaagaagttctgccaagtgagcccctcaatttggacccttcctccccgagtgaccagttcagatatgggccccttcctgggccagctgtgcccaggcatggtgctgtgtgccacaccggagcccctgatgccacactgcatacagtgcaccctgacagcgtgtcatccagctatagcagcagaagccacggaaggctctcaggctcagccaggccccaggagctggttggcacattcattcagcaagaagttggaaaacccgaggatgaagcttcaggtagtttttttaagcaaatcgattcttctcccgtaggaggtgaaacagacgagaccactgtgagccagaattaccgtggcagcgtgtcccagccctcaaccccgagccccccgaaacctacaggaatatttcagacaagtgcaaatagttctttcgaaccggtaaaatctcacttagttggggtaaaaccatttgaggcagatcgcgccaacgtggttggtgaagtaagggagacctgtgtccgccagaagcagtgcagaccagctgccgccctgcccgatgcttcccctggcaacctggagcagccaccagacaacatggagaccctctgtgcaccccaggtctgtcccctgcctcttaactccaccacggaagctgtgcacatgcttccgcacgcaggggcaccgcccttggatactgtgtatccagcacccgagaagaggccttcagccaggacccaggggcccgtgaagtgtgagagcccagcaacgactctgtgggcgcaaagtgagctgccagattttggaggcaacgtccttctggcccctgcagccccggcgctttatgtgtgtgcaaaacctcagccacctgttgttcagcctccagaagaggcgatgtccgggcagcagtcacggaacccaagctcggcggccccggtgcagagccgaggtggcattggtgcttctgagaaccttgagaatcctcccaaaatgggagaggaggaggcccttcagtcccaggtcacgaaagatgcccagggccagcctggcctcgaaagagcccagcaggagctggtgccaccccagcaacaggcttctcccccacaactacccaaagccatgttttcggagctgtcaaatccagaaagtctgcccgcacagggacaggcccagaactcagcacagtcaccagcaagtctggttctggtcgacgcgggtcagcagctgccccctcggcctcctcagtcctctagcgtgtctctggtgtccagtggctccggccaggcagctgtgccgtcagagcagccgtggccacagccagtgcctgcacttgcccccggcccaccgcctcaggacctggccgcctactactactaccggcctttgtacgatgcctaccagcctcagtactctttgccgtacccaccggagcctggcgcagcctccctctattaccaggatgtctacagcctctatgagcctcgatacaggccctatgatggtgctgcgtctgcttacgcccagaactaccgctatcccgagcccgagcggcccagctcccgagccagccactcctcggaacggccacctcccaggcaaggatatcctgaaggatactatagttccaaaagtggatggagcagtcagagcgattactatgcaagctattactccagccagtacgattatggagatccaggtcactgggatcgttaccactacagtgctagagtcagggacccccgcacctatgaccggaggtattggtgtgatgcagagtatgacgcatacaggagagagcactctgccttcggggacaggcccgagaaacgtgacaacaactggaggtacgatcctcgcttcacggggagttttgacgatgaccccgatccgcacagagacccttatggggaagaggtggaccggcgcagcgtccacagcgagcactcggcacggagcctgcacagcgcacacagcctggccagccgccgcagcagcctcagctcccactcgcaccagagtcagatttacagaagccacaatgtggctgccggttcctacgaggccccgcttcctccaggctcctttcacggcgattttgcctacggcacctaccgcagcaatttcagcagtggccccggcttcccagagtatggctaccctgccgacaccgtctggcctgccatggagcaagtttcatcaagaccaacttctcctgaaaaattttcagtgcctcatgtctgtgccaggtttggccctggcggtcagcttatcaaagtgattcccaatctgccttcagaaggacagccggccttggtggaggtccacagcatggaggccttgctgcagcacacgtctgagcaggaggagatgcgggcgttcccgggacccctggccaaagacgacacccataaggtggatgtcattaattttgcacagaacaaagctatgaaatgtttgcagaatgaaaacttaattgacaaagagtctgcaagtcttctttggaattttattgttctcttatgcagacaaaatgggaccgtggtagggaccgacattgcggagcttctgttacgagaccacagaacagtgtggcttcctgggaagtcgcccaatgaagcaaacctgattgatttcacgaatgaggcagtggagcaggtggaagaggaggagtctggtgaggcccagctctctttcctcactggtggtccggcggctgccgccagctcgctcgagagagagaccgagaggttcagggagctgttgctgtatggccgtaagaaggatgctttggagtctgcaatgaagaatggcctgtggggtcacgctctgctacttgcaagtaagatggacagccggacacacgcccgagtcatgaccaggtttgctaacagcctcccaatcaacgaccctctgcagacagtctaccagctcatgtccggacggatgcctgccgcgtccacgtgctgtggagacgagaaatggggagattggaggccgcacctcgccatggtcttgtccaacttgaacaacaacatggacgtcgagtccaggacgatggctaccatgggcgacactctggcttcaaggggcctcttggatgcggcccacttctgctacctcatggcccaggcgggatttggtgtttacacgaagaaaactacaaagcttgtcttaatcggatccaatcacagtttgccattcttaaagttcgcaaccaacgaagcaatccagaggacggaagcctatgagtacgcccagtccctgggtgccgagacctgccccctgcctagtttccaggtgtttaagttcatctactcctgccgcctggcggaaatggggctggccacgcaagccttccactactgtgaggccatcgcgaagagcatcctgacgcagccgcacctgtattccccggtgttgatcagccagcttgtgcagatggcttcccagttacgactcttcgatccccagctgaaagagaagccagaagaggagtccttggccgcacccacgtggctggttcacctgcagcaggtggagcggcagattaaggagggggctggagtatggcatcaggatggagccctcccgcagcagtgtcctggcactccgagttccgagatggagcagttggacaggccaggactcagtcagccaggagccctggggatcgccaaccctctgctggcggtgcctgcaccgagccctgagcactcgagcccgagcgtgcggctgctgccctcagctccgcagacgctccctgacggcccattggccagtcctgccagagtgccgatgttcccagtgccactgcccccggggcccctggagccgggtcctggctgtgtgaccccagggcctgcacttggcttcctggagccctccgggcctggcctcccacctggtgtgccacctctgcaggaaaggagacacttgctccaggaagccaggagcccagacccagggatagtgccgcaggaggcgcctgttggaaactcactttccgagctaagcgaagaaaattttgatggaaaatttgctaatctgaccccctcgaggacggtgccagactcggaggcccccccagggtgggatcgtgccgactcgggtcccacgcagccacctctgtctctctcacccgctcccgaaacaaagagacccggacaggcagccaagaaagaaacgaaggaacctaagaagggtgaatcctggttctttcgttggctacctggaaagaaaaagacagaagcttatttgccagatgacaagaacaaatcgattgtttgggatgaaaagaaaaaccagtgggtgaatttaaatgagccagaagaggagaagaaagccccgcccccacctccaacctcgatgcccaagactgtgcaagctgccccgcctgccctcccagggcctcctggagcccccgtgaacatgtactctagaagagcagcaggaaccagagctcgctacgttgacgtcctgaacccaagcgggacccagcggagcgagccggctctcgctcctgcggactttgtcgctccactcgcgccactcccaattccttctaacttgttcgtgccaaccccagatgcagaagaaccacagcttccagacgggactggcagggaagggcctgcagcagctaggggcctggccaatccagagcctgccccagagcccaaggttttaagctctgcagcgtcactccctggctctgaactcccctcctccaggcctgagggttcccagggaggagaggctcctggcgacctccctgctgcagggggccctcccagcggggccatgcccttctacaaccctgctcagctggcacaggcctgcgccacctccgggagctcaaggctagggaggattggccagaggaagcacctggtgctgaactaggcttgccctgctgtgaacttgcacttggagccctgacgctgctgttctccccgaagaacccgaccgacctccgcga

SEQ ID NO: 27325 - DNA, 6541 bp, Homo sapiens
  source 1..6541: mol_type = unassigned DNA
atgcctgggctcgaccgacccctgagcaggcaaaacccacatgacggtgtggtcaccccagcagcatccccttccctccctcagcctggtctgcagatgccaggacagtgggggccagtgcagggaggcccacagccctcggggcaacatcgttcaccctgccctgaaggacctgttcccagcggggtgccctgtgccaccagcgttcctcatttccccaccccgtccatcctacatcagggccctggtcatgagcaacacagccctctggtggctcccccagcagccttgcccagtgacggaagagacgaggtgagccacttgcaaagtggaagccacctggccaataactctgatcctgaaagtacattcaggcaaaatcccagaattgtgaatcactgggcaagcccagagctcaggcagaatccaggagtgaagaatgagcaccggcccgcctctgctcttgtgaaccccctcgcccggggagatagcccagaaaaccgtacgcaccacccactgggggctggggccgggtctggctgtgccccgctagaagcagactcaggagcttcaggagctctggcgatgtttttccaagggggagagacagaaaatgaggagaatctctcatctgaaaaagcaggcttatctggtcaagcggactttgacgatttctgctccagccctgggctaggccgtccgcccgcacctacacacgtgggggcaggcagcctctgccaggcccttctcccaggccccagcaatgaggctgctggtgatgtgtggggtgacacagcgagcacaggggtgccggatgccagcggctcgcagtatgagaatgttgagaacttagaatttgttcagaatcaagaagttctgccaagtgagcccctcaatttggacccttcctccccgagtgaccagttcagatatgggccccttcctgggccagctgtgcccaggcatggtgctgtgtgccacaccggagcccctgatgccacactgcatacagtgcaccctgacagcgtgtcatccagctatagcagcagaagccacggaaggctctcaggctcagccaggccccaggagctggttggcacattcattcagcaagaagttggaaaacccgaggatgaagcttcaggtagtttttttaagcaaatcgattcttctcccgtaggaggtgaaacagacgagaccactgtgagccagaattaccgtggcagcgtgtcccagccctcaaccccgagccccccgaaacctacaggaatatttcagacaagtgcaaatagttctttcgaaccggtaaaatctcacttagttggggtaaaaccatttgaggcagatcgcgccaacgtggttggtgaagtaagggagacctgtgtccgccagaagcagtgcagaccagctgccgccctgcccgatgcttcccctggcaacctggagcagccaccagacaacatggagaccctctgtgcaccccaggtctgtcccctgcctcttaactccaccacggaagctgtgcacatgcttccgcacgcaggggcaccgcccttggatactgtgtatccagcacccgagaagaggccttcagccaggacccaggggcccgtgaagtgtgagagcccagcaacgactctgtgggcgcaaagtgagctgccagattttggaggcaacgtccttctggcccctgcagccccggcgctttatgtgtgtgcaaaacctcagccacctgttgttcagcctccagaagaggcgatgtccgggcagcagtcacggaacccaagctcggcggccccggtgcagagccgaggtggcattggtgcttctgagaaccttgagaatcctcccaaaatgggagaggaggaggcccttcagtcccaggcgagttctggttatgcaagtttattatcctcaccgcccactgagtctctgcagaatcctccagtcttgattgctcagcctgatcacagctataatctggctcagcccattaacttttctgtgtccttatcgaactctcatgagaagaatcagtcctggagagaggctttggtgggggatagacctgcagtcagcagttgggctctcggtggtgattctggggagaacacttctttgtctgggattccaaccagctctgtccttagcttgtctctgcctagcagtgttgcccaaagtaattttccacaaggttctggtgcttccgaaatggtttctaatcagcctgctaatttgctggttcaaccaccatcccagccagttccagagaacttggttccagaaagtcaaaaggatcgtaaggcaggaagtgctcttcccggatttgctaatagccctgctggaagcacaagtgtggtgttagttccacctgcacacggcaccctggtgcctgatggtaataaggcaaaccattccagtcatcaggaagacacttacggagccctagactttaccttaagcaggactttggaaaatcctgtaaacgtgtacaacccgtcccattctgacagcctcgcttctcagcaaagtgttgccagtcatcccagacaatctgggcctggggcgcctaaccttgaccgtttttatcagcaggtcacgaaagatgcccagggccagcctggcctcgaaagagcccagcaggagctggtgccaccccagcaacaggcttctcccccacaactacccaaagccatgttttcggagctgtcaaatccagaaagtctgcccgcacagggacaggcccagaactcagcacagtcaccagcaagtctggttctggtcgacgcgggtcagcagctgccccctcggcctcctcagtcctctagcgtgtctctggtgtccagtggctccggccaggcagctgtgccgtcagagcagccgtggccacagccagtgcctgcacttgcccccggcccaccgcctcaggacctggccgcctactactactaccggcctttgtacgatgcctaccagcctcagtactctttgccgtacccaccggagcctggcgcagcctccctctattaccaggatgtctacagcctctatgagcctcgatacaggccctatgatggtgctgcgtctgcttacgcccagaactaccgctatcccgagcccgagcggcccagctcccgagccagccactcctcggaacggccacctcccaggcaaggatatcctgaaggatactatagttccaaaagtggatggagcagtcagagcgattactatgcaagctattactccagccagtacgattatggagatccaggtcactgggatcgttaccactacagtgctagagtcagggacccccgcacctatgaccggaggtattggtgtgatgcagagtatgacgcatacaggagagagcactctgccttcggggacaggcccgagaaacgtgacaacaactggaggtacgatcctcgcttcacggggagttttgacgatgaccccgatccgcacagagacccttatggggaagaggtggaccggcgcagcgtccacagcgagcactcggcacggagcctgcacagcgcacacagcctggccagccgccgcagcagcctcagctcccactcgcaccagagtcagatttacagaagccacaatgtggctgccggttcctacgaggccccgcttcctccaggctcctttcacggcgattttgcctacggcacctaccgcagcaatttcagcagtggccccggcttcccagagtatggctaccctgccgacaccgtctggcctgccatggagcaagtttcatcaagaccaacttctcctgaaaaattttcagtgcctcatgtctgtgccaggtttggccctggcggtcagcttatcaaagtgattcccaatctgccttcagaaggacagccggccttggtggaggtccacagcatggaggccttgctgcagcacacgtctgagcaggaggagatgcgggcgttcccgggacccctggccaaagacgacacccataaggtggatgtcattaattttgcacagaacaaagctatgaaatgtttgcagaatgaaaacttaattgacaaagagtctgcaagtcttctttggaattttattgttctcttatgcagacaaaatgggaccgtggtagggaccgacattgcggagcttctgttacgagaccacagaacagtgtggcttcctgggaagtcgcccaatgaagcaaacctgattgatttcacgaatgaggcagtggagcaggtggaagaggaggagtctggtgaggcccagctctctttcctcactggtggtccggcggctgccgccagctcgctcgagagagagaccgagaggttcagggagctgttgctgtatggccgtaagaaggatgctttggagtctgcaatgaagaatggcctgtggggtcacgctctgctacttgcaagtaagatggacagccggacacacgcccgagtcatgaccaggtttgctaacagcctcccaatcaacgaccctctgcagacagtctaccagctcatgtccggacggatgcctgccgcgtccacgtgctgtggagacgagaaatggggagattggaggccgcacctcgccatggtcttgtccaacttgaacaacaacatggacgtcgagtccaggacgatggctaccatgggcgacactctggcttcaaggggcctcttggatgcggcccacttctgctacctcatggcccaggcgggatttggtgtttacacgaagaaaactacaaagcttgtcttaatcggatccaatcacagtttgccattcttaaagttcgcaaccaacgaagcaatccagaggacggaagcctatgagtacgcccagtccctgggtgccgagacctgccccctgcctagtttccaggtgtttaagttcatctactcctgccgcctggcggaaatggggctggccacgcaagccttccactactgtgaggccatcgcgaagagcatcctgacgcagccgcacctgtattccccggtgttgatcagccagcttgtgcagatggcttcccagttacgactcttcgatccccagctgaaagagaagccagaagaggagtccttggccgcacccacgtggctggttcacctgcagcaggtggagcggcagattaaggagggggctggagtatggcatcaggatggagccctcccgcagcagtgtcctggcactccgagttccgagatggagcagttggacaggccaggactcagtcagccaggagccctggggatcgccaaccctctgctggcggtgcctgcaccgagccctgagcactcgagcccgagcgtgcggctgctgccctcagctccgcagacgctccctgacggcccattggccagtcctgccagagtgccgatgttcccagtgccactgcccccggggcccctggagccgggtcctggctgtgtgaccccagggcctgcacttggcttcctggagccctccgggcctggcctcccacctggtgtgccacctctgcaggaaaggagacacttgctccaggaagccaggagcccagacccagggatagtgccgcaggaggcgcctgttggaaactcactttccgagctaagcgaagaaaattttgatggaaaatttgctaatctgaccccctcgaggacggtgccagactcggaggcccccccagggtgggatcgtgccgactcgggtcccacgcagccacctctgtctctctcacccgctcccgaaacaaagagacccggacaggcagccaagaaagaaacgaaggaacctaagaagggtgaatcctggttctttcgttggctacctggaaagaaaaagacagaagcttatttgccagatgacaagaacaaatcgattgtttgggatgaaaagaaaaaccagtgggtgaatttaaatgagccagaagaggagaagaaagccccgcccccacctccaacctcgatgcccaagactgtgcaagctgccccgcctgccctcccagggcctcctggagcccccgtgaacatgtactctagaagagcagcaggaaccagagctcgctacgttgacgtcctgaacccaagcgggacccagcggagcgagccggctctcgctcctgcggactttgtcgctccactcgcgccactcccaattccttctaacttgttcgtgccaaccccagatgcagaagaaccacagcttccagacgggactggcagggaagggcctgcagcagctaggggcctggccaatccagagcctgccccagagcccaagctttcgcgctgtagttcaatgagttcattatcacgtgaagtgagccagcattttaatcaggctcctggcgacctccctgctgcagggggccctcccagcggggccatgcccttctacaaccctgctcagctggcacaggcctgcgccacctccgggagctcaaggctagggaggattggccagaggaagcacctggtgctgaactaggcttgccctgctgtgaacttgcacttggagccctgacgctgctgttctccccgaagaacccgaccgacctccgcga

SEQ ID NO: 27326 - DNA, 3169 bp, Homo sapiens
  source 1..3169: mol_type = unassigned DNA
ctctgccttcggggacaggcccgagaaacgtgacaacaactggaggtacgatcctcgcttcacggggagttttgacgatgaccccgatccgcacagagacccttatggggaagaggtggaccggcgcagcgtccacagcgagcactcggcacggagcctgcacagcgcacacagcctggccagccgccgcagcagcctcagctcccactcgcaccagagtcagatttacagaagccacaatgtggctgccggttcctacgaggccccgcttcctccaggctcctttcacggcgattttgcctacggcacctaccgcagcaatttcagcagtggccccggcttcccagagtatggctaccctgcacttggcttcctggagccctccgggcctggcctcccacctggtgtgccacctctgcaggaaaggagacacttgctccaggaagccaggagcccagacccagggatagtgccgcaggaggcgcctgttggaaactcactttccgagctaagcgaagaaaattttgatggaaaatttgctaatctgaccccctcgaggacggtgccagactcggaggcccccccagggtgggatcgtgccgactcgggtcccacgcagccacctctgtctctctcacccgctcccgaaacaaagagacccggacaggcagccaagaaagaaacgaaggaacctaagaagggtgaatcctggttctttcgttggctacctggaaagaaaaagacagaagcttatttgccagatgacaagaacaaatcgattgtttgggatgaaaagaaaaaccagtgggtgaatttaaatgagccagaagaggagaagaaagccccgcccccacctccaacctcgatgcccaagactgtgcaagctgccccgcctgccctcccagggcctcctggagcccccgtgaacatgtactctagaagagcagcaggaaccagagctcgctacgttgacgtcctgaacccaagcgggacccagcggagcgagccggctctcgctcctgcggactttgtcgctccactcgcgccactcccaattccttctaacttgttcgtgccaaccccagtgagaccccagggacgttcgggacggaatgatggcctcctcgctctctcatccccagatgcagaagaaccacagcttccagacgggactggcagggaagggcctgcagcagctaggggcctggccaatccagagcctgccccagagcccaaggttttaagctctgcagcgtcactccctggctctgaactcccctcctccaggcctgagggttcccagggaggagagctttcgcgctgtagttcaatgagttcattatcacgtgaagtgagccagcattttaatcaggctcctggcgacctccctgctgcagggggccctcccagcggggccatgcccttctacaaccctgctcagctggcacaggcctgcgccacctccgggagctcaaggctagggaggattggccagaggaagcacctggtgctgaactaggcttgccctgctgtgaacttgcacttggagccctgacgctgctgttctccccgaagaacccgaccgacctccgcgatctccgtcccgcccccagggagacacagcagtgactcagagctggtcgcacactgtgcctccctcctcaccgcccatcgtaatgaattattttgaaaattaattccaccatcctttcagattctggatggaaagactgaatctttgactcagaattgtttgccgaaaagaatgatgtgactttcttagtcatttaggatgatttaaggatatagtattcctggtcatttaagaatgttcattcattgaagccggagctgtctctgccacaggagagccacatggtcggtagtaaccagggcctctccaagcccagctgtgagtcactgcccagtgagtcccgcgcttcctttaaggtgctgggagcaaagagagggtgactgaggcagaccccaacccctgctctgcaccatctgggccctcgccgtgtttgaacctggctgaatgagtggagggcgctgtgttctcaatcagcgcctccgaggagccgtggggttccttcggcattagttcacggtttttgagagaggccttagttactgcagtgaatttctttcctgttgcaaagacgcttccagcctcactttactttctgtggcctgatgaggaccatgggtgattttgtgtacccaaagcgctggggactgcccaccgtgtggcccagtcactgggaaggagccccagagagccggctgtctgacatgatggctcagggtggtcatccaggttgaaaactgaccgtgtgatgtttgatttgggcttcatttcgtgtgtaggagcacggttagactcactgttaaggaagctggatgcacttctctaaaaggctgcactttccgtgagcacttttcgtggtacaatccacatgacccactttctcccctgggggacgttggttcagaggttggtagcacttggggagagtatcttaacacagtttcttgacagcagctctggaacttagtatttctgccccgagttttgccacactgagactttgagtagctcctggtggactcaaccctgttcaactcagagacgggcctcctctcactgatgcaaagctttaaggcttctctgactgttctgaaactcttcgtattcttgtcaagtctaaagagactgaagaaaagatttaaatactaataaaaatcagtagataatttctgtaggttctgctggaggaatacaaactgtttggtgttttaaatttaagtgtagaaattgtagaatgtggaattagcacagatccttcctggctttctgtttcacttgatcatttagcccagaccacccaggatgttttccaaaatgttccacaggcgtgtcccgctggatccatttgtccttgtcacttggagaaaggccagtccctgtgacggggcagccctctctgtccctcggtcagctcgtgtgaatcctgggacctcttccggtcggctctgcccgctgttctggggtcgactgccacgacttttgattcaagaagcttcctccaggcgggagcggctatttttcctaaatgagaattgttacattgcaaattgttgaataaaatattttgcgctccttcaa

SEQ ID NO: 27327 - DNA, 4834 bp, Homo sapiens
  source 1..4834: mol_type = unassigned DNA
gctagagtcagggacccccgcacctatgaccggaggtattggtgtgatgcagagtatgacgcatacaggagagagcactctgccttcggggacaggcccgagaaacgtgacaacaactggaggtacgatcctcgcttcacggggagttttgacgatgaccccgatccgcacagagacccttatggggaagaggtggaccggcgcagcgtccacagcgagcactcggcacggagcctgcacagcgcacacagcctggccagccgccgcagcagcctcagctcccactcgcaccagagtcagatttacagaagccacaatgtggctgccggttcctacgaggccccgcttcctccaggctcctttcacggcgattttgcctacggcacctaccgcagcaatttcagcagtggccccggcttcccagagtatggctaccctgccgacaccgtctggcctgccatggagcaagtttcatcaagaccaacttctcctgaaaaattttcagtgcctcatgtctgtgccaggtttggccctggcggtcagcttatcaaagtgattcccaatctgccttcagaaggacagccggccttggtggaggtccacagcatggaggccttgctgcagcacacgtctgagcaggaggagatgcgggcgttcccgggacccctggccaaagacgacacccataaggtggatgtcattaattttgcacagaacaaagctatgaaatgtttgcagaatgaaaacttaattgacaaagagtctgcaagtcttctttggaattttattgttctcttatgcagacaaaatgggaccgtggtagggaccgacattgcggagcttctgttacgagaccacagaacagtgtggcttcctgggaagtcgcccaatgaagcaaacctgattgatttcacgaatgaggcagtggagcaggtggaagaggaggagtctggtgaggcccagctctctttcctcactggtggtccggcggctgccgccagctcgctcgagagagagaccgagaggttcagggagctgttgctgtatggccgtaagaaggatgctttggagtctgcaatgaagaatggcctgtggggtcacgctctgctacttgcaagtaagatggacagccggacacacgcccgagtcatgaccaggtttgctaacagcctcccaatcaacgaccctctgcagacagtctaccagctcatgtccggacggatgcctgccgcgtccacgtgctgtggagacgagaaatggggagattggaggccgcacctcgccatggtcttgtccaacttgaacaacaacatggacgtcgagtccaggacgatggctaccatgggcgacactctggcttcaaggggcctcttggatgcggcccacttctgctacctcatggcccaggcgggatttggtgtttacacgaagaaaactacaaagcttgtcttaatcggatccaatcacagtttgccattcttaaagttcgcaaccaacgaagcaatccagaggacggaagcctatgagtacgcccagtccctgggtgccgagacctgccccctgcctagtttccaggtgtttaagttcatctactcctgccgcctggcggaaatggggctggccacgcaagccttccactactgtgaggccatcgcgaagagcatcctgacgcagccgcacctgtattccccggtgttgatcagccagcttgtgcagatggcttcccagttacgactcttcgatccccagctgaaagagaagccagaagaggagtccttggccgcacccacgtggctggttcacctgcagcaggtggagcggcagattaaggagggggctggagtatggcatcaggatggagccctcccgcagcagtgtcctggcactccgagttccgagatggagcagttggacaggccaggactcagtcagccaggagccctggggatcgccaaccctctgctggcggtgcctgcaccgagccctgagcactcgagcccgagcgtgcggctgctgccctcagctccgcagacgctccctgacggcccattggccagtcctgccagagtgccgatgttcccagtgccactgcccccggggcccctggagccgggtcctggctgtgtgaccccagggcctgcacttggcttcctggagccctccgggcctggcctcccacctggtgtgccacctctgcaggaaaggagacacttgctccaggaagccaggagcccagacccagggatagtgccgcaggaggcgcctgttggaaactcactttccgagctaagcgaagaaaattttgatggaaaatttgctaatctgaccccctcgaggacggtgccagactcggaggcccccccagggtgggatcgtgccgactcgggtcccacgcagccacctctgtctctctcacccgctcccgaaacaaagagacccggacaggcagccaagaaagaaacgaaggaacctaagaagggtgaatcctggttctttcgttggctacctggaaagaaaaagacagaagcttatttgccagatgacaagaacaaatcgattgtttgggatgaaaagaaaaaccagtgggtgaatttaaatgagccagaagaggagaagaaagccccgcccccacctccaacctcgatgcccaagactgtgcaagctgccccgcctgccctcccagggcctcctggagcccccgtgaacatgtactctagaagagcagcaggaaccagagctcgctacgttgacgtcctgaacccaagcgggacccagcggagcgagccggctctcgctcctgcggactttgtcgctccactcgcgccactcccaattccttctaacttgttcgtgccaaccccagatgcagaagaaccacagcttccagacgggactggcagggaagggcctgcagcagctaggggcctggccaatccagagcctgccccagagcccaaggttttaagctctgcagcgtcactccctggctctgaactcccctcctccaggcctgagggttcccagggaggagaggctcctggcgacctccctgctgcagggggccctcccagcggggccatgcccttctacaaccctgctcagctggcacaggcctgcgccacctccgggagctcaaggctagggaggattggccagaggaagcacctggtgctgaactaggcttgccctgctgtgaacttgcacttggagccctgacgctgctgttctccccgaagaacccgaccgacctccgcgatctccgtcccgcccccagggagacacagcagtgactcagagctggtcgcacactgtgcctccctcctcaccgcccatcgtaatgaattattttgaaaattaattccaccatcctttcagattctggatggaaagactgaatctttgactcagaattgtttgccgaaaagaatgatgtgactttcttagtcatttaggatgatttaaggatatagtattcctggtcatttaagaatgttcattcattgaagccggagctgtctctgccacaggagagccacatggtcggtagtaaccagggcctctccaagcccagctgtgagtcactgcccagtgagtcccgcgcttcctttaaggtgctgggagcaaagagagggtgactgaggcagaccccaacccctgctctgcaccatctgggccctcgccgtgtttgaacctggctgaatgagtggagggcgctgtgttctcaatcagcgcctccgaggagccgtggggttccttcggcattagttcacggtttttgagagaggccttagttactgcagtgaatttctttcctgttgcaaagacgcttccagcctcactttactttctgtggcctgatgaggaccatgggtgattttgtgtacccaaagcgctggggactgcccaccgtgtggcccagtcactgggaaggagccccagagagccggctgtctgacatgatggctcagggtggtcatccaggttgaaaactgaccgtgtgatgtttgatttgggcttcatttcgtgtgtaggagcacggttagactcactgttaaggaagctggatgcacttctctaaaaggctgcactttccgtgagcacttttcgtggtacaatccacatgacccactttctcccctgggggacgttggttcagaggttggtagcacttggggagagtatcttaacacagtttcttgacagcagctctggaacttagtatttctgccccgagttttgccacactgagactttgagtagctcctggtggactcaaccctgttcaactcagagacgggcctcctctcactgatgcaaagctttaaggcttctctgactgttctgaaactcttcgtattcttgtcaagtctaaagagactgaagaaaagatttaaatactaataaaaatcagtagataatttctgtaggttctgctggaggaatacaaactgtttggtgttttaaatttaagtgtagaaattgtagaatgtggaattagcacagatccttcctggctttctgtttcacttgatcatttagcccagaccacccaggatgttttccaaaatgttccacaggcgtgtcccgctggatccatttgtccttgtcacttggagaaaggccagtccctgtgacggggcagccctctctgtccctcggtcagctcgtgtgaatcctgggacctcttccggtcggctctgcccgctgttctggggtcgactgccacgacttttgattcaagaagcttcctccaggcgggagcggctatttttcctaaatgagaattgttacattgcaaattgttgaataaaatattttgcgctccttcaagcac

SEQ ID NO: 27328 - DNA, 2097 bp, Homo sapiens
  source 1..2097: mol_type = unassigned DNA
ctccaacctcgatgcccaagactgtgcaagctgccccgcctgccctcccagggcctcctggagcccccgtgaacatgtactctagaagagcagcaggaaccagagctcgctacgttgacgtcctgaacccaagcgggacccagcggagcgagccggctctcgctcctgcggactttgtcgctccactcgcgccactcccaattccttctaacttgttcgtgccaaccccagtgtcttcagtgagaccccagggacgttcgggacggaatgatggcctcctcgctctctcatccccagatgcagaagaaccacagcttccagacgggactggcagggaagggcctgcagcagctaggggcctggccaatccagagcctgccccagagcccaaggttttaagctctgcagcgtcactccctggctctgaactcccctcctccaggcctgagggttcccagggaggagaggctcctggcgacctccctgctgcagggggccctcccagcggggccatgcccttctacaaccctgctcagctggcacaggcctgcgccacctccgggagctcaaggctagggaggattggccagaggaagcacctggtgctgaactaggcttgccctgctgtgaacttgcacttggagccctgacgctgctgttctccccgaagaacccgaccgacctccgcgatctccgtcccgcccccagggagacacagcagtgactcagagctggtcgcacactgtgcctccctcctcaccgcccatcgtaatgaattattttgaaaattaattccaccatcctttcagattctggatggaaagactgaatctttgactcagaattgtttgccgaaaagaatgatgtgactttcttagtcatttaggatgatttaaggatatagtattcctggtcatttaagaatgttcattcattgaagccggagctgtctctgccacaggagagccacatggtcggtagtaaccagggcctctccaagcccagctgtgagtcactgcccagtgagtcccgcgcttcctttaaggtgctgggagcaaagagagggtgactgaggcagaccccaacccctgctctgcaccatctgggccctcgccgtgtttgaacctggctgaatgagtggagggcgctgtgttctcaatcagcgcctccgaggagccgtggggttccttcggcattagttcacggtttttgagagaggccttagttactgcagtgaatttctttcctgttgcaaagacgcttccagcctcactttactttctgtggcctgatgaggaccatgggtgattttgtgtacccaaagcgctggggactgcccaccgtgtggcccagtcactgggaaggagccccagagagccggctgtctgacatgatggctcagggtggtcatccaggttgaaaactgaccgtgtgatgtttgatttgggcttcatttcgtgtgtaggagcacggttagactcactgttaaggaagctggatgcacttctctaaaaggctgcactttccgtgagcacttttcgtggtacaatccacatgacccactttctcccctgggggacgttggttcagaggttggtagcacttggggagagtatcttaacacagtttcttgacagcagctctggaacttagtatttctgccccgagttttgccacactgagactttgagtagctcctggtggactcaaccctgttcaactcagagacgggcctcctctcactgatgcaaagctttaaggcttctctgactgttctgaaactcttcgtattcttgtcaagtctaaagagactgaagaaaagatttaaatactaataaaaatcagtagataatttctgtaggttctgctggaggaatacaaactgtttggtgttttaaatttaagtgtagaaattgtagaatgtggaattagcacagatccttcctgggacctcttccggtcggctctgcccgctgttctggggtcgactgccacgacttttgattcaagaagcttcctccaggcgggagcggctatttttcctaaatgagaattgttacattgcaaattgttgaataaaatattttgcgctccttc

SEQ ID NO: 27329 - DNA, 4228 bp, Homo sapiens
  source 1..4228: mol_type = unassigned DNA
ctttctgtttaaaattttgcctggatttctgattatttttctcaagacaggtatatatttaaatttattgaggttaaaaggtatgccttcagactcttgttgaaattgccaaatcattttgagaactgtttgtaccagtttttacttccatctgtacttatgagaatgccagacagaagtattattttttaaaaagctaatgtggctgggtgtggtggctcatgcctgtaatcccagcactgtggcaggcgcctatagtcccagccacatcctatgctgtggcatgggaacccaggctgaggcatgagaattgcttgaaccctggatgggggatgttgcagtcagccaagatggcgccactgcactccagcctgggtgacagagcaagatgctgtctcaaaaaaaaaaacaaaaaacaaaaaacaaaagctatatgttaagtgaagcatagtatgttgttttaattagttttttgttttttttttcctcctgagacggagtctcactctgtcgcccaggctggagctcagtgacgcgatttcggctcactgcaacctctgcctcccgggttcaagcaattctcctgcctcggcctcctgagtagctgggattacaggtgtgcaccaccacgcctggctaatttttgtatttttagtagagaaggggtttcatcatgttggccaggctggtctcaaactcctgatcttgtgatccaccctcctcagccacccaaagtgctgggattacaggtgtgagccaccacacctggccattttaattactattcttatattactagtaagttgaacatttttacatatgcttatcaagtttggctttaatttttatgtaacccaaattgttcattttgttttaggtcttctctgttggttgaaatgtctatgattttatctgcctcagtcattcgtgtcagagatggactgccactttctgcttctactgattatgaacaaagcacaggaatgcaggagtgcagaaagtattttaaaatgctttcgaggaaacttgctcaacttcctgatagatgtacactgaaaactggacattataacattaattttattagctctctgggagtgagctacatgatgttgtgcactgaaaattacccaaatgttctcgccttctctttcctggatgagcttcagaaggagttcattactacttataacatgatgaagacaaatactgctgtcagaccatactgtttcattgaatttgataacttcattcagaggaccaagcagcgatataataatcccaggtctctttcaacaaagataaatctttctgacatgcagacggaaatcaagctgaggcctccttatcaaatttccatgtgcgaactggggtcagccaatggagtcacatcagcattttctgttgactgtaaaggtgctggtaagatttcttctgctcaccagcgactggaaccagcaactctgtcagggattgtaggatttatccttagtcttttatgtggagctctgaatttaattcgaggctttcatgctatagaaagtctcctgcagagtgatggtgatgattttaattacatcattgcatttttccttggaacagcagcctgcctttaccagtgttatttacttgtctactacaccggctggcggaatgtcaaatcttttttgacttttggcttaatctgtctatgcaacatgtatctctatgaactgcgcaacctctggcagcttttctttcatgtgactgtgggagcatttgttacactacagatctggctaaggcaagcccagggcaaggctcccgattatgatgtctgacaccatccttcagatctattgccttggcttcagggggataaggagggaacatatcataactgcactgtgatgaagaagctgttccccacagaggagaagctctgctttctttctctccaactttccttttttaaaatcagcatgatgtgcctgtgagcatggaagagtcctctcagaagaatgttggccatgagactatcattcagaggaggaggggatttctctcttcaaggccgtaacagtggaagaacagtcatatgccattggaagtcttggccagcagtcctgaatccttcctgaagagttcagaaaatagatgtggtattgctctgaggaccaggcaggaggaactctacaacctgagtttgcctttgtgaggcattagtatagaccaaataaaaagctgcagaaattggaaagtttatgttttaaataaatgactgtgataaatatcagattatttgcacacttatggtactacgagtttataaagtccaagatggtgtgaaattggttctttttacttttatatttttgcttgaatcttaactctggaaatcacctgatgtagaagaagactgtgatgagctcgtctgtggaacatcacaagtatcgaaaatacagtaatggatgtttcctttctaatccacatttattgtttcttttgaaatcacgtctaaaaaatatgactcacactatagccgttgtttcccaaacttcagtctctttagtactacttgtattattttcttaatatttatcttttaaattttaaagtttttttaaaaaaatgaatcctgctccaagtggaaaaccagtatcagtttgccataaataaaaggtaaccacaaaataagtaagatgaacacaaaaaatgttgttcagttctagctagaaactaatgcctagaaaggctccgaatcttaggctctttctttgtggcagtgagggagatgttaccagcaccagcatgaggcactgtctctggaatagtcagaggataaaaggaaactgtaaagggaatgacattctcactgtgattcagcattattctatgttgtgcatcacttaaagacatgttgtgtgccaccagtggcatgggtccgcactatggaaatgcttgactgtagtaagaatcagaaggtggctttcctagcaactcattattttatggctttgaggaattaagcccctagtatctgagagaacttacttgttttttgataacgttttaaagattgtttaagcagttatgaattaataatataggaagcacagttggattccactagcaaaatctataactctcatggttttggaagtcatcttcatgggtgattttcctttgttttttaaagaaaatatttcaaacaaggaattcataggatactgaaatttgatatcatccagaaaaacagatcccattacattgtaattgttgttactaggcatatttattaagtagagaaatagagggtaaaaagttagtgaactgtcttgtttgcgtgaaccagtatttgtggatatgtctagaactgtaaaatcttgcttaactagaaccttagtctgcaccctccttttaggagaatgaggtaaaaggaagacaataagcttatgatatcagggattcatgtaaaacaggaaatagtagttggctccagtcttctcctctaacaaaagtatgcatattctgagagataccccaaggcatcacaagatcctgaatcatcaaaacaccattgaattgtgttgggcattttgtagccaggaaagtgaagtggttcaatttagaaagggtttcaggccaggcacggtgactcaggcctgtaatcccagcactttgggaggccgagacaggcagatcacttgagaccagtagtttgagaatcagcctggccaacgtggtgaaacctcatctctactaaaaatacaaaatttagctgggtgtggttgcgcgtgcctttagtcccagctactcgggaggctgaggcaggagaatcgcttgaacccaggaggtggaagttggcagtgagccaagatcacgccactgtactccagcctggccaacagagcgagactctgtctcaaaaaagaaaggttttctaaactaatggttaaaacagaattttcttgtaaatagggaagttggagcattctggttgagattttgctctgtattgacacagctcgcaccagtttggttcaggagctacctccttgtcattgaattgacgagttacaatgtttggtattcggatacattcagcaagaacacttgaaaactcctcaccaactatttttaaaggcttactttgtttttgtttttattttttcactggctattttggataagaggatgtttacatcttaatgtaaaaaaatgaaaacaggtataaatgttttatgta

SEQ ID NO: 27330 - DNA, 572 bp, Homo sapiens
  source 1..572: mol_type = unassigned DNA
agtcctcttcttcctttcttaggggtcgttcgaatccctgccggcctctcccctcccgctccctgcctctcgccacagcctcggccttcgccctcgggattgaagacctaccccacgggcaggagccaattgctgatggggagaggaaaaaatagccactattcaggttccctgtgagttaactgctgctgtacaaaggcaggtgtaatattttctctgtattaaaggtcttctctgttggttgaaatgtctatgattttatctgcctcagtcattcgtgtcagagatggactgccactttctgcttctactgattatgaacaaagcacaggaatgcaggagtgcagaaagtattttaaaatgctttcgaggaaacttgctcaacttcctgatagatgtacactgaaaactggacattataacattaattttattagctctctgggagtgagctacatgatgttgtgcactgaaaattacccaaatgttctcgccttctctttcctggatgagcttcagaaggagttcattactacttataacatgatgaagacaaatactgctgtcagacc

SEQ ID NO: 27331 - DNA, 1011 bp, Homo sapiens
  source 1..1011: mol_type = unassigned DNA
ctcggagcggcgggtcccgtctcgacagttgctgatggggagaggaaaaaatagccactattcaggttccctgtgagttaactgctgctgtacaaaggcaggtgtaatattttctctgtattaaaggtcttctctgttggttgaaatgtctatgattttatctgcctcagtcattcgtgtcagagatggactgccactttctgcttctactgattatgaacaaagcacaggaatgcaggagtgcagaaagtattttaaaatgctttcgaggaaacttgctcaacttcctgatagatgtacactgaaaactggacattataacattaattttattagctctctgggagtgagctacatgatgttgtgcactgaaaattacccaaatgttctcgccttctctttcctggatgagcttcagaaggagttcattactacttataacatgatgaagacaaatactgctgtcagaccatactgtttcattgaatttgataacttcattcagaggaccaagcagcgatataataatcccaggtctctttcaacaaagataaatctttctgacatgcagacggaaatcaagctgaggcctccttatcaaatttccatgtgcgaactggggtcagccaatggagtcacatcagcattttctgttgactgtaaaggtgctggtaagatttcttctgctcaccagcgactggaaccagcaactctgtcagggattgtaggatttatccttagtcttttatgtggagctctgaatttaattcgaggctttcatgctatagaaagtctcctgcagagtgatggtgatgattttaattacatcattgcatttttccttggaacagcagcctgcctttaccagtgttatttacttgtctactacaccggctggcggaatgtcaaatcttttttgacttttggcttaatctgtctatgcaacatgtatctctatgaactgcgcaacctctggcagcttttctttcatgtgactgtgggagcatttgt

SEQ ID NO: 27332 - DNA, 550 bp, Homo sapiens
  source 1..550: mol_type = unassigned DNA
ctttcttaggggtcgttcgaatccctgccggcctctcccctcccgctccctgcctctcgccacagcctcggccttcgccctcgggattgaagacctaccccacgggcaggagccaagtcttctctgttggttgaaatgtctatgattttatctgcctcagtcattcgtgtcagagatggactgccactttctgcttctactgattatgaacaaagcacaggaatgcaggagtgcagaaagtattttaaaatgctttcgaggaaacttgctcaacttcctgatagatgtacactgaaaactggacattataacattaattttattagctctctgggagtgagctacatgatgttgtgcactgaaaattacccaaatgttctcgccttctctttcctggatgagcttcagaaggagttcattactacttataacatgatgaagacaaatactgctgtcagaccatactgtttcattgaatttgataacttcattcagaggaccaagcagcgatataataatcccaggtctctttcaacaaagataaatcttt

SEQ ID NO: 27333 - DNA, 870 bp, Homo sapiens
  source 1..870: mol_type = unassigned DNA
ctctcccctcccgctccctgcctctcgccacagcctcggccttcgccctcgggattgaagacctaccccacgggcaggagccaagtccgtgcctttgggatgggagtcggggccgcggagctctggagttgctgatggggagaggaaaaaatagccactattcaggttccctgtgagttaactgctgctgtacaaaggtcttctctgttggttgaaatgtctatgattttatctgcctcagtcattcgtgtcagagatggactgccactttctgcttctactgattatgaacaaagcacaggaatgcaggagtgcagaaagtattttaaaatgctttcgaggaaacttgctcaacttcctgatagatgtacactgaaaactggacattataacattaattttattagctctctgggagtgagctacatgatgttgtgcactgaaaattacccaaatgttctcgccttctctttcctggatgagcttcagaaggagttcattactacttataacatgatgaagacaaatactgctgtcagaccatactgtttcattgaatttgataacttcattcagaggaccaagcagcgatataataatcccaggtctctttcaacaaagataaatctttctgacatgcagacggaaatcaagctgaggcctccttatcaaatttccatgtgcgaactggggtcagccaatggagtcacatcagcattttctgttgactgtaaaggtgctggtaagatttcttctgctcaccagcgactggaaccagcaactctgtcagggattgtaggatttatccttagtcttttatgtggagctctgaatttaattcgaggctttcatgctatagaaagtctcctg

SEQ ID NO: 27334 - DNA, 482 bp, Homo sapiens
  source 1..482: mol_type = unassigned DNA
tttcttaggggtcgttcgaatccctgccggcctctcccctcccgctccctgcctctcgccacagcctcggccttcgccctcgggattgaagacctaccccacgggcaggagccaagtccgtgcctttgggatgggagtcggggccgcggagctctggaggtcttctctgttggttgaaatgtctatgattttatctgcctcagtcattcgtgtcagagatggactgccactttctgcttctactgattatgaacaaagcacaggaatgcaggagtgcagaaagtattttaaaatgctttcgaggaaacttgctcaacttcctgatagatgtacactgaaaactggacattataacattaattttattagctctctgggagtgagctacatgatgttgtgcactgaaaattacccaaatgttctcgccttctctttcctggatgagcttcagaaggagttcattactacttataacatgatga

SEQ ID NO: 27335 - DNA, 972 bp, Homo sapiens
  source 1..972: mol_type = unassigned DNA
actcggagcggcgggtcccgtctcgacaggtcttctctgttggttgaaatgtctatgattttatctgcctcagtcattcgtgtcagagatggactgccactttctgcttctactgattatgaacaaagcacaggaatgcaggagtgcagaaagtattttaaaatgctttcgaggaaacttgctcaacttcctgatagatgtacactgaaaactggacattataacattaattttattagctctctgggagtgagctacatgatgttgtgcactgaaaattacccaaatgttctcgccttctctttcctggatgagcttcagaaggagttcattactacttataacatgatgaagacaaatactgctgtcagaccatactgtttcattgaatttgataacttcattcagaggaccaagcagcgatataataatcccaggtctctttcaacaaagataaatctttctgacatgcagacggaaatcaagctgaggcctccttatcaaatttccatgtgcgaactggggtcagccaatggagtcacatcagcattttctgttgactgtaaaggtgctggtaagatttcttctgctcaccagcgactggaaccagcaactctgtcagggattgtaggatttatccttagtcttttatgtggagctctgaatttaattcgaggctttcatgctatagaaagtctcctgcagagtgatggtgatgattttaattacatcattgcatttttccttggaacagcagcctgcctttaccagtgttatttacttgtctactacaccggctggcggaatgtcaaatcttttttgacttttggcttaatctgtctatgcaacatgtatctctatgaactgcgcaacctctggcagcttttctttcatgtgactgtgggagcatttgttacactacagatctggctaaggcaagcccagggcaaggctcccgattatgatgtctga

SEQ ID NO: 27336 - DNA, 4135 bp, Homo sapiens
  source 1..4135: mol_type = unassigned DNA
acgctgtggctttagggagctgggaaaggcgctctctcccggtcccgctctgcccggtcccacgcccctcggccgtccggctgcctgggtcttccgggttcttccgcccctctggctcggtccccgctacctctcctccctcctcccctctcggtaccttcgcccgccgcgcgcctttctcaaatcctccggttattaagcaagctcaggggtccggtggcctgccctggtaactctgcgcccgccccttcctgcccccttcctgccctcacgccccgtcccctcctcttgacgtggcagaggcggcgccagccatgttggccgggcggaggtcttcgctgaggcccggggcggggtggcgccacccctgattgcggtgccacggactgctcctgctgggcggagaggacagattttgcaaagcggaggctgcgacgggtcctgcagggggacagtgaggaaagggccgcctcgtctccgctcctgggggaccgcagaaataagaatcaaactccacaatgacaacctatttggaattcattcaacaaaatgaagaacgagatggagtccgatttagttggaatgtttggccatcaagtcgactggaagctacaagaatggttgttcctgtggcagccctgtttacaccactgaaagagagacctgacttaccacctattcaatatgaacctgttctgtgtagtaggaccacttgccgtgcagttttgaatcctttatgtcaagtggattatcgagcaaaactttgggcttgcaacttttgttaccaaaggaatcagtttccacctagttatgctggtatatctgaactgaatcagcctgctgaacttttacctcagttttctagcattgaatatgtagttctgcgtggtcctcagatgcctttgatattcctctatgtggttgatacttgcatggaagatgaagatttacaagccctgaaagaatccatgcagatgtcattaagtcttttaccacctacagctttggttggacttattacttttgggagaatggttcaggttcatgaacttggatgtgaaggcatttcaaaaagctatgtcttcagaggaacaaaagatttgtctgccaaacaactgcaggaaatgctggggctctctaaagtaccacttactcaagcaacacgtggtcctcaggtacagcagccacctccttccaacagattcttacaaccagtacagaaaatagacatgaatctcacagatcttctgggagaactccagcgagacccttggcctgtaccacagggaaagagacctttgcgttcctctggggtggcactttccatagctgtaggactgctggagtgtacttttcccaacactggtgctcgtatcatgatgttcattggtggtcctgctactcaggggcctggaatggtggttggagatgagttgaagacacctataagatcgtggcatgacattgacaaagacaatgccaaatatgttaaaaagggaactaagcattttgaagcattggctaatcgagctgctacaactggccatgttattgatatctatgcgtgtgcattagatcagacaggtctcctggagatgaaatgctgtcccaaccttactggaggatacatggtaatgggtgattctttcaatacttccttattcaaacaaacttttcaaagagtctttaccaaagacatgcatggacagtttaaaatgggctttggtggtacgctagaaataaagacctcaagggaaataaagatttcaggagctattggaccctgtgtgtcactcaattctaaaggaccctgtgtgtctgaaaatgagataggaacaggtggcacatgtcagtggaagatatgtggacttagtcccactacaaccttagccatatattttgaggttgtcaatcagcataatgctccaattcctcaaggagggcgtggtgcaatccagtttgtgactcagtatcagcattcaagtgggcagagacgcatccgagtgaccaccattgctaggaactgggcagatgctcaaactcaaatccaaaacattgctgcatcttttgaccaggaggcagctgccattcttatggcccggctagcaatatatagagcagaaacagaagaaggtccagatgtgcttaggtggctggacagacagctcattcgactgtgtcagaaatttggagaatatcataaagatgacccaagttccttcagattttcagaaactttctccctttatccacagtttatgtttcatttaagaagatcttctttcctgcaagtttttaacaatagtcctgatgagagttcatattatcgtcaccattttatgcgtcaagatctgacccagtctctaattatgattcagcctatcctgtatgcgtattcttttagtggaccaccagagccggttcttcttgatagcagtagcattcttgcagatcgtattcttctcatggacacattcttccagattttgatttatcatggtgagaccatagcacagtggcggaagtcaggataccaggatatgcctgagtatgaaaatttccgccaccttctgcaagccccagtggatgatgcacaggaaattcttcactccagatttccaatgccaagatacattgacactgaacatggaggcagccaggcccgtttcctcctttcaaaagtcaacccttcacagactcataataatatgtatgcctgggggcaggagtctggagcacctattcttacagatgatgttagtttacaagtgtttatggatcacttgaagaaacttgctgtgtccagtgctgcttgaagtgctaataatgttaaagacacttaagaagatgaaataatattcaaatttcattttttcctttttccatttatctgtggaaaccaacagatattgctctatattttttgtattagtatggtttgagacaacatatggaaaatgttcacatttgtagattaagctggaattataatgagagcaataagaacaaatttattttgcttaccacagtgttatagctggttctagaaatttgaagtctttataacttaattatgtttaataaaaaatagagtctgcctcgtactacagatgtaactcatttgtatattgcagacagacccaaagtggcactgaattttcttgctcaccttttaaaaacttgttccttaattttagccagaaagcaaaaaaacaatagtaatgataaatgtgaacatttttgcttattcattgaatatttttctgtaattttcagcacttatgtatacactttttctgtacttactaggttaaggcagatttatttttatgatttgtttaggaattatttgattttataatggtaattttcatgatgataatgtttttggttatttggaaagatagtttagagatgaaaggtttttttgggtaacaatcccgcagctgacaaaaaatgtgaaatttccacaaaatatccaacttatgtgactaaacgcagtagtttttttaaaaggggagatagaaaataaatggttttgttggagtgcattttagtaagcctttgcagtaaaatgacggttgtaactactaaaccaaatttagttttcacagcatggttttgttgttttccccttgtttttcagaggtaaattttgcattatatccttcagtattttaacactattttggcagtttacacattactttttgtttttccttcctttttgtgaaatgtattaagttgtggttcttattgaaacagtattatataatgtttgcttaattatatcatgtgatgctcagttctattttgatttattcattagtattcacttttacctttaaagtttacttgtagcaaatatgtttacattgataaagccagatatgttttgacaatgaaatttacatatcaagtactgcaaataaaaggtggtgctatgatatatgcttaggaggacagttttaatgattgtacttgcatgaacacaatcatatgatggtaaagcagaaacttaagaaaaaattgtttatgtgttatattcaattagcttaaataagttgctttgttatattttatttgaattgaactacgctaggcctaaatgccaataaaatatacttttcactgt

SEQ ID NO: 27337 - DNA, 2685 bp, Homo sapiens
  source 1..2685: mol_type = unassigned DNA
agtgaggaaagggccgcctcgtctccgctcctgggggaccgcagtcaagtggattatcgagcaaaactttgggcttgcaacttttgttaccaaaggaatcagtttccacctagttatgctggtatatctgaactgaatcagcctgctgaacttttacctcagttttctagcattgaatatgtagttctgcgtggtcctcagatgcctttgatattcctctatgtggttgatacttgcatggaagatgaagatttacaagccctgaaagaatccatgcagatgtcattaagtcttttaccacctacagctttggttggacttattacttttgggagaatggttcaggttcatgaacttggatgtgaaggcatttcaaaaagctatgtcttcagaggaacaaaagatttgtctgccaaacaactgcaggaaatgctggggctctctaaagtaccacttactcaagcaacacgtggtcctcaggtacagcagccacctccttccaacagattcttacaaccagtacagaaaatagacatgaatctcacagatcttctgggagaactccagcgagacccttggcctgtaccacagggaaagagacctttgcgttcctctggggtggcactttccatagctgtaggactgctggagtgtacttttcccaacactggtgctcgtatcatgatgttcattggtggtcctgctactcaggggcctggaatggtggttggagatgagttgaagacacctataagatcgtggcatgacattgacaaagacaatgccaaatatgttaaaaagggaactaagcattttgaagcattggctaatcgagctgctacaactggccatgttattgatatctatgcgtgtgcattagatcagacaggtctcctggagatgaaatgctgtcccaaccttactggaggatacatggtaatgggtgattctttcaatacttccttattcaaacaaacttttcaaagagtctttaccaaagacatgcatggacagtttaaaatgggctttggtggtacgctagaaataaagacctcaagggaaataaagatttcaggagctattggaccctgtgtgtcactcaattctaaaggaccctgtgtgtctgaaaatgagataggaacaggtggcacatgtcagtggaagatatgtggacttagtcccactacaaccttagccatatattttgaggttgtcaatcagcataatgctccaattcctcaaggagggcgtggtgcaatccagtttgtgactcagtatcagcattcaagtgggcagagacgcatccgagtgaccaccattgctaggaactgggcagatgctcaaactcaaatccaaaacattgctgcatcttttgaccaggaggcagctgccattcttatggcccggctagcaatatatagagcagaaacagaagaaggtccagatgtgcttaggtggctggacagacagctcattcgactgtgtcagaaatttggagaatatcataaagatgacccaagttccttcagattttcagaaactttctccctttatccacagaggagagacttccctaaaacctctggtgagatcctggagaaccaggaaaaggcaaggtctgcttgtcttaagtttatgtttcatttaagaagatcttctttcctgcaagtttttaacaatagtcctgatgagagttcatattatcgtcaccattttatgcgtcaagatctgacccagtctctaattatgattcagcctatcctgtatgcgtattcttttagtggaccaccagagccggttcttcttgatagcagtagcattcttgcagatcgtattcttctcatggacacattcttccagattttgatttatcatggtgagaccatagcacagtggcggaagtcaggataccaggatatgcctgagtatgaaaatttccgccaccttctgcaagccccagtggatgatgcacaggaaattcttcactccagatttccaatgccaagatacattgacactgaacatggaggcagccaggcccgtttcctcctttcaaaagtcaacccttcacagactcataataatatgtatgcctgggggcaggagtctggagcacctattcttacagatgatgttagtttacaagtgtttatggatcacttgaagaaacttgctgtgtccagtgctgcttgaagtgctaataatgttaaagacacttaagaagatgaaataatattcaaatttcattttttcctttttccatttatctgtggaaaccaacagatattgctctatattttttgtattagtatggtttgagacaacatatggaaaatgttcacatttgtagattaagctggaattataatgagagcaataagaacaaatttattttgcttaccacagtgttatagctggttctagaaatttgaagtctttataacttaattatgtttaataaaaaatagagtctgcctcgtactacagatgtaactcatttgtatattgcagacagacccaaagtggcactgaattttcttgctcaccttttaaaaacttgttccttaattttagccagaaagcaaaaaaacaatagtaatgataaatgtgaacatttttgcttattcattgaatatttttctgtaattttcagcacttatgtatacactttttctgtacttacta

SEQ ID NO: 27338 - DNA, 4215 bp, Homo sapiens
  source 1..4215: mol_type = unassigned DNA
tctcgctctgtcacccgggctggagtgcggtggcacgatctcagctcactgcaacctctgcctcttgggttcaagcgcttctcttgcctcagcctcccaagtagctgggattacaggagcataccaccatgccttactaatttttgtatttttagtagagttggtgcttcaccatgttagccaaggttggtcttgaacttctgaccttgtgatttgcccaccttgacctcccaaagtgctgggattacaggcatgatccaccgcacctggccctaatttttgtatttttagtagacatggggtttcaccatgttggccaggctggtcttgaactcctgacctcaggtgatccacccgcctcggcctcccaaaatactgggattacagctgtgattcactgcgcctggccacatcttccttttttcaataggcaagtgaatgcctgcagactgaattttttttctccattgaaacatgtttattttctttccctatttagattaaatttccctattctttccctattattagttgaaaagagcctggcctttgctccccagatagtcctggattcaaatcttaaactcttctggttgtatgatcctgggtttttgtctttgctgattgtgtcatccttcatagaaaggaataaactacctattttgccaggttattagtactaaatatgaaattctcaatatggtgtaaacccttatagagctttatagaaaaacctggatttaaaatcttgctttgttacttactgattgtgtaacctcagacaaattacttagtctttctgattgtcaattttcatttataaagtagaatttaagaagaaatctatttcattattgttttgtgaggaaatagtatatataaaggttttagcatagaatatggaacatattaagttcttagtaaagagttgctgtttctgctaacagtataggaaatattgcaggattagttcactaattttatctttgtacatctttagacttcagttttctgttacacagttttataactccagtacttcatgactaagcatttctagattcaagaaaaatttagtataacattattttcatttgtctagagagaaattgtgcacatatctgaaattcaaaacaaaggtggcagttcgtagtttggttatgaattacattagaaaatcaagatgtatataggtacaaagaaatgctggggctctctaaagtaccacttactcaagcaacacgtggtcctcaggtacagcagccacctccttccaacagattcttacaaccagtacagaaaatagacatgaatctcacagatcttctgggagaactccagcgagacccttggcctgtaccacagggaaagagacctttgcgttcctctggggtggcactttccatagctgtaggactgctggagtgtacttttcccaacactggtgctcgtatcatgatgttcattggtggtcctgctactcaggggcctggaatggtggttggagatgagttgaagacacctataagatcgtggcatgacattgacaaagacaatgccaaatatgttaaaaagggaactaagcattttgaagcattggctaatcgagctgctacaactggccatgttattgatatctatgcgtgtgcattagatcagacaggtctcctggagatgaaatgctgtcccaaccttactggaggatacatggtaatgggtgattctttcaatacttccttattcaaacaaacttttcaaagagtctttaccaaagacatgcatggacagtttaaaatgggctttggtggtacgctagaaataaagacctcaagggaaataaagatttcaggagctattggaccctgtgtgtcactcaattctaaaggaccctgtgtgtctgaaaatgagataggaacaggtggcacatgtcagtggaagatatgtggacttagtcccactacaaccttagccatatattttgaggttgtcaatcagcataatgctccaattcctcaaggagggcgtggtgcaatccagtttgtgactcagtatcagcattcaagtgggcagagacgcatccgagtgaccaccattgctaggaactgggcagatgctcaaactcaaatccaaaacattgctgcatcttttgaccaggaggcagctgccattcttatggcccggctagcaatatatagagcagaaacagaagaaggtccagatgtgcttaggtggctggacagacagctcattcgactgtgtcagaaatttggagaatatcataaagatgacccaagttccttcagattttcagaaactttctccctttatccacagtttatgtttcatttaagaagatcttctttcctgcaagtttttaacaatagtcctgatgagagttcatattatcgtcaccattttatgcgtcaagatctgacccagtctctaattatgattcagcctatcctgtatgcgtattcttttagtggaccaccagagccggttcttcttgatagcagtagcattcttgcagatcgtattcttctcatggacacattcttccagattttgatttatcatggtgagaccatagcacagtggcggaagtcaggataccaggatatgcctgagtatgaaaatttccgccaccttctgcaagccccagtggatgatgcacaggaaattcttcactccagatttccaatgccaagatacattgacactgaacatggaggcagccaggcccgtttcctcctttcaaaagtcaacccttcacagactcataataatatgtatgcctgggggcaggagtctggagcacctattcttacagatgatgttagtttacaagtgtttatggatcacttgaagaaacttgctgtgtccagtgctgcttgaagtgctaataatgttaaagacacttaagaagatgaaataatattcaaatttcattttttcctttttccatttatctgtggaaaccaacagatattgctctatattttttgtattagtatggtttgagacaacatatggaaaatgttcacatttgtagattaagctggaattataatgagagcaataagaacaaatttattttgcttaccacagtgttatagctggttctagaaatttgaagtctttataacttaattatgtttaataaaaaatagagtctgcctcgtactacagatgtaactcatttgtatattgcagacagacccaaagtggcactgaattttcttgctcaccttttaaaaacttgttccttaattttagccagaaagcaaaaaaacaatagtaatgataaatgtgaacatttttgcttattcattgaatatttttctgtaattttcagcacttatgtatacactttttctgtacttactaggttaaggcagatttatttttatgatttgtttaggaattatttgattttataatggtaattttcatgatgataatgtttttggttatttggaaagatagtttagagatgaaaggtttttttgggtaacaatcccgcagctgacaaaaaatgtgaaatttccacaaaatatccaacttatgtgactaaacgcagtagtttttttaaaaggggagatagaaaataaatggttttgttggagtgcattttagtaagcctttgcagtaaaatgacggttgtaactactaaaccaaatttagttttcacagcatggttttgttgttttccccttgtttttcagaggtaaattttgcattatatccttcagtattttaacactattttggcagtttacacattactttttgtttttccttcctttttgtgaaatgtattaagttgtggttcttattgaaacagtattatataatgtttgcttaattatatcatgtgatgctcagttctattttgatttattcattagtattcacttttacctttaaagtttacttgtagcaaatatgtttacattgataaagccagatatgttttgacaatgaaatttacatatcaagtactgcaaataaaaggtggtgctatgatatatgcttaggaggacagttttaatgattgtacttgcatgaacacaatcatatgatggtaaagcagaaacttaagaaaaaattgtttatgtgttatattcaattagcttaaataagttgctttgttatattttatttgaattgaactacgctaggcctaaatgccaataaaatatacttttcactgtt

SEQ ID NO: 27339 - DNA, 2734 bp, Homo sapiens
  source 1..2734: mol_type = unassigned DNA
gtggcagaggcggcgccagccatgttggccgggcggaggtcttcgctgaggcccggggcggggtggcgccacccctgattgcggtgccacggactgctcctgctgggcggagaggacagattttgcaaagcggaggctgcgacgggtcctgcagggggacagtgaggaaagggccgcctcgtctccgctcctgggggaccgcagaaataagaatcaaactccacaatgacaacctatttggaattcattcaacaaaatgaagaacgagatggagtccgatttagttggaatgtttggccatcaagtcgactggaagctacaagaatggttgttcctgtggcagccctgtttacaccactgaaagagagacctgacttaccacctattcaatatgaacctgttctgtgtagtaggaccacttgccgtgcagttttgaatcctttatgtcaagtggattatcgagcaaaactttgggcttgcaacttttgttaccaaaggaatcagcgtggtcctcagatgcctttgatattcctctatgtggttgatacttgcatggaagatgaagatttacaagccctgaaagaatccatgcagatgtcattaagtcttttaccacctacagctttggttggacttattacttttgggagaatggttcaggttcatgaacttggatgtgaaggcatttcaaaaagctatgtcttcagaggaacaaaagatttgtctgccaaacaactgcaggaaatgctggggctctctaaagtaccacttactcaagcaacacgtggtcctcaggtacagcagccacctccttccaacagattcttacaaccagtacagaaaatagacatgaatctcacagatcttctgggagaactccagcgagacccttggcctgtaccacagggaaagagacctttgcgttcctctggggtggcactttccatagctgtaggactgctggagtgtacttttcccaacactggtgctcgtatcatgatgttcattggtggtcctgctactcaggggcctggaatggtggttggagatgagttgaagacacctataagatcgtggcatgacattgacaaagacaatgccaaatatgttaaaaagggaactaagcattttgaagcattggctaatcgagctgctacaactggccatgttattgatatctatgcgtgtgcattagatcagacaggtctcctggagatgaaatgctgtcccaaccttactggaggatacatggtaatgggtgattctttcaatacttccttattcaaacaaacttttcaaagagtctttaccaaagacatgcatggacagtttaaaatgggctttggtggtacgctagaaataaagacctcaagggaaataaagatttcaggagctattggaccctgtgtgtcactcaattctaaaggaccctgtgtgtctgaaaatgagataggaacaggtggcacatgtcagtggaagatatgtggacttagtcccactacaaccttagccatatattttgaggttgtcaatcagcataatgctccaattcctcaaggagggcgtggtgcaatccagtttgtgactcagtatcagcattcaagtgggcagagacgcatccgagtgaccaccattgctaggaactgggcagatgctcaaactcaaatccaaaacattgctgcatcttttgaccaggaggcagctgccattcttatggcccggctagcaatatatagagcagaaacagaagaaggtccagatgtgcttaggtggctggacagacagctcattcgactgtgtcagaaatttggagaatatcataaagatgacccaagttccttcagattttcagaaactttctccctttatccacagtttatgtttcatttaagaagatcttctttcctgcaagtttttaacaatagtcctgatgagagttcatattatcgtcaccattttatgcgtcaagatctgacccagtctctaattatgattcagcctatcctgtatgcgtattcttttagtggaccaccagagccggttcttcttgatagcagtagcattcttgcagatcgtattcttctcatggacacattcttccagattttgatttatcatggtgagaccatagcacagtggcggaagtcaggataccaggatatgcctgagtatgaaaatttccgccaccttctgcaagccccagtggatgatgcacaggaaattcttcactccagatttccaatgccaagatacattgacactgaacatggaggcagccaggcccgtttcctcctttcaaaagtcaacccttcacagactcataataatatgtatgcctgggggcaggagtctggagcacctattcttacagatgatgttagtttacaagtgtttatggatcacttgaagaaacttgctgtgtccagtgctgcttgaagtgctaataatgttaaagacacttaagaagatgaaataatattcaaatttcattttttcctttttccatttatctgtggaaaccaacagatattgctctatattttttgtattagtatggtttgagacaacatatggaaaatgttcacatttgtagattaagctggaattataatgagagcaataagaacaaatttattttgcttaccacagtgttatagctggttctagaaatttgaagtctttataacttaattatgtttaataaaaaatagagtctgcctcgtactacagatgt

SEQ ID NO: 27340 - DNA, 588 bp, Homo sapiens
  source 1..588: mol_type = unassigned DNA
gtgattctcggaatcaaccagggtcctaagatgtcctggaggccgtctccatttctctcgaaataagaatcaaactccacaatgacaacctatttggaattcattcaacaaaatgaagaacgagatggagtccgatttagttggaatgtttggccatcaagtcgactggaagctacaagaatggttgttcctgtggcagccctgtttacaccactgaaagagagacctgacttaccacctattcaatatgaacctgttctgtgtagtaggaccacttgccgtgcagttttgaatcctttatgtcaagtggattatcgagcaaaactttgggcttgcaacttttgttaccaaaggaatcagtttccacctagttatgctggtatatctgaactgaatcagcctgctgaacttttacctcagttttctagcattgaatatgtagttctgcgtggtcctcagatgcctttgatattcctctatgtggttgatacttgcatggaagatgaagatttacaagccctgaaagaatccatgcagatgtcattaagtcttttaccacctacagctttggttggacttattactttt

SEQ ID NO: 27341 - DNA, 547 bp, Homo sapiens
  source 1..547: mol_type = unassigned DNA
gttctccttcctcagcctccggagtagctgggattacaggcgcatgtcaccatgcccggctaatttttgtatttttagtagagacggggtttcactgtgttagccaggatggtctcgatctcctgacctcatgatccgcctgcctcggcctcccaaagtgctgggattacagatagatgtgatttgtgattctcggaatcaaccagggtcctaagatgtcctggaggccgtctccatttctctcgaaataagaatcaaactccacaatgacaacctatttggaattcattcaacaaaatgaagaacgagatggagtccgatttagttggaatgtttggccatcaagtcgactggaagctacaagaatggttgttcctgtggcagccctgtttacaccactgaaagagagacctgacttaccacctattcaatatgaacctgttctgtgtagtaggaccacttgccgtgcagttttgaatcctttatgtcaagtggattatcgagcaaaactttgggcttgcaacttttgttaccaaaggaatcaggt

SEQ ID NO: 27342 - DNA, 571 bp, Homo sapiens
  source 1..571: mol_type = unassigned DNA
ggcagaggcggcgccagccatgttggccgggcggagaggacagattttgcaaagcggaggctgcgacgggtcctgcagggggacagtgaggaaagggccgcctcgtctccgctcctgggggaccgcagaaataagaatcaaactccacaatgacaacctatttggaattcattcaacaaaatgaagaacgagatggagtccgatttagttggaatgtttggccatcaagtcgactggaagctacaagaatggttgttcctgtggcagccctgtttacaccactgaaagagagacctgacttaccacctattcaatatgaacctgttctgtgtagtaggaccacttgccgtgcagttttgaatcctttatgtcaagtggattatcgagcaaaactttgggcttgcaacttttgttaccaaaggaatcagtttccacctagttatgctggtatatctgaactgaatcagcctgctgaacttttacctcagttttctagcattgaatatgtagttctgcgtggtcctcagatgcctttgatattcctctatgtggttgatacttgcatggaaga

SEQ ID NO: 27343 - DNA, 575 bp, Homo sapiens
  source 1..575: mol_type = unassigned DNA
aggctgactaaaatacataaatagtacgtgaattctttcgggccagggatctgggcctactttgcctgcatcatattaccagcatctcaattgtgtctggcacatagtaagtttcagtaaacatttgttgcactaagtgaaagaatgaacttttcacttttttcagagatgtgatttgtgattctcggaatcaaccagggtcctaagatgtcctggaggccgtctccatttctctcgaggcggcgccagccatgttggccgggcggaggtcttcgctgaggcccggggcggggtggcgccacccctgattgcggtgccacggactgctcctgctgggcggagaggacagattttgcaaagcggaggctgcgacgggtcctgcagggggacagtgaggaaagggccgcctcgtctccgctcctgggggaccgcagaaataagaatcaaactccacaatgacaacctatttggaattcattcaacaaaatgaagaacgagatggagtccgatttagttggaatgtttggccatcaagtcgactggaagctacaagaatggttgttcctgtggcagcc

SEQ ID NO: 27344 - DNA, 3176 bp, Homo sapiens
  source 1..3176: mol_type = unassigned DNA
atcgttctcgctttccggtagctaaggcgatcagcgggacttcccactgagacgagcggatgtcatattgtatcagggcgaacctctgaggagcgctggctgcgcttaggcaacggtgcggcaggcgccggggttttctgaaacagaaacgtttaggggtggggaaacgtgttccgaggaactctcgttttgaagtgcgacatacacctgtcttgccctgttccaagatggtggcagagcttctctgagtctctcgcttcctccagtccgtcggagaagcgctctttgattggccagtggacagcgccgtggcatgacgcgctggggcgctggccaatcggttgagagctgagctggacttggcggtgggagccggagcctgcttgttgcagctgtgggtgaggacggctctagctaggtgagcggctccggccaggtgagcggggcgcataggtgacggagggccgagggcacggttcccttttagactatggcgacatacctggagttcatccagcagaatgaagaacgggatggtgtgcgttttagttggaacgtgtggccttccagccggctggaggctacaagaatggttgtacccctggcttgtctccttactcctttgaaagaacgtccagacctacctcctgtacaatatgaacctgtgctttgcagcaggccaacttgtaaagctgttctcaacccactttgtcaggttgattatcgagcaaaactttgggcctgtaatttctgttttcaaagaaatcagtttcctccagcttatggaggcatatctgaggtgaatcaacctgccgaattgatgccccagttttctacaattgagtacgtgatacagcgaggtgctcagtcccctctgatctttctctatgtggttgacacatgcctggaggaagatgaccttcaagcactcaaagagtccctgcagatgtccctgagtcttcttcctccagatgctctggtgggtctgatcacatttggaaggatggtgcaggttcatgagctaagctgtgaaggaatctccaaaagttatgtcttccgagggaccaaggatttaactgcaaagcaaatacaggatatgttgggcctgaccaagccagccatgcccatgcagcaagcacgacctgcacaaccacaggagcacccttttgcttcaagcagatttctgcagcctgttcacaagattgatatgaacctcactgatcttcttggggagctacagagggacccatggccagtaactcaggggaagagacctttgcgatccactggtgtggctttgtccattgctgttggcttgctggagggcacttttccaaacacaggagccaggatcatgctgtttactggaggtccccctacccaagggcctggcatggtggttggagatgaattaaagattcctattcgttcttggcatgatattgagaaagataatgcacgattcatgaaaaaggcaaccaagcactatgagatgcttgctaatcgaacagctgcaaatggtcactgcattgatatttatgcttgtgcccttgatcaaactggacttttggagatgaagtgttgtgcaaatcttactggaggctacatggtaatgggagattctttcaacacttctctcttcaagcagacattccaaagaatctttactaaagattttaatggagatttccgaatggcatttggtgctactttggacgtaaagacctctcgggaactgaagattgcaggagccattggtccatgcgtatctctgaatgtgaaaggaccgtgtgtgtcagaaaatgagcttggtgttggtggcacgagtcagtggaaaatctgtggcctagatcctacatctacacttggcatctattttgaagttgtcaatcagcacaacaccccgatcccccaaggaggcagaggagccatccagtttgtcacgcattatcagcactccagcacccagagacgcatccgcgtgaccaccatcgcccgaaattgggcagatgtacagagtcagctcaggcacatagaagcagcatttgaccaggaggctgcggcagtgttgatggcacggcttggggtgttccgagcggagtcagaggaggggcccgatgtgctccggtggctggaccgacaactcatccgactgtgtcaaaagtttggacagtataacaaagaagaccccacttcttttaggttatcagattccttttctctatatcctcagtttatgttccatctgagaagatctccatttcttcaagtgtttaacaacagtcctgatgagtcgtcatattacagacatcattttgcccggcaggacctgacccagtccctcatcatgatccagcccattctctactcttactcctttcatgggccaccagagccagtactcttggatagcagcagcattctagctgacagaattttgctgatggatactttctttcaaattgtcatttatcttggtgagaccatagcccagtggcgtaaagctggctaccaggacatgcccgagtatgaaaacttcaagcaccttctgcaggcaccactggatgatgctcaagaaattctgcaagcacgcttcccgatgccacgttacatcaacacggagcatggaggcagtcaggctcgattccttttgtccaaagtgaacccatctcagacacacaataacctgtatgcttggggacaggaaactggagcacccatcctaactgatgatgttagcctgcaggtgttcatggaccatttgaagaagctggctgtctccagtgcctgttaagctgaggatacaaccaggaaatgcaacggtgtcagattgtgttcaaaatgtctagaaaggcttgataacattcctgttacttttctagcagattttaacaaataatcaaggacattttatatgtaactctttagattataatttatttgtattcctgtctttgtcctttttcttgcactataaaattataaggtcataaatgttttggtacttgtagatgtttatgtgctttttgtatcctaacttttagaatctaaataaaatcagaggtaatgtattttggcagcttgtttaggtgagaatcttaatgatcataaaggaaataaatctagatgcagaaagtactggctaaaatattgctaatacaaatgtgatttcctga

SEQ ID NO: 27345 - DNA, 3411 bp, Homo sapiens
  source 1..3411: mol_type = unassigned DNA
atcgttctcgctttccggtagctaaggcgatcagcgggacttcccactgagacgagcggatgtcatattgtatcagggcgaacctctgaggagcgctggctgcgcttaggcaacggtgcggcaggcgccggggttttctgaaacagaaacgtttaggggtggggaaacgtgttccgaggaactctcgttttgaagtgcgacatacacctgtcttgccctgttccaagatggtggcagagcttctctgagtctctcgcttcctccagtccgtcggagaagcgctctttgattggccagtggacagcgccgtggcatgacgcgctggggcgctggccaatcggttgagagctgagctggacttggcggtgggagccggagcctgcttgttgcagctgtgggtgaggacggctctagctagttcccttttagactatggcgacatacctggagttcatccagcagaatgaagaacgggatggtgtgcgttttagttggaacgtgtggccttccagccggctggaggctacaagaatggttgtacccctggcttgtctccttactcctttgaaagaacgtccagacctacctcctgtacaatatgaacctgtgctttgcagcaggccaacttgtaaagctgttctcaacccactttgtcaggttgattatcgagcaaaactttgggcctgtaatttctgttttcaaagaaatcagtttcctccagcttatggaggcatatctgaggtgaatcaacctgccgaattgatgccccagttttctacaattgagtacgtgatacagcgaggtgctcagtcccctctgatctttctctatgtggttgacacatgcctggaggaagatgaccttcaagcactcaaagagtccctgcagatgtccctgagtcttcttcctccagatgctctggtgggtctgatcacatttggaaggatggtgcaggttcatgagctaagctgtgaaggaatctccaaaagttatgtcttccgagggaccaaggatttaactgcaaagcaaatacaggatatgttgggcctgaccaagccagccatgcccatgcagcaagcacgacctgcacaaccacaggagcacccttttgcttcaagcagatttctgcagcctgttcacaagattgatatgaacctcactgatcttcttggggagctacagagggacccatggccagtaactcaggggaagagacctttgcgatccactggtgtggctttgtccattgctgttggcttgctggagggcacttttccaaacacaggagccaggatcatgctgtttactggaggtccccctacccaagggcctggcatggtggttggagatgaattaaagattcctattcgttcttggcatgatattgagaaagataatgcacgattcatgaaaaaggcaaccaagcactatgagatgcttgctaatcgaacagctgcaaatggtcactgcattgatatttatgcttgtgcccttgatcaaactggacttttggagatgaagtgttgtgcaaatcttactggaggctacatggtaatgggagattctttcaacacttctctcttcaagcagacattccaaagaatctttactaaagattttaatggagatttccgaatggcatttggtgctactttggacgtaaagacctctcgggaactgaagattgcaggagccattggtccatgcgtatctctgaatgtgaaaggaccgtgtgtgtcagaaaatgagcttggtgttggtggcacgagtcagtggaaaatctgtggcctagatcctacatctacacttggcatctattttgaagttgtcaatcagcacaacaccccgatcccccaaggaggcagaggagccatccagtttgtcacgcattatcagcactccagcacccagagacgcatccgcgtgaccaccatcgcccgaaattgggcagatgtacagagtcagctcaggcacatagaagcagcatttgaccaggaggctgcggcagtgttgatggcacggcttggggtgttccgagcggagtcagaggaggggcccgatgtgctccggtggctggaccgacaactcatccgactgtgtcaaaagtttggacagtataacaaagaagaccccacttcttttaggttatcagattccttttctctatatcctcagtttatgttccatctgagaagatctccatttcttcaagtgtttaacaacagtcctgatgagtcgtcatattacagacatcattttgcccggcaggacctgacccagtccctcatcatgatccagcccattctctactcttactcctttcatgggccaccagagccagtactcttggatagcagcagcattctagctgacagaattttgctgatggatactttctttcaaattgtcatttatcttggtgagaccatagcccagtggcgtaaagctggctaccaggacatgcccgagtatgaaaacttcaagcaccttctgcaggcaccactggatgatgctcaagaaattctgcaagcacgcttcccgatgccacgttacatcaacacggagcatggaggcagtcaggctcgattccttttgtccaaagtgaacccatctcagacacacaataacctgtatgcttggggacaggaaactggagcacccatcctaactgatgatgttagcctgcaggtgttcatggaccatttgaagaagctggctgtctccagtgcctgttaagctgaggatacaaccaggaaatgcaacggtgtcagattgtgttcaaaatgtctagaaaggcttgataacattcctgttacttttctagcagattttaacaaataatcaaggacattttatatgtaactctttagattataatttatttgtattcctgtctttgtcctttttcttgcactataaaattataaggtcataaatgttttggtacttgtagatgtttatgtgctttttgtatcctaacttttagaatctaaataaaatcagaggtaatgtattttggcagcttgtttaggtgagaatcttaatgatcataaaggaaataaatctagatgcagaaagtactggctaaaatattgctaatacaaatgtgatttcctgaggtctctgtgtgagtgtgtatgtgttttaagtgacttccttaagaggtgtttcctgaacctaattctcataattaaagtaatgtatatgcaggatcaaaatgaaacaaatataccttatcctaaagagctcataacaaataagttacctccactctataaactcagacctactttttgaagataactgcttttaacctctccttacaagatttttgttgttgatgtatttaattttagcccatgtctcaattctcattttcaaagaatcaatatattaatatacctttggtca

SEQ ID NO: 27346 - DNA, 3229 bp, Homo sapiens
  source 1..3229: mol_type = unassigned DNA
gcttctgggaggaggccttttcttgacagtttagggtagcgggggaatggatgatccgggagtcccctgcggatgtcgtcccgcaccaggccgggaccgatttctggctccagtttccccagaattgcggagtgcgcacacctggaaggacccaagtcccgttttatagttgagaaactcaagactcagacaagtgaaacgacttttgcttcatgacagctggaactggaacccagttcccttttagactatggcgacatacctggagttcatccagcagaatgaagaacgggatggtgtgcgttttagttggaacgtgtggccttccagccggctggaggctacaagaatggttgtacccctggcttgtctccttactcctttgaaagaacgtccagacctacctcctgtacaatatgaacctgtgctttgcagcaggccaacttgtaaagctgttctcaacccactttgtcaggttgattatcgagcaaaactttgggcctgtaatttctgttttcaaagaaatcagtttcctccagcttatggaggcatatctgaggtgaatcaacctgccgaattgatgccccagttttctacaattgagtacgtgatacagcgaggtgctcagtcccctctgatctttctctatgtggttgacacatgcctggaggaagatgaccttcaagcactcaaagagtccctgcagatgtccctgagtcttcttcctccagatgctctggtgggtctgatcacatttggaaggatggtgcaggttcatgagctaagctgtgaaggaatctccaaaagttatgtcttccgagggaccaaggatttaactgcaaagcaaatacaggatatgttgggcctgaccaagccagccatgcccatgcagcaagcacgacctgcacaaccacaggagcacccttttgcttcaagcagatttctgcagcctgttcacaagattgatatgaacctcactgatcttcttggggagctacagagggacccatggccagtaactcaggggaagagacctttgcgatccactggtgtggctttgtccattgctgttggcttgctggagggcacttttccaaacacaggagccaggatcatgctgtttactggaggtccccctacccaagggcctggcatggtggttggagatgaattaaagattcctattcgttcttggcatgatattgagaaagataatgcacgattcatgaaaaaggcaaccaagcactatgagatgcttgctaatcgaacagctgcaaatggtcactgcattgatatttatgcttgtgcccttgatcaaactggacttttggagatgaagtgttgtgcaaatcttactggaggctacatggtaatgggagattctttcaacacttctctcttcaagcagacattccaaagaatctttactaaagattttaatggagatttccgaatggcatttggtgctactttggacgtaaagacctctcgggaactgaagattgcaggagccattggtccatgcgtatctctgaatgtgaaaggaccgtgtgtgtcagaaaatgagcttggtgttggtggcacgagtcagtggaaaatctgtggcctagatcctacatctacacttggcatctattttgaagttgtcaatcagcacaacaccccgatcccccaaggaggcagaggagccatccagtttgtcacgcattatcagcactccagcacccagagacgcatccgcgtgaccaccatcgcccgaaattgggcagatgtacagagtcagctcaggcacatagaagcagcatttgaccaggaggctgcggcagtgttgatggcacggcttggggtgttccgagcggagtcagaggaggggcccgatgtgctccggtggctggaccgacaactcatccgactgtgtcaaaagtttggacagtataacaaagaagaccccacttcttttaggttatcagattccttttctctatatcctcagtttatgttccatctgagaagatctccatttcttcaagtgtttaacaacagtcctgatgagtcgtcatattacagacatcattttgcccggcaggacctgacccagtccctcatcatgatccagcccattctctactcttactcctttcatgggccaccagagccagtactcttggatagcagcagcattctagctgacagaattttgctgatggatactttctttcaaattgtcatttatcttggtgagaccatagcccagtggcgtaaagctggctaccaggacatgcccgagtatgaaaacttcaagcaccttctgcaggcaccactggatgatgctcaagaaattctgcaagcacgcttcccgatgccacgttacatcaacacggagcatggaggcagtcaggctcgattccttttgtccaaagtgaacccatctcagacacacaataacctgtatgcttggggacaggaaactggagcacccatcctaactgatgatgttagcctgcaggtgttcatggaccatttgaagaagctggctgtctccagtgcctgttaagctgaggatacaaccaggaaatgcaacggtgtcagattgtgttcaaaatgtctagaaaggcttgataacattcctgttacttttctagcagattttaacaaataatcaaggacattttatatgtaactctttagattataatttatttgtattcctgtctttgtcctttttcttgcactataaaattataaggtcataaatgttttggtacttgtagatgtttatgtgctttttgtatcctaacttttagaatctaaataaaatcagaggtaatgtattttggcagcttgtttaggtgagaatcttaatgatcataaaggaaataaatctagatgcagaaagtactggctaaaatattgctaatacaaatgtgatttcctgaggtctctgtgtgagtgtgtatgtgttttaagtgacttccttaagaggtgtttcctgaacctaattctcataattaaagtaatgtatatgcaggatcaaaatgaaacaaatataccttatcctaaagagctcataacaaataagttacctccactctataaactcagacctactttttgaagataactgcttttaacctctccttacaagatttttgttgttgatgtatttaattttagcccatgtctcaattctcattttcaaagaatcaatatattaatatacctttggtca

SEQ ID NO: 27347 - DNA, 3405 bp, Homo sapiens
  source 1..3405: mol_type = unassigned DNA
aggcgatcagcgggacttcccactgagacgagcggatgtcatattgtatcagggcgaacctctgaggagcgctggctgcgcttaggcaacggtgcggcaggcgccggggttttctgaaacagaaacgtttaggggtggggaaacgtgttccgaggaactctcgttttgaagtgcgacatacacctgtcttgccctgttccaagatggtggcagagcttctctgagtctctcgcttcctccagtccgtcggagaagcgctctttgattggccagtggacagcgccgtggcatgacgcgctggggcgctggccaatcggttgagagctgagctggacttggcggtgggagccggagcctgcttgttgcagctgtgggtgaggacggctctagctaggtgagcggctccggccagttcccttttagactatggcgacatacctggagttcatccagcagaatgaagaacgggatggtgtgcgttttagttggaacgtgtggccttccagccggctggaggctacaagaatggttgtacccctggcttgtctccttactcctttgaaagaacgtccagacctacctcctgtacaatatgaacctgtgctttgcagcaggccaacttgtaaagctgttctcaacccactttgtcaggttgattatcgagcaaaactttgggcctgtaatttctgttttcaaagaaatcagtttcctccagcttatggaggcatatctgaggtgaatcaacctgccgaattgatgccccagttttctacaattgagtacgtgatacagcgaggtgctcagtcccctctgatctttctctatgtggttgacacatgcctggaggaagatgaccttcaagcactcaaagagtccctgcagatgtccctgagtcttcttcctccagatgctctggtgggtctgatcacatttggaaggatggtgcaggttcatgagctaagctgtgaaggaatctccaaaagttatgtcttccgagggaccaaggatttaactgcaaagcaaatacaggatatgttgggcctgaccaagccagccatgcccatgcagcaagcacgacctgcacaaccacaggagcacccttttgcttcaagcagatttctgcagcctgttcacaagattgatatgaacctcactgatcttcttggggagctacagagggacccatggccagtaactcaggggaagagacctttgcgatccactggtgtggctttgtccattgctgttggcttgctggagggcacttttccaaacacaggagccaggatcatgctgtttactggaggtccccctacccaagggcctggcatggtggttggagatgaattaaagattcctattcgttcttggcatgatattgagaaagataatgcacgattcatgaaaaaggcaaccaagcactatgagatgcttgctaatcgaacagctgcaaatggtcactgcattgatatttatgcttgtgcccttgatcaaactggacttttggagatgaagtgttgtgcaaatcttactggaggctacatggtaatgggagattctttcaacacttctctcttcaagcagacattccaaagaatctttactaaagattttaatggagatttccgaatggcatttggtgctactttggacgtaaagacctctcgggaactgaagattgcaggagccattggtccatgcgtatctctgaatgtgaaaggaccgtgtgtgtcagaaaatgagcttggtgttggtggcacgagtcagtggaaaatctgtggcctagatcctacatctacacttggcatctattttgaagttgtcaatcagcacaacaccccgatcccccaaggaggcagaggagccatccagtttgtcacgcattatcagcactccagcacccagagacgcatccgcgtgaccaccatcgcccgaaattgggcagatgtacagagtcagctcaggcacatagaagcagcatttgaccaggaggctgcggcagtgttgatggcacggcttggggtgttccgagcggagtcagaggaggggcccgatgtgctccggtggctggaccgacaactcatccgactgtgtcaaaagtttggacagtataacaaagaagaccccacttcttttaggttatcagattccttttctctatatcctcagtttatgttccatctgagaagatctccatttcttcaagtgtttaacaacagtcctgatgagtcgtcatattacagacatcattttgcccggcaggacctgacccagtccctcatcatgatccagcccattctctactcttactcctttcatgggccaccagagccagtactcttggatagcagcagcattctagctgacagaattttgctgatggatactttctttcaaattgtcatttatcttggtgagaccatagcccagtggcgtaaagctggctaccaggacatgcccgagtatgaaaacttcaagcaccttctgcaggcaccactggatgatgctcaagaaattctgcaagcacgcttcccgatgccacgttacatcaacacggagcatggaggcagtcaggctcgattccttttgtccaaagtgaacccatctcagacacacaataacctgtatgcttggggacaggaaactggagcacccatcctaactgatgatgttagcctgcaggtgttcatggaccatttgaagaagctggctgtctccagtgcctgttaagctgaggatacaaccaggaaatgcaacggtgtcagattgtgttcaaaatgtctagaaaggcttgataacattcctgttacttttctagcagattttaacaaataatcaaggacattttatatgtaactctttagattataatttatttgtattcctgtctttgtcctttttcttgcactataaaattataaggtcataaatgttttggtacttgtagatgtttatgtgctttttgtatcctaacttttagaatctaaataaaatcagaggtaatgtattttggcagcttgtttaggtgagaatcttaatgatcataaaggaaataaatctagatgcagaaagtactggctaaaatattgctaatacaaatgtgatttcctgaggtctctgtgtgagtgtgtatgtgttttaagtgacttccttaagaggtgtttcctgaacctaattctcataattaaagtaatgtatatgcaggatcaaaatgaaacaaatataccttatcctaaagagctcataacaaataagttacctccactctataaactcagacctactttttgaagataactgcttttaacctctccttacaagatttttgttgttgatgtatttaattttagcccatgtctcaattctcattttcaaagaatcaatatattaatatacctttggtca

SEQ ID NO: 27348 - DNA, 834 bp, Homo sapiens
  source 1..834: mol_type = unassigned DNA
cagagacgcatccgcgtgaccaccatcgcccgaaattgggcagatgtacagagtcagctcaggcacatagaagcagcatttgaccaggaggctgcggcagtgttgatggcacggcttggggtgttccgagcggagtcagaggaggggcccgatgtgctccggtggctggaccgacaactcatccgactgtgtcaaaagtttggacagtataacaaagaagaccccacttcttttaggttatcagattccttttctctatatcctcagtttatgttccatctgagaagatctccatttcttcaagtgtttaacaacagtcctgatgagtcgtcatattacagacatcattttgcccggcaggacctgacccagtccctcatcatgatccagcccattctctactcttactcctttcatgggccaccagagaccatagcccagtggcgtaaagctggctaccaggacatgcccgagtatgaaaacttcaagcaccttctgcaggcaccactggatgatgctcaagaaattctgcaagcacgcttcccgatgccacgttacatcaacacggagcatggaggcagtcaggctcgattccttttgtccaaagtgaacccatctcagacacacaataacctgtatgcttggggacaggaaactggagcacccatcctaactgatgatgttagcctgcaggtgttcatggaccatttgaagaagctggctgtctccagtgcctgttaagctgaggatacaaccaggaaatgcaacggtgtcagattgtgttcaaaatgtctagaaaggcttgataacattcctgttacttttctagcagat

SEQ ID NO: 27349 - DNA, 1184 bp, Homo sapiens
  source 1..1184: mol_type = unassigned DNA
cttcttccggcagccttagtttcttccaaccagtgcagctccctgttccgcgagcatacgtcatcgttctcgctttccggtagctaaggcgatcagcgggacttcccactgagacgagcggatgtcatattgtatcagggcgaacctctgaggagcgctggctgcgcttaggcaacgttcccttttagactatggcgacatacctggagttcatccagcagaatgaagaacgggatggtgtgcgttttagttggaacgtgtggccttccagccggctggaggctacaagaatggttgtacccctggcttgtctccttactcctttgaaagaacgtccagacctacctcctgtacaatatgaacctgtgctttgcagcaggccaacttgtaaagctgttctcaacccactttgtcaggttgattatcgagcaaaactttgggcctgtaatttctgttttcaaagaaatcagtttcctccagcttatggaggcatatctgaggtgaatcaacctgccgaattgatgccccagttttctacaattgagtacgtgatacagcgaggtgctcagtcccctctgatctttctctatgtggttgacacatgcctggaggaagatgaccttcaagcactcaaagagtccctgcagatgtccctgagtcttcttcctccagatgctctggtgggtctgatcacatttggaaggatggtgcaggttcatgagctaagctgtgaaggaatctccaaaagttatgtcttccgagggaccaaggatttaactgcaaagcaaatacaggatatgttgggcctgaccaagccagccatgcccatgcagcaagcacgacctgcacaaccacaggagcacccttttgcttcaagcagatttctgcagcctgttcacaagattgatatgaacctcactgatcttcttggggagctacagagggacccatggccagtaactcaggggaagagacctttgcgatccactggtgtggctttgtccattgctgttggcttgctggagggcacttttccaaacacaggagccaggatcatgctgtttactggaggtccccctacccaagggcctggcatggtggttggagatgaattaaagattcctattcgttcttggcatgatattgagaaagataatgcacgattcatgaaaaaggcaaccaag

SEQ ID NO: 27350 - DNA, 6568 bp, Homo sapiens
  source 1..6568: mol_type = unassigned DNA
aggtttccaccgccccctcctcgctccacgtcagagggaaccgggcggagcggccaacatggcggaacgcaggagacacaagaagcggatccaggaagttggtgaaccatctaaagaagagaaggctgtggccaagtatcttcgattcaactgtccaacaaagtccaccaatatgatgggtcaccgggttgattattttattgcttcaaaagcagtggactgtcttttggattcaaagtgggcaaaggccaagaaaggagaggaagctttatttacaaccagggagtctgtggttgactactgcaacaggcttttaaagaagcagttttttcaccgagccctaaaagtaatgaaaatgaaatatgataaagacataaagaaagaaaaagataaaggaaaagctgaaagtggaaaagaagaagataaaaagagcaagaaagaaaatataaaggatgagaagacaaaaaaagaaaaagagaaaaaaaaagatggtgaaaaggaagaatccaaaaaggaggaaactccaggaactcctaaaaagaaggaaactaagaaaaaattcaaacttgagccacatgatgatcaggtttttctggatggaaatgaggtgtatgtatggatctatgacccagttcactttaaaacatttgtcatgggattaattcttgtgattgcagtaatagcggccaccctcttccccctttggccagcagaaatgagagtaggtgtttattacctcagtgtgggtgcaggctgttttgtagccagtattcttctccttgctgttgctcgatgcattctatttctcatcatttggctcataactggaggaaggcaccacttttggttcttgccaaatctgactgctgatgtgggcttcattgactccttcaggcctctgtacacacatgaatacaaaggaccaaaagcagacttaaagaaagatgagaagtctgaaaccaaaaagcaacagaagtccgacagtgaggaaaagtcagacagtgagaaaaaggaagatgaggaggggaaagtaggaccaggaaatcatggaacagaaggctcggggggagaacggcattcagacacggacagtgacaggagggaagatgatcgatcccagcacagtagtggaaatggaaatgattttgaaatgataacaaaagaggaactggaacagcaaacagatggggattgtgaagaggatgaggaagaggaaaatgatggagaaacacctaaatcttcacatgaaaaatcataatctgactaattttgggactgaatgaataagtacaagaggttggattttctatgttggctgattaccatattgaacacatggcatttgtagcattctttaaatctatctactgaaatgtatttgacattcaagcagttatattcggtccttcattttatagaatattggcactattattggtacagtttaaagccattaatatgttttatccatttgataattttacagtaagtaggtctcattcattttgacagttatcaaagatgtactttccacagttaaatttacattaatggcaatttttgatagttttatggctttttactgttagactaatcaaaaataactttaaaaggaacaaagaaactccaacatttcacattatgcatagttatgtagccatttcacagtttctttaagatgtgtaaactcattgtccttgatagtttttatttttcattataaaattataccaggagatttcttttaagattctgagttagcagagttcaaaactattttgtggaaacaagccaactagtaacaatgcagcaacacttctggtttagctaaattatttttccaatgtaggaaatccacactgatttgtacgtctgactgagagaaagatggtcgtctccagcagagaaagtgaacagcatttgttggaaggtgatggctctccctcctccctccccatttcattggcgtaacgtaaagtgtattctgtacataatttacaaataaaacattttattttaattgttacttattatttagatatttctcaacacttaaattcataaaattaagaccatgtaagggtatgtttttagagaaatggaagtttgagtaacccacagaacatctgtgatctttctacagcagcttcagttttgtgccaacattccatgtattttgaatatgagcaaaaactgatcttaagagcagacttaaagtagctttgtacgccttaatgttcattttgatttattttaaatctttacattcagaaatgagatactgtattatcagaccaggaggcattgctgtgaaagataatttcctattctaaaatatcaaatttaaaataaagataatgaaagaaaacataagagaactattggactctaattgctttgaactagttttgcagtttgactttacgtcttatacatcttagttacaagtctttggaaactcttgtttacttatgagcataatcattccttggagttatactaactaataatgaatattaaatgatttttcttcagtcacagtgagagcatcttgctttgtggttgaaataggtagtgtatgtcagtctttgctttaggctgtttctcatctaagtgtttgaattaaagatgttaaatttttctaattgtgaaaaatatgttttctgtatcgacacattttattaaacttggcttgattgcttctttatagtagtccctgtaagtggacataaatgtggctatttgatgttaatgcaactatgtcaaggctgcaatcactttaatagtttctttttagcaaataaatgttcattgatgaagtgcctgggtattttcccgtcccatttgcagagctctactacttcatttccacagtaagcatatatataatgatcacttctgagtttatcaccagtaacattgatacctattttggggtataaacatggtgtttttcagaaataaaaattatttcattaacctttactattactgtgataatacccaggcactcaatattcatcctgaaattttttataatatatgtaatttgtctagtcttaaagacatttggagcatggccaacaggaaggtcagcttcttactgatgtgtgtggattcttacagaatgttagtacaaatttttataaatatttggtgatccctggggggaaatatcattcttactatggttagaaagtgaattagaaatttcagctcagtttctattttactattcaagttgtgtactttaaacaaatataaaaatcaaaaggctgcctctattacaatcctcagtggaatagatggctatctttcttggctaacattaaatattcttgtaccagagcatggaaaatcgtttataattgttaatagaatggcgatttttttttaagaacttcagatttgctatgctgctgtaagtagaaagcatgaagctttttgatcatgtagggcttattgtagagggtatcaattggcctaactaagcaggattgaatttaccagaggctaagttcagatagtaagaataatgcatatgtgattgttcttaaagtcaatgtattaaataaggtatttttccttttccctcttactggatttttcaattttcaaaccatatggcctaggtaactttaattgaaataatatagatttagttgaatactattcaggaagtaataaattttaatatatcacattgaaattatgcagtggtgatgaattttggtgtttcccccctctttctggttttacatcatgaggatcagttagctgctgacaagaaaagtcatcttgtgtcttttgtaaattgaattttttttttaaatctattaggaactggaaaacagcaagtatggttgattctcattattcaaggtagttacgttctataaagtcactgcgaacactgaattagcaaatatagaacctaggggaaatacaaggctagatttctgcaagccactggtcacattttcatcaagcagtcaacatgtaaatttctgttgtaaagacaccttatttaatataatcgattcattaacattgaagtcatgaccaacaacactgtaactcatgcctgaatgaagcttatctgacacataagcttcataaggcacacaacagcctttttacccttaggaacagctttttgcccttagcactatgcttgggggccattttaaacagtgaaatcaaaaaaagaacagaaatgcaaaaaccatggcattagcgtaaaaaggacacgtttatagtatgaaagctggaacatggccttgttcaacctcagctcagaatatgtgtacagcaagttttttgctgtaccacaaaattttaggttaggcaaattcacaaatacggaatccatgaataacgaggatcaactgtacttaactatattttaaagctgtgacatttatctacctggtttatggaatagaatttattgctgaatcatgctccagtatttgagtgatgttttaaatatcctatgtctgaaaataattcctcctaattgtgtggtaatttgcttttactgtttccacagtatttcaggtctttgctcattcactcagtaatactgagcacttaccatgtaccagaattttactaggcacaaccatgaataaaaatacaattctcttgcaccattaaatagtgtgttaagtgctacggcagcaaattgctacatgtgctggatatctcttgttttcccctccagctccactctgctcttgcccacaaagctgacccgaatggaccacagcagtgggctcctatgcctcctggcttctgagtgggtttggccaaggagtgtcctggccagagatcagaggatggtagggtgcctattctcggctcttctcctggggttggggggctgccttagcagccaaaggtcacttctcccaaactccttccctgctttccaggttgccagtccctgcactcttcctttctggccaaggatgatgtcagttctgctgctactagcctggagttgcagaagctactgtgcttcctctttgggtagcctatacctatacttatctcctcataatatcttcatgtaaagaaccatctgtttcttattggaatcaagaccaataccaaggagaaattcctagggaacaaaaattccaatgaggaattgacctctttgtcagatccttatcaccaaacattagaaaagatctcataactttatacagcatgttgtaagcattttgataactaaaatcctgttctagtgaatgtcatgcagataactacacaaggagattaatttaaatttgccttctttggcaagcccttaaaccaatggctaaagcagttagttgtgagtttctgagtaggtcccaatgcgtttatttcatttgtccaacctagcacagagatcctttgatactttaattgcatggcttttccaatcagacgaaatttcagtctgagagaggacatattttctgaggtttatagttttaggattgtccaaaaggcctatgatctcttcttagcatgacagaaagagggaaagataagttaaatttcaagggggtcatatcatcacactttggtcttatttcattttcaatgatttcctagatcactttaacttttttgtgtcatggactcctcagaataatgggttttttttgtttgtttgtttgtttgagatggagtctcactctgtcacccaggctggagtgcagtggcgaaatctcagctcactgcaacctccgcctcctgaggttcaagtgatcctcctgcctcagcctcccaagtagctgggattacaggcacatgccaccacacccagctaatttttgtattttttagtagagacagggtttcaccgtgttggcgagactgatcttgaactcctgacatcaggtgatccacctgcctcggcctcccaaagtgctgggattacaggcatgagccaccatgcctggccagaataatgtttttaaatgcagaaaaggaaatgcatggggttacaagggaaacgaattacactgaagtgtaagctaccaaataatttatgatgtggtagttataggtgtgcatttaatagccagatctacgagtggatgtaataactgctatgatgttgaagtagcataaaacatatattagatatctgcaacaactgtgatgtaacatgaaaatacctgatttctgttgacaaagttactgctagtacaactgtggattgttgtctgcactcgtcattgaaggaaatactaaattttagttttaggctagtgaaattaaagttaatttttcccatccaagttcatgtatcttctgaattctatccgtgaatcccttagaggtctgtgaattgtaggttaagaacccctgccctagctaatcagatccaccaatgtttcaaataggactataacttattcaaaggccaatgatacttcgcataattcaattttaatattattcacatttcatgtcacaaatttagtaagttacatgtgttatgtgatgttttgttttgatagattatatcttactcctaaataaaaagtcaagatttttgtagcaa

SEQ ID NO: 27351 - DNA, 1430 bp, Homo sapiens
  source 1..1430: mol_type = unassigned DNA
ggcggagcggccaacatggcggaacgcaggagacacaagaagcggatccaggaagttggtgaaccatctaaagaagagaaggctgtggccaagtatcttcgattcaactgtccaacaaagtccaccaatatgatgggtcaccgggttgattattttattgcttcaaaagcagtggactgtcttttggattcaaagtgggcaaaggccaagaaaggagaggaagctttatttacaaccagggagtctgtggttgactactgcaacaggcttttaaagaagcagttttttcaccgagccctaaaagtaatgaaaatgaaatatgataaagacataaagaaagaaaaagataaaggaaaagctgaaagtggaaaagaagaagataaaaagagcaagaaagaaaatataaaggatgagaagacaaaaaaagaaaaagagaaaaaaaaagatggtgaaaaggaagaatccaaaaaggaggaaactccaggaactcctaaaaagaaggaaactaagaaaaaattcaaacttgagccacatgatgatcaggtttttctggatggaaatgaggtgtatgtatggatctatgacccagttcactttaaaacatttgtcatgggattaattcttgtgattgcagtaatagcggccaccctcttccccctttggccagcagaaatgagagtaggtgtttattacctcagtgtgggtgcaggctgttttgtagccagtattcttctccttgctgttgctcgatgcattctatttctcatcatttggctcataactggaggaaggcaccacttttggttcttgccaaatctgactgctgatgtgggcttcattgactccttcaggcctctgtacacacatgaatacaaaggaccaaaagcagacttaaagaaagatgagaagtctgaaaccaaaaagcaacagaagtccgacagtgaggaaaagtcagacagtgagaaaaaggaagatgaggaggggaaagtaggaccaggaaatcatggaacagaaggctcggggggagaacggcattcagacacggacagtgacaggagggaagatgatcgatcccagcacagtagtggaaatggaaatgattttgaaatgataacaaaagaggaactggaacagcaaacagatggggattgtgaagaggatgaggaagaggaaaatgatggagaaacacctaaatcttcacatgaaaaatcataatctgactaattttgggactgaatgaataagtacaagaggaaatccacactgatttgtacgtctgactgagagaaagatggtcgtctccagcagagaaagtgaacagcatttgttggaaggtgatggctctccctcctccctccccatttcattggcgtaacgtaaagtgtattctgtacataatttacaaataaaacattttattttaattgtta

SEQ ID NO: 27352 - DNA, 947 bp, Homo sapiens
  source 1..947: mol_type = unassigned DNA
gggaaccgggcggagcggccaacatggcggaacgcaggagacacaagaagcggatccaggaagttggtgaaccatctaaagatgagaagtctgaaaccaaaaagcaacagaagtccgacagtgaggaaaagtcagacagtgagaaaaaggaagatgaggaggggaaagtaggaccaggaaatcatggaacagaaggctcggggggagaacggcattcagacacggacagtgacaggagggaagatgatcgatcccagcacagtagtggaaatggaaatgattttgaaatgataacaaaagaggaactggaacagcaaacagatggggattgtgaagaggatgaggaagaggaaaatgatggagaaacacctaaatcttcacatgaaaaatcataatctgactaattttgggactgaatgaataagtacaagaggttggattttctatgttggctgattaccatattgaacacatggcatttgtagcattctttaaatctatctactgaaatgtatttgacattcaagcagttatattcggtccttcattttatagaatattggcactattattggtacagtttaaagccattaatatgttttatccatttgataattttacagtaagtaggtctcattcattttgacagttatcaaagatgtactttccacagttaaatttacattaatggcaatttttgatagttttatggctttttactgttagactaatcaaaaataactttaaaaggaacaaagaaactccaacatttcacattatgcatagttatgtagccatttcacagtttctttaagatgtgtaaactcattgtccttgatagtttttatttttcattataaaattataccaggagatttcttttaagattctgagttagcagagttcaaaactattttgtggaaacaagccaactagtaacaatgcag

SEQ ID NO: 27353 - DNA, 6411 bp, Homo sapiens
  source 1..6411: mol_type = unassigned DNA
cggcggcggcagcggcagaggtggcggcggcgtgtccgtgagagtggcgtgggggcggggaggagaggcggcggcggcagtgtccaagctacgccactcgggccggggcgttgggagcgggagtgcagagcgtggtcgtggcggcggcggtgagaagagcgaggcggaggagggggtgccatggccgggcagcagttccagtacgatgacagtgggaacaccttcttctacttcctcacctccttcgtggggctcatcgtgatcccggcgacatactacctctggccccgagatcagaatgccgagcaaattcgattaaagaatatcagaaaagtatatggaaggtgtatgtggtatcgtttacggttattaaaaccccagccaaatattattcctacagtaaagaaaatagttctgcttgcaggatgggcattgttcttattccttgcatataaagtttccaaaacagaccgagaataccaagaatacaatccttatgaagtattaaatttggatcctggagccacagtagcagaaattaaaaaacaatatcgtttgctgtcacttaaatatcatccagataaaggaggtgatgaggttatgttcatgaggatagcaaaagcttatgctgctttaacggatgaagagtcccggaaaaattgggaagaatttggaaatccagatgggcctcaagccacaagctttggaattgccctgccagcttggatagttgaccagaaaaactcaattctggttttacttgtatatggattggcatttatggttatccttccagttgttgtgggctcttggtggtatcgctcaatacgctatagtggagaccagattctaatacgcacaacacagatttatacatactttgtttataaaacccgaaatatggatatgaaacgtcttatcatggttttggctggagcttctgaatttgatcctcagtataataaagatgccacaagcagaccaacggataatattctaataccacagctaatcagagaaattggcagcattaatttaaagaagaatgagcctccacttacctgcccatatagcctgaaggccagagttcttttactgtctcatcttgctagaatgaaaattcctgagacccttgaagaagatcagcaattcatgctaaaaaagtgtcctgccctacttcaagaaatggttaatgtaatctgccaactaatagtaatggcccggaaccgtgaagaaagggagtttcgtgctccaactttggcatccctagaaaactgcatgaagctttctcagatggccgttcagggacttcagcaatttaagtctccccttctgcagctccctcatattgaagaggacaatcttagacgggtttctaatcataagaagtataaaattaaaactatccaggatttggtgagtttaaaagaatcagatcgtcacactctactgcacttccttgaagatgaaaaatatgaagaggttatggctgtccttgggagttttccatatgtgaccatggatataaaatcacaggtgttagatgatgaagatagcaacaacatcacagtaggatccttagttacagtgttggttaagttgacaaggcaaacaatggctgaagtatttgaaaaggagcagtccatctgtgctgcagaggaacagccagcagaagatgggcagggtgaaactaacaagaacaggacaaaaggaggatggcaacagaagagtaaaggacccaagaaaactgctaaatcaaaaaaaaagaaacctttaaaaaaaaaacctacacctgtgctattaccacagtcaaagcaacagaaacaaaagcaggcaaatggagtcgttgggaatgaagctgcagtaaaggaagatgaagaagaagtttcagataagggcagtgattctgaagaagaagaaaccaatagagattcccaaagtgagaaagatgatggtagtgacagagactctgatagagagcaagatgaaaaacaaaacaaagatgatgaagcagagtggcaagaattacaacaaagcatacagcgaaaagagagagctctattggaaaccaaatcaaaaataacacatcctgtgtatagcctttactttcctgaggaaaaacaagaatggtggtggctttacattgcagataggaaggagcagacattaatatccatgccatatcatgtgtgtacgctgaaagatacagaggaggtagagctgaagtttcctgcaccaggcaagcctggaaattatcagtatactgtgtttctgagatcagactcctatatgggtttggatcagattaaaccattgaagttggaagttcatgaggctaagcctgtgccagaaaatcacccacagtgggatacagcaatagagggggatgaagaccaggaggacagtgagggctttgaagatagctttgaggaagaagaggaggaagaagaagatgatgactaagcagtactctgaatggaccacagtgtttgcacatatttgcaattttttgctgttttggaagtgtatcataaaccagaaacagtacagaactgatgttgagggaggtgtagtttttttactcttgaaatgggtgcataatataactaggcagtggcggtgccttggtacaacctgaaaaatgttaaggcttattgaaacctttcaagtaggggatggtacatttatttcatctgcaaatgataataaatcctttgttattataactgtccagaagtgtgggctatgtattatctgatcagtctatggtcccagtaaaagtaaagatgcaggaaacacagtctgtaaatgagcgacttttctttgttcagctttagttttagcaaacaccacaaatatgttttaagtaacatcgctcaagtttaagtaacatcgctcaagttgataatctcttgataagctctgttgttgacattttgcagtgatacaacagctccactcatagatttaaacttttatttttacttatcttggtcataagttggcattctctcacattccacatgatatagagggctacgttttggaattttccttttcttaattgcccagagttatcagacagattataaaaatggcttttaatggcttaaaccatttctaaacctctatcttagcagatcaatgcaggatctaattcttttgataagttctagctctaaaagtgatagtgggactgtatgttttctgatactggtggcttatgttattaaaccttttttaaaaaaggttcactctaaaagctgaactacatccttagttttcagtctacttgactctatcaggagctttttaaggaaagtaagtataacatgcaaaggaagctttttttgtattcattttggactcctgtcaataaaaatagaagtttgttgactcgttttatgtttcaatggtgtgtgtctttttactatcaggacataaatagggcaatccacttctttatttttcaactaaagattgaatagtattgtacattactgctaaagtgactgctatttctgtatactgtagaaaaacccaggagtgagagggatttcccctcatagtacaactggaaggatagtgcttgtaaagagtagagatgtgtacatgatgaatcattgagggagggtggatatttttattcctagatatggaggaaacataagtctgtagtattataaaactgattgtaataattctttcctatcaaaatctccataggtcaaaatattgttggaatactaaaatttgcaaccttgtttactttaaaaggttgccactttcagtgcagaatactaccggcatcttgttactgcaatagttggaaataaaatgtgaaaattagcaaaaccatgaatggtttttttggttctaaatttaagatgtaatatttcctataaaagggtgaaagcagtttctttctctataacctcaatcaccagtttagtgagagcctttcttggcaggcaggaggcagtgtcactgaggatttttttcatttacttcattgtacaagtaggagggtgggtttaattttcaaatcaggttctgctgtgaagcaccagtgtcttgaggcagctactgattacctaagtgtggtggcagggggtaagccagctggtgtcaagtgaaaggagggattagagaaaacaggtgtggcacgaaggcaaggaaactgagcagacaagacagaacaatgtgtagaatgcatatttcctagttttcttgaaagatttcaagaaaagttgtttttttttttctagtggctactttgccttaaagaggctttataagttcattcacacagctggcttctctggttttaagattctggagaggatgataacctagtaacaccacagtgcttaaaaaaaaaaaaaaaaaaaaaactaccatcaccagaaaattccaccagtttgttttccttttctctttgtgtgatgtgtatgtacttcccaactaagtaaaataaaatttcctctagtgagtgctttaggtaacctctttccatatggcagtagtgaaagaactgagccttcagttgatagttcttctctctccagcaagtcgctaaactccacatcccttcgtttttcctctggaatgagaataacaaactatcctagtttgcatttaatctaatggaaacttgagcaaagtttcaattttcttcctataaagaaactgacattttgtcaacaattgatgagcctatagatcatacagtgtataggaagtgaaattgaaacagttaaattatgtgatatttttctctaattggtaaagtacctattaaaatacagctgttcatgaggagacttaccacaattcaaagtgtagcagttgtgtattttagcattataatatttgattgaggccctgaggtgttaatatctcaatctcagagttagatgttcatgtcctttttgaattttttaaacatttttcataattttttttttaagttagggagcacattgagtgaagttctctgtgtagaacaataccttctgctctgcttctcccagctttcactgagggctggaaaaggacaggcctgtccagctgtactgtcccactgtgtatggggaagctcaggctctggtggaagcagggggcgtggatgtcaaacaactgatgtggaaacagggagggagagatataatgaggctctctaggcatgttatttttgaccacaagttttgttcagtttgcttcagccaatccaaaccatatactagagtgttctgtagtcacaattcttatttcaaatgtaattcagcaccttacataatttttgagaggttgtcattcatcacatatttactgagtttctatgtgccaggctctgtgactggatactggagctatcaaaatgaaaaaaatagtgttaagaactcactcgctggtgttagagcaggtagatgagtggcaatccatttaaatccatttgccttggctattatttggaatgcctttttttttttttagtctatctactgtaggcagaagaattatttctttaggggctagctgtttattttgctggcctttttttctctctttctctttttcttcttaagacggagtctcgctctgtcctccaggctggaggagtgcagtggcacgatctcagctcactgcaacctccgcctcccagcttcaagcgattcttctgcctcagcctcctgagtagctgggactgcaggtgcatgccaccacacccagctaattttttaatttttagtagagatgggattttgccacgttgtccagcctggtctcgaactcctggcctcaagtgatcagccctcctcagcctcccaaagtgctggcattacaggcatgagccactgcgcccagcctgttgggtttttttggaaaaaaaacaaaaacaacaaatcatcatcctttcctttaaaatgtttttttttttttaagaaacaattttcccacaaacggtctgatttaactccatgaaatcctctatttagactgccttaaagtgaaataactgttggtgaaccataacattttgccagctgtgtagtgattagtccaaatatgtctcaagaagttagcaccaagcattctcatccatttaaacttgatgctagggctattttgcaaaacttaaaaagatgcgatcttgtacatatttctgtaacctgagctgaaaacccaaataacaatcattgacatactttagggctattgtttcaggtgggggtgtatacatcccaggggcgtggagatgatcaatccattgaggaagtattaagatgattatttgtatttaatctcatccttttaaatttctatttttgtgtgttttataatgtacataatatattgtacaattgtacacttctattatttataaataaacatttattggtgcattaa

SEQ ID NO: 27354 - DNA, 1940 bp, Homo sapiens
  source 1..1940: mol_type = unassigned DNA
acgtctcccttagcgagctcgctggggacacgcagggggagggaaaactgagcggggcgggaactatctcctctcgcgagagctggcgacggcggcggcagcggcagaggtggcggcggcgtgtccgtgagagtggcgtgggggcggggaggagaggcggcggcggcagtgtccaagctacgccactcgggccggggcgttgggagcgggagtgcagagcgtggtcgtggcggcggcggtgagaagagcgaggcggaggagggggtgccatggccgggcagcagttccagtacgatgacagtgggaacaccttcttctacttcctcacctccttcgtggggctcatcgtgatcccggcgacatactacctctggccccgagatcagaatgccgagcaaattcgattaaagaatatcagaaaagtatatggaaggtgtatgtggtatcgtttacggttattaaaaccccagccaaatattattcctacagtaaagaaaatagttctgcttgcaggatgggcattgttcttattccttgcatataaagtttccaaaacagaccgagaataccaagaatacaatccttatgaagtattaaatttggatcctggagccacagtagcagaaattaaaaaacaatatcgtttgctgtcacttaaatatcatccagataaaggaggtgatgaggttatgttcatgaggatagcaaaagcttatgctgctttaacggatgaagagtcccggaaaaattgggaagaatttggaaatccagatgggcctcaagccacaagctttggaattgccctgccagcttggatagttgaccagaaaaactcaattctggttttacttgtatatggattggcatttatggttatccttccagttgttgtgggctcttggtggtatcgctcaatacgctatagtggagaccagattctaatacgcacaacacagatttatacatactttgtttataaaacccgaaatatggatatgaaacgtcttatcatggttttggctggagcttctgaatttgatcctcagtataataaagatgccacaagcagaccaacggataatattctaataccacagctaatcagagaaattggcagcattaatttaaagaagaatgagcctccacttacctgcccatatagcctgaaggccagagttcttttactgtctcatcttgctagaatgaaaattcctgagacccttgaagaagatcagcaattcatgctaaaaaagtgtcctgccctacttcaagaaatggttaatgtaatctgccaactaatagtaatggcccggaaccgtgaagaaagggagtttcgtgctccaactttggcatccctagaaaactgcatgaagctttctcagatggccgttcagggacttcagcaatttaagtctccccttctgcagctccctcatattgaagaggacaatcttagacgggtttctaatcataagaagtataaaattaaaactatccaggatttggtgagtttaaaagaatcagatcgtcacactctactgcacttccttgaagatgaaaaatatgaagaggttatggctgtccttgggagttttccatatgtgaccatggatataaaatcacaggtgttagatgatgaagatagcaacaacatcacagtaggatccttagttacagtgttggttaagttgacaaggcaaacaatggctgaagtatttgaaaaggagcagtccatctgtgctgcagaggaacagccagcagaagatgggcagggtgaaactaacaagaacaggacaaaaggaggatggcaacagaagagtaaaggacccaagaaaactgctaaaaaaaaaaaagaaacctttaaaaaaaaaacctacacctgtgctattaccacagtcaaagcaacagaaacaaaagcaggcaaatggagtcgttgggaa

SEQ ID NO: 27355 - DNA, 5085 bp, Homo sapiens
  source 1..5085: mol_type = unassigned DNA
gaacatgaaagggagtttcgtgctccaactttggcatccctagaaaactgcatgaagctttctcagatggccgttcagggacttcagcaatttaagtctccccttctgcagctccctcatattgaagaggacaatcttagacgggtttctaatcataagaagtataaaattaaaactatccaggatttggtgagtttaaaagaatcagatcgtcacactctactgcacttccttgaagatgaaaaatatgaagaggttatggctgtccttgggagttttccatatgtgaccatggatataaaatcacaggtgttagatgatgaagatagcaacaacatcacagtaggatccttagttacagtgttggttaagttgacaaggcaaacaatggctgaagtatttgaaaaggagcagtccatctgtgctgcagaggaacagccagcagaagatgggcagggtgaaactaacaagaacaggacaaaaggaggatggcaacagaagagtaaaggacccaagaaaactgctaaatcaaaaaaaaagaaacctttaaaaaaaaaacctacacctgtgctattaccacagtcaaagcaacagaaacaaaagcaggcaaatggagtcgttgggaatgaagctgcagtaaaggaagatgaagaagaagtttcagataagggcagtgattctgaagaagagtggcaagaattacaacaaagcatacagcgaaaagagagagctctattggaaaccaaatcaaaaataacacatcctgtgtatagcctttactttcctgaggaaaaacaagaatggtggtggctttacattgcagataggaaggagcagacattaatatccatgccatatcatgtgtgtacgctgaaagatacagaggaggtagagctgaagtttcctgcaccaggcaagcctggaaattatcagtatactgtgtttctgagatcagactcctatatgggtttggatcagattaaaccattgaagttggaagttcatgaggctaagcctgtgccagaaaatcacccacagtgggatacagcaatagagggggatgaagaccaggaggacagtgagggctttgaagatagctttgaggaagaagaggaggaagaagaagatgatgactaagcagtactctgaatggaccacagtgtttgcacatatttgcaattttttgctgttttggaagtgtatcataaaccagaaacagtacagaactgatgttgagggaggtgtagtttttttactcttgaaatgggtgcataatataactaggcagtggcggtgccttggtacaacctgaaaaatgttaaggcttattgaaacctttcaagtaggggatggtacatttatttcatctgcaaatgataataaatcctttgttattataactgtccagaagtgtgggctatgtattatctgatcagtctatggtcccagtaaaagtaaagatgcaggaaacacagtctgtaaatgagcgacttttctttgttcagctttagttttagcaaacaccacaaatatgttttaagtaacatcgctcaagtttaagtaacatcgctcaagttgataatctcttgataagctctgttgttgacattttgcagtgatacaacagctccactcatagatttaaacttttatttttacttatcttggtcataagttggcattctctcacattccacatgatatagagggctacgttttggaattttccttttcttaattgcccagagttatcagacagattataaaaatggcttttaatggcttaaaccatttctaaacctctatcttagcagatcaatgcaggatctaattcttttgataagttctagctctaaaagtgatagtgggactgtatgttttctgatactggtggcttatgttattaaaccttttttaaaaaaggttcactctaaaagctgaactacatccttagttttcagtctacttgactctatcaggagctttttaaggaaagtaagtataacatgcaaaggaagctttttttgtattcattttggactcctgtcaataaaaatagaagtttgttgactcgttttatgtttcaatggtgtgtgtctttttactatcaggacataaatagggcaatccacttctttatttttcaactaaagattgaatagtattgtacattactgctaaagtgactgctatttctgtatactgtagaaaaacccaggagtgagagggatttcccctcatagtacaactggaaggatagtgcttgtaaagagtagagatgtgtacatgatgaatcattgagggagggtggatatttttattcctagatatggaggaaacataagtctgtagtattataaaactgattgtaataattctttcctatcaaaatctccataggtcaaaatattgttggaatactaaaatttgcaaccttgtttactttaaaaggttgccactttcagtgcagaatactaccggcatcttgttactgcaatagttggaaataaaatgtgaaaattagcaaaaccatgaatggtttttttggttctaaatttaagatgtaatatttcctataaaagggtgaaagcagtttctttctctataacctcaatcaccagtttagtgagagcctttcttggcaggcaggaggcagtgtcactgaggatttttttcatttacttcattgtacaagtaggagggtgggtttaattttcaaatcaggttctgctgtgaagcaccagtgtcttgaggcagctactgattacctaagtgtggtggcagggggtaagccagctggtgtcaagtgaaaggagggattagagaaaacaggtgtggcacgaaggcaaggaaactgagcagacaagacagaacaatgtgtagaatgcatatttcctagttttcttgaaagatttcaagaaaagttgtttttttttttctagtggctactttgccttaaagaggctttataagttcattcacacagctggcttctctggttttaagattctggagaggatgataacctagtaacaccacagtgcttaaaaaaaaaaaaaaaaaaaaaactaccatcaccagaaaattccaccagtttgttttccttttctctttgtgtgatgtgtatgtacttcccaactaagtaaaataaaatttcctctagtgagtgctttaggtaacctctttccatatggcagtagtgaaagaactgagccttcagttgatagttcttctctctccagcaagtcgctaaactccacatcccttcgtttttcctctggaatgagaataacaaactatcctagtttgcatttaatctaatggaaacttgagcaaagtttcaattttcttcctataaagaaactgacattttgtcaacaattgatgagcctatagatcatacagtgtataggaagtgaaattgaaacagttaaattatgtgatatttttctctaattggtaaagtacctattaaaatacagctgttcatgaggagacttaccacaattcaaagtgtagcagttgtgtattttagcattataatatttgattgaggccctgaggtgttaatatctcaatctcagagttagatgttcatgtcctttttgaattttttaaacatttttcataattttttttttaagttagggagcacattgagtgaagttctctgtgtagaacaataccttctgctctgcttctcccagctttcactgagggctggaaaaggacaggcctgtccagctgtactgtcccactgtgtatggggaagctcaggctctggtggaagcagggggcgtggatgtcaaacaactgatgtggaaacagggagggagagatataatgaggctctctaggcatgttatttttgaccacaagttttgttcagtttgcttcagccaatccaaaccatatactagagtgttctgtagtcacaattcttatttcaaatgtaattcagcaccttacataatttttgagaggttgtcattcatcacatatttactgagtttctatgtgccaggctctgtgactggatactggagctatcaaaatgaaaaaaatagtgttaagaactcactcgctggtgttagagcaggtagatgagtggcaatccatttaaatccatttgccttggctattatttggaatgcctttttttttttttagtctatctactgtaggcagaagaattatttctttaggggctagctgtttattttgctggcctttttttctctctttctctttttcttcttaagacggagtctcgctctgtcctccaggctggaggagtgcagtggcacgatctcagctcactgcaacctccgcctcccagcttcaagcgattcttctgcctcagcctcctgagtagctgggactgcaggtgcatgccaccacacccagctaattttttaatttttagtagagatgggattttgccacgttgtccagcctggtctcgaactcctggcctcaagtgatcagccctcctcagcctcccaaagtgctggcattacaggcatgagccactgcgcccagcctgttgggtttttttggaaaaaaaacaaaaacaacaaatcatcatcctttcctttaaaatgtttttttttttttaagaaacaattttcccacaaacggtctgatttaactccatgaaatcctctatttagactgccttaaagtgaaataactgttggtgaaccataacattttgccagctgtgtagtgattagtccaaatatgtctcaagaagttagcaccaagcattctcatccatttaaacttgatgctagggctattttgcaaaacttaaaaagatgcgatcttgtacatatttctgtaacctgagctgaaaacccaaataacaatcattgacatactttagggctattgtttcaggtgggggtgtatacatcccaggggcgtggagatgatcaatccattgaggaagtattaagatgattatttgtatttaatctcatccttttaaatttctatttttgtgtgttttataatgtacataatatattgtacaattgtacacttctattatttataaataaacatttattggtgcattaa

SEQ ID NO: 27356 - DNA, 3320 bp, Homo sapiens
  source 1..3320: mol_type = unassigned DNA
ggcaagccgacggcccgctgctggcctccgtgacgcggcctcctccgcgcctcgcggcatggcgtcggaggggccgcgggagcccgaaagcgagggcatcaagttatcagcagatgtcaaaccatttgtccccagatttgccgggctcaatgtggcatggttagagtcctcagaagcatgtgtcttccccagctctgcagccacatactatccgtttgttcaggaaccaccagtgacagaaatgtttactcagtgcctggctcccagtatctttataaccaacccagttgttaccgaggttttcaaacagtgaagcatcgaaatgagaacacatgccctctcccacaagaaatgaaagctctgtttaagaagaaaacctatgatgagaaaaaaacgtatgatcagcaaaagtttgacagtgaaagggctgatggaactatatcatctgagataaaatcagctagaggttcacatcatttgtccatttacgctgagaatagtttgaaatcagatggttaccataagcgaacagacaggaaatccagaatcattgcaaaaaatgtatctacctccaaacctgagtttgaatttaccacactggactttcctgaactgcaaggtgcagagaacaatatgtcagagatacagaagcaacccaagtggggacctgtccactctgtctctaccgacatttctcttctaagagaagtagtaaaaccagctgcagtgttatcaaagggtgaaatagtggtgaaaaataacccaaatgaatctgtaactgctaatgccgctaccaattctccttcatgtacaagagagttatcttggacaccaatgggttatgttgttcgacagacattatctacagaactgtcagcagcccctaaaaatgttacttctatgataaacttaaagaccattgcttcatcagcagatcctaaaaatgttagtataccatcttctgaagctttatcttcggatccttcctacaacaaagaaaaacacattattcatcctacccaaaagtctaaagcatcacaaggtagtgaccttgaacaaaatgaagcctcaagaaagaataagaaaaagaaagaaaaatctacatcaaaatatgaagtcctgacagttcaagagcctccaaggattgaagatgccgaggaatttcccaacctggcagttgcatctgaaagaagagacagaatagagacaccgaaatttcaatctaagcagcagccacaggataattttaaaaataatgtaaagaagagccagcttccagtgcagttggacttggggggcatgctgacagccctggagaagaagcagcactctcagcatgcaaagcagtcctccaaaccagtggtagtctcagttggagcagtgccagtcctttccaaagaatgtgcatcaggggagagaggccgccgcatgagtcaaatgaagaccccgcacaatcccttggactccagcgccccactgatgaagaaagggaagcagagggagatccccaaggccaagaagccaacctcactgaagaagattattttgaaagaacggcaagagagaaagcagcgtctccaagaaaatgctgtgagtccagcttttaccagtgatgacacacaagatggagagagtggtggtgatgaccagtttcccgagcaggcagagctgtcagggccagaggggatggacgaactgatctccactccttcggttgaggacaagtctgaagagccaccaggcacagagctccagagggacacagaggcctcccaccttgctcccaatcacaccaccttccctaagatccacagccgcagattcagggattactgcagccagatgcttagtaaagaagtggatgcttgtgttaccgacctactcaaagaactggtccgtttccaagaccgtatgtaccagaaagatccagtcaaggccaagactaaacgtcgacttgtgttggggttgagggaggttctcaaacacctgaagctcaaaaaactgaaatgtgtcattatttctcccaactgtgagaagatacagtcaaaaggtgggctggatgacactttgcacacaattattgattatgcctgtgagcagaacattccctttgtgtttgctctcaaccgcaaagctctggggcgcagtttgaataaggcagttcctgtcagtgtggtggggatcttcagctatgatggggcccaggatcagttccacaagatggttgagctgacagtggcggcccgacaggcgtacaagaccatgctggagaatgtgcagcaggagctggtgggagagcccaggcctcaggcacctcccagcctacccacacagggccccagctgccctgcagaagatggccccccagccctgaaagaaaaagaagagccacactacattgaaatctggaaaaaacatctggaagcatacagtggatgtaccctggagctagaagaatccttggaggcttcaacctctcaaatgatgaatttgaatttatgagagttcttgcctgtgtgtctgtattttgggtaaggaggggaggtctgaaaaagactttggggctttttcttctgtttttcatgacaatgtaatttgtgtaactgttgaatctggaaattgatcagcattaaagggcacatgaagcagtgtctgcaggcgttcagtgctgcggagcctgttaaaggtcactcagatgtgcaggtgttaatcttctctaaaagcctggtgatacagctctggctttctgagcacactacggatctggaaaatactggaaaatgtgatacttagaatactttggctgctaaggaaacttcctctccattgcagaatagctgagccaagtgagtgagtttgcagaaagcaggtggtgagctcctgcctgctggaggttgccatggagggccattcctgcccggcaacagcaccgtcctgcagggagccacttggcagaagggtgcagggctgctggtgtcagagcaagagggctacagggaaagggccctttctcaggggatgtagcttttttaaaagatttgggaacacttggaggatttgctaaaatgagcctcagaaggaaaattggttttctaacctgtgactttttgaaatgaattattcctttcagtctttatttttcaaagaaacaatgtgtattgaagtacctagatttgtttgataatcaacaaatctttcctttttcaatgaacatattctgaatgtggtttctgtcttagaccaggaggacagagtttgctttcatattttccctgtaagtaagagggcttatttattttaaataaagagtaattattaaa

SEQ ID NO: 27357 - DNA, 3454 bp, Homo sapiens
  source 1..3454: mol_type = unassigned DNA
gctttgtctgtccggcaagccgacggcccgctgctggcctccgtgacgcggcctcctccgcgcctcgcggcatggcgtcggaggggccgcgggagcccgaaagcgagggcatcaagttatcagcagatgtcaaaccatttgtccccagatttgccgggctcaatgtggcatggttagagtcctcagaagcatgtgtcttccccagctctgcagccacatactatccgtttgttcaggaaccaccagtgacagagcagaaaatatatactgaagacatggcctttggagcttcaacttttccacctcagtatttatcttctgagataactcttcatccatatgcctattctccttatacccttgactccacacagaatgtttactcagtgcctggctcccagtatctttataaccaacccagttgttaccgaggttttcaaacagtgaagcatcgaaatgagaacacatgccctctcccacaagaaatgaaagctctgtttaagaagaaaacctatgatgagaaaaaaacgtatgatcagcaaaagtttgacagtgaaagggctgatggaactatatcatctgagataaaatcagctagaggttcacatcatttgtccatttacgctgagaatagtttgaaatcagatggttaccataagcgaacagacaggaaatccagaatcattgcaaaaaatgtatctacctccaaacctgagtttgaatttaccacactggactttcctgaactgcaaggtgcagagaacaatatgtcagagatacagaagcaacccaagtggggacctgtccactctgtctctaccgacatttctcttctaagagaagtagtaaaaccagctgcagtgttatcaaagggtgaaatagtggtgaaaaataacccaaatgaatctgtaactgctaatgccgctaccaattctccttcatgtacaagagagttatcttggacaccaatgggttatgttgttcgacagacattatctacagaactgtcagcagcccctaaaaatgttacttctatgataaacttaaagaccattgcttcatcagcagatcctaaaaatgttagtataccatcttctgaagctttatcttcggatccttcctacaacaaagaaaaacacattattcatcctacccaaaagtctaaagcatcacaaggtagtgaccttgaacaaaatgaagcctcaagaaagaataagaaaaagaaagaaaaatctacatcaaaatatgaagtcctgacagttcaagagcctccaaggattgaagatgccgaggaatttcccaacctggcagttgcatctgaaagaagagacagaatagagacaccgaaatttcaatctaagcagcagccacaggataattttaaaaataatgtaaagaagagccagcttccagtgcagttggacttggggggcatgctgacagccctggagaagaagcagcactctcagcatgcaaagcagtcctccaaaccagtggtagtctcagttggagcagtgccagtcctttccaaagaatgtgcatcaggggagagaggccgccgcatgagtcaaatgaagaccccgcacaatcccttggactccagcgccccactgatgaagaaagggaagcagagggagatccccaaggccaagaagccaacctcactgaagaagattattttgaaagaacggcaagagagaaagcagcgtctccaagaaaatgctgtgagtccagcttttaccagtgatgacacacaagatggagagagtggtggtgatgaccagtttcccgagcaggcagagctgtcagggccagaggggatggacgaactgatctccactccttcggttgaggacaagtctgaagagccaccaggcacagagctccagagggacacagaggcctcccaccttgctcccaatcacaccaccttccctaagatccacagccgcagattcagggattactgcagccagatgcttagtaaagaagtggatgcttgtgttaccgacctactcaaagaactggtccgtttccaagaccgtatgtaccagaaagatccagtcaaggccaagactaaacgtcgacttgtgttggggttgagggaggttctcaaacacctgaagctcaaaaaactgaaatgtgtcattatttctcccaactgtgagaagatacagtcaaaaggtgggctggatgacactttgcacacaattattgattatgcctgtgagcagaacattccctttgtgtttgctctcaaccgcaaagctctggggcgcagtttgaataaggcagttcctgtcagtgtggtggggatcttcagctatgatggggcccaggatcagttccacaagatggttgagctgacagtggcggcccgacaggcgtacaagaccatgctggagaatgtgcagcaggagctggtgggagagcccaggcctcaggcacctcccagcctacccacacagggccccagctgccctgcagaagatggccccccagccctgaaagaaaaagaagagccacactacattgaaatctggaaaaaacatctggaagcatacagtggatgtaccctggagctagaagaatccttggaggcttcaacctctcaaatgatgaatttgaatttatgagagttcttgcctgtgtgtctgtattttgggtaaggaggggaggtctgaaaaagactttggggctttttcttctgtttttcatgacaatgtaatttgtgtaactgttgaatctggaaattgatcagcattaaagggcacatgaagcagtgtctgcaggcgttcagtgctgcggagcctgttaaaggtcactcagatgtgcaggtgttaatcttctctaaaagcctggtgatacagctctggctttctgagcacactacggatctggaaaatactggaaaatgtgatacttagaatactttggctgctaaggaaacttcctctccattgcagaatagctgagccaagtgagtgagtttgcagaaagcaggtggtgagctcctgcctgctggaggttgccatggagggccattcctgcccggcaacagcaccgtcctgcagggagccacttggcagaagggtgcagggctgctggtgtcagagcaagagggctacagggaaagggccctttctcaggggatgtagcttttttaaaagatttgggaacacttggaggatttgctaaaatgagcctcagaaggaaaattggttttctaacctgtgactttttgaaatgaattattcctttcagtctttatttttcaaagaaacaatgtgtattgaagtacctagatttgtttgataatcaacaaatctttcctttttcaatgaacatattctgaatgtggtttctgtcttagaccaggaggacagagtttgctttcatattttccctgtaagtaagagggcttatttattttaaataaagagtaattattaaa

SEQ ID NO: 27358 - DNA, 3398 bp, Homo sapiens
  source 1..3398: mol_type = unassigned DNA
ccggcaagccgacggcccgctgctggcctccgtgacgcggcctcctccgcgcctcgcggcatggcgtcggaggggccgcgggagcccgaaagcgagggcatcaagttatcagcagatgtcaaaccatttgtccccagatttgccgggctcaatgtggcatggttagagtcctcagaagcatgtgtcttccccagctctgcagccacatactatccgtttgttcaggaaccaccagtgacagagcagaaaatatatactgaagacatggcctttggagcttcaacttttccacctcagtatttatcttctgagataactcttcatccatatgcctattctccttatacccttgactccacacagaatgtttactcagtgcctggctcccagtatctttataaccaacccagttgttaccgaggttttcaaacagtgaagcatcgaaatgagaacacatgccctctcccacaagaaatgaaagctctgtttaagaagaaaacctatgatgagaaaaaaacgtatgatcagcaaaagtttgacagtgaaagggctgatggaactatatcatctgagataaaatcagctagaggttcacatcatttgtccatttacgctgagaatagtttgaaatcagatggttaccataagcgaacagacaggaaatccagaatcattgcaaaaaatgtatctacctccaaacctgagtttgaatttaccacactggactttcctgaactgcaaggtgcagagaacaatatgtcagagatacagaagcaacccaagtggggacctgtccactctgtctctaccgacatttctcttctaagagaagtagtaaaaccagctgcagtgttatcaaagggtgaaatagtggtgaaaaataacccaaatgaatctgtactaatgccgctaccaattctccttcatgtacaagagacattatctacagaactgtcagcagcccctaaaaatgttacttctatgataaacttaaagaccattgcttcatcagcagatcctaaaaatgttagtataccatcttctgaagctttatcttcggatccttcctacaacaaagaaaaacacattattcatcctacccaaaagtctaaagcatcacaaggtagtgaccttgaacaaaatgaagcctcaagaaagaataagaaaaagaaagaaaaatctacatcaaaatatgaagtcctgacagttcaagagcctccaaggattgaagatgccgaggaatttcccaacctggcagttgcatctgaaagaagagacagaatagagacaccgaaatttcaatctaagcagcagccacaggataattttaaaaataatgtaaagaagagccagcttccagtgcagttggacttggggggcatgctgacagccctggagaagaagcagcactctcagcatgcaaagcagtcctccaaaccagtggtagtctcagttggagcagtgccagtcctttccaaagaatgtgcatcaggggagagaggccgccgcatgagtcaaatgaagaccccgcacaatcccttggactccagcgccccactgatgaagaaagggaagcagagggagatccccaaggccaagaagccaacctcactgaagaagattattttgaaagaacggcaagagagaaagcagcgtctccaagaaaatgctgtgagtccagcttttaccagtgatgacacacaagatggagagagtggtggtgatgaccagtttcccgagcaggcagagctgtcagggccagaggggatggacgaactgatctccactccttcggttgaggacaagtctgaagagccaccaggcacagagctccagagggacacagaggcctcccaccttgctcccaatcacaccaccttccctaagatccacagccgcagattcagggattactgcagccagatgcttagtaaagaagtggatgcttgtgttaccgacctactcaaagaactggtccgtttccaagaccgtatgtaccagaaagatccagtcaaggccaagactaaacgtcgacttgtgttggggttgagggaggttctcaaacacctgaagctcaaaaaactgaaatgtgtcattatttctcccaactgtgagaagatacagtcaaaaggtgggctggatgacactttgcacacaattattgattatgcctgtgagcagaacattccctttgtgtttgctctcaaccgcaaagctctggggcgcagtttgaataaggcagttcctgtcagtgtggtggggatcttcagctatgatggggcccaggatcagttccacaagatggttgagctgacagtggcggcccgacaggcgtacaagaccatgctggagaatgtgcagcaggagctggtgggagagcccaggcctcaggcacctcccagcctacccacacagggccccagctgccctgcagaagatggccccccagccctgaaagaaaaagaagagccacactacattgaaatctggaaaaaacatctggaagcatacagtggatgtaccctggagctagaagaatccttggaggcttcaacctctcaaatgatgaatttgaatttatgagagttcttgcctgtgtgtctgtattttgggtaaggaggggaggtctgaaaaagactttggggctttttcttctgtttttcatgacaatgtaatttgtgtaactgttgaatctggaaattgatcagcattaaagggcacatgaagcagtgtctgcaggcgttcagtgctgcggagcctgttaaaggtcactcagatgtgcaggtgttaatcttctctaaaagcctggtgatacagctctggctttctgagcacactacggatctggaaaatactggaaaatgtgatacttagaatactttggctgctaaggaaacttcctctccattgcagaatagctgagccaagtgagtgagtttgcagaaagcaggtggtgagctcctgcctgctggaggttgccatggagggccattcctgcccggcaacagcaccgtcctgcagggagccacttggcagaagggtgcagggctgctggtgtcagagcaagagggctacagggaaagggccctttctcaggggatgtagcttttttaaaagatttgggaacacttggaggatttgctaaaatgagcctcagaaggaaaattggttttctaacctgtgactttttgaaatgaattattcctttcagtctttatttttcaaagaaacaatgtgtattgaagtacctagatttgtttgataatcaacaaatctttcctttttcaatgaacatattctgaatgtggtttctgtcttagaccaggaggacagagtttgctttcatattttccctgtaagtaagagggcttatttattttaaataaagagtaattatt

SEQ ID NO: 27359 - DNA, 826 bp, Homo sapiens
  source 1..826: mol_type = unassigned DNA
ggaactatatcatctgagataaaatcagctagaggttcacatcatttgtccatttacgctgagaatagtttgaaatcagatggttaccataagcgaacagacaggaaatccagaatcattgcaaaaaatgtatctacctccaaacctgagtttgaatttaccacactggactttcctgaactgcaaggtgcagagaacaatatgtcagagatacagaagcaacccaagtggggacctgtccactctgtctctaccgacatttctcttctaagagaagtagtaaaaccagctgcagtgttatcaaagggtgaaatagtggtgaaaaataacccaaatgaatctgtaactgctaatgccgctaccaattctccttcatgtacaagagcagatcctaaaaatgttagtataccatcttctgaagctttatcttcggatccttcctacaacaaagaaaaacacattattcatcctacccaaaagtctaaagcatcacaaggtagtgaccttgaacaaaatgaagcctcaagaaagaataagaaaaagaaagaaaaatctacatcaaaatatgaagtcctgacagttcaagagcctccaaggattgaagatgccgaggaatttcccaacctggcagttgcatctgaaagaagagacagaatagagacaccgaaatttcaatctaagcagcagccacaggataattttaaaaataatgtaaagaagagccagcttccagtgcagttggacttggggggcatgctgacagccctggagaagaagcagcactctcagcatgcaaagcagtcctccaaaccagtggtagtctcag

SEQ ID NO: 27360 - DNA, 547 bp, Homo sapiens
  source 1..547: mol_type = unassigned DNA
gctgcttccaagttgtggcagttatgagtaaagctgctataaacatccatgtgcaggtttttgtgtggacataagttttcacctcctttggataattaccaaggagtgcagtggctaaatcatatggtaagagtatggttagttttgtaaggaattgctaaactattaaatatctcccaaagtggctgtaacgtttttcattcttaccagcaatggataaggatttctgttgtcaaagtgttctggattttgatatgtagtgttatctccttgttttaatttgcatttctctgatgacatctaatgtgtttgctttttagggtgaaatagtggtgaaaaataacccaaatgaatctgtaactgctaatgccgctaccaattctccttcatgtacaagagcagatcctaaaaatgttagtataccatcttctgaagctttatcttcggatccttcctacaacaaagaaaaacacattattcatcctacccaaaagtctaaagcatcacaaggtagtgaccttgaacaaaatgaagcctcaagaaagaa

SEQ ID NO: 27361 - DNA, 3085 bp, Homo sapiens
  source 1..3085: mol_type = unassigned DNA
acccagcgcagtgactgcggcccagcccggcgctccccgcagtcggggcggggggactctggcgagcttcccgcgctcttgggaacggatagattgttttaaaggatcctgcgtttttctgaacgtcattctccgctctacgtactcagcattaccactagatggagccctggcgatcgcttgcatcatttttagacccataaaattctcggtgaaaggcatcaagttatcagcagatgtcaaaccatttgtccccagatttgccgggctcaatgtggcatggttagagtcctcagaagcatgtgtcttccccagctctgcagccacatactatccgtttgttcaggaaccaccagtgacagagcagaaaatatatactgaagacatggcctttggagcttcaacttttccacctcagtatttatcttctgagataactcttcatccatatgcctattctccttatacccttgactccacacagaatgtttactcagtgcctggctcccagtatctttataaccaacccagttgttaccgaggttttcaaacagtgaagcatcgaaatgagaacacatgccctctcccacaagaaatgaaagctctgtttaagaagaaaacctatgatgagaaaaaaacgtatgatcagcaaaagtttgacagtgaaagggctgatggaactatatcatctgagataaaatcagctagaggttcacatcatttgtccatttacgctgagaatagtttgaaatcagatggttaccataagcgaacagacaggaaatccagaatcattgcaaaaaatgtatctacctccaaacctgagtttgaatttaccacactggactttcctgaactgcaaggtgcagagaacaatatgtcagagatacagaagcaacccaagtggggacctgtccactctgtctctaccgacatttctcttctaagagaagtagtaaaaccagctgcagtgttatcaaagggtgaaatagtggtgaaaaataacccaaatgaatctgtaactgctaatgccgctaccaattctccttcatgtacaagagagttatcttggacaccaatgggttatgttgttcgacagacattatctacagaactgtcagcagcccctaaaaatgttacttctatgataaacttaaagaccattgcttcatcagcagatcctaaaaatgttagtataccatcttctgaagctttatcttcggatccttcctacaacaaagaaaaacacattattcatcctacccaaaagtctaaagcatcacaaggtagtgaccttgaacaaaatgaagcctcaagaaagaataagaaaaagaaagaaaaatctacatcaaaatatgaagtcctgacagttcaagagcctccaaggattgaagatgccgaggaatttcccaacctggcagttgcatctgaaagaagagacagaatagagacaccgaaatttcaatctaagcagcagccacaggataattttaaaaataatgtaaagaagagccagcttccagtgcagttggacttggggggcatgctgacagccctggagaagaagcagcactctcagcatgcaaagcagtcctccaaaccagtggtagtctcagttggagcagtgccagtcctttccaaagaatgtgcatcaggggagagaggccgccgcatgagtcaaatgaagaccccgcacaatcccttggactccagcgccccactgatgaagaaagggaagcagagggagatccccaaggccaagaagccaacctcactgaagaagattattttgaaagaacggcaagagagaaagcagcgtctccaagaaaatgctgtgagtccagcttttaccagtgatgacacacaagatggagagagtggtggtgatgaccagtttcccgagcaggcagagctgtcagggccagaggggatggacgaactgatctccactccttcggttgaggacaagtctgaagagccaccaggcacagagctccagagggacacagaggcctcccaccttgctcccaatcacaccaccttccctaagatccacagccgcagattcagggattactgcagccagatgcttagtaaagaagtggatgcttgtgttaccgacctactcaaagaactggtccgtttccaagaccgtatgtaccagaaagatccagtcaaggccaagactaaacgtcgacttgtgttggggttgagggaggttctcaaacacctgaagctcaaaaaactgaaatgtgtcattatttctcccaactgtgagaagatacagtcaaaaggtgggctggatgacactttgcacacaattattgattatgcctgtgagcagaacattccctttgtgtttgctctcaaccgcaaagctctggggcgcagtttgaataaggcagttcctgtcagtgtggtggggatcttcagctatgatggggcccaggatcagttccacaagatggttgagctgacagtggcggcccgacaggcgtacaagaccatgctggagaatgtgcagcaggagctggtgggagagcccaggcctcaggcacctcccagcctacccacacagggccccagctgccctgcagaagatggccccccagccctgaaagaaaaagaagagccacactacattgaaatctggaaaaaacatctggaagcatacagtggatgtaccctggagctagaagaatccttggaggcttcaacctctcaaatgatgaatttgaatttatgagagttcttgcctgtgtgtctgtattttgggtaaggaggggaggtctgaaaaagactttggggctttttcttctgtttttcatgacaatgtaatttgtgtaactgttgaatctggaaattgatcagcattaaagggcacatgaagcagtgtctgcaggcgttcagtgctgcggagcctgttaaaggtcactcagatgtgcaggtgttaatcttctctaaaagcctggtgatacagctctggctttctgagcacactacggatctggaaaatactggaaaatgtgatacttagaatactttggctgctaaggaaacttcctctccattgcagaatagctga

SEQ ID NO: 27362 - DNA, 2282 bp, Homo sapiens
  source 1..2282: mol_type = unassigned DNA
aaacagccccgcggggaacgcgcgccgcacgcgagctggacccgcccaggcacgaactctcctggaaaaatgctcccggcggctttcctgcttcctttagcgtgaaccgcgggtgcggtgcctcccgtgaaaataataaattcaccgtcacgcttgttgtgaacgcgggtggttcccgaaacttggaggcttcccgtaaacccagctccttcctcatctgggaggtgggtcccgcgcgggtccgccgcctcctccctggcccctccctctcgtgtctttcattttcctggggctccggggcgcggagaagctgcatcccagaggagcgcgtccaggagcggacccgggagtgtttcaagagccagtgacaaggaccaggggcccaagtcccaccagccatgcagacctgccccctggcattccctggccacgtttcccaggcccttgggaccctcctgtttttggctgcctccttgagtgctcagaatgaaggctgggacagccccatctgcacagagggggtagtctctgtgtcttggggcgagaacaccgtcatgtcctgcaacatctccaacgccttctcccatgtcaacatcaagctgcgtgcccacgggcaggagagcgccatcttcaatgaggtggctccaggctacttctcccgggacggctggcagctccaggttcagggaggcgtggcacagctggtgatcaaaggcgcccgggactcccatgctgggctgtacatgtggcacctcgtgggacaccagagaaataacagacaagtcacgctggaggtttcaggtgcagaaccccagtccgcccccgacactgggttctggcctgtgccagcggtggtcactgctgtcttcatcctcttggtcgctctggtcatgttcgcctggtacaggtgccgctgttcccagcaacgccgggagaagaagttcttcctcctagaaccccagatgaaggtcgcagccctcagagcgggagcccagcagggcctgagcagagcctccgctgaactgtggaccccagactccgagcccaccccaaggccgctggcactggtgttcaaaccctcaccacttggagccctggagctgctgtccccccaacccttgtttccatatgccgcagacccatagccgcctgcaaggcagagaggacacaggagagccagccctgagtgccgaccttgggtggcggggcctgggtctctcgtcccacccggagggcacagacaccggcttgcttggcaggctgggcctctgtgtcacccactcctgggtgcgtgcagacccttcccctccaccccccaggtcttccaagctctgcttcctcagtttccaaaatggaaccacctcacctccgcagcacccgacttaccaggacgcatgcccctccctctgccctcatcaaacccacagacccggactccctttctgccaccccaggctggtccggccccaggtgtggggtccgctctctccactcccagggctccgcgcccaagtgagggggcccctgccggagcctcagacacactccagttcagggctgtggggggccttggccacatacctgtcccttggctatgagcaggctttgggggcccttccgcggcagccccgggggccgaggtagggtcgggggcttagaggctgggatggctcctggccccaccgccagggggcagcgcaggccgggctgggaggcggcggcggcggctcgggctggggggtcaggtggacgccgccctccggggctggacgcgcatccctcagtccctcggccacccgggggtcgctccctcgtgcccaccgcacctgccgagcctctttggacccagatctgttcatgcttttgtcttcgtcactgcggcggggccctttgatgtcttcatctgtatggggtggaaaaatcaccgggaatcccccttcagttctttgaaaaagttccatgactcgaatatctgaaatgaagaaaacaaaccgactcacaaacctccaagtagctccaaatgcaatttttaaaatggaaaacaaaaatctgaaagaaacgtctttagtggctttaagccccaaaacgtccctaaggcgtcctcgagatgaagacgggggggagcccccagccaggtggagaccccgcagggacgcggcggcgcccggtgaccgaggcctcgcacagccggccgccctgagggtcgggccggagccagggtccaagaggggcgcgtttgtgtctcgggttaaaataaggttccgtccgcgtgctgggtcaga

SEQ ID NO: 27363 - DNA, 2032 bp, Homo sapiens
  source 1..2032: mol_type = unassigned DNA
agatttgcataaaaaaggccaagaaaactctggctgtgccccagcaacggctcattctgctcccccgggtcggagccccccggagctgcgcgcgggcttgcagcgcctcgcccgcgctgtcctcccggtgtcccgcttctccgcgccccagccgccggctgccagcttttcggggccccgagtcgcacccagcgaagagagcgggcccgggacaagctcgaactccggccgcctcgcccttccccggctccgctccctctgccccctcggggtcgcgcgcccacgatgctgcagggccctggctcgctgctgctgctcttcctcgcctcgcactgctgcctgggctcggcgcgcgggctcttcctctttggccagcccgacttctcctacaagcgcagcaattgcaagcccatccctgccaacctgcagctgtgccacggcatcgaataccagaacatgcggctgcccaacctgctgggccacgagaccatgaaggaggtgctggagcaggccggcgcttggatcccgctggtcatgaagcagtgccacccggacaccaagaagttcctgtgctcgctcttcgcccccgtctgcctcgatgacctagacgagaccatccagccatgccactcgctctgcgtgcaggtgaaggaccgctgcgccccggtcatgtccgccttcggcttcccctggcccgacatgcttgagtgcgaccgtttcccccaggacaacgacctttgcatccccctcgctagcagcgaccacctcctgccagccaccgaggaagctccaaaggtatgtgaagcctgcaaaaataaaaatgatgatgacaacgacataatggaaacgctttgtaaaaatgattttgcactgaaaataaaagtgaaggagataacctacatcaaccgagataccaaaatcatcctggagaccaagagcaagaccatttacaagctgaacggtgtgtccgaaagggacctgaagaaatcggtgctgtggctcaaagacagcttgcagtgcacctgtgaggagatgaacgacatcaacgcgccctatctggtcatgggacagaaacagggtggggagctggtgatcacctcggtgaagcggtggcagaaggggcagagagagttcaagcgcatctcccgcagcatccgcaagctgcagtgctagtcccggcatcctgatggctccgacaggcctgctccagagcacggctgaccatttctgctccgggatctcagctcccgttccccaagcacactcctagctgctccagtctcagcctgggcagcttccccctgccttttgcacgtttgcatccccagcatttcctgagttataaggccacaggagtggatagctgttttcacctaaaggaaaagcccacccgaatcttgtagaaatattcaaactaataaaatcatgaatatttttatgaagtttaaaaatagctcactttaaagctagttttgaataggtgcaactgtgacttgggtctggttggttgttgtttgttgttttgagtcagctgattttcacttcccactgaggttgtcataacatgcaaattgcttcaattttctctgtggcccaaacttgtgggtcacaaaccctgttgagataaagctggctgttatctcaacatcttcatcagctccagactgagactcagtgtctaagtcttacaacaattcatcattttataccttcaatgggaacttaaactgttacatgtatcacattccagctacaatacttccatttattagaagcacattaaccatttctatagcatgatttcttcaagtaaaaggcaaaagatataaattttataattgacttgagtactttaagccttgtttaaaacatttcttacttaacttttgcaaattaaacccattgtagcttacctgtaatatacatagtagtttacctttaaaagttgtaaaaatattgctttaaccaacactgtaaatatttcagataaacattatattcttgtatataaactttacatcctgttttacct

SEQ ID NO: 27364 - DNA, 537 bp, Homo sapiens
  source 1..537: mol_type = unassigned DNA
ctctcatcacttctgagcacggagcaatggcctctcgctgggctgtgcagctgctgctcgtggcagcctggagcatgggctgtggtgaggccctcaagtgctacacctgcaaggagcccatgaccagtgcttcctgcaggaccattacccgctgcaagccagaggacacagcctgcatgaccacgctggtgacggtggaggcagagtaccccttcaaccagagccccgtggtgacccgctcctgctccagctcctgtgtggccaccgaccccgacagcatcggggccgcccacctgatcttctgctgcttccgagacctctgcaactcggaactctgaacccagggcggcagggcggaaggtgctcctcaggcacctcctctctgacggggcctggctccacctgtgatcacctccccctgcttcctgctgctgtggcacagctcactcatggggtctgaggggagagaagcacaccaggggcgccctctgccttccataccccacgcttataaaacataactaagccaagagtgga

SEQ ID NO: 27365 - DNA, 1024 bp, Homo sapiens
  source 1..1024: mol_type = unassigned DNA
gccagtgtttgataaagacagctcctcttaggaagaactgtcatccccaaacacatagagagacactctctgtctctcgattacaatcatgatttccagaatggagaagatgacgatgatgatgaagatattgattatgtttgctcttggaatgaactactggtcttgctcaggtttcccagtgtacgactacgatccatcctccttaagggatgccctcagtgcctctgtggtaaaagtgaattcccagtcactgagtccgtatctgtttcgggcattcagaagctcattaaaaagagttgaggtcctagatgagaacaacttggtcatgaatttagagttcagcatccgggagactacatgcaggaaggattctggagaagatcccgctacatgtgccttccagagggactactatgtgtccacagctgtttgcagaagcaccgtgaaggtatctgcccagcaggtgcagggcgtgcatgctcgctgcagctggtcctcctccacgtctgagtcttacagcagcgaagagatgatttttggggacatgttgggatctcataaatggagaaacaattatctatttggtctcatttcagacgagtccataagtgaacaattttatgatcggtcacttgggatcatgagaagggtattgcctcctggaaacagaaggtacccaaaccaccggcacagagcaagaataaatactgactttgagtaacggccttgaggtgtccctcgcccttttggtttgttcaaggagctgctgctttgcatagctgctctagtgtctggtatcatcggatctggttttgaataattcccaggagtcctgggtccctggcctccaaagctggaatgtgaacgcatgccacggtggtctgaccctcacactccttttctcttaacagcaaaatgcaatggaaggaagaaaagttccaacaaagaatgattttgtgaattctgtgatttttcttctgatcagtttcaatctgtaataaatgccttatttttcctgtaa

SEQ ID NO: 27366 - DNA, 860 bp, Homo sapiens
  source 1..860: mol_type = unassigned DNA
tgctgcagtcaaaataagcagccagtgtttgataaagacagctcctcttaggaagaactgtcatccccaaacacatagagagacactctctgtctctcgattacaatcatgatttccagaatggagaagatgacgatgatgatgaagatattgattatgtttgctcttggaatgaactactggtcttgctcaggtttcccagtgtacgactacgatccatcctccttaagggatgccctcagtgcctctgtggtaaaagtgaattcccagtcactgagtccgtatctgtttcgggcattcagaagctcattaaaaagagttgaggtcctagatgagaacaacttggtcatgaatttagagttcagcatccgggagactacatgcaggaaggattctggagaagatcccgctacatgtgccttccagagggactactatgtgtccacagctgtttgcagaagcaccgtgaaggtatctgcccagcaggtgcagggcgtgcatgctcgctgcagctggtcctcctccacgtctgagtcttacagcagcgaagagatgatttttggggacatgttgggatctcataaatggagaaacaattatctatttggtctcatttcagacgagtccataagtgaacaattttatgatcggtcacttgggatcatgagaagggtattgcctcctggaaacagaaggtacccaaaccaccggcacagagcaagaataaatactgactttgagtaacggccttgagcaaaatgcaatggaaggaagaaaagttccaacaaagaatgattttgtgaattctgtgatttttcttctgatcagtttcaatctgtaataaatgccttatttttcct

SEQ ID NO: 27367 - DNA, 366 bp, Homo sapiens
  source 1..366: mol_type = unassigned DNA
atggccccccggcccctcctgctgctgctgctgctcctcgggggctccgccgcgcgccccgcgccccccagggcccggcgacactcagacgggacgttcaccagcgagctcagccgcctgcgggagggcgcgcggctccagcggctgctacagggcctggtggggaagcgcagcgagcaggacgcagagaacagcatggcctggaccaggctcagcgcgggtctgctctgcccgtcagggtccaacatgcccatcctgcaggcctggatgcccctggacgggacctggtctccctggctgccccctgggcctatggtttcagaaccagctggcgctgctgcagaaggaaccttgcggcccagatga

SEQ ID NO: 27368 - DNA, 1865 bp, Homo sapiens
  source 1..1865: mol_type = unassigned DNA
gaccccgcgccagtccctgccgggtggaggaggcgcgccggcaaagccgcgtcctgatcaatggggcgggcggcttagcgcgcgcggccacctggtccgaggaggagcagtcccggggcccgccgcaggtcgggtggctcagccatggctcctcggggcgcagcggccggccggagcccgggaccctgcgcggggcgctgagctcccgagcgggcagagggcacgggcaggcggacgtcggggcgccctcggggaacgtgcgggcaccatgcgtccccacctgtcgccgccgctgcagcagctactactgccggtgctgctcgcctgcgccgcgcactcgactggagcccttccccgactatgtgacgtgctacaagtgctgtgggaagagcaagaccagtgcctgcaggaactctccagagagcagacaggagacctgggcacggagcagccagtgccaggttgtgaggggatgtgggacaacataagctgctggccctcttctgtgccgggccggatggtggaggtggaatgcccgagattcctccggatgctcaccagcagaaatggttccttgttccgaaactgcacacaggatggctggtcagaaaccttccccaggcctaatctggcctgtggcgttaatgtgaacgactcttccaacgagaagcggcactcctacctgctgaagctgaaagtcatgtacaccgtgggctacagctcctccctggtcatgctcctggtcgcccttggcatcctctgtgctttccggaggctccactgcactcgcaactacatccacatgcacctgttcgtgtccttcatccttcgtgccctgtccaacttcatcaaggacgccgtgctcttctcctcagatgatgtcacctactgcgatgcccacagggcgggctgcaagctggtcatggtgctgttccagtactgcatcatggccaactactcctggctgctggtggaaggcctctaccttcacacactcctcgccatctccttcttctctgaaagaaagtacctccagggatttgtggcattcggatggggttctccagccatttttgttgctttgtgggctattgccagacactttctggaagatgttgggtgctgggacatcaatgccaacgcatccatctggtggatcattcgtggtcctgtgatcctctccatcctgattaatttcatccttttcataaacattctaagaatcctgatgagaaaacttagaacccaagaaacaagaggaaatgaagtcagccattataagcgcctggccaggtccactctcctgctgatccccctctttggcatccactacatcgtcttcgccttctccccagaggacgctatggagatccagctgttttttgaactagcccttggctcattccagggactggtggtggccgtcctctactgcttcctcaatggggaggtgcagctggaggttcagaagaagtggcagcaatggcacctccgtgagttcccactgcaccccgtggcctccttcagcaacagcaccaaggccagccacttggagcagagccagggcacctgcaggaccagcatcatctgagaggctggagcagggtcacccacggacagagaccaagagaggtcctgcgaaggctgggcactgctgtgggacagccagtcttcccagcagacaccctgtgtcctccttcagctgaagatgcccctccccaggccttggactcttccgaagggatgtgaggcactgtggggcaggacaagggcctgggatttggttcgtttgctcttctgggaagagaagttcaggggtcccagaaagggacagggaaataaatggtgcctgggatgagattcaa

SEQ ID NO: 27369 - DNA, 518 bp, Homo sapiens
  source 1..518: mol_type = unassigned DNA
cctccacagcaacttccttgatccctgccacgcacgactgaacacagacagcagccgcctcgccatgaagctgctgatggtcctcatgctggcggccctcctcctgcactgctatgcagattctggctgcaaactcctggaggacatggttgaaaagaccatcaattccgacatatctatacctgaatacaaagagcttcttcaagagttcatagacagtgatgccgctgcagaggctatggggaaattcaagcagtgtttcctcaaccagtcacatagaactctgaaaaactttggactgatgatgcatacagtgtacgacagcatttggtgtaatatgaagagtaattaactttacccaaggcgtttggctcagagggctacagactatggccagaactcatctgttgattgctagaaaccacttttctttcttgtgttgtctttttatgtggaaactgctagacaactgttgaaacctcaaattcatttccatttcaataaactaactgcaaatc

SEQ ID NO: 27370 - DNA, 505 bp, Homo sapiens
  source 1..505: mol_type = unassigned DNA
tccacagcggcttccttgatccttgccacccgcgactgaacaccgacagcagcagcctcaccatgaagttgctgatggtcctcatgctggcggccctctcccagcactgctacgcaggctctggctgccccttattggagaatgtgatttccaagacaatcaatccacaagtgtctaagactgaatacaaagaacttcttcaagagttcatagacgacaatgccactacaaatgccatagatgaattgaaggaatgttttcttaaccaaacggatgaaactctgagcaatgttgaggtgtttatgcaattaatatatgacagcagtctttgtgatttattttaactttctgcaagacctttggctcacagaactgcagggtatggtgagaaaccaactacggattgctgcaaaccacaccttctctttcttatgtctttttactacaaactacaagacaattgttgaaacctgctatacatgtttattttaataaattgatggca

SEQ ID NO: 27371 - DNA, 1305 bp, Homo sapiens
  source 1..1305: mol_type = unassigned DNA
acagcggcttccttgatccttgccacccgcgactgaacaccgacagcagcagcctcaccatgaagttgctgatggtcctcatgctggcggccctctcccagcactgctacgcaggctctggctgccccttattggagaatgtgatttccaagacaatcaatccacaagtgtctaagactgaatacaaagaacttcttcaagagttcatagacgacaatgccactacaaatgccatagatgaattgaaggaatgttttcttaaccaaacggatgaaactctgagcaatgttgaggtgtttatggtaatttcattttcttcctataagctttttaaatcccctgaccagggacaagtgggctcttcatttctcactgacaatgccaaagccactagtgaacaagccttttcttacattggttaatttagttgaatggttagtctaatgactttgccatcaagaaaaacatccagtgtccctgtgttgtcactctacccagagaatcctcagtggatgataaatgaatagggcaagagaggaaaaggaaaggtcggtagaagtcttacctatccccagagctctctaattcatgctcacaaacacagacacaatcacacaaacacagaaacacacatacacacatccagacacatgcaaacacacagacacagtcacaatcacacaaacacacacacattcagacatacacaaacatagacagacaggcaaagacacagacacagacacagacacaatcacaccagcacacaatcatccagacacaaacacaaacacacagacagaaccacacaaccacagaaacacagagacacacacaaacacactcagacacacacatacaaacatatgttcactctctacagaaaaaacaattttccagaagacccgcacctatagaccaatctgcagagaaaacttctcttcttcaaaaaaaagtaaaagtgttctttcttaaaaaatgccctatttttcaacagtttggaaaataccatttgagcaagattctatacatctcaaataaaaagaatttaaaatgcacttccaggcaatcataatttgctagcataaatgatgagaaaccttggactatccaataggcaactgtagatcatgggtatgaaaccaccatggaggaagaattgcctcaaacaaaaaccaatagttttgtatttctttctaactatacatgtatattgttgagggttttctttagcatttattccctatgttaaattcttctttaatccttccctggtaaaaaaaaaaaaaaaaaaaaagttagaaa

SEQ ID NO: 27372 - DNA, 521 bp, Homo sapiens
  source 1..521: mol_type = unassigned DNA
gcgaggaccgggtataagaagcctcgtggccttgcccgggcagccgcaggttccccgcgcgccccgagcccccgcgccatgaagctcgccgccctcctggggctctgcgtggccctgtcctgcagctccgctgctgctttcttagtgggctcggccaagcctgtggcccagcctgtcgctgcgctggagtcggcggcggaggccggggccgggaccctggccaaccccctcggcaccctcaacccgctgaagctcctgctgagcagcctgggcatccccgtgaaccacctcatagagggctcccagaagtgtgtggctgagctgggtccccaggccgtgggggccgtgaaggccctgaaggccctgctgggggccctgacagtgtttggctgagccgagactggagcatctacacctgaggacaagacgctgcccacccgcgagggctgaaaaccccgccgcggggaggaccgtccatccccttcccccggcccctctcaataaacgtggttaagagcagc

SEQ ID NO: 27373 - DNA, 515 bp, Homo sapiens
  source 1..515: mol_type = unassigned DNA
acactttgtatggcaagtggaaccactggcttggtggattttgctagatttttctgatttttaaactcctgaaaaatatcccagataactgtcatgaagctggtaactatcttcctgctggtgaccatcagcctttgtagttactctgctactgccttcctcatcaacaaagtgccccttcctgttgacaagttggcacctttacctctggacaacattcttccctttatggatccattaaagcttcttctgaaaactctgggcatttctgttgagcaccttgtggaggggctaaggaagtgtgtaaatgagctgggaccagaggcttctgaagctgtgaagaaactgctggaggcgctatcacacttggtgtgacatcaagataaagagcggaggtggatggggatggaagatgatgctcctatcctccctgcctgaaacctgttctaccaattatagatcaaatgccctaaaatgtagtgacccgtgaaaaggacaaataaagcaatgaatac

SEQ ID NO: 27374 - DNA, 2576 bp, Homo sapiens
  source 1..2576: mol_type = unassigned DNA
aaatataaagtgattattttctcttggttctttgaaaaacctcgcttgtgctggggtttgtggctgaacccggtgacgtcagtgtggcagtgcggagtcaggcgcagcggctccctataagcagaggagctgtccgtgtgctgaaacggcccgagaagctcgcccggagaacggggaggaatatgctgtggagctcctctgccatataaacaaaaagaggaaatctttcaaacatggctgaagcaaagacccactggcttggagcagccctgtctcttatccctttaattttcctcatctctggggctgaagcagcttcatttcagagaaaccagctgcttcagaaagaaccagacctcaggttggaaaatgtccaaaagtttcccagtcctgaaatgatcagggctttggagtacatagaaaacctccgacaacaagctcataaggaagaaagcagcccagattataatccctaccaaggtgtctctgtcccccttcagcaaaaagaaaatggcgatgaaagccacttgcccgagagggattcactgagtgaagaagactggatgagaataatactcgaagctttgagacaggctgaaaatgagcctcagtctgcaccaaaagaaaataagccctatgccttgaattcagaaaagaactttccaatggacatgagtgatgattatgagacacagcagtggccagaaagaaagcttaagcacatgcaattccctcctatgtatgaagagaattccagggataacccctttaaacgcacaaatgaaatagtggaggaacaatatactcctcaaagccttgctacattggaatctgtcttccaagagctggggaaactgacaggaccaaacaaccagaaacgtgagaggatggatgaggagcaaaaactttatacggatgatgaagatgatatctacaaggctaataacattgcctatgaagatgtggtcgggggagaagactggaacccagtagaggagaaaatagagagtcaaacccaggaagaggtgagagacagcaaagagaatatagaaaaaaatgaacaaatcaacgatgagatgaaacgctcagggcagcttggcatccaggaagaagatcttcggaaagagagtaaagaccaactctcagatgatgtctccaaagtaattgcctatttgaaaaggttagtaaatgctgcaggaagtgggaggttacagaatgggcaaaatggggaaagggccaccaggctttttgagaaacctcttgattctcagtctatttatcagctgattgaaatctcaaggaatttacagatacccccagaagacttaattgagatgctcaaaactggggagaagccgaatggatcagtggaaccggagcgggagcttgaccttcctgttgacctagatgacatctcagaggctgacttagaccatccagacctgttccaaaataggatgctctccaagagtggctaccctaaaacacctggtcgtgctgggactgaggccctaccagacgggctcagtgttgaggatattttaaatcttttagggatggagagtgcagcaaatcagaaaacgtcgtattttcccaatccatataaccaggagaaagttctgccaaggctcccttatggtgctggaagatctagatcgaaccagcttcccaaagctgcctggattccacatgttgaaaacagacagatggcatatgaaaacctgaacgacaaggatcaagaattaggtgagtacttggccaggatgctagttaaataccctgagatcattaattcaaaccaagtgaagcgagttcctggtcaaggctcatctgaagatgacctgcaggaagaggaacaaattgagcaggccatcaaagagcatttgaatcaaggcagctctcaggagactgacaagctggccccggtgagcaaaaggttccctgtggggcccccgaagaatgatgataccccaaataggcagtactgggatgaagatctgttaatgaaagtgctggaatacctcaaccaagaaaaggcagaaaagggaagggagcatattgctaagagagcaatggaaaatatgtaagctgctttcattaattaccctactttcattcctcccaccccaagcaaatcccaacatttctcttcagtgtgttgacttctatcctgttaacactgtaatatctttaaatgatgtacaggcagatgaaaccaggtcactggggagtctgcttcatttcctctgagctgttatcttgtgtatggatatgtgtaaatgttatgactccttgataaaaaatttattatgtccattattcaagaaagatatctatgactgtgtttaatagtatatctaatggctgtggcattgttgatgctcacatatgataaaaaagtgtcctataattctattgaaagtttttaatatttattgaattattttgttactgtctgtagtgttttgtggagtactggaccaaaaaaataaagcattataaatatatagttttatttataaggccttttctattgtgtgttttactgttgattaataaatgttatttctggacaa

SEQ ID NO: 27375 - DNA, 589 bp, Homo sapiens
  source 1..589: mol_type = unassigned DNA
gtaaggctgcttttctctttgatttattggaaagttccaaattgcatgctcttcttttaattcctagctgagaagaaaaagactgtttggcaagcttatgtcgataggataactgaatagcaacctgctgctcatcagccaatgaaatctttcaaacatggctgaagcaaagacccactggcttggagcagccctgtctcttatccctttaattttcctcatctctggggctgaagcagcttcatttcagagaaaccagctgcttcagaaagaaccagacctcaggttggaaaatgtccaaaagtttcccagtcctgaaatgatcagggctttggagtacatagaaaacctccgacaacaagctcataaggaagaaagcagcccagattataatccctaccaaggtgtctctgtcccccttcagcaaaaagaaaatggcgatgaaagccacttgcccgagagggattcactgagtgaagaagactggatgagaataatactcgaagctttgagacaggctgaaaatgagcctcagtctgcaccaaaagaaaataagccctatgccttgaattcagaaaagaactttcca

SEQ ID NO: 27376 - DNA, 544 bp, Homo sapiens
  source 1..544: mol_type = unassigned DNA
gaaacggcccgagaagctcgcccggagaacggggaggaatatgctgtggagctcctctgccatataaacaaaaagagctgagaagaaaaagactgtttggcaagcttatgtcgataggataactgaatagcaacctgctgctcatcagccaatgaaatctttcaaacatggctgaagcaaagacccactggcttggagcagccctgtctcttatccctttaattttcctcatctctggggctgaagcagcttcatttcagagaaaccagctgcttcagaaagaaccagacctcaggttggaaaatgtccaaaagtttcccagtcctgaaatgatcagggctttggagtacatagaaaacctccgacaacaagctcataaggaagaaagcagcccagattataatccctaccaaggtgtctctgtcccccttcagcaaaaagaaaatggcgatgaaagccacttgcccgagagggattcactgagtgaagaagactggatgagaataatactcgaagctttgagacaggctgaaaatgagcctca

SEQ ID NO: 27377 - DNA, 1434 bp, Homo sapiens
  source 1..1434: mol_type = unassigned DNA
atggctgaagcaaagacccactggcttggagcagccctgtctcttatccctttaattttcctcatctctggggctgaagcagcttcatttcagagaaaccagctgcttcagaaagaaccagacctcaggttggaaaatgtccaaaagtttcccagtcctgaaatgatcagggctttggagtacatagaaaacctccgacaacaagctcataaggaagaaagcagcccagattataatccctaccaaggtgtctctgtcccccttcagcaaaaagaaaatggcgatgaaagccacttgcccgagagggattcactgaggggagaagactggaacccagtagaggagaaaatagagagtcaaacccaggaagaggtgagagacagcaaagagaatatagaaaaaaatgaacaaatcaacgatgagatgaaacgctcagggcagcttggcatccaggaagaagatcttcggaaagagagtaaagaccaactctcagatgatgtctccaaagtaattgcctatttgaaaaggttagtaaatgctgcaggaagtgggaggttacagaatgggcaaaatggggaaagggccaccaggctttttgagaaacctcttgattctcagtctatttatcagctgattgaaatctcaaggaatttacagatacccccagaagacttaattgagatgctcaaaactggggagaagccgaatggatcagtggaaccggagcgggagcttgaccttcctgttgacctagatgacatctcagaggctgacttagaccatccagacctgttccaaaataggatgctctccaagagtggctaccctaaaacacctggtcgtgctgggactgaggccctaccagacgggctcagtgttgaggatattttaaatcttttagggatggagagtgcagcaaatcagaaaacgtcgtattttcccaatccatataaccaggagaaagttctgccaaggctcccttatggtgctggaagatctagatcgaaccagcttcccaaagctgcctggattccacatgttgaaaacagacagatggcatatgaaaacctgaacgacaaggatcaagaattaggtgagtacttggccaggatgctagttaaataccctgagatcattaattcaaaccaagtgaagcgagttcctggtcaaggctcatctgaagatgacctgcaggaagaggaacaaattgagcaggccatcaaagagcatttgaatcaaggcagctctcaggagactgacaagctggccccggtgagcaaaaggttccctgtggggcccccgaagaatgatgataccccaaataggcagtactgggatgaagatctgttaatgaaagtgctggaatacctcaaccaagaaaaggcagaaaagggaagggagcatattgctaagagagcaatggaaaatatgtaa

SEQ ID NO: 27378 - DNA, 3310 bp, Homo sapiens
  source 1..3310: mol_type = unassigned DNA
gttccattcccgggggattggagtagcgttggagtcaccgacgccatcccctcccgcctctggcgtgcatggagcatgcgcttccttcctcacttcctctgcaggagggagcgagagtaaagctacgccctggcgcgcagtctccgcgtcacaggaacttcagcacccacagggcggacagcgctcccctctacctggagacttgactcccgcgcgccccaaccctgcttatcccttgaccgtcgagtgtcagagatcctgcagccgcccagtcccggcccctctcccgccccacacccaccctcctggctcttcctgtttttactcctccttttcattcataacaaaagctacagctccaggagcccagcgccgggctgtgacccaagccgagcgtggaagaatggggttcctcgggaccggcacttggattctggtgttagtgctcccgattcaagctttccccaaacctggaggaagccaagacaaatctctacataatagagaattaagtgcagaaagacctttgaatgaacagattgctgaagcagaagaagacaagattaaaaaaacatatcctccagaaaacaagccaggtcagagcaactattcttttgttgataacttgaacctgctaaaggcaataacagaaaaggaaaaaattgagaaagaaagacaatctataagaagctccccacttgataataagttgaatgtggaagatgttgattcaaccaagaatcgaaaactgatcgatgattatgactctactaagagtggattggatcataaatttcaagatgatccagatggtcttcatcaactagacgggactcctttaaccgctgaagacattgtccataaaatcgctgccaggatttatgaagaaaatgacagagccgtgtttgacaagattgtttctaaactacttaatctcggccttatcacagaaagccaagcacatacactggaagatgaagtagcagaggttttacaaaaattaatctcaaaggaagccaacaattatgaggaggatcccaataagcccacaagctggactgagaatcaggctggaaaaataccagagaaagtgactccaatggcagcaattcaagatggtcttgctaagggagaaaacgatgaaacagtatctaacacattaaccttgacaaatggcttggaaaggagaactaaaacctacagtgaagacaactttgaggaactccaatatttcccaaatttctatgcgctactgaaaagtattgattcagaaaaagaagcaaaagagaaagaaacactgattactatcatgaaaacactgattgactttgtgaagatgatggtgaaatatggaacaatatctccagaagaaggtgtttcctaccttgaaaacttggatgaaatgattgctcttcagaccaaaaacaagctagaaaaaaatgctactgacaatataagcaagcttttcccagcaccatcagagaagagtcatgaagaaacagacagtaccaaggaagaagcagctaagatggaaaaggaatatggaagcttgaaggattccacaaaagatgataactccaacccaggaggaaagacagatgaacccaaaggaaaaacagaagcctatttggaagccatcagaaaaaatattgaatggttgaagaaacatgacaaaaagggaaataaagaagattatgacctttcaaagatgagagacttcatcaataaacaagctgatgcttatgtggagaaaggcatccttgacaaggaagaagccgaggccatcaagcgcatttatagcagcctgtaaaaatggcaaaagatccaggagtctttcaactgtttcagaaaacataatatagcttaaaacacttctaattctgtgattaaaattttttgacccaagggttattagaaagtgctgaatttacagtagttaaccttttacaagtggttaaaacatagctttcttcccgtaaaaactatctgaaagtaaagttgtatgtaagctgagattttgtatacagaatccttatttcctcatagacttatattttataatcagaatatgttgctttgaaaaagcctctaatggactgaccttaaaactcatccttcttccactgtctcatccacataagcactccccgaagaattaagggggttctgttttcaaggcatgccaagtactaaagcaccttgcagagcgtgtctattacaagatgtcatttccaccagcagttcccttaggggagctgaaataaattcacattttctcaaagtctcatagctttggaggagccatctgcttttttggctgctctttttagctggctttttattaggctcagtgacataaaaaggatccaggtaaatgggtataggatttgctggatttactaacaatttccccctgttcttaacacttcctattagtgacttttcagacattgagtttacttataaagagagatatttatgtactctctaagaagacaaatgaggtcataaacactgcataaagcaaggcaaaaatgtatgccacatctcagttatctaaactagattagatccaagccaagttttctcaacagagagcaaagggccaggcagtaaggtagaaatagagataaaaatcattccttccttgtgatccaaagctggtcgagcagctttcctggaggaaaaggttaatgaacttcaggtccctgcaactcagcccccaccacaaacacagccctggaaacatacagtggcgcaaggtcctcttgaaatgttaatggttaatgttcccaaaccagagaatgctttgaaaatgtatcattcagtgtaaattaattacatacatatttttctatatatttgtttcaaactgtaaaaataacataatatgtaatttgtgtattagtgagaggtgaagccagctggacttcctgggtcgagtggggccttggagaacttttctgtcttacaagaggattgtaaaatgcacccatcagtgctctgtaaaacacaccaatcagcgctctgtagctagcaataggtttgtaaaatgcacccatcagcactctgtaaaacgcaccaatcagcactctgtaaaatgcaccaatcagcaggattctaaaagtagacaatcacagggaggattgaaaaaaagggcactctgatagggcaaaaacggaacatgggaggggacaaataagggaataaaatctggccaccccagccagcagcagcaacctgttcaggtcgcctgccgctgtggaagctttgtccttttgctcttcataataaaccttgctactgttca

SEQ ID NO: 27379 - DNA, 2163 bp, Homo sapiens
  source 1..2163: mol_type = unassigned DNA
gtctccgcgtcacaggaacttcagcacccacagggcggacagcgctcccctctacctggagacttgactcccgcgcgccccaaccctgcttatcccttgaccgtcgagtgtcagagatcctgcagccgcccagtcccggcccctctcccgccccacacccaccctcctggctcttcctgtttttactcctccttttcattcataacaaaagctacagctccaggagcccagcgccgggctgtgacccaagccgagcgtggaagaatggggttcctcgggaccggcacttggattctggtgttagtgctcccgattcaagctttccccaaacctggaggaagccaagattgctgaagcagaagaagacaagattaaaaaaacatatcctccagaaaacaagccaggtcagagcaactattcttttgttgataacttgaacctgctaaaggcaataacagaaaaggaaaaaattgagaaagaaagacaatctataagaagctccccacttgataataagttgaatgtggaagatgttgattcaaccaagaatcgaaaactgatcgatgattatgactctactaagagtggattggatcataaatttcaagatgatccagatggtcttcatcaactagacgggactcctttaaccgctgaagacattgtccataaaatcgctgccaggatttatgaagaaaatgacagagccgtgtttgacaagattgtttctaaactacttaatctcggccttatcacagaaagccaagcacatacactggaagatgaagtagcagaggttttacaaaaattaatctcaaaggaagccaacaattatgaggaggatcccaataagcccacaagctggactgagaatcaggctggaaaaataccagagaaagtgactccaatggcagcaattcaagatggtcttgctaagggagaaaacgatgaaacagtatctaacacattaaccttgacaaatggcttggaaaggagaactaaaacctacagtgaagacaactttgaggaactccaatatttcccaaatttctatgcgctactgaaaagtattgattcagaaaaagaagcaaaagagaaagaaacactgattactatcatgaaaacactgattgactttgtgaagatgatggtgaaatatggaacaatatctccagaagaaggtgtttcctaccttgaaaacttggatgaaatgattgctcttcagaccaaaaacaagctagaaaaaaatgctactgacaatataagcaagcttttcccagcaccatcagagaagagtcatgaagaaacagacagtaccaaggaagaagcagctaagatggaaaaggaatatggaagcttgaaggattccacaaaagatgataactccaacccaggaggaaagacagatgaacccaaaggaaaaacagaagcctatttggaagccatcagaaaaaatattgaatggttgaagaaacatgacaaaaagggaaataaagaagattatgacctttcaaagatgagagacttcatcaataaacaagctgatgcttatgtggagaaaggcatccttgacaaggaagaagccgaggccatcaagcgcatttatagcagcctgtaaaaatggcaaaagatccaggagtctttcaactgtttcagaaaacataatatagcttaaaacacttctaattctgtgattaaaattttttgacccaagggttattagaaagtgctgaatttacagtagttaaccttttacaagtggttaaaacatagctttcttcccgtaaaaactatctgaaagtaaagttgtatgtaagctgagattttgtatacagaatccttatttcctcatagacttatattttataatcagaatatgttgctttgaaaaagcctctaatggactgaccttaaaactcatccttcttccactgtctcatccacataagcactccccgaagaattaagggggttctgttttcaaggcatgccaagtactaaagcaccttgcagagcgtgtctattacaagatgtcatttccaccagcagttcccttaggggagctgaaataaattcacattttctcaaagtctcatagctttggaggagccatctgcttttttggctgctctttttagctggctttttattaggctcagtgac

SEQ ID NO: 27380 - DNA, 896 bp, Homo sapiens
  source 1..896: mol_type = unassigned DNA
agcgctcccctctacctggagacttgactcccgcgcgccccaaccctgcttatcccttgaccgtcgagtgtcagagatcctgcagccgcccagtcccggcccctctcccgccccacacccaccctcctggctcttcctgtttttactcctccttttcattcataacaaaagctacagctccaggagcccagcgccgggctgtgacccaagccgagcgtggaagaatggggttcctcgggaccggcacttggattctggtgttagtgctcccgattcaagctttccccaaacctggaggaagccaagattgctgaagcagaagaagacaagattaaaaaaacatatcctccagaaaacaagccaggtcagagcaactattcttttgttgataacttgaacctgctaaaggcaataacagaaaaggaaaaaattgagaaagaaagacaatctataagaagctccccacttgataataagttgaatgtggaagatgttgattcaaccaagaatcgaaaactgatcgatgattatgactctactaagagtggattggatcataaatttcaagatcacagaaagccaagcacatacactggaagatgaagtagcagaggttttacaaaaattaatctcaaaggaagccaacaattatgaggaggatcccaataagcccacaagctggactgagaatcaggctggaaaaataccagagaaagtgactccaatggcagcaattcaagatggtcttgctaagggagaaaacgatgaaacagtatctaacacattaaccttgacaaatggcttggaaaggagaactaaaacctacagtgaagacaactttgaggaactccaatatttcccaaatttctatgcgctactgaaaagtattgattcag

SEQ ID NO: 27381 - DNA, 2466 bp, Homo sapiens
  source 1..2466: mol_type = unassigned DNA
tcgcgcctgcgccagaaccgctgcctcgctcccggaagtggagggtctacacgaagcgccgctgggtctgggtgcccggaggcagcagcgttcgcggagttcgcccgctggcccccgatcaccatgtcggctttcgacaccaaccccttcgcggacccagtggatgtaaaccccttccaggatccctctgtgacccagctgaccaacgccccgcagggcggcctggcggaattcaaccccttctcagagacaaatgcagcgacaacagttcctgtcacccaactccctgggtcctcacagccagcggttctccagccatcagtggaaccaacccagccgaccccccaggccgtggtgtctgcagcccaggcaggcctgctccggcagcaggaagaactggacaggaaagctgccgagctggaacgcaaggagcgggagctgcagaacactgtagccaacttgcatgtgagacagaacaactggccccctctgccctcgtggtgccctgtgaagccctgcttctatcaggatttctccacagagatccctgccgactaccagcggatatgcaagatgctctactatctgtggatgttgcattcagtgactctgtttctgaacctgcttgcctgcctggcctggttctcgggcaacagctccaagggagtggactttggcctctccatcctgtggtttctgatcttcactccctgtgccttcctttgttggtaccgacccatctataaggcctttaggtccgacaactctttcagcttctttgtgttcttctttgtatttttttgtcaaatagggatctacatcatccagttggttggcatccctggcctgggggacagcggttggattgcagccctgtctacactggataatcattccctggccatatcagtcatcatgatggtggtggctggcttcttcaccctctgtgccgtgctctcagtcttcctcctgcagcgggtgcactccctctaccgacggacaggggccagcttccagcaggcccaggaggagttttcccagggcatcttcagcagcagaaccttccacagagctgcttcatctgctgcccaaggagccttccaggggaattagtcctcctctcttctctccccctcagcctttctctcgcctgccttctgagctgcactttccgtgggtgccttatgtggtggtggttgtgcccagcacagacctggcagggttcttgccgtggctcttcctcctccctcagcgaccagctctccctggaacgggagggacagggaattttttccccctctatgtacaaaaaaaaacaaagctctctttccttctctggtgatggtttggtaggattcttttgtctctggaagcagtgggactgaagttctcttcgtcctgtgcacacacagacacccccacacagttgggatcacaggctgacctgggcccatcccagctggagctttctgccagggtcctgggccttgactcccccaccctgcaggcctggcctgaatctggcttcttagacacagcccagtccttcctgcctgggctgggaataagcctctcacaggttctggtggacagatctgttccccaggtcactccagtggtctccaggcttccagagaaggctggttgcctcaagctcttctctgcctcataaacggatccagagaaggctggttgccttaagctcttccctgcctcgtgttcctgagaaacggattaatagccctttatccccctgcaccctcctgcaggggatggcactttgagccctctggagccctccccttgctgagccttactctcttcagactttctgaatgtacaatgccgttggttgggatttggggactggaagggaccaaggacactgaccccaagctgtcctgcctagcgtccagcgtcttctaggagggtggggtctgcctgtcctggtgtggttggtttggccctgtttgctgtgactacccccccccctccccgaaccgagggacggctgcctttgtctctgcctcagatgccacctgccccgcccatgctccccatcagcagcatccagactttcaggaagggcagggccagccagtccagaaccgcatccctcagcagggactgataagccatctctcggagggccccctaatacccagtggagtctggttcacaccctggggggtgtgtcactgtgatgggacacgtaggagtccacccttaaaaccagcaccctgtccctcgaggctgccgagtgggtgtgtggactggggtgccttcccacaaaactagcctccggctctgggcccgagacagccgcaggccccagccactgaatgatactggcagcggctggggttttatgaactcctttctggtattttttcccctctatgtacaaatgtatatgttacgtctcaatttttgtgcttaagtaaaaataaaaacattttcagacaa

SEQ ID NO: 27382 - DNA, 2611 bp, Homo sapiens
  source 1..2611: mol_type = unassigned DNA
aaccgctgcctcgctcccggaagtggagggtctacacgaagcgccgctgggtctgggtgcccggaggcagcagcgttcgcggagttcgcccgctggcccccgatcaccatgtcggctttcgacaccaaccccttcgcggacacaaatgcagcgacaacagttcctgtcacccaactccctgggtcctcacagccagcggttctccagccatcagtggaaccaacccagccgaccccccaggccgtggtgtctgcagcccaggcaggcctgctccggcagcaggaagaactggacaggaaagctgccgagctggaacgcaaggagcgggagctgcagaacactgtagccaacttgcatgtgagacagaacaactggccccctctgccctcgtggtgccctgtgaagccctgcttctatcaggatttctccacagagatccctgccgactaccagcggatatgcaagatgctctactatctgtggatgttgcattcagtgactctgtttctgaacctgcttgcctgcctggcctggttctcgggcaacagctccaagggagtggactttggcctctccatcctgtggtttctgatcttcactccctgtgccttcctttgttggtaccgacccatctataaggcctttaggtccgacaactctttcagcttctttgtgttcttctttgtatttttttgtcaaatagggatctacatcatccagttggttggcatccctggcctgggggacagcggttggattgcagccctgtctacactggataatcattccctggccatatcagtcatcatgatggtggtggctggcttcttcaccctctgtgccgtgctctcagtcttcctcctgcagcgggtgagtggtgtgggcagggctgacagcaaatgggaggaggcaggcaaccgtttcctgcccttgccacgagatgtttttcaccactgcagttgggcatcctaggcccccaaaggtccagtacctttctccagggatctgggtggggggtcaggcagtgccaggcttctggtgacccctttgggagtataacctggatggctggcttcctggtgggcccaaaggacaggcttctctcaccccacccctcttcgccaggtgcactccctctaccgacggacaggggccagcttccagcaggcccaggaggagttttcccagggcatcttcagcagcagaaccttccacagagctgcttcatctgctgcccaaggagccttccaggggaattagtcctcctctcttctctccccctcagcctttctctcgcctgccttctgagctgcactttccgtgggtgccttatgtggtggtggttgtgcccagcacagacctggcagggttcttgccgtggctcttcctcctccctcagcgaccagctctccctggaacgggagggacagggaattttttccccctctatgtacaaaaaaaaacaaagctctctttccttctctggtgatggtttggtaggattcttttgtctctggaagcagtgggactgaagttctcttcgtcctgtgcacacacagacacccccacacagttgggatcacaggctgacctgggcccatcccagctggagctttctgccagggtcctgggccttgactcccccaccctgcaggcctggcctgaatctggcttcttagacacagcccagtccttcctgcctgggctgggaataagcctctcacaggttctggtggacagatctgttccccaggtcactccagtggtctccaggcttccagagaaggctggttgcctcaagctcttctctgcctcataaacggatccagagaaggctggttgccttaagctcttccctgcctcgtgttcctgagaaacggattaatagccctttatccccctgcaccctcctgcaggggatggcactttgagccctctggagccctccccttgctgagccttactctcttcagactttctgaatgtacaatgccgttggttgggatttggggactggaagggaccaaggacactgaccccaagctgtcctgcctagcgtccagcgtcttctaggagggtggggtctgcctgtcctggtgtggttggtttggccctgtttgctgtgactacccccccccctccccgaaccgagggacggctgcctttgtctctgcctcagatgccacctgccccgcccatgctccccatcagcagcatccagactttcaggaagggcagggccagccagtccagaaccgcatccctcagcagggactgataagccatctctcggagggccccctaatacccagtggagtctggttcacaccctggggggtgtgtcactgtgatgggacacgtaggagtccacccttaaaaccagcaccctgtccctcgaggctgccgagtgggtgtgtggactggggtgccttcccacaaaactagcctccggctctgggcccgagacagccgcaggccccagccactgaatgatactggcagcggctggggttttatgaactcctttctggtattttttcccctctatgtacaaatgtatatgttacgtctcaatttttgtgcttaagtaaaaataaaaacattttcagac

SEQ ID NO: 27383 - DNA, 1446 bp, Homo sapiens
  source 1..1446: mol_type = unassigned DNA
agcggggcgaactgaggcgagtgaagtggactctgagggctaccgctaccgccactgctgcggcaggggcgtggagggcagagggccgcggaggccgcagttgcaaacatggctcagagcagagacggcggaaacccgttcgccgagcccagcgagcttgacaacccctttcaggacccagctgtgatccagcaccgacccagccggcagtatgccacgcttgacgtctacaacccttttgagacccgggagccaccaccagcctatgagcctccagcccctgccccattgcctccaccctcagctccctccttgcagccctcgagaaagctcagccccacagaacctaagaactatggctcatacagcactcaggcctcagctgcagcagccacagctgagctgctgaagaaacaggaggagctcaaccggaaggcagaggagttggaccgaagggagcgagagctgcagcatgctgccctggggggcacagctactcgacagaacaattggccccctctaccttctttttgtccagttcagccctgctttttccaggacatctccatggagatcccccaagaatttcagaagactgtatccaccatgtactacctctggatgtgcagcacgctggctcttctcctgaacttcctcgcctgcctggccagcttctgtgtggaaaccaacaatggcgcaggctttgggctttctatcctctgggtcctccttttcactccctgctcctttgtctgctggtaccgccccatgtataaggctttccggagtgacagttcattcaatttcttcgttttcttcttcattttcttcgtccaggatgtgctctttgtcctccaggccattggtatcccaggttggggattcagtggctggatctctgctctggtggtgccgaagggcaacacagcagtatccgtgctcatgctgctggtcgccctgctcttcactggcattgctgtgctaggaattgtcatgctgaaacggatccactccttataccgccgcacaggtgccagctttcagaaggcccagcaagaatttgctgctggtgtcttctccaaccctgcggtgcgaaccgcagctgccaatgcagccgctggggctgctgaaaatgccttccgggccccgtgacccctgactgggatgccctggccctgctacttgagggagctgacttagctcccgtccctaaggtctctgggacttggagagacatcactaactgatggctcctccgtagtgctcccaatcctatggccatgactgctgaacctgacaggcgtgtggggagttcactgtgacctagtccccccatcaggccacactgctgccacctctcacacgccccaacccagcttccctctgctgtgccacggctgttgcttcggttatttaaataaaaagaaagtggaactggaactgaca

SEQ ID NO: 27384 - DNA, 1537 bp, Homo sapiens
  source 1..1537: mol_type = unassigned DNA
ggaaggaagtcacatggaagaggggcggtagttggttgtgggcactgggttagaggtatcacgtgggggcactttcgtcttagcttttggacaagacgcaggcgcaacccacggctgctgcggggatccttgtggcccttccggtcggtggaaccaatccgtgcacagagaagcggggcgaactgaggcgagtgaagtggactctgagggctaccgctaccgccactgctgcggcaggggcgtggagggcagagggccgcggaggccgcagttgcaaacatggctcagagcagagacggcggaaacccgttcgccgagcccagcgagcttgacaacccctttcagccaccaccagcctatgagcctccagcccctgccccattgcctccaccctcagctccctccttgcagccctcgagaaagctcagccccacagaacctaagaactatggctcatacagcactcaggcctcagctgcagcagccacagctgagctgctgaagaaacaggaggagctcaaccggaaggcagaggagttggaccgaagggagcgagagctgcagcatgctgccctggggggcacagctactcgacagaacaattggccccctctaccttctttttgtccagttcagccctgctttttccaggacatctccatggagatcccccaagaatttcagaagactgtatccaccatgtactacctctggatgtgcagcacgctggctcttctcctgaacttcctcgcctgcctggccagcttctgtgtggaaaccaacaatggcgcaggctttgggctttctatcctctgggtcctccttttcactccctgctcctttgtctgctggtaccgccccatgtataaggctttccggagtgacagttcattcaatttcttcgttttcttcttcattttcttcgtccaggatgtgctctttgtcctccaggccattggtatcccaggttggggattcagtggctggatctctgctctggtggtgccgaagggcaacacagcagtatccgtgctcatgctgctggtcgccctgctcttcactggcattgctgtgctaggaattgtcatgctgaaacggatccactccttataccgccgcacaggtgccagctttcagaaggcccagcaagaatttgctgctggtgtcttctccaaccctgcggtgcgaaccgcagctgccaatgcagccgctggggctgctgaaaatgccttccgggccccgtgacccctgactgggatgccctggccctgctacttgagggagctgacttagctcccgtccctaaggtctctgggacttggagagacatcactaactgatggctcctccgtagtgctcccaatcctatggccatgactgctgaacctgacaggcgtgtggggagttcactgtgacctagtccccccatcaggccacactgctgccacctctcacacgccccaacccagcttccctctgctgtgccacggctgttgcttcggttatttaaataaaaagaaagtggaactggaactga

SEQ ID NO: 27385 - DNA, 2526 bp, Homo sapiens
  source 1..2526: mol_type = unassigned DNA
ggtgggttgggccgggccggttgctaagacttggcgaagcgctgcgctcgcgcccggatccctcaggcggctgcaggcttcagcctgcgctggttggtgaaacagagatgtcagaaaaggagaacaacttcccgccactgcccaagttcatccctgtgaagccctgcttctaccagaacttctccgacgagatcccagtggagcaccaggtcctggtgaagaggatctaccggctgtggatgttttactgcgccaccctcggcgtcaacctcattgcctgcctggcctggtggatcggcggaggctcggggaccaacttcggcctggccttcgtgtggctgctcctgttcacgccttgcggctacgtgtgctggttccggcctgtctacaaggccttccgagccgacagctcctttaatttcatggcgtttttcttcatcttcggagcccagtttgtcctgaccgtcatccaggcgattggcttctccggctggggcgcgtgcggctggctgtcggcaattggattcttccagtacagcccgggcgctgccgtggtcatgctgcttccagccatcatgttctccgtgtcggctgccatgatggccatcgcgatcatgaaggtgcacaggatctaccgaggggctggcggaagcttccagaaggcacagacggagtggaacacgggcacttggcggaacccaccgtcgagggaggcccagtacaacaacttctcaggcaacagcctgcccgagtaccccactgtgcccagctacccgggcagtggccagtggccttagagggagcctgccctgcccccaccgcccaccacctcctccccttcattcctgctgctacccctggtcccgagggctgggagtacctggggccccatccccccagctgggatggtggaagccggtggtggccacggaccgcccccctcctgccagggccacagaacccgtgttcatctcatccgagagcggagttcctcacaagcactccccagcagcccttggcctctgccgtccacaggacgccctcttgctcccggaaacgtgtggtcacccgccgtccactgcacggctggtacggccttgtcttcaggtctcgaggcctgactccgggggacaggtggcagcaggtcggccgccctcccgtcctcccagagctgctggcgctgaggtcagagcgggtctgatggggagctccgtctcaccggccacccgccgtcaccatggcagatgcccttggccggaactaataagaggcgtcggggccagcttccggtcccctgcagtgatagagggcttggtgcctagctgagtcctcgctgtccccgccatcccctgatctgtgcggctccagcctcgccccctccccacgtgcaccatacctggggagttcctggtccagggtatcctggggccaccctccctgcctccaaaacagggatccctggcaggctgtctttccacgcccctgagttcagagtcggggacccaggccaggtcgggagcacagccgctccccaaacccagcaaaccggcagagagccggtttcccagcagccggagccctgcaggagaggcctttgtgttttgttttgttttgttttttctcttttgagacaagagtttcactctgtcgcccaggctggagtgcagtggtgtgatctcggctcactgcaacctctgcctcccgtgttcaagcagttctcctgcctcagcctcccaaatagctgggattacagttgcctgccaccacgcccagctaatttttatatttttagtacagatggggtttcaccatgttggccaggctggtctcgaactcctgacctcaagtgatccacccgccttggcctcccaaagtgctgggataataggtgtcagccaccgcgcccagcctggagtggccttttatgagaggggacccgtcaaatctgtgccttatggaggggtccggcagcggccacaattgtcttgtcccctcaccccccaactccccctggaacacctctcccaggcaagacattttcacagcaccattcacaacggttgggccaaaaagaaacttttccttcatcatttcctgcactcgctgaccacaactttggacaccccaggctgccacccctccccacccgttcacccccaggatgctgttgctgtaggacgcctgctgccctggagccctccccaggatgtgagccagtcccctcgctggtacggaatgccgctgggtgcccggaggcggccatggtgtctcgatggacggcagccaggatggagcacccatgggtctcacggccatgcttcagggtcttcaggtcctgcccccggccagtctgccaagaggcacccccttccccagcctctcgcctgcactgatgcagacaaaatctcacctggcaggcccaacccccccccacccctcccccgccgtgtgtggcccctcgccgcatcgttggggttttgttatgtgaaaatatcctggaaataaatacatgtttctgcacttaga

SEQ ID NO: 27386 - DNA, 2393 bp, Homo sapiens
  source 1..2393: mol_type = unassigned DNA
ttggcgaagcgctgcgctcgcgcccggatccctcaggcggctgcaggcttcagcctgcgctggttggtgaaacagagatgtcagaaaaggagaacaacttcccgccactgcccaagttcatccctgtgaagccctgcttctaccagaacttctccgacgagatcccagtggagcaccaggtcctggtgaagaggatctaccggctgtggatgttttactgcgccaccctcggcgtcaacctcattgcctgcctggcctggtggatcggcggaggctcggggaccaacttcggcctggccttcgtgtggctgctcctgttcacgccttgcggctacgtgtgctggttccggcctgtctacaaggccttccgcggctggctgtcggcaattggattcttccagtacagcccgggcgctgccgtggtcatgctgcttccagccatcatgttctccgtgtcggctgccatgatggccatcgcgatcatgaaggtgcacaggatctaccgaggggctggcggaagcttccagaaggcacagacggagtggaacacgggcacttggcggaacccaccgtcgagggaggcccagtacaacaacttctcaggcaacagcctgcccgagtaccccactgtgcccagctacccgggcagtggccagtggccttagagggagcctgccctgcccccaccgcccaccacctcctccccttcattcctgctgctacccctggtcccgagggctgggagtacctggggccccatccccccagctgggatggtggaagccggtggtggccacggaccgcccccctcctgccagggccacagaacccgtgttcatctcatccgagagcggagttcctcacaagcactccccagcagcccttggcctctgccgtccacaggacgccctcttgctcccggaaacgtgtggtcacccgccgtccactgcacggctggtacggccttgtcttcaggtctcgaggcctgactccgggggacaggtggcagcaggtcggccgccctcccgtcctcccagagctgctggcgctgaggtcagagcgggtctgatggggagctccgtctcaccggccacccgccgtcaccatggcagatgcccttggccggaactaataagaggcgtcggggccagcttccggtcccctgcagtgatagagggcttggtgcctagctgagtcctcgctgtccccgccatcccctgatctgtgcggctccagcctcgccccctccccacgtgcaccatacctggggagttcctggtccagggtatcctggggccaccctccctgcctccaaaacagggatccctggcaggctgtctttccacgcccctgagttcagagtcggggacccaggccaggtcgggagcacagccgctccccaaacccagcaaaccggcagagagccggtttcccagcagccggagccctgcaggagaggcctttgtgttttgttttgttttgttttttctcttttgagacaagagtttcactctgtcgcccaggctggagtgcagtggtgtgatctcggctcactgcaacctctgcctcccgtgttcaagcagttctcctgcctcagcctcccaaatagctgggattacagttgcctgccaccacgcccagctaatttttatatttttagtacagatggggtttcaccatgttggccaggctggtctcgaactcctgacctcaagtgatccacccgccttggcctcccaaagtgctgggataataggtgtcagccaccgcgcccagcctggagtggccttttatgagaggggacccgtcaaatctgtgccttatggaggggtccggcagcggccacaattgtcttgtcccctcaccccccaactccccctggaacacctctcccaggcaagacattttcacagcaccattcacaacggttgggccaaaaagaaacttttccttcatcatttcctgcactcgctgaccacaactttggacaccccaggctgccacccctccccacccgttcacccccaggatgctgttgctgtaggacgcctgctgccctggagccctccccaggatgtgagccagtcccctcgctggtacggaatgccgctgggtgcccggaggcggccatggtgtctcgatggacggcagccaggatggagcacccatgggtctcacggccatgcttcagggtcttcaggtcctgcccccggccagtctgccaagaggcacccccttccccagcctctcgcctgcactgatgcagacaaaatctcacctggcaggcccaacccccccccacccctcccccgccgtgtgtggcccctcgccgcatcgttggggttttgttatgtgaaaatatcctggaaataaatacatgtttctgcacttag

SEQ ID NO: 27387 - DNA, 783 bp, Homo sapiens
  source 1..783: mol_type = unassigned DNA
actgcatctccggttctgtgctttgttgaacgcgtgagcttcgggcagcgctggggccgcttcagcgtgacctccaaggccactggcctggagttccactggctgctggtcccccatctgtggggcgccccggcggctgaggcgtggaccaggcagtgcatgtcgaggagtagcacccacagctgcgcggctgcgaaatgatccagagacacatccctgtctgcgggaggagccgtccataccagcggggatgtgtagtccaggctggcagttcaggatcacccggctggagtcattttaagatcatctgcggcttagccccagcaccatctgaggcagtactgtctgctagaaataactgtgagcacacaggcggctgcaggcttcagcctgcgctggttggtgaaacagagatgtcagaaaaggagaacaacttcccgccactgcccaagttcatccctgtgaagccctgcttctaccagaacttctccgacgagatcccagtggagcaccaggtcctggtgaagaggatctaccggctgtggatgttttactgcgccaccctcggcgtcaacctcattgcctgcctggcctggtggatcggcggaggctcggggaccaacttcggcctggccttcgtgtggctgctcctgttcacgccttgcggctacgtgtgctggttccggcctgtctacaaggccttccgagccgacagctcctttaatttcatggcgtttttcttcatcttcggagcccagtttgtcctgaccgtcatccaggcga

SEQ ID NO: 27388 - DNA, 3490 bp, Homo sapiens
  source 1..3490: mol_type = unassigned DNA
ctcgggcgcgcgcgcgcgcgcgcgcgctccccgcccccagccccggagcggctcgcggccggctccgcgccgcatcgctcgggtgcagcgcagctcagcgcagcgctgcggcctttcggcagccgaacggccgcggcagcatttcctttacaggctgcacttccttccctgctgccagccaggagtttcggaaggtttcctggaggaagtgtgatacagcagttcaggacaaagaggtgtgggcaggccactgggccagctggtaacatcatggcagagaaagtgaacaacttcccaccattgcccaaattcatcccgctgaagccatgtttctaccaagacttcgaggcagatattcctccccagcatgtcagcatgaccaagcgcctctactacctctggatgttgaacagcgtcacgctggccgtgaacctggtgggctgtctcgcgtggctgatcggaggcgggggagccaccaactttggcctcgcctttctctggctcatcctcttcacaccctgctcctacgtctgctggtttcggcccatttacaaggccttcaagactgacagctccttcagtttcatggcattcttctttaccttcatggctcagttggtcatcagcatcatccaggccgtgggcatcccaggctggggcgtctgcggctggattgctaccatctccttcttcggaacgaacattggctcggcggtggtgatgctaattcccactgtcatgttcacagtgatggccgtcttttccttcatcgccctcagcatggttcataaattttaccggggaagtggggggagtttcagcaaagctcaggaggagtggaccacaggggcctggaagaatccacatgtgcagcaggcagcccagaacgcagccatgggggcagcccagggtgccatgaatcagcctcagactcagtattccgccacccccaattacacgtactccaatgagatgtgaaccagccacgcctaccaggtggcagagctggggccattgggacagggggctcaagccacatcgtcatttgtggttaccaagcagggttcccccttcccttttctccttccctactttgtacaaaggaccagagttatatatatatatatatgtatatgtctgtaccccagcccccacctttcagattctgctcttggcactcagctgtgggctgcacgtggagctgtcccgtgcggtagtagctgtgtctgtgtcccctcgtgaaatagtgtgcagtggaggtctcttgtggtgctagatgtgtgtttagagctaaaccagcccccacccccaccctccacctgcccctcttgcctctggcccctctgaccctggcccagggacccctcacggggccaggggaggcatagcagaaagactggccccttcctagggttatgagctggaactgtttctactttcagtcttcctgggaagtaacagtacttagcactcttggtggtgggtgggagggtgggtacaggccagggatattcccttgctcttttgatccctccaggcctcgcctccttcagcctcctcctccctcatctgttccctgatgtcacattccctgtgcaatcttcccttgcccatggtctgtctatctctttcctatgtggcttttctttgtcttccccaaggctgagtgtcccagttttatctgctcctgagactgagcccagatccccaaatctaatctgatttacagttcaaggaagctgatggggagctgggccttacccctgatgtaggaggggcacacagctgggggtgcagagcccacctgggtacctgacccccaggggatgaaaatgcaaggatgagtctgcttgggcctgagagtttgatctgcaggggcaggctcatcttttctctcccctgccttctcctccttctctccccagagcccccttgagcccctctgcctatgtccctctgcctcctccccatgcccccagttgctgtggcttgattctgctaccctgaccccaccatgtgccaggtggcatctgccttactgccttccctgaggagctgggacatgctgggcagttgtcagatgtaaaggcacagctggagcagagggcatgtcagtaatgattggtccctggggaaggtctggctggctccagcacagtgaggcatttaggtatctctcggtgaccgttggattcctggaagcagtagctgttctgtttggatctggtaggacagggctcagagggctaggcacggagggaaggtcagaggagaaggcaggcagggcccagtgagaggggagcatgccttcccccaccctggcttgctcttggtcacagggcggttctgggcacttgaactcagggcccaagcagaagcacaggcccagtcctggctgcaagcacaatagcctgaatgggatttcaggttaggcagggtgggaggggaggctctctggctttagttttgttttgttttccaaatcaaggtaacttgctcccttctgcctacaggccttggtcttggcttgtcctcacccagtcggaactccctaccactttcaggagagtggttttaggcccgtggggctgttctgttccaagcagtgtgagaacatggctggtagaggctctagctgtgtgcggggcctgaaggggagtgggttctcgcccaaagagcatctgcccatttcccaccttcccttctcccaccagaagcttgcctgagctgtttggacaaaaatccaaaccccacttggctactctggcctggcttcagcttggaacccaatacctaggcttacaggccatcctgagccaggggcctctggaaattctcttcctgatggtcctttaggtttgggcacaaaatataattgcctctcccctctcccattttctctcttgggagcaatggtcacagtccctggtacctgaaaaggtacctaggtctaggcccttcttccctttcccttcctctcccctaccccagaactttggctccctttcccttctctctctggtagctccaggaggcctgtgatccagctccctgcctagcatccatgacctgttggatgttacctccaatcagtttcctgtcctacctgcctctttggcttggacctatatggccatgctctggctctacccttgggaagcctgatcccggtgtgtggcccagcttgttcaggccctgggatgctgcatctccaggcaactatgcactttcccggggagagaaccagtatgagaagtgggggcagggcacacattcatctttgtaggaaggtctggcctggggtcgggtgaaggagggcccaggtcagttctggggtcccagtgacctgctttgccattctcctggtgccgctgctgctccctgtttctggagctggatgttccccagctggcagttgagctgcctgagccaatgtgtctgtctttggtaactgagtgaaccataataaaggggaacatttggccctgtg

SEQ ID NO: 27389 - DNA, 3407 bp, Homo sapiens
  source 1..3407: mol_type = unassigned DNA
ctcgggcgcgcgcgcgcgcgcgcgcgctccccgcccccagccccggagcggctcgcggccggctccgcgccgcatcgctcgggtgcagcgcagctcagcgcagcgctgcggcctttcggcagccgaacggccgcggcagttcaggacaaagaggtgtgggcaggccactgggccagctggtaacatcatggcagagaaagtgaacaacttcccaccattgcccaaattcatcccgctgaagccatgtttctaccaagacttcgaggcagatattcctccccagcatgtcagcatgaccaagcgcctctactacctctggatgttgaacagcgtcacgctggccgtgaacctggtgggctgtctcgcgtggctgatcggaggcgggggagccaccaactttggcctcgcctttctctggctcatcctcttcacaccctgctcctacgtctgctggtttcggcccatttacaaggccttcaagactgacagctccttcagtttcatggcattcttctttaccttcatggctcagttggtcatcagcatcatccaggccgtgggcatcccaggctggggcgtctgcggctggattgctaccatctccttcttcggaacgaacattggctcggcggtggtgatgctaattcccactgtcatgttcacagtgatggccgtcttttccttcatcgccctcagcatggttcataaattttaccggggaagtggggggagtttcagcaaagctcaggaggagtggaccacaggggcctggaagaatccacatgtgcagcaggcagcccagaacgcagccatgggggcagcccagggtgccatgaatcagcctcagactcagtattccgccacccccaattacacgtactccaatgagatgtgaaccagccacgcctaccaggtggcagagctggggccattgggacagggggctcaagccacatcgtcatttgtggttaccaagcagggttcccccttcccttttctccttccctactttgtacaaaggaccagagttatatatatatatatatgtatatgtctgtaccccagcccccacctttcagattctgctcttggcactcagctgtgggctgcacgtggagctgtcccgtgcggtagtagctgtgtctgtgtcccctcgtgaaatagtgtgcagtggaggtctcttgtggtgctagatgtgtgtttagagctaaaccagcccccacccccaccctccacctgcccctcttgcctctggcccctctgaccctggcccagggacccctcacggggccaggggaggcatagcagaaagactggccccttcctagggttatgagctggaactgtttctactttcagtcttcctgggaagtaacagtacttagcactcttggtggtgggtgggagggtgggtacaggccagggatattcccttgctcttttgatccctccaggcctcgcctccttcagcctcctcctccctcatctgttccctgatgtcacattccctgtgcaatcttcccttgcccatggtctgtctatctctttcctatgtggcttttctttgtcttccccaaggctgagtgtcccagttttatctgctcctgagactgagcccagatccccaaatctaatctgatttacagttcaaggaagctgatggggagctgggccttacccctgatgtaggaggggcacacagctgggggtgcagagcccacctgggtacctgacccccaggggatgaaaatgcaaggatgagtctgcttgggcctgagagtttgatctgcaggggcaggctcatcttttctctcccctgccttctcctccttctctccccagagcccccttgagcccctctgcctatgtccctctgcctcctccccatgcccccagttgctgtggcttgattctgctaccctgaccccaccatgtgccaggtggcatctgccttactgccttccctgaggagctgggacatgctgggcagttgtcagatgtaaaggcacagctggagcagagggcatgtcagtaatgattggtccctggggaaggtctggctggctccagcacagtgaggcatttaggtatctctcggtgaccgttggattcctggaagcagtagctgttctgtttggatctggtaggacagggctcagagggctaggcacggagggaaggtcagaggagaaggcaggcagggcccagtgagaggggagcatgccttcccccaccctggcttgctcttggtcacagggcggttctgggcacttgaactcagggcccaagcagaagcacaggcccagtcctggctgcaagcacaatagcctgaatgggatttcaggttaggcagggtgggaggggaggctctctggctttagttttgttttgttttccaaatcaaggtaacttgctcccttctgcctacaggccttggtcttggcttgtcctcacccagtcggaactccctaccactttcaggagagtggttttaggcccgtggggctgttctgttccaagcagtgtgagaacatggctggtagaggctctagctgtgtgcggggcctgaaggggagtgggttctcgcccaaagagcatctgcccatttcccaccttcccttctcccaccagaagcttgcctgagctgtttggacaaaaatccaaaccccacttggctactctggcctggcttcagcttggaacccaatacctaggcttacaggccatcctgagccaggggcctctggaaattctcttcctgatggtcctttaggtttgggcacaaaatataattgcctctcccctctcccattttctctcttgggagcaatggtcacagtccctggtacctgaaaaggtacctaggtctaggcccttcttccctttcccttcctctcccctaccccagaactttggctccctttcccttctctctctggtagctccaggaggcctgtgatccagctccctgcctagcatccatgacctgttggatgttacctccaatcagtttcctgtcctacctgcctctttggcttggacctatatggccatgctctggctctacccttgggaagcctgatcccggtgtgtggcccagcttgttcaggccctgggatgctgcatctccaggcaactatgcactttcccggggagagaaccagtatgagaagtgggggcagggcacacattcatctttgtaggaaggtctggcctggggtcgggtgaaggagggcccaggtcagttctggggtcccagtgacctgctttgccattctcctggtgccgctgctgctccctgtttctggagctggatgttccccagctggcagttgagctgcctgagccaatgtgtctgtctttggtaactgagtgaaccataataaaggggaacatttggccctgtg

SEQ ID NO: 27390 - DNA, 3270 bp, Homo sapiens
  source 1..3270: mol_type = unassigned DNA
tccgcgccgcatcgctcgggtgcagcgcagctcagcgcagcgctgcggcctttcggcagccgaacggccgcggcagcatttcctttacaggctgcacttccttccctgctgccagccaggagtttcggaaggtttcctggaggaagtgtgatacagcagttcaggacaaagaggtgtgggcaggccactgggccagctggtaacatcatggcagagaaagtgaacaacttcccaccattgcccaaattcatcccgctgaagccatgtttctaccaagacttcgaggcagatattcctccccagcatgtcagcatgaccaagcgcctctactacctctggatgtgactgacagctccttcagtttcatggcattcttctttaccttcatggctcagttggtcatcagcatcatccaggccgtgggcatcccaggctggggcgtctgcggctggattgctaccatctccttcttcggaacgaacattggctcggcggtggtgatgctaattcccactgtcatgttcacagtgatggccgtcttttccttcatcgccctcagcatggttcataaattttaccggggaagtggggggagtttcagcaaagctcaggaggagtggaccacaggggcctggaagaatccacatgtgcagcaggcagcccagaacgcagccatgggggcagcccagggtgccatgaatcagcctcagactcagtattccgccacccccaattacacgtactccaatgagatgtgaaccagccacgcctaccaggtggcagagctggggccattgggacagggggctcaagccacatcgtcatttgtggttaccaagcagggttcccccttcccttttctccttccctactttgtacaaaggaccagagttatatatatatatatatgtatatgtctgtaccccagcccccacctttcagattctgctcttggcactcagctgtgggctgcacgtggagctgtcccgtgcggtagtagctgtgtctgtgtcccctcgtgaaatagtgtgcagtggaggtctcttgtggtgctagatgtgtgtttagagctaaaccagcccccacccccaccctccacctgcccctcttgcctctggcccctctgaccctggcccagggacccctcacggggccaggggaggcatagcagaaagactggccccttcctagggttatgagctggaactgtttctactttcagtcttcctgggaagtaacagtacttagcactcttggtggtgggtgggagggtgggtacaggccagggatattcccttgctcttttgatccctccaggcctcgcctccttcagcctcctcctccctcatctgttccctgatgtcacattccctgtgcaatcttcccttgcccatggtctgtctatctctttcctatgtggcttttctttgtcttccccaaggctgagtgtcccagttttatctgctcctgagactgagcccagatccccaaatctaatctgatttacagttcaaggaagctgatggggagctgggccttacccctgatgtaggaggggcacacagctgggggtgcagagcccacctgggtacctgacccccaggggatgaaaatgcaaggatgagtctgcttgggcctgagagtttgatctgcaggggcaggctcatcttttctctcccctgccttctcctccttctctccccagagcccccttgagcccctctgcctatgtccctctgcctcctccccatgcccccagttgctgtggcttgattctgctaccctgaccccaccatgtgccaggtggcatctgccttactgccttccctgaggagctgggacatgctgggcagttgtcagatgtaaaggcacagctggagcagagggcatgtcagtaatgattggtccctggggaaggtctggctggctccagcacagtgaggcatttaggtatctctcggtgaccgttggattcctggaagcagtagctgttctgtttggatctggtaggacagggctcagagggctaggcacggagggaaggtcagaggagaaggcaggcagggcccagtgagaggggagcatgccttcccccaccctggcttgctcttggtcacagggcggttctgggcacttgaactcagggcccaagcagaagcacaggcccagtcctggctgcaagcacaatagcctgaatgggatttcaggttaggcagggtgggaggggaggctctctggctttagttttgttttgttttccaaatcaaggtaacttgctcccttctgcctacaggccttggtcttggcttgtcctcacccagtcggaactccctaccactttcaggagagtggttttaggcccgtggggctgttctgttccaagcagtgtgagaacatggctggtagaggctctagctgtgtgcggggcctgaaggggagtgggttctcgcccaaagagcatctgcccatttcccaccttcccttctcccaccagaagcttgcctgagctgtttggacaaaaatccaaaccccacttggctactctggcctggcttcagcttggaacccaatacctaggcttacaggccatcctgagccaggggcctctggaaattctcttcctgatggtcctttaggtttgggcacaaaatataattgcctctcccctctcccattttctctcttgggagcaatggtcacagtccctggtacctgaaaaggtacctaggtctaggcccttcttccctttcccttcctctcccctaccccagaactttggctccctttcccttctctctctggtagctccaggaggcctgtgatccagctccctgcctagcatccatgacctgttggatgttacctccaatcagtttcctgtcctacctgcctctttggcttggacctatatggccatgctctggctctacccttgggaagcctgatcccggtgtgtggcccagcttgttcaggccctgggatgctgcatctccaggcaactatgcactttcccggggagagaaccagtatgagaagtgggggcagggcacacattcatctttgtaggaaggtctggcctggggtcgggtgaaggagggcccaggtcagttctggggtcccagtgacctgctttgccattctcctggtgccgctgctgctccctgtttctggagctggatgttccccagctggcagttgagctgcctgagccaatgtgtctgtctttggtaactgagtgaaccataataaaggggaacatttggccctgtg

SEQ ID NO: 27391 - DNA, 3503 bp, Homo sapiens
  source 1..3503: mol_type = unassigned DNA
aggcaggggcggtgcgggggcgtgggcagcacaagccgtgcgctcccgggctgcgaggtctggctaggctacgggccacgcgccgccgccgctgccgccgccactgtcctcttcggaggcgcgggcccgacggaaaccatgtttgtggctcgcagcatcgcggcggaccacaaggatctcatccacgatgtctctttcgacttccacgggcggcggatggcaacctgctccagcgatcagagcgttaaggtctgggataaaagtgaaagtggtgattggcattgtactgctagctggaagacacatagtggatctgtatggcgtgtgacatgggcccatcctgaatttgggcaggttttggcttcctgttcttttgaccgaacagctgctgtatgggaagaaatagtaggagaatcaaatgataaactgcgaggacagagccactgggttaaaaggacaactctggtggatagcagaacatctgttactgatgtgaagtttgctcccaagcacatgggtcttatgttagcaacctgttccgcagatggtatagtaagaatctatgaggcaccagatgttatgaatctcagccagtggtctttgcagcatgagatctcatgtaagctaagctgtagttgtatttcttggaacccttcaagctctcgtgctcattcccccatgatcgccgtaggaagtgatgacagtagccccaacgcaatggccaaggttcagatttttgaatataatgaaaacaccaggaaatatgcaaaagctgaaactcttatgacagtcactgatcctgttcatgatattgcattcgctccaaatttgggaagatctttccatattctagcaatagcgaccaaagatgtgagaatttttacattaaagcctgtgaggaaagaactgacttcctctggtgggccaacaaagtttgaaatccatatagtggctcagttcgataatcataattctcaggtctggcgagtgagttggaatataacaggaacggtgctagcatcttcaggagatgatgggtgtgtaagattgtggaaagctaattatatggacaattggaagtgtactggtattttgaaaggtaatgggagcccagtcaatgggagttctcagcagggaacctcaaatccttccctaggttcaactattccaagtcttcagaattcattaaatggatcttctgctggcagaaagcacagctgagtacaagctaactggagtaactttgctgttttgctgcttgttgcatgcacacaggaatggaaagcgagctccttttccccttccccagcgccgtttgacctctcccaagatacaccagcagcctgcttactactaaacgcaatccaaaaggcctttaaaaatacagtgtatattttttgtactagtcagtttattgacactatttgaaacttttgaaatataaacggagaggctttctgttgagacattgtcaccaaaacaattttttgaaatgttcctgaaactaatttgggtttaaagattaaaagggttgttaccattcttatctgagtagttgggaggaggggaataccactttagttcatttggaaaatatagacatatttcttttgctttcttaaaacagcttaaaatgatgaacttttataattttaatttgaagattgaataaatattttttataaagattgttttgagtgctgatttgtttactttttgtagatttgctttatccatgatattcagtacaactctgtcatttctttgtaatatttaaaaaatattagtaaaggagtgaattaataaagtagtaatagtaaaatgaaaggaacttgactgtacagtttgtagccaggttaagcatttggtattgtttcatttacaatttgggactaagatggaaacactttttttataagtttttaattcatagtcactaaagagataaatgtttcttatatacatttgtgtatttttatggtgttatttattccatggcttagcttccttcaaatcaaaatttggacacacactattaagagaagccattaaaattttactaaaattgtgcatgtaaattaattgtcagcattccatgtctcaagattttcttaatttagttcgctgtttaaattaattcatgtcctgtaaagttctgaccttgataacaaagctataaatatttaagtttgctaatatgcgtaagtattatcggtaagttacaagatggaagaagaataacagtagggcacagtcattctgtgaatccttttacttatcaaaatttggtagctattctaaggcttttgcagaaaaataagtgttcaatgtttgtagttcttcaaaagcatgttgcagtagccagccatactatgtgtattcccagtatcatgtacgcactaaaaaaaatgtgtgcttgctgctgctgtgagtgaaccattgcttaagataaaaaacttaactagatctgtaaatgtacagaatagcatcagatgtttctgagagattagaaaatgttttgaatttataaaattaatgtttttctttgtaacatttatatatattttttaacattttaagtttaacagattgtattcctttcaagtttctatacttgcttaagcaatcttgatttgagtaagggtcttgatttgtgctattatgttctgttagttttggcatgaatatactaaagcttttttttttttttctagcatgtgttttctcctctttggttctctttgtatttactacttttctctttttcttgtgttttttttttcctgtttttgttttgtttggtgttttgttcctgtcttcattgtttcaggtatttctttacccctctggattccccacgggctggatcgagatggtccagttatgcccagctccttcctcctcctcctcctcctctggtagagcactcttgcgatgctgacactgccaacctccagtatcctcaccctcgcagacgatatctctctcggcctcttaatcccttacctgagaatgaagggatttaaaacactgatttaacattgaaaggccttattcaagtgcttgtaaatgctttcatttctggctgctttttgtttttcattttctttcagaagatttttctaacttagggtctgtcttgcatgtattacaaccagaatacagtgtttggaacctaaatctgtttgtgcgtctgcatcaaaggaacatttgcttcactgggtgataacctttgatgaaatgagatatgtccaagtaacgttaactgtgaagttacacacagtagctgacttcaaagtgcctgttctgtaaattttattttaaactgttaccatagtcttaagttgtttatgctttatcagactggctaatgtgaaagcataatattatgaagtttattctgccttatgagaccttaaaaaatggatttcattttacaggctaatgttgtaactgactagtatgtaaaataaatcattcctgtgtataaagcagcaaaacct

SEQ ID NO: 27392 - DNA, 1881 bp, Homo sapiens
  source 1..1881: mol_type = unassigned DNA
aggcaggggcggtgcgggggcgtgggcagcacaagccgtgcgctcccgggctgcgaggtctggctaggctacgggccacgcgccgccgccgctgccgccgccactgtcctcttcggaggcgcgggcccgacggaaaccatgtttgtggctcgcagcatcgcggcggaccacaaggatctcatccacgatgtctctttcgacttccacgggcggcggatggcaacctgctccagcgatcagagcgttaaggtctgggataaaagtgaaagtggtgattggcattgtactgctagctggaagacacatagtggatctgtatggcgtgtgacatgggcccatcctgaatttgggcaggttttggcttcctgttcttttgaccgaacagctgctgtatgggaagaaatagtaggagaatcaaatgataaactgcgaggacagagccactgggttaaaaggacaactctggtggatagcagaacatctgttactgatgtgaagtttgctcccaagcacatgggtcttatgttagcaacctgttccgcagatggtatagtaagaatctatgaggcaccagatgttatgaatctcagccagtggtctttgcagcatgagatctcatgtaagctaagctgtagttgtatttcttggaacccttcaagctctcgtgctcattcccccatgatcgccgtaggaagtgatgacagtagccccaacgcaatggccaaggttcagatttttgaatataatgaaaacaccaggaaatatgcaaaagctgaaactcttatgacagtcactgatcctgttcatgatattgcattcgctccaaatttgggaagatctttccatattctagcaatagcgaccaaagatgtgagaatttttacattaaagcctgtgaggaaagaactgacttcctctggtgggccaacaaagtttgaaatccatatagtggctcagttcgataatcataattctcaggtctggcgagtgagttggaatataacaggaacggtgctagcatcttcaggagatgatgggtgtgtaagattgtggaaagctaattatatggacaattggaagtgtactggtattttgaaaggtaatgggagcccagtcaatgggagttctcagcagggaacctcaaatccttccctaggttcaactattccaagtcttcagaattcattaaatggatcttctgctggcaggtatttctttacccctctggattccccacgggctggatcgagatggtccagttatgcccagctccttcctcctcctcctcctcctctggtagagcactcttgcgatgctgacactgccaacctccagtatcctcaccctcgcagacgatatctctctcggcctcttaatcccttacctgagaatgaagggatttaaaacactgatttaacattgaaaggccttattcaagtgcttgtaaatgctttcatttctggctgctttttgtttttcattttctttcagaagatttttctaacttagggtctgtcttgcatgtattacaaccagaatacagtgtttggaacctaaatctgtttgtgcgtctgcatcaaaggaacatttgcttcactgggtgataacctttgatgaaatgagatatgtccaagtaacgttaactgtgaagttacacacagtagctgacttcaaagtgcctgttctgtaaattttattttaaactgttaccatagtcttaagttgtttatgctttatcagactggctaatgtgaaagcataatattatgaagtttattctgccttatgagaccttaaaaaatggatttcattttacaggctaatgttgtaactgactagtatgtaaaataaatcattcctgtgtataaagcagcaaaacct

SEQ ID NO: 27393 - DNA, 3248 bp, Homo sapiens
  source 1..3248: mol_type = unassigned DNA
gcttcccctttctcgctcaccgccgccctccttccccagctccctcgccgtccgcccgccccacagccagcggctccgcgccccctgcagccacgatgcccgcggcccggccgcccgccgcgggactccgcgggatctcgctgttcctcgctctgctcctggggagcccggcggcagcgctggagcgagatgctcttcccgagggagatgctagccctttgggtccttacctcctgccctcaggagccccggagagaggcagtcctggcaaagagcaccctgaagagagagtggtaacagcgccccccagttcctcacagtcggcggaagtgctgggcgagctggtgctggatgggaccgcaccctctgcacatcacgacatcccagccctgtcaccgctgcttccagaggaggcccgccccaagcacgccttgccccccaagaagaaactgccttcgctcaagcaggtgaactctgccaggaagcagctgaggcccaaggccacctccgcagccactgtccaaagggcagggtcccagccagcgtcccagggcctagatctcctctcctcctccacggagaagcctggcccaccgggggacccggaccccatcgtggcctccgaggaggcatcagaagtgcccctttggctggaccgaaaggagagtgcggtccctacaacacccgcacccctgcaaatctcccccttcacttcgcagccctatgtggcccacacactcccccagaggccagaacccggggagcctgggcctgacatggcccaggaggccccccaggaggacaccagccccatggccctgatggacaaaggtgagaatgagctgactgggtcagcctcagaggagagccaggagaccactacctccaccattatcaccaccacggtcatcaccaccgagcaggcaccagctctctgcagtgtgagcttctccaatcctgaggggtacattgactccagcgactacccactgctgcccctcaacaactttctggagtgcacatacaacgtgacagtctacactggctatggggtggagctccaggtgaagagtgtgaacctgtccgatggggaactgctctccatccgcggggtggacggccctaccctgaccgtcctggccaaccagacactcctggtggaggggcaggtaatccgaagccccaccaacaccatctccgtctacttccggaccttccaggacgacggccttgggaccttccagcttcactaccaggccttcatgctgagctgcaactttccccgccggcctgactctggggatgtcacggtgatggacctgcactcaggtggggtggcccactttcactgccacctgggctatgagctccagggcgctaagatgctgacatgcatcaatgcctccaagccgcactggagcagccaggagcccatctgctcagctccttgtggaggggcagtgcacaatgccaccatcggccgcgtcctctccccaagttaccctgaaaacacaaatgggagccaattctgcatctggacgattgaagctccagagggccagaagctgcacctgcactttgagaggctgttgctgcatgacaaggacaggatgacggttcacagcgggcagaccaacaagtcagctcttctctacgactcccttcaaaccgagagtgtcccttttgagggcctgctgagcgaaggcaacaccatccgcatcgagttcacgtccgaccaggcccgggcggcctccaccttcaacatccgatttgaagcgtttgagaaaggccactgctatgagccctacatccagaatgggaacttcactacatccgacccgacctataacattgggactatagtggagttcacctgcgaccccggccactccctggagcagggcccggccatcatcgaatgcatcaatgtgcgggacccatactggaatgacacagagcccctgtgcagagccatgtgtggtggggagctctctgctgtggctggggtggtattgtccccaaactggcccgagccctacgtggaaggtgaagattgtatctggaagatccacgtgggagaagagaaacggatcttcttagatatccagttcctgaatctgagcaacagtgacatcttgaccatctacgatggcgacgaggtcatgccccacatcttggggcagtaccttgggaacagtggcccccagaaactgtactcctccacgccagacttaaccatccagttccattcggaccctgctggcctcatctttggaaagggccagggatttatcatgaactacatagaggtatcaaggaatgactcctgctcggatttacccgagatccagaatggctggaaaaccacttctcacacggagttggtgcggggagccagaatcacctaccagtgtgaccccggctatgacatcgtggggagtgacaccctcacctgccagtgggacctcagctggagcagcgaccccccattttgtgagaaaattatgtactgcaccgaccccggagaggtggatcactcgacccgcttaatttcggatcctgtgctgctggtggggaccaccatccaatacacctgcaaccccggttttgtgcttgaagggagttctcttctgacctgctacagccgtgaaacagggactcccatctggacgtctcgcctgccccactgcgtttcggaggagtccctggcatgtgacaacccagggctgcctgaaaatggataccaaatcctgtacaagcgactctacctgccaggagagtccctcaccttcatgtgctacgaaggctttgagctcatgggtgaagtgaccatccgctgcatcctgggacagccatcccactggaacgggcccctgcccgtgtgtaaagttaatcaagacagttttgaacatgctttagaagtagcagaagcggcagcagagacgtcgctggaaggggggaacatggccctggctatcttcatcccggtcctcatcatctccttactgctgggaggagcctacatttacatcacaagatgtcgctactattccaacctccgcctgcctctgatgtactcccacccctacagccagatcaccgtggaaaccgagtttgacaaccccatttacgagacaggggaaaccagagagtatgaggtttctatctaaagagagctacacttgagaaggggacttgtgaactcaaccacaatctcctcgagacattcatccagagaccatgtggca

SEQ ID NO: 27394 - DNA, 2898 bp, Homo sapiens
  source 1..2898: mol_type = unassigned DNA
cctgcagccacgatgcccgcggcccggccgcccgccgcgggactccgcgggatctcgctgttcctcgctctgctcctggggagcccggcggcagcgctggagcgagatgctcttcccgagggagatgctagccctttgggtccttacctcctgccctcaggagccccggagagaggcagtcctggcaaagagcaccctgaagagagagtggtaacagcgccccccagttcctcacagtcggcggaagtgctgggcgagctggtgctggatgggaccgcaccctctgcacatcacgacatcccagccctgtcaccgctgcttccagaggaggcccgccccaagcacgccttgccccccaagaagaaactgccttcgctcaagcaggtgaactctgccaggaagcagctgaggcccaaggccacctccgcagccactgtccaaagggcagggtcccagccagcgtcccagggcctagatctcctctcctcctccacggagaagcctggcccaccgggggacccggaccccatcgtggcctccgaggaggcatcagaagtgcccctttggctggaccgaaaggagagtgcggtccctacaacacccgcacccctgcaaatctcccccttcacttcgcagccctatgtggcccacacactcccccagaggccagaacccggggagcctgggcctgacatggcccaggaggccccccaggaggacaccagccccatggccctgatggacaaaggtgagaatgagctgactgggtcagcctcagaggagagccaggagaccactacctccaccattatcaccaccacggtcatcaccaccgagcaggcaccagctctctgcagtgtgagcttctccaatcctgaggggtacattgactccagcgactacccactgctgcccctcaacaactttctggagtgcacatacaacgtgacagtctacactggctatggggtggagctccaggtgaagagtgtgaacctgtccgatggggaactgctctccatccgcggggtggacggccctaccctgaccgtcctggccaaccagacactcctggtggaggggcaggtaatccgaagccccaccaacaccatctccgtctacttccggaccttccaggacgacggccttgggaccttccagcttcactaccaggccttcatgctgagctgcaactttccccgccggcctgactctggggatgtcacggtgatggacctgcactcaggtggggtggcccactttcactgccacctgggctatgagctccagggcgctaagatgctgacatgcatcaatgcctccaagccgcactggagcagccaggagcccatctgctcagctccttgtggaggggcagtgcacaatgccaccatcggccgcgtcctctccccaagttaccctgaaaacacaaatgggagccaattctgcatctggacgattgaagctccagagggccagaagctgcacctgcactttgagaggctgttgctgcatgacaaggacaggatgacggttcacagcgggcagaccaacaagtcagctcttctctacgactcccttcaaaccgagagtgtcccttttgagggcctgctgagcgaaggcaacaccatccgcatcgagttcacgtccgaccaggcccgggcggcctccaccttcaacatccgatttgaagcgtttgagaaaggccactgctatgagccctacatccagaatgggaacttcactacatccgacccgacctataacattgggactatagtggagttcacctgcgaccccggccactccctggagcagggcccggccatcatcgaatgcatcaatgtgcgggacccatactggaatgacacagagcccctgtgcagagccatgtgtggtggggagctctctgctgtggctggggtggtattgtccccaaactggcccgagccctacgtggaaggtgaagattgtatctggaagatccacgtgggagaagagaaacggatcttcttagatatccagttcctgaatctgagcaacagtgacatcttgaccatctacgatggcgacgaggtcatgccccacatcttggggcagtaccttgggaacagtggcccccagaaactgtactcctccacgccagacttaaccatccagttccattcggaccctgctggcctcatctttggaaagggccagggatttatcatgaactacatagaggtatcaaggaatgactcctgctcggatttacccgagatccagaatggctggaaaaccacttctcacacggagttggtgcggggagccagaatcacctaccagtgtgaccccggctatgacatcgtggggagtgacaccctcacctgccagtgggacctcagctggagcagcgaccccccattttgtgagaaaattatgtactgcaccgaccccggagaggtggatcactcgacccgcttaatttcggatcctgtgctgctggtggggaccaccatccaatacacctgcaaccccggttttgtgcttgaagggagttctcttctgacctgctacagccgtgaaacagggactcccatctggacgtctcgcctgccccactgcgttttagcagaagcggcagcagagacgtcgctggaaggggggaacatggccctggctatcttcatcccggtcctcatcatctccttactgctgggaggagcctacatttacatcacaagatgtcgctactattccaacctccgcctgcctctgatgtactcccacccctacagccagatcaccgtggaaaccgagtttgacaaccccatttacgagacaggggaaaccagagagtatgaggtttctatctaaagagagctacacttgagaaggggacttgtgaactcaacc

SEQ ID NO: 27395 - DNA, 6307 bp, Homo sapiens
  source 1..6307: mol_type = unassigned DNA
cgcgcgtccgcccagggggctccggaagctgccccggcccgcggcctcctccctcgctcccgcttcccctttctcgctcaccgccgccctccttccccagctccctcgccgtccgcccgccccacagccagcggctccgcgccccctgcagccacgatgcccgcggcccggccgcccgccgcgggactccgcgggatctcgctgttcctcgctctgctcctggggagcccggcggcagcgctggagcgagatgctcttcccgagggagatgctagccctttgggtccttacctcctgccctcaggagccccggagagaggcagtcctggcaaagagcaccctgaagagagagtggtaacagcgccccccagttcctcacagtcggcggaagtgctgggcgagctggtgctggatgggaccgcaccctctgcacatcacgacatcccagccctgtcaccgctgcttccagaggaggcccgccccaagcacgccttgccccccaagaagaaactgccttcgctcaagcaggtgaactctgccaggaagcagctgaggcccaaggccacctccgcagccactgtccaaagggcagggtcccagccagcgtcccagggcctagatctcctctcctcctccacggagaagcctggcccaccgggggacccggaccccatcgtggcctccgaggaggcatcagaagtgcccctttggctggaccgaaaggagagtgcggtccctacaacacccgcacccctgcaaatctcccccttcacttcgcagccctatgtggcccacacactcccccagaggccagaacccggggagcctgggcctgacatggcccaggaggccccccaggaggacaccagccccatggccctgatggacaaaggtgagaatgagctgactgggtcagcctcagaggagagccaggagaccactacctccaccattatcaccaccacggtcatcaccaccgagcaggcaccagctctctgcagtgtgagcttctccaatcctgaggggtacattgactccagcgactacccactgctgcccctcaacaactttctggagtgcacatacaacgtgacagtctacactggctatggggtggagctccaggtgaagagtgtgaacctgtccgatggggaactgctctccatccgcggggtggacggccctaccctgaccgtcctggccaaccagacactcctggtggaggggcaggtaatccgaagccccaccaacaccatctccgtctacttccggaccttccaggacgacggccttgggaccttccagcttcactaccaggccttcatgctgagctgcaactttccccgccggcctgactctggggatgtcacggtgatggacctgcactcaggtggggtggcccactttcactgccacctgggctatgagctccagggcgctaagatgctgacatgcatcaatgcctccaagccgcactggagcagccaggagcccatctgctcagctccttgtggaggggcagtgcacaatgccaccatcggccgcgtcctctccccaagttaccctgaaaacacaaatgggagccaattctgcatctggacgattgaagctccagagggccagaagctgcacctgcactttgagaggctgttgctgcatgacaaggacaggatgacggttcacagcgggcagaccaacaagtcagctcttctctacgactcccttcaaaccgagagtgtcccttttgagggcctgctgagcgaaggcaacaccatccgcatcgagttcacgtccgaccaggcccgggcggcctccaccttcaacatccgatttgaagcgtttgagaaaggccactgctatgagccctacatccagaatgggaacttcactacatccgacccgacctataacattgggactatagtggagttcacctgcgaccccggccactccctggagcagggcccggccatcatcgaatgcatcaatgtgcgggacccatactggaatgacacagagcccctgtgcagagccatgtgtggtggggagctctctgctgtggctggggtggtattgtccccaaactggcccgagccctacgtggaaggtgaagattgtatctggaagatccacgtgggagaagagaaacggatcttcttagatatccagttcctgaatctgagcaacagtgacatcttgaccatctacgatggcgacgaggtcatgccccacatcttggggcagtaccttgggaacagtggcccccagaaactgtactcctccacgccagacttaaccatccagttccattcggaccctgctggcctcatctttggaaagggccagggatttatcatgaactacatagaggtatcaaggaatgactcctgctcggatttacccgagatccagaatggctggaaaaccacttctcacacggagttggtgcggggagccagaatcacctaccagtgtgaccccggctatgacatcgtggggagtgacaccctcacctgccagtgggacctcagctggagcagcgaccccccattttgtgagaaaacggaggagtccctggcatgtgacaacccagggctgcctgaaaatggataccaaatcctgtacaagcgactctacctgccaggagagtccctcaccttcatgtgctacgaaggctttgagctcatgggtgaagtgaccatccgctgcatcctgggacagccatcccactggaacgggcccctgcccgtgtgtaaagtagcagaagcggcagcagagacgtcgctggaaggggggaacatggccctggctatcttcatcccggtcctcatcatctccttactgctgggaggagcctacatttacatcacaagatgtcgctactattccaacctccgcctgcctctgatgtactcccacccctacagccagatcaccgtggaaaccgagtttgacaaccccatttacgagacaggggaaaccagagagtatgaggtttctatctaaagagagctacacttgagaaggggacttgtgaactcaaccacaatctcctcgagacattcatccagagaccatgtggcacttgattgaaaccccagaatgtcgactgtcttttgtttagactctttatcaaaggtttactgttttcttccctgtatttattatatttaaaagtgaaataggtgtgggtttggatgtttcgcggcctcagccaaattcatgttacagcctcaattctgaaggcaggtggaagacttgcaaaatggcaaaccgcggcagcaaaaacacaaaacagcagatggagtttctcccatcagcaatgccatgctaaggctgcattgaattgcatgcatctttgggaaccatgcccatgatgttttcagtacaaatctaagtcccaagattaggttggaaagggtatttcttgttggcttagtttgggttggaatttagcatgggtacttaaacccatttggagagctgtgctcctaaacaaattctgtgtcctctcttcccattttgccagcttctgaaaggtttttccacagcccctccctctcacggttcttctgaaggtagcaaaggtgttatataaacattgtcttttaccactctggcctcgctggacagtgacaaaacaagaaaacgttttctttctagaaaggtgataaacgaccaaaggcaatttttcagagacaaatgagagatttgagagttccaatgaagaattgggtgagggggatcattgggtaagggaattgggttaaaatgttcttttctttgacactctttcaatgatgaaagagcgtgtaatttatgctacaagtgccagaatcgatcaccatgttcagcaagccactctcaagctgtggtaataaacacacaggcttgggaggcaccagcggccccactcatacagtgacaaggatttgtgatgggaaaaaggaggtgccatgtttggaaatgcaggggtgagctctggtttctcctggggttctggaatatctcagccctcaaaatagaggagactcaagtgcactgattctctaaaaggtgtcatcttcagaatatacttgccatcaagtatttcagggggcgggagggtcccatgagaagaaactatttttctattctccaaagctgtctggatgttggagggtggtgtgaatgctgactgaggaggtgcagagaacaggggcaggggattttaaatcacagcagaccatccagtggaatcctgtatcatctgatctgaacatcaatgaagacagagagaggaatttcattcagaaaggattccatagccccacatctagtcacacgggcattcctcttattttatcagggtctgttttcccccaacccagtgaaaccggtgagtgtgtaactcttgggaagattcttttctaaatacaggtataaagagaaggtggagggtgcgggtgcatggaagaaatactatgtgtgaagcagattcaccttcctgggaccggtgacatggtggtgacagtcaatggcttggacagacagacgggcacagtggcatttggaaccctctttggtgccctcccattctctctggaattgtttcaagtctgctggttttcaaacaagaaaagacctttctggccatagggagaatagcagggagtctatgttttggtggttacattggaaacatcttaagcaagatagggaaagttgattttaggcacacatgtaccctccttgacagcaggaactcagacttcaatcttgggggtctaagaccagaatattttccttctgccagaaaagaatcttgcacatatactcctgaaggcatgagtgtgtggtccatggcaagaaatagctaaaggctgctttccaggacccaaagccccatttaatgcaagaaccagagaagtgttctaggccattagtggacaatgtcatgtttggagaaagataacaacacaaataatgtaacctttccttaaaaggcagaactcaatccattttatttgatgcttattctaaccctaaccctgggtcacctggaatgaagaactctatgaataatatttgattttacaacgtgttatggttatgtgaaaactaaacatttgccttttataaagactgacaaaatataaatctttattctaaccctatccccaaaactagccaggccacaccccagatgttcttattgactattggaaagatagaaaaggcgttgtgttttttgtttttttgttgttgttgtcattgttgtttttttcagaagaccagtgtctcagttctgtcttagtagtaccacacccgtaaccgtgttttaaaagtttgttttagcctagagacagatcatacgagttcaacaatgtacagtgtgattgaaaagacaggttggtgtctatttttctttttaaaatatctgaatgtgtatttgtaatacgtaaaggtaaaaaaaaatagtgccaaaaatgtgcaaggcatctcattacagctcatgtacgtctgtttttataagatcaatattaaaacccattgggattaaatatttttgaataggatacactcttgagaaactcgagaatggactgagccttcctacaagccactctttgtttttaaaacagtggggaaatacgtttacagagattgtgagcttcagagaatgcatgtgatggtgtgtattacatgctaattcatataagctgtatctgtcagctaccaccctgtgctttaaaaatgcacacactcaaccctctttagcttggagctcagctttttgcttttttttttttttttttgtagaattatttagctaacataagtattctgattgctacctgatggccattcttacttagtttcatagatgtgctttaactatgatcctttgaagctcaccccttggagagcctacagaacctcaggctgatagctttgaagactgccaaacagcccagaaggaagcaaagcatctgcataatcaggagggttgtataacaagtagtgatttggcaaatatgtgggtagctttaggctgaggcacgggcctcaggcaaaaatgcccttcgagtgaatccgaagggcatgatcttcctatgtccttgactaggcatgacgagtcatttgaggtcagatattatttgagttgttcagcacccccaaaggtaggcattctcctgggaaattttcatttccattttatcgccaaacaaaataaaaagcaaaacaaactttctaagctagaataatgaaattaagtcattttccactttgtatatattgatgctaataaaacagatgaaaaaga

SEQ ID NO: 27396 - DNA, 983 bp, Homo sapiens
  source 1..983: mol_type = unassigned DNA
aaagaggtatcaaggaatgactcctgctcggatttacccgagatccagaatggctggaaaaccacttctcacacggagttggtgcggggagccagaatcacctaccagtgtgaccccggctatgacatcgtggggagtgacaccctcacctgccagtgggacctcagctggagcagcgaccccccattttgtgagaaaattatgtactgcaccgaccccggagaggtggatcactcgacccgcttaatttcggatcctgtgctgctggtggggaccaccatccaatacacctgcaaccccggttttgtgcttgaagggagttctcttctgacctgctacagccgtgaaacagggactcccatctggacgtctcgcctgccccactgcgtttcggaggagtccctggcatgtgacaacccagggctgcctgaaaatggataccaaatcctgtacaagcgactctacctgccaggagagtccctcaccttcatgtgctacgaaggctttgagctcatgggtgaagtgaccatccgctgcatcctgggacagccatcccactggaacgggcccctgcccgtgtgtaaagatgtcgctactattccaacctccgcctgcctctgatgtactcccacccctacagccagatcaccgtggaaaccgagtttgacaaccccatttacgagacaggggaaaccagagagtatgaggtttctatctaaagagagctacacttgagaaggggacttgtgaactcaaccacaatctcctcgagacattcatccagagaccatgtggcacttgattgaaaccccagaatgtcgactgtcttttgtttagactctttatcaaaggtttactgttttcttccctgtatttattatatttaaaagtgaaataggtgtgggtttggatgtttcgcggcctcagccaaattcatgttacagcctcaattctgaaggcaggtggaagacttgcaaaatggc

SEQ ID NO: 27397 - DNA, 6532 bp, Homo sapiens
  source 1..6532: mol_type = unassigned DNA
gcgcccggcgcagctcggccagagcgaccgcggggctgagcgcgcgtccgcccagggggctccggaagctgccccggcccgcggcctcctccctcgctcccgcttcccctttctcgctcaccgccgccctccttccccagctccctcgccgtccgcccgccccacagccagcggctccgcgccccctgcagccacgatgcccgcggcccggccgcccgccgcgggactccgcgggatctcgctgttcctcgctctgctcctggggagcccggcggcagcgctggagcgagatgctcttcccgagggagatgctagccctttgggtccttacctcctgccctcaggagccccggagagaggcagtcctggcaaagagcaccctgaagagagagtggtaacagcgccccccagttcctcacagtcggcggaagtgctgggcgagctggtgctggatgggaccgcaccctctgcacatcacgacatcccagccctgtcaccgctgcttccagaggaggcccgccccaagcacgccttgccccccaagaagaaactgccttcgctcaagcaggtgaactctgccaggaagcagctgaggcccaaggccacctccgcagccactgtccaaagggcagggtcccagccagcgtcccagggcctagatctcctctcctcctccacggagaagcctggcccaccgggggacccggaccccatcgtggcctccgaggaggcatcagaagtgcccctttggctggaccgaaaggagagtgcggtccctacaacacccgcacccctgcaaatctcccccttcacttcgcagccctatgtggcccacacactcccccagaggccagaacccggggagcctgggcctgacatggcccaggaggccccccaggaggacaccagccccatggccctgatggacaaaggtgagaatgagctgactgggtcagcctcagaggagagccaggagaccactacctccaccattatcaccaccacggtcatcaccaccgagcaggcaccagctctctgcagtgtgagcttctccaatcctgaggggtacattgactccagcgactacccactgctgcccctcaacaactttctggagtgcacatacaacgtgacagtctacactggctatggggtggagctccaggtgaagagtgtgaacctgtccgatggggaactgctctccatccgcggggtggacggccctaccctgaccgtcctggccaaccagacactcctggtggaggggcaggtaatccgaagccccaccaacaccatctccgtctacttccggaccttccaggacgacggccttgggaccttccagcttcactaccaggccttcatgctgagctgcaactttccccgccggcctgactctggggatgtcacggtgatggacctgcactcaggtggggtggcccactttcactgccacctgggctatgagctccagggcgctaagatgctgacatgcatcaatgcctccaagccgcactggagcagccaggagcccatctgctcagctccttgtggaggggcagtgcacaatgccaccatcggccgcgtcctctccccaagttaccctgaaaacacaaatgggagccaattctgcatctggacgattgaagctccagagggccagaagctgcacctgcactttgagaggctgttgctgcatgacaaggacaggatgacggttcacagcgggcagaccaacaagtcagctcttctctacgactcccttcaaaccgagagtgtcccttttgagggcctgctgagcgaaggcaacaccatccgcatcgagttcacgtccgaccaggcccgggcggcctccaccttcaacatccgatttgaagcgtttgagaaaggccactgctatgagccctacatccagaatgggaacttcactacatccgacccgacctataacattgggactatagtggagttcacctgcgaccccggccactccctggagcagggcccggccatcatcgaatgcatcaatgtgcgggacccatactggaatgacacagagcccctgtgcagagccatgtgtggtggggagctctctgctgtggctggggtggtattgtccccaaactggcccgagccctacgtggaaggtgaagattgtatctggaagatccacgtgggagaagagaaacggatcttcttagatatccagttcctgaatctgagcaacagtgacatcttgaccatctacgatggcgacgaggtcatgccccacatcttggggcagtaccttgggaacagtggcccccagaaactgtactcctccacgccagacttaaccatccagttccattcggaccctgctggcctcatctttggaaagggccagggatttatcatgaactacatagaggtatcaaggaatgactcctgctcggatttacccgagatccagaatggctggaaaaccacttctcacacggagttggtgcggggagccagaatcacctaccagtgtgaccccggctatgacatcgtggggagtgacaccctcacctgccagtgggacctcagctggagcagcgaccccccattttgtgagaaaattatgtactgcaccgaccccggagaggtggatcactcgacccgcttaatttcggatcctgtgctgctggtggggaccaccatccaatacacctgcaaccccggttttgtgcttgaagggagttctcttctgacctgctacagccgtgaaacagggactcccatctggacgtctcgcctgccccactgcgtttcggaggagtccctggcatgtgacaacccagggctgcctgaaaatggataccaaatcctgtacaagcgactctacctgccaggagagtccctcaccttcatgtgctacgaaggctttgagctcatgggtgaagtgaccatccgctgcatcctgggacagccatcccactggaacgggcccctgcccgtgtgtaaagtagcagaagcggcagcagagacgtcgctggaaggggggaacatggccctggctatcttcatcccggtcctcatcatctccttactgctgggaggagcctacatttacatcacaagatgtcgctactattccaacctccgcctgcctctgatgtactcccacccctacagccagatcaccgtggaaaccgagtttgacaaccccatttacgagacaggggaaaccagagagtatgaggtttctatctaaagagagctacacttgagaaggggacttgtgaactcaaccacaatctcctcgagacattcatccagagaccatgtggcacttgattgaaaccccagaatgtcgactgtcttttgtttagactctttatcaaaggtttactgttttcttccctgtatttattatatttaaaagtgaaataggtgtgggtttggatgtttcgcggcctcagccaaattcatgttacagcctcaattctgaaggcaggtggaagacttgcaaaatggcaaaccgcggcagcaaaaacacaaaacagcagatggagtttctcccatcagcaatgccatgctaaggctgcattgaattgcatgcatctttgggaaccatgcccatgatgttttcagtacaaatctaagtcccaagattaggttggaaagggtatttcttgttggcttagtttgggttggaatttagcatgggtacttaaacccatttggagagctgtgctcctaaacaaattctgtgtcctctcttcccattttgccagcttctgaaaggtttttccacagcccctccctctcacggttcttctgaaggtagcaaaggtgttatataaacattgtcttttaccactctggcctcgctggacagtgacaaaacaagaaaacgttttctttctagaaaggtgataaacgaccaaaggcaatttttcagagacaaatgagagatttgagagttccaatgaagaattgggtgagggggatcattgggtaagggaattgggttaaaatgttcttttctttgacactctttcaatgatgaaagagcgtgtaatttatgctacaagtgccagaatcgatcaccatgttcagcaagccactctcaagctgtggtaataaacacacaggcttgggaggcaccagcggccccactcatacagtgacaaggatttgtgatgggaaaaaggaggtgccatgtttggaaatgcaggggtgagctctggtttctcctggggttctggaatatctcagccctcaaaatagaggagactcaagtgcactgattctctaaaaggtgtcatcttcagaatatacttgccatcaagtatttcagggggcgggagggtcccatgagaagaaactatttttctattctccaaagctgtctggatgttggagggtggtgtgaatgctgactgaggaggtgcagagaacaggggcaggggattttaaatcacagcagaccatccagtggaatcctgtatcatctgatctgaacatcaatgaagacagagagaggaatttcattcagaaaggattccatagccccacatctagtcacacgggcattcctcttattttatcagggtctgttttcccccaacccagtgaaaccggtgagtgtgtaactcttgggaagattcttttctaaatacaggtataaagagaaggtggagggtgcgggtgcatggaagaaatactatgtgtgaagcagattcaccttcctgggaccggtgacatggtggtgacagtcaatggcttggacagacagacgggcacagtggcatttggaaccctctttggtgccctcccattctctctggaattgtttcaagtctgctggttttcaaacaagaaaagacctttctggccatagggagaatagcagggagtctatgttttggtggttacattggaaacatcttaagcaagatagggaaagttgattttaggcacacatgtaccctccttgacagcaggaactcagacttcaatcttgggggtctaagaccagaatattttccttctgccagaaaagaatcttgcacatatactcctgaaggcatgagtgtgtggtccatggcaagaaatagctaaaggctgctttccaggacccaaagccccatttaatgcaagaaccagagaagtgttctaggccattagtggacaatgtcatgtttggagaaagataacaacacaaataatgtaacctttccttaaaaggcagaactcaatccattttatttgatgcttattctaaccctaaccctgggtcacctggaatgaagaactctatgaataatatttgattttacaacgtgttatggttatgtgaaaactaaacatttgccttttataaagactgacaaaatataaatctttattctaaccctatccccaaaactagccaggccacaccccagatgttcttattgactattggaaagatagaaaaggcgttgtgttttttgtttttttgttgttgttgtcattgttgtttttttcagaagaccagtgtctcagttctgtcttagtagtaccacacccgtaaccgtgttttaaaagtttgttttagcctagagacagatcatacgagttcaacaatgtacagtgtgattgaaaagacaggttggtgtctatttttctttttaaaatatctgaatgtgtatttgtaatacgtaaaggtaaaaaaaaatagtgccaaaaatgtgcaaggcatctcattacagctcatgtacgtctgtttttataagatcaatattaaaacccattgggattaaatatttttgaataggatacactcttgagaaactcgagaatggactgagccttcctacaagccactctttgtttttaaaacagtggggaaatacgtttacagagattgtgagcttcagagaatgcatgtgatggtgtgtattacatgctaattcatataagctgtatctgtcagctaccaccctgtgctttaaaaatgcacacactcaaccctctttagcttggagctcagctttttgcttttttttttttttttttgtagaattatttagctaacataagtattctgattgctacctgatggccattcttacttagtttcatagatgtgctttaactatgatcctttgaagctcaccccttggagagcctacagaacctcaggctgatagctttgaagactgccaaacagcccagaaggaagcaaagcatctgcataatcaggagggttgtataacaagtagtgatttggcaaatatgtgggtagctttaggctgaggcacgggcctcaggcaaaaatgcccttcgagtgaatccgaagggcatgatcttcctatgtccttgactaggcatgacgagtcatttgaggtcagatattatttgagttgttcagcacccccaaaggtaggcattctcctgggaaattttcatttccattttatcgccaaacaaaataaaaagcaaaacaaactttctaagctagaataatgaaattaagtcattttccactttgtatatattgatgctaataaaacagatg

SEQ ID NO: 27398 - DNA, 3444 bp, Homo sapiens
  source 1..3444: mol_type = unassigned DNA
gcgcccggcgcagctcggccagagcgaccgcggggctgagcgcgcgtccgcccagggggctccggaagctgccccggcccgcggcctcctccctcgctcccgcttcccctttctcgctcaccgccgccctccttccccagctccctcgccgtccgcccgccccacagccagcggctccgcgccccctgcagccacgatgcccgcggcccggccgcccgccgcgggactccgcgggatctcgctgttcctcgctctgctcctggggagcccggcggcagcgctggagcgagatgctcttcccgagggagatgctagccctttgggtccttacctcctgccctcaggagccccggagagaggcagtcctggcaaagagcaccctgaagagagagtggtaacagcgccccccagttcctcacagtcggcggaagtgctgggcgagctggtgctggatgggaccgcaccctctgcacatcacgacatcccagccctgtcaccgctgcttccagaggaggcccgccccaagcacgccttgccccccaagaagaaactgccttcgctcaagcaggtgaactctgccaggaagcagctgaggcccaaggccacctccgcagccactgtccaaagggcagggtcccagccagcgtcccagggcctagatctcctctcctcctccacggagaagcctggcccaccgggggacccggaccccatcgtggcctccgaggaggcatcagaagtgcccctttggctggaccgaaaggagagtgcggtccctacaacacccgcacccctgcaaatctcccccttcacttcgcagccctatgtggcccacacactcccccagaggccagaacccggggagcctgggcctgacatggcccaggaggccccccaggaggacaccagccccatggccctgatggacaaaggtgagaatgagctgactgggtcagcctcagaggagagccaggagaccactacctccaccattatcaccaccacggtcatcaccaccgagcaggcaccagctctctgcagtgtgagcttctccaatcctgaggggtacattgactccagcgactacccactgctgcccctcaacaactttctggagtgcacatacaacgtgacagtctacactggctatggggtggagctccaggtgaagagtgtgaacctgtccgatggggaactgctctccatccgcggggtggacggccctaccctgaccgtcctggccaaccagacactcctggtggaggggcaggtaatccgaagccccaccaacaccatctccgtctacttccggaccttccaggacgacggccttgggaccttccagcttcactaccaggccttcatgctgagctgcaactttccccgccggcctgactctggggatgtcacggtgatggacctgcactcaggtggggtggcccactttcactgccacctgggctatgagctccagggcgctaagatgctgacatgcatcaatgcctccaagccgcactggagcagccaggagcccatctgctcagctccttgtggaggggcagtgcacaatgccaccatcggccgcgtcctctccccaagttaccctgaaaacacaaatgggagccaattctgcatctggacgattgaagctccagagggccagaagctgcacctgcactttgagaggctgttgctgcatgacaaggacaggatgacggttcacagcgggcagaccaacaagtcagctcttctctacgactcccttcaaaccgagagtgtcccttttgagggcctgctgagcgaaggcaacaccatccgcatcgagttcacgtccgaccaggcccgggcggcctccaccttcaacatccgatttgaagcgtttgagaaaggccactgctatgagccctacatccagaatgggaacttcactacatccgacccgacctataacattgggactatagtggagttcacctgcgaccccggccactccctggagcagggcccggccatcatcgaatgcatcaatgtgcgggacccatactggaatgacacagagcccctgtgcagagccatgtgtggtggggagctctctgctgtggctggggtggtattgtccccaaactggcccgagccctacgtggaaggtgaagattgtatctggaagatccacgtgggagaagagaaacggatcttcttagatatccagttcctgaatctgagcaacagtgacatcttgaccatctacgatggcgacgaggtcatgccccacatcttggggcagtaccttgggaacagtggcccccagaaactgtactcctccacgccagacttaaccatccagttccattcggaccctgctggcctcatctttggaaagggccagggatttatcatgaactacatagaggtatcaaggaatgactcctgctcggatttacccgagatccagaatggctggaaaaccacttctcacacggagttggtgcggggagccagaatcacctaccagtgtgaccccggctatgacatcgtggggagtgacaccctcacctgccagtgggacctcagctggagcagcgaccccccattttgtgagaaaattatgtactgcaccgaccccggagaggtggatcactcgacccgcttaatttcggatcctgtgctgctggtggggaccaccatccaatacacctgcaaccccggttttgtgcttgaagggagttctcttctgacctgctacagccgtgaaacagggactcccatctggacgtctcgcctgccccactgcgtttcggaggagtccctggcatgtgacaacccagggctgcctgaaaatggataccaaatcctgtacaagcgactctacctgccaggagagtccctcaccttcatgtgctacgaaggctttgagctcatgggtgaagtgaccatccgctgcatcctgggacagccatcccactggaacgggcccctgcccgtgtgtaaagttaatcaagacagttttgaacatgctttagaagcagaagcggcagcagagacgtcgctggaaggggggaacatggccctggctatcttcatcccggtcctcatcatctccttactgctgggaggagcctacatttacatcacaagatgtcgctactattccaacctccgcctgcctctgatgtactcccacccctacagccagatcaccgtggaaaccgagtttgacaaccccatttacgagacaggggaaaccagagagtatgaggtttctatctaaagagagctacacttgagaaggggacttgtgaactcaaccacaatctcctcgagacattcatccagagaccatgtggcacttgattgaaaccccagaatgtcgactgtcttttgtttagactctttatcaaaggtttactgttttcttccctgtatttattatatttaaaagtgaaa

SEQ ID NO: 27399 - DNA, 267 bp, Homo sapiens
  source 1..267: mol_type = unassigned DNA
taccatttctatgggtttggcaccgatgtagattatgaaactgcatttattcattaccgtctggcttctgagcagcaacacagtgcacaagctatgtttaatctgggatatatgcatgagaaaggactgggcattaaacaggatattcaccttgcgaaacgtttttatgacatggcagctagccagcccagatgcacaagttccagtcttcctagccctctgcaaattgggcgtcgtctatttcttgcagtacatacgggaaacaaa

SEQ ID NO: 27400 - DNA, 7925 bp, Homo sapiens
  source 1..7925: mol_type = unassigned DNA
gcggaggaaggagactagagcaggaagagcagcggcgaggcggcggtggtggctgagtccgtggtggcagaggcgaaggcgacagctctaggggttggcaccggccccgagaggaggatgcgggtccggatagggctgacgctgctgctgtgtgcggtgctgctgagcttggcctcggcgtcctcggatgaagaaggcagccaggatgaatccttagattccaagactactttgacatcagatgagtcagtaaaggaccatactactgcaggcagagtagttgctggtcaaatatttcttgattcagaagaatctgaattagaatcctctattcaagaagaggaagacagcctcaagagccaagagggggaaagtgtcacagaagatatcagctttctagagtctccaaatccagaaaacaaggactatgaagagccaaagaaagtacggaaaccagctttgaccgccattgaaggcacagcacatggggagccctgccacttcccttttcttttcctagataaggagtatgatgaatgtacatcagatgggagggaagatggcagactgtggtgtgctacaacctatgactacaaagcagatgaaaagtggggcttttgtgaaactgaagaagaggctgctaagagacggcagatgcaggaagcagaaatgatgtatcaaactggaatgaaaatccttaatggaagcaataagaaaagccaaaaaagagaagcatatcggtatctccaaaaggcagcaagcatgaaccataccaaagccctggagagagtgtcatatgctcttttatttggtgattacttgccacagaatatccaggcagcgagagagatgtttgagaagctgactgaggaaggctctcccaagggacagactgctcttggctttctgtatgcctctggacttggtgttaattcaagtcaggcaaaggctcttgtatattatacatttggagctcttgggggcaatctaatagcccacatggttttgggttacagatactgggctggcatcggcgtcctccagagttgtgaatctgccctgactcactatcgtcttgttgccaatcatgttgctagtgatatctcgctaacaggaggctcagtagtacagagaatacggctgcctgatgaagtggaaaatccaggaatgaacagtggaatgctagaagaagatttgattcaatattaccagttcctagctgaaaaaggtgatgtacaagcacaggttggtcttggacaactgcacctgcacggagggcgtggagtagaacagaatcatcagagagcatttgactacttcaatttagcagcaaatgctggcaattcacatgccatggcctttttgggaaagatgtattcggaaggaagtgacattgtacctcagagtaatgagacagctctccactactttaagaaagctgctgacatgggcaacccagttggacagagtgggcttggaatggcctacctctatgggagaggagttcaagttaattatgatctagcccttaagtatttccagaaagctgctgaacaaggctgggtggatgggcagctacagcttggttccatgtactataatggcattggagtcaagagagattataaacaggccttgaagtattttaatttagcttctcagggaggccatatcttggctttctataacctagctcagatgcatgccagtggcaccggcgtgatgcgatcatgtcacactgcagtggagttgtttaagaatgtatgtgaacgaggccgttggtctgaaaggcttatgactgcctataacagctataaagatggcgattacaatgctgcagtgatccagtacctcctcctggctgaacagggctatgaagtggcacaaagcaatgcagcctttattcttgatcagagagaagcaagcattgtaggtgagaatgaaacttatcccagagctttgctacattggaacagggccgcctctcaaggctatactgtggctagaattaagctcggagactaccatttctatgggtttggcaccgatgtagattatgaaactgcatttattcattaccgtctggcttctgagcagcaacacagtgcacaagctatgtttaatctgggatatatgcatgagaaaggactgggcattaaacaggatattcaccttgcgaaacgtttttatgacatggcagctgaagccagcccagatgcacaagttccagtcttcctagccctctgcaaattgggcgtcgtctatttcttgcagtacatacgggaaacaaacattcgagatatgttcacccaacttgatatggaccagcttttgggacctgagtgggacctttacctcatgaccatcattgcgctgctgttgggaacagtcatagcttacaggcaaaggcagcaccaagacatgcctgcacccaggcctccagggccacggccagctccaccccagcaggaggggccaccagagcagcagccaccacagtaataggcactgggtccagccttgatcagtgacagcgaaggaagttatctgctgggaacacttgcatttgatttaggaccttggatcagtggtcacctcccagaagaggcacggcacaaggaagcattgaattcctaaagctgcttagaatctgatgcctttattttcagggataagtaactcttacctaaactgagctgaatgtttgtttcagtgccatatggaataacaactttcagtggcttttttttttcttttctggaaacatatgtgagacactcagagtaatgtctactgtatccagctatctttcttggatccttttggtcattatttcagtgtgcataagttcttaatgtcaaccatctttaaggtattgtgcatcgacactaaaaactgatcagtgtaaaaaggaaaacccagttgcaagtttaaacgtgttcgaaagtctgaaaatagaacttgccttttaagttaaaaaaaaaaaaagctatcttgaaaatgttttggaactgcgataactgagaaactcttaccagtccacatgcaattagacatattcagcatatttgttattttaaaagggagggttgggaggtttcttattggtgattgtcacacggtataccatactcctctccttcaaagaatgaaaggccttgttaaggagttttttgtgagctttacttctttggaatggaatatacttatgcaaaaccttgtgaactgactccttgcactaacgcgagtttgccccacctactctgtaatttgcttgtttgttttgaatatacagagccttgatccagaagccagaggatggactaagtgggagaaattagaaaacaaaacgaactctggttggggtactacgatcacagacacagacatacttttcctaaagttgaagcatttgttcccaggatttattttactttgcatttctttttgcacaaagaacacatcaccttcctgaattctttaaatatgaaatatcattgccagggtatggcttacagtgactactattataatactaaaactcagagaatcaaagatggattaaactcagtggttgatgaaagccaaaacctgtttgtactgttctatactattcaggtatctttttatttctgatagttttatattataatagaaagccagccactgcttagctatcatagtcaccattttctcactgttaacattaggaaaatcaaggctactatgcttcaggattgtctggttaaatagtatgggaaaaaaactgaagagtttcacataattacacacgtgaaataattaaagcttaaactgaatttgtatttcattttattgtcagatggtggtgttcaccagcctgtatcttgtctgagactgcattcgtatctgagcaggttttctatgcctactgatgtcagtatgtttatactaaccttcatgcttttttcccagaatccctcatctgccagaaaacttgaaaagtttattgcttgtagagttgtactgctttgatttttgaagttggggtagtagttagaactagatttaactagtctataatgaacatgaaggcttttatatatgaagttgtatacctttttgtgtttagagaattatgggaaacctggtaagcaaaactttcctcccagataattgcttccaaattcgaagagttagtcaccaagagagccatatgtatgaaagcgtatctgtgaaaggtaggaaacttaccccccctaagtgtaatgttgctttaggcaactcttgtaaatagtgagacttgtttggtctcttacatgtagagatttgagtgcagttggtacagtactttggtgtctccaccactgtcccttctccccgcttcaaaataagtgtaatccacggtagcagccacacttcctttagaaggaactgttataatttatttaaaagttgaaaaaccacccaagatgactaccaactttcacttttttcttctgccatccaccctcatttttcctttagcaagatttttatatctaactttccttccctccattgagtacgtgctttgagaaaacatttcttaaaacagtgtgtgccacctaaggctggatgggaaagtgcagtcttgttgttcatataaaaacacacttcttattagtttaccacttgcctttttctattgttaatgttctgaatttccttttcttggcttgtttctacttcattttaccctgggtcacttgctgccagcagtttgtgaatggtgtctttcaaataacttagttcttatggcttcacttaaagactgtctcaaaaatactttgctctcttcttcttttttgttcatgggacatggtacctaagcaaataggagttgggtttggtttttctcctaaaataatgctcaatacttacctaatcaaatggcatccatttgaataaaatgacaataactaaagctagttaatgtcagtgacattaaactaactccaggattcaggagttttaatgttagaatttagatttaacagatagagtgtggcttcatttgtccatggtagcccatctctcctaagaccttttctagtctgtcttcctgccttcgaacttgatgacagtaaaaccctgtttagtattctcttgtgcatttggtttgttggttagccgactgtcttgaaactattcattttgcttctagttttattttacagaggtagcattggtgggtttttttttttttttctgtctctgtgtttgaagtttcagtttctgttttctaggtaaggcttatttttgattagcagtcaatggcaaagaaaaagtaaatcaaagatgacttcttttcaaaatgtattgtttagcacttaactcagatgaatttataaattattaatcttgatactaaggatttgttacttttttgcatattaggttaatttttaccttacatgtgagagtcttaccactaagccattctgtctctgtactgttgggaagttttggaaacccctgccagtgatctggtgatgatctgatgatttatttaaagagccgttgatgcctccaggaaacttaagtattttattaatatatatataggaatttttttttattttgctttgtctttctctcccttcttttatcctcatgttcattcttcaaaccagtgttttggaagtatgcatgcaggcctataaatgaaaaacacaattctttatgtgtatagcatgtgtattaatgtctaactacatacgcaaaaacttcctttacagaggttcggactaacatttcacatgcacatttcaaaacaagatgtgtcatgaaaacagcccctttacctgccaagacaagcagggctatatttcagtgacagctgatatttgttttgaaagtgaatctcataatatatatatgtattacacattattatgactagaagtatgtaagaaatgatcagaacaaaagaaaatttctattttcatgcaaatatttttcatcagtcatcactctcaaatataaattaaaatataacactcctgaatgcctgaggcacgatctggattttaaatgtgtggtattcattgaaaagaagctctccacccacttggtatttcaagaaaatttaaaacgatcccaaggaaagatgatttgtatgttaaagtgactgcacaagtaaaagtccaatgttgtgtgcatgaaaaggattccttggttatgtgcagggaatcatctcacatgctgtttttcctatttggtttgagaaacaggctgacactattctctttgattagaaaataaactcataaaactcataatgttgatataatcaagatgtaaccactataaatatgtagaagaggaagttttaaaagaccttaagctggcattgtgaaggaacaccatggtagactctttttgtaaatgtattttgtatttaatgaaatgcagtataaaggttggtgaagtgtaatataattgtgtaaacaaatcctgttaatagagagatgtacagaatcgttttgtactgtatcttgaaacttgtgaaataaagattccacctctggttatcctgtatgctgtaatataccacaaccaagcacctttccagacagactttttttaagctgaatgattcaattttttaatgttttttggaaattcagaagcttctgaaaacattcacttgtggcaatttgaatttatctttcattttaaactcctgaaattcagatttttacaagtccaatattgccctagggagaacatgaatttgctaagaaatgttatcttttaaatctctgatatctttgtcttgaagcagccttgatatgtagtaagcgtgattcactttagcctgattataatattatttatctaaagtttgtttatgcattgccttgtcccaggaattttttaagaggacttgcagagacacgtaccacacagtaacatttagactaaatatgctctgagtaaaggagaaatgaaaaaatattaaatcaagagtgaacatgtacacaaagtgcaattggaagtgggctacaaatttggcccccagcttcccagcaggcaactcaaagaggtaactgaggtaaaatgttccagctcagaagcattggatcttggataaaaagcctacatgatgcaaactgtggcaactgagatgtcagatctcaagatctcaaattgtacttgtgggagcacagtcagtgaccccagatgaccttgactgacctaaaagttgtgggggaagtcggatgtcagagccttaacaccagcaggtgaccatccaacctggggcaatgcctgcctgttcaccacttagcctctttctggcaagtcattagaatgtcctccatcttcattggctgcaacttgatgagctacagcctctttcctaacttcctttatgatgctagtttaggttggttataccagcttggaagtatgcttagattaagttacagcagatacacaaattagatgcaagtaaaaaaaatcagaatttctgtagtagaaactacgaaaaataaaaaggaaagtttttactttttgggtatttttttacgaataagaaaaagtgagcgttaatcagttcaaaaggaggtactgctgtgtaatgggctttgtacgttccttctcatgtcacttacgtcactacttcgccatcaaattgaacaagcttttaattagatcctgaaaattcactatgctagtagtttattggtagtattatattttgagtagaactctgattttccctagaggccaaattctttttatctgggttaatttcttttaaacataacaatgttaatgctgaattgtatattaaatcccatttctaaaaaccacacaattttttctcatgtaagttgagtggaatgtggttagttaactgaatttggaatgttcatataaataatttgttgctgctc

SEQ ID NO: 27401 - DNA, 1631 bp, Homo sapiens
  source 1..1631: mol_type = unassigned DNA
gcagcggcgaggcggcggtggtggctgagtccgtggtggcagaggcgaaggcgacagctctaggggttggcaccggccccgagaggaggatgcgggtccggatagggctgacgctgctgctgtgtgcggtgctgctgagcttggcctcggcgtcctcggatgaagaaggcagccaggatgaatccttagattccaagactactttgacatcagatgagtcagtaaaggaccatactactgcaggcagagtagttgctggtcaaatatttcttgattcagaagaatctgaattagaatcctctattcaagaagaggaagacagcctcaagagccaagagggggaaagtgtcacagaagatatcagctttctagagtctccaaatccagaaaacaaggactatgaagagccaaagaaagtacggaaaccagctttgaccgccattgaaggcacagcacatggggagccctgccacttcccttttcttttcctagataaggagtatgatgaatgtacatcagatgggagggaagatggcagactgtggtgtgctacaacctatgactacaaagcagatgaaaagtggggcttttgtgaaactgaagaagaggctgctaagagacggcagatgcaggaagcagaaatgatgtatcaaactggaatgaaaatccttaatggaagcaataagaaaagccaaaaaagagaagcatatcggtatctccaaaaggcagcaagcatgaaccataccaaagccctggagagagtgtcatatgctcttttatttggtgattacttgccacagaatatccaggcagcgagagagatgtttgagaagctgactgaggaaggctctcccaagggacagactgctcttggctttctgtatgcctctggacttggtgttaattcaagtcaggcaaaggctcttgtatattatacatttggagctcttgggggcaatctaatagcccacatggttttggtaagtagactttagtggaaggctaataatattaacatcagaagaatttgtggtttatagcggccacaactttttcagctttcatgatccagatttgcttgtattaagaccaaatattcagttgaacttccttcaaattcttgttaatggatataacacatggaatctacatgtaaatgaaagttggtggagtccacaatttttctttaaaatgattagtttggctgattgcccctaaaaagagagatctgataaatggctctttttaaattttctctgagttggaattgtcagaatcattttttacattagattatcataattttaaaaatttttctttagtttttcaaaattttgtaaatggtggctatagaaaaacaacatgaaatattatacaatattttgcaacaatgccctaagaattgttaaaattcatggagttatttgtgcagaatgactccagagagctctactttctgttttttacttttcatgattggctgtcttcccatttattctggtcatttattgctagtgacactgtgcctgcttccagtagtctcattttccctattttgctaatttgttactttttctttgctaatttggaagattaactcatttttaataaaattatgtctaagattaaaa

SEQ ID NO: 27402 - DNA, 2224 bp, Homo sapiens
  source 1..2224: mol_type = unassigned DNA
ctgagaagaggagctcttgggccaatcacctagtttctgcctgtgttacagtgaagagaagctgcttaagagaagatgaagcccttgtctctgttaatagagatattgataattcttggggtcacaattaaaactatcaaagcagaggaacataataaaagacaaaaggaaagaaatgtcaccacacaggtatcagtgaacgaaatcaaacaatatttatcacacatattggaacaaagaacatctagtaatgtaatcaataaaagagaaaatctcctggagaaaaagaagaatcaacgtaaaataagaataaaaggaattcaaaataaagatatcttgaagagaaataagaatcatttacaaaagcaagcagagaaaaattttacagatgaaggagaccagctatttaagatgggcatcaaggttctccagcagtctaaaagccaaaaacaaaaagaagaagcctacctactttttgccaaagcagctgacatgggaaacttgaaagctatggagaaaatggctgacgctttgctatttggaaattttggcgtgcaaaatataacagcagctatccaattatatgagtccttggctaaagaaggatcatgtaaagcccaaaacgcattaggatttttgtcttcttatggaataggaatggaatatgatcaagctaaggcactgatatattacacctttggaagtgctggaggaaacatgatgtcccagatgattttggggtacagatatttgtcgggaatcaatgttctacagaattgtgaagttgccctaagttattacaagaaagtggcagattatattgctgacacatttgaaaaaagtgaaggtgttccagtggaaaaagtgagactaacggaaagacctgaaaatctgagttctaacagtgagattttggattgggacatataccaatactataaatttttggcagaaagaggagatgttcagatacaagtctctcttggacaattacatctaattggcaggaaaggtctagatcaggattactacaaagcattacactacttcttaaaggcagcaaaggccgggagtgcaaatgccatggcatttataggaaagatgtatttagaggggaatgctgccgtgccgcaaaataacgctactgccttcaagtacttttccatggcagccagtaagggcaatgcaatcggccttcatgggcttggtcttctttactttcatggaaaaggagttcccctgaattatgccgaagcacttaaatactttcagaaagctgcggaaaaagggtggcccgacgcacagttccagttaggcttcatgtactactctggctctggaatatggaaggattataaacttgccttcaaatatttttacctggcatctcagagtgggcagccccttgccatttattatctggccaagatgtatgcaacaggaacaggagtagtaagatcatgcagaactgctgtggagctttataaaggtgtctgtgaactaggccactgggctgagaaattcctgacagcttactttgcctataaggatggtgatatagattcttctcttgttcagtatgcactgcttgcagaaatggggtatgaagtagctcaaagcaattcagcattcattttggaatctaaaaaggctaacattcttgaaaaagagaagatgtatccaatggcgcttctcctatggaatcgagctgccattcaaggcaatgcatttgctagagtaaaaattggagattaccattactatggctatgggactaagaaagactatcaaacagcagccacacactacagcattgcagccaacaaataccacaacgcgcaagccatgttcaatctggcttatatgtatgaacacggcttaggcatcacaaaggacattcacttggccagaagattgtacgacatggctgctcaaacgagtccagatgcccacatacctgtgctctttgccgtcatgaaactggaaactacgcatttgctccgggatatcctgttttttaatttcacaacgagatggaactggctgaaactggacaacaccattggaccacactgggacttatttgtgattggcctcattgttcctgggctgattttgttgcttagaaatcaccatgggtaggatgcggatcacaggaaaacctgctcacgggaatcagttcactccaaggtatccccactaaataaacagtttcccatccaaa

SEQ ID NO: 27403 - DNA, 1892 bp, Homo sapiens
  source 1..1892: mol_type = unassigned DNA
acagtccctgagaagaggagctcttgggccaatcacctagtttctgcctgtgttacagtgaagagaagctgcttaagagaagatgaagcccttgtctctgttaatagagatattgataattcttggggtcacaattaaaactatcaaagcagaggaacataataaaagacaaaaggaaagaaatgtcaccacacaggtatcagtgaacgaaatcaaacaatatttatcacacatattggaacaaagaacatctagtaatgtaatcaataaaagagaaaatctcctggagaaaaagaagaatcaacgtaaaataagaataaaaggaattcaaaataaagatatcttgaagagaaataagaatcatttacaaaagcaagcagagaaaaattttacagatgaaggagaccagctatttaagatgggcatcaaggttctccagcagtctaaaagccaaaaacaaaaagaagaagcctacctactttttgccaaagcagctgacatgggaaacttgaaagctatggagaaaatggctgacgctttgctatttggaaattttggcgtgcaaaatataacagcagctatccaattatatgagtccttggctaaagaaggatcatgtaaagcccaaaacgcattaggatttttgtcttcttatggaataggaatggaatatgatcaagctaaggcactgatatattacacctttggaagtgctggaggaaacatgatgtcccagatgattttggggtacagatatttgtcgggaatcaatgttctacagaattgtgaagttgccctaagttattacaagaaagtggcagattatattgctgacacatttgaaaaaagtgaaggtgttccagtggaaaaagtgagactaacggaaagacctgaaaatctgagttctaacagtgagattttggattgggacatataccaatactataaatttttggcagaaagaggagatgttcagatacaagtctctcttggacaattacatctaattggcaggaaaggtctagatcaggattactacaaagcattacactacttcttaaaggcagcaaaggccgggagtgcaaatgccatggcatttataggaaagatgtatttagaggggaatgctgccgtgccgcaaaataacgctactgccttcaagtacttttccatggcagccagtaagggcaatgcaatcggccttcatgggcttggtcttctttactttcatggaaaaggagttcccctgaattatgccgaagcacttaaatactttcagaaagctgcggaaaaagggtggcccgacgcacagttccagttaggcttcatgtactactctggctctggaatatggaaggattataaacttgccttcaaatatttttacctggcatctcagagtgggcagccccttgccatttattatctggccaagatgtatgcaacaggaacaggagtagtaagatcatgcagaactgctgtggagaaaaggctaacattcttgaaaaagagaagatgtatccaatggcgcttctcctatggaatcgagctgccattcaaggacattcacttggccagaagattgtacgacatggctgctcaaacgagtccagatgcccacatacctgtgctctttgccgtcatgaaactggaaactacgcatttgctccgggatatcctgttttttaatttcacaacgagatggaactggctgaaactggacaacaccattggaccacactgggacttatttgtgattggcctcattgttcctgggctgattttgttgcttagaaatcaccatgggtaggatgcggatcacaggaaaacctgctcacgggaatcagttcactccaaggtatccccactaaataaacagtttcccatccaaa

SEQ ID NO: 27404 - DNA, 3857 bp, Homo sapiens
  source 1..3857: mol_type = unassigned DNA
ttcacatcaaaactcctatactgacctgagacagaggcagcagtgatacccacctgagagatcctgtgtttgaacaactgcttcccaaaacggaaagtatttcaagcctaaacctttgggtgaaaagaactcttgaagtcatgattgcttcacagtttctctcagctctcactttggtgcttctcattaaagagagtggagcctggtcttacaacacctccacggaagctatgacttatgatgaggccagtgcttattgtcagcaaaggtacacacacctggttgcaattcaaaacaaagaagagattgagtacctaaactccatattgagctattcaccaagttattactggattggaatcagaaaagtcaacaatgtgtgggtctgggtaggaacccagaaacctctgacagaagaagccaagaactgggctccaggtgaacccaacaataggcaaaaagatgaggactgcgtggagatctacatcaagagagaaaaagatgtgggcatgtggaatgatgagaggtgcagcaagaagaagcttgccctatgctacacagctgcctgtaccaatacatcctgcagtggccacggtgaatgtgtagagaccatcaataattacacttgcaagtgtgaccctggcttcagtggactcaagtgtgagcaaattgtgaactgtacagccctggaatcccctgagcatggaagcctggtttgcagtcacccactgggaaacttcagctacaattcttcctgctctatcagctgtgataggggttacctgccaagcagcatggagaccatgcagtgtatgtcctctggagaatggagtgctcctattccagcctgcaatgtggttgagtgtgatgctgtgacaaatccagccaatgggttcgtggaatgtttccaaaaccctggaagcttcccatggaacacaacctgtacatttgactgtgaagaaggatttgaactaatgggagcccagagccttcagtgtacctcatctgggaattgggacaacgagaagccaacgtgtaaagctgtgacatgcagggccgtccgccagcctcagaatggctctgtgaggtgcagccattcccctgctggagagttcaccttcaaatcatcctgcaacttcacctgtgaggaaggcttcatgttgcagggaccagcccaggttgaatgcaccactcaagggcagtggacacagcaaatcccagtttgtgaagctttccagtgcacagccttgtccaaccccgagcgaggctacatgaattgtcttcctagtgcttctggcagtttccgttatgggtccagctgtgagttctcctgtgagcagggttttgtgttgaagggatccaaaaggctccaatgtggccccacaggggagtgggacaacgagaagcccacatgtgaagctgtgagatgcgatgctgtccaccagcccccgaagggtttggtgaggtgtgctcattcccctattggagaattcacctacaagtcctcttgtgccttcagctgtgaggagggatttgaattacatggatcaactcaacttgagtgcacatctcagggacaatggacagaagaggttccttcctgccaagtggtaaaatgttcaagcctggcagttccgggaaagatcaacatgagctgcagtggggagcccgtgtttggcactgtgtgcaagttcgcctgtcctgaaggatggacgctcaatggctctgcagctcggacatgtggagccacaggacactggtctggcctgctacctacctgtgaagctcccactgagtccaacattcccttggtagctggactttctgctgctggactctccctcctgacattagcaccatttctcctctggcttcggaaatgcttacggaaagcaaagaaatttgttcctgccagcagctgccaaagccttgaatcagatggaagctaccaaaagccttcttacatcctttaagttcaaaagaatcagaaacaggtgcatctggggaactagagggatacactgaagttaacagagacagataactctcctcgggtctctggcccttcttgcctactatgccagatgcctttatggctgaaaccgcaacacccatcaccacttcaatagatcaaagtccagcaggcaaggacggccttcaactgaaaagactcagtgttccctttcctactctcaggatcaagaaagtgttggctaatgaagggaaaggatattttcttccaagcaaaggtgaagagaccaagactctgaaatctcagaattccttttctaactctcccttgctcgctgtaaaatcttggcacagaaacacaatattttgtggctttctttcttttgcccttcacagtgtttcgacagctgattacacagttgctgtcataagaatgaataataattatccagagtttagaggaaaaaaatgactaaaaatattataacttaaaaaaatgacagatgttgaatgcccacaggcaaatgcatggagggttgttaatggtgcaaatcctactgaatgctctgtgcgagggttactatgcacaatttaatcactttcatccctatgggattcagtgcttcttaaagagttcttaaggattgtgatatttttacttgcattgaatatattataatcttccatacttcttcattcaatacaagtgtggtagggacttaaaaaacttgtaaatgctgtcaactatgatatggtaaaagttacttattctagattaccccctcattgtttattaacaaattatgttacatctgttttaaatttatttcaaaaagggaaactattgtcccctagcaaggcatgatgttaaccagaataaagttctgagtgtttttactacagttgttttttgaaaacatggtagaattggagagtaaaaactgaatggaaggtttgtatattgtcagatattttttcagaaatatgtggtttccacgatgaaaaacttccatgaggccaaacgttttgaactaataaaagcataaatgcaaacacacaaaggtataattttatgaatgtctttgttggaaaagaatacagaaagatggatgtgctttgcattcctacaaagatgtttgtcagatatgatatgtaaacataattcttgtatattatggaagattttaaattcacaatagaaactcaccatgtaaaagagtcatctggtagatttttaacgaatgaagatgtctaatagttattccctatttgttttcttctgtatgttagggtgctctggaagagaggaatgcctgtgtgagcaagcatttatgtttatttataagcagatttaacaattccaaaggaatctccagttttcagttgatcactggcaatgaaaaattctcagtcagtaattgccaaagctgctctagccttgaggagtgtgagaatcaaaactctcctacacttccattaacttagcatgtgttgaaaaaaaagtttcagagaagttctggctgaacactggcaacaacaaagccaacagtcaaaacagagatgtgataaggatcagaacagcagaggttcttttaaaggggcagaaaaactctgggaaataagagagaacaactactgtgatcaggctatgtatggaatacagtgttattttctttgaaattgtttaagtgttgtaaatatttatgtaaactgcattagaaattagctgtgtgaaataccagtgtggtttgtgtttgagttttattgagaattttaaattataacttaaaatattttataatttttaaagtatatatttatttaagcttatgtcagacctatttgacataacactataaaggttgacaataaatgtgcttatgttt

SEQ ID NO: 27405 - DNA, 1518 bp, Homo sapiens
  source 1..1518: mol_type = unassigned DNA
gaaagtatttcaagcctaaacctttgggtgaaaagaactcttgaagtcatgattgcttcacagtttctctcagctctcactttggtgcttctcattaaagagagtggagcctggtcttacaacacctccacggaagctatgacttatgatgaggccagtgcttattgtcagcaaaggtacacacacctggttgcaattcaaaacaaagaagagattgagtacctaaactccatattgagctattcaccaagttattactggattggaatcagaaaagtcaacaatgtgtgggtctgggtaggaacccagaaacctctgacagaagaagccaagaactgggctccaggtgaacccaacaataggcaaaaagatgaggactgcgtggagatctacatcaagagagaaaaagatgtgggcatgtggaatgatgagaggtgcagcaagaagaagcttgccctatgctacacagctgcctgtaccaatacatcctgcagtggccacggtgaatgtgtagagaccatcaataattacacttgcaagtgtgaccctggcttcagtggactcaagtgtgagcaaattgtgaactgtacagccctggaatcccctgagcatggaagcctggtttgcagtcacccactgggaaacttcagctacaattcttcctgctctatcagctgtgataggggttacctgccaagcagcatggagaccatgcagtgtatgtcctctggagaatggagtgctcctattccagcctgcaatgtggttgagtgtgatgctgtgacaaatccagccaatgggttcgtggaatgtttccaaaaccctggaagcttcccatggaacacaacctgtacatttgactgtgaagaaggatttgaactaatgggagcccagagccttcagtgtacctcatctgggaattgggacaacgagaagccaacgtgtaaagctgtgacatgcagggccgtccgccagcctcagaatggctctgtgaggtgcagccattcccctgctggagagttcaccttcaaatcatcctgcaacttcacctgtgaggaaggcttcatgttgcagggaccagcccaggttgaatgcaccactcaagggcagtggacacagcaaatcccagtttgtgaagtggtaaaatgttcaagcctggcagttccgggaaagatcaacatgagctgcagtggggagcccgtgtttggcactgtgtgcaagttcgcctgtcctgaaggatggacgctcaatggctctgcagctcggacatgtggagccacaggacactggtctggcctgctacctacctgtgaagctcccactgagtccaacattcccttggtagctggactttctgctgctggactctccctcctgacattagcaccatttctcctctggcttcggaaatgcttacggaaagcaaagaaatttgttcctgccagcagctgccaaagccttgaatcagatggaagctaccaaaagccttcttacatcctttaagttcaaaagaatcag

SEQ ID NO: 27406 - DNA, 3389 bp, Homo sapiens
  source 1..3389: mol_type = unassigned DNA
aaagtatttcaagcctaaacctttgggtgaaaagaactcttgaagtcatgattgcttcacagtttctctcagctctcactttggtgcttctcattaaagagagtggagcctggtcttacaacacctccacggaagctatgacttatgatgaggccagtgcttattgtcagcaaaggtacacacacctggttgcaattcaaaacaaagaagagattgagtacctaaactccatattgagctattcaccaagttattactggattggaatcagaaaagtcaacaatgtgtgggtctgggtaggaacccagaaacctctgacagaagaagccaagaactgggctccaggtgaacccaacaataggcaaaaagatgaggactgcgtggagatctacatcaagagagaaaaagatgtgggcatgtggaatgatgagaggtgcagcaagaagaagcttgccctatgctacacagctgcctgtaccaatacatcctgcagtggccacggtgaatgtgtagagaccatcaataattacacttgcaagtgtgaccctggcttcagtggactcaagtgtgagcaaatggttgagtgtgatgctgtgacaaatccagccaatgggttcgtggaatgtttccaaaaccctggaagcttcccatggaacacaacctgtacatttgactgtgaagaaggatttgaactaatgggagcccagagccttcagtgtacctcatctgggaattgggacaacgagaagccaacgtgtaaagctgtgacatgcagggccgtccgccagcctcagaatggctctgtgaggtgcagccattcccctgctggagagttcaccttcaaatcatcctgcaacttcacctgtgaggaaggcttcatgttgcagggaccagcccaggttgaatgcaccactcaagggcagtggacacagcaaatcccagtttgtgaagctgtgagatgcgatgctgtccaccagcccccgaagggtttggtgaggtgtgctcattcccctattggagaattcacctacaagtcctcttgtgccttcagctgtgaggagggatttgaattacatggatcaactcaacttgagtgcacatctcagggacaatggacagaagaggttccttcctgccaagtggtaaaatgttcaagcctggcagttccgggaaagatcaacatgagctgcagtggggagcccgtgtttggcactgtgtgcaagttcgcctgtcctgaaggatggacgctcaatggctctgcagctcggacatgtggagccacaggacactggtctggcctgctacctacctgtgaagctcccactgagtccaacattcccttggtagctggactttctgctgctggactctccctcctgacattagcaccatttctcctctggcttcggaaatgcttacggaaagcaaagaaatttgttcctgccagcagctgccaaagccttgaatcagatggaagctaccaaaagccttcttacatcctttaagttcaaaagaatcagaaacaggtgcatctggggaactagagggatacactgaagttaacagagacagataactctcctcgggtctctggcccttcttgcctactatgccagatgcctttatggctgaaaccgcaacacccatcaccacttcaatagatcaaagtccagcaggcaaggacggccttcaactgaaaagactcagtgttccctttcctactctcaggatcaagaaagtgttggctaatgaagggaaaggatattttcttccaagcaaaggtgaagagaccaagactctgaaatctcagaattccttttctaactctcccttgctcgctgtaaaatcttggcacagaaacacaatattttgtggctttctttcttttgcccttcacagtgtttcgacagctgattacacagttgctgtcataagaatgaataataattatccagagtttagaggaaaaaaatgactaaaaatattataacttaaaaaaatgacagatgttgaatgcccacaggcaaatgcatggagggttgttaatggtgcaaatcctactgaatgctctgtgcgagggttactatgcacaatttaatcactttcatccctatgggattcagtgcttcttaaagagttcttaaggattgtgatatttttacttgcattgaatatattataatcttccatacttcttcattcaatacaagtgtggtagggacttaaaaaacttgtaaatgctgtcaactatgatatggtaaaagttacttattctagattaccccctcattgtttattaacaaattatgttacatctgttttaaatttatttcaaaaagggaaactattgtcccctagcaaggcatgatgttaaccagaataaagttctgagtgtttttactacagttgttttttgaaaacatggtagaattggagagtaaaaactgaatggaaggtttgtatattgtcagatattttttcagaaatatgtggtttccacgatgaaaaacttccatgaggccaaacgttttgaactaataaaagcataaatgcaaacacacaaaggtataattttatgaatgtctttgttggaaaagaatacagaaagatggatgtgctttgcattcctacaaagatgtttgtcagatatgatatgtaaacataattcttgtatattatggaagattttaaattcacaatagaaactcaccatgtaaaagagtcatctggtagatttttaacgaatgaagatgtctaatagttattccctatttgttttcttctgtatgttagggtgctctggaagagaggaatgcctgtgtgagcaagcatttatgtttatttataagcagatttaacaattccaaaggaatctccagttttcagttgatcactggcaatgaaaaattctcagtcagtaattgccaaagctgctctagccttgaggagtgtgagaatcaaaactctcctacacttccattaacttagcatgtgttgaaaaaaaagtttcagagaagttctggctgaacactggcaacaacaaagccaacagtcaaaacagagatgtgataaggatcagaacagcagaggttcttttaaaggggcagaaaaactctgggaaataagagagaacaactactgtgatcaggctatgtatggaatacagtgttattttctttgaaattgtttaagtgttgtaaatatttatgtaaactgcattagaaattagctgtgtgaaataccagtgtggtttgtgtttgagttttattgagaattttaaattataacttaaaatattttataatttttaaagtatatatttatttaagcttatgtcagacctatttgacataacactataaaggttgacaataaatgtgcttatgttt

SEQ ID NO: 27407 - DNA, 3576 bp, Homo sapiens
  source 1..3576: mol_type = unassigned DNA
gaaagtatttcaagcctaaacctttgggtgaaaagaactcttgaagtcatgattgcttcacagtttctctcagctctcactttggtgcttctcattaaagagagtggagcctggtcttacaacacctccacggaagctatgacttatgatgaggccagtgcttattgtcagcaaaggtacacacacctggttgcaattcaaaacaaagaagagattgagtacctaaactccatattgagctattcaccaagttattactggattggaatcagaaaagtcaacaatgtgtgggtctgggtaggaacccagaaacctctgacagaagaagccaagaactgggctccaggtgaacccaacaataggcaaaaagatgaggactgcgtggagatctacatcaagagagaaaaagatgtgggcatgtggaatgatgagaggtgcagcaagaagaagcttgccctatgctacacagctgcctgtaccaatacatcctgcagtggccacggtgaatgtgtagagaccatcaataattacacttgcaagtgtgaccctggcttcagtggactcaagtgtgagcaaattgtgaactgtacagccctggaatcccctgagcatggaagcctggtttgcagtcacccactgggaaacttcagctacaattcttcctgctctatcagctgtgataggggttacctgccaagcagcatggagaccatgcagtgtatgtcctctggagaatggagtgctcctattccagcctgcaatgtggttgagtgtgatgctgtgacaaatccagccaatgggttcgtggaatgtttccaaaaccctggaagcttcccatggaacacaacctgtacatttgactgtgaagaaggatttgaactaatgggagcccagagccttcagtgtacctcatctgggaattgggacaacgagaagccaacgtgtaaagctgtgacatgcagggccgtccgccagcctcagaatggctctgtgaggtgcagccattcccctgctggagagttcaccttcaaatcatcctgcaacttcacctgtgaggaaggcttcatgttgcagggaccagcccaggttgaatgcaccactcaagggcagtggacacagcaaatcccagtttgtgaagctgtgagatgcgatgctgtccaccagcccccgaagggtttggtgaggtgtgctcattcccctattggagaattcacctacaagtcctcttgtgccttcagctgtgaggagggatttgaattacatggatcaactcaacttgagtgcacatctcagggacaatggacagaagaggttccttcctgccaagtggtaaaatgttcaagcctggcagttccgggaaagatcaacatgagctgcagtggggagcccgtgtttggcactgtgtgcaagttcgcctgtcctgaaggatggacgctcaatggctctgcagctcggacatgtggagccacaggacactggtctggcctgctacctacctgtgaagctcccactgagtccaacattcccttggtagctggactttctgctgctggactctccctcctgacattagcaccatttctcctctggcttcggaaatgcttacggaaagcaaagaaatttgttcctgccagcagctgccaaagccttgaatcagatggaagctaccaaaagccttcttacatcctttaagttcaaaagaatcagaaacaggtgcatctggggaactagagggatacactgaagttaacagagacagataactctcctcgggtctctggcccttcttgcctactatgccagatgcctttatggctgaaaccgcaacacccatcaccacttcaatagatcaaagtccagcaggcaaggacggccttcaactgaaaagactcagtgttccctttcctactctcaggatcaagaaagtgttggctaatgaagggaaaggatattttcttccaagcaaaggtgaagagaccaagactctgaaatctcagaattccttttctaactctcccttgctcgctgtaaaatcttggcacagaaacacaatattttgtggctttctttcttttgcccttcacagtgtttcgacagctgattacacagttgctgtcataagaatgaataataattatccagagtttagaggaaaaaaatgactaaaaatattataacttaaaaaaatgacagatgttgaatgcccacaggcaaatgcatggagggttgttaatggtgcaaatcctactgaatgctctgtgcgagggttactatgcacaatttaatcactttcatccctatgggattcagtgcttcttaaagagttcttaaggattgtgatatttttacttgcattgaatatattataatcttccatacttcttcattcaatacaagtgtggtagggacttaaaaaacttgtaaatgctgtcaactatgatatggtaaaagttacttattctagattaccccctcattgtttattaacaaattatgttacatctgttttaaatttatttcaaaaagggaaactattgtcccctagcaaggcatgatgttaaccagaataaagttctgagtgtttttactacagttgttttttgaaaacatggtagaattggagagtaaaaactgaatggaaggtttgtatattgtcagatattttttcagaaatatgtggtttccacgatgaaaaacttccatgaggccaaacgttttgaactaataaaagcataaatgcaaacacacaaaggtataattttatgaatgtctttgttggaaaagaatacagaaagatggatgtgctttgcattcctacaaagatgtttgtcagatatgatatgtaaacataattcttgtatattatggaagattttaaattcacaatagaaactcaccatgtaaaagagtcatctggtagatttttaacgaatgaagatgtctaatagttattccctatttgttttcttctgtatgttagggtgctctggaagagaggaatgcctgtgtgagcaagcatttatgtttatttataagcagatttaacaattccaaaggaatctccagttttcagttgatcactggcaatgaaaaattctcagtcagtaattgccaaagctgctctagccttgaggagtgtgagaatcaaaactctcctacacttccattaacttagcatgtgttgaaaaaaaagtttcagagaagttctggctgaacactggcaacaacaaagccaacagtcaaaacagagatgtgataaggatcagaacagcagaggttcttttaaaggggcagaaaaactctgggaaataagagagaacaactactgtgatcaggctatgtatggaatacagtgttattttctttgaaattgtttaagtgttgtaaatatttatgtaaactgcattagaaattagctgtgtgaaataccagtgtggtttgtgtttgagttttattgagaattttaaattataacttaaaatattttataatttttaaagtatatatttatttaagcttatgtcagacctatttgacataacactataaaggttgacaataaatgtgcttatgttt

SEQ ID NO: 27408 - DNA, 3576 bp, Homo sapiens
  source 1..3576: mol_type = unassigned DNA
gaaagtatttcaagcctaaacctttgggtgaaaagaactcttgaagtcatgattgcttcacagtttctctcagctctcactttggtgcttctcattaaagagagtggagcctggtcttacaacacctccacggaagctatgacttatgatgaggccagtgcttattgtcagcaaaggtacacacacctggttgcaattcaaaacaaagaagagattgagtacctaaactccatattgagctattcaccaagttattactggattggaatcagaaaagtcaacaatgtgtgggtctgggtaggaacccagaaacctctgacagaagaagccaagaactgggctccaggtgaacccaacaataggcaaaaagatgaggactgcgtggagatctacatcaagagagaaaaagatgtgggcatgtggaatgatgagaggtgcagcaagaagaagcttgccctatgctacacagctgcctgtaccaatacatcctgcagtggccacggtgaatgtgtagagaccatcaataattacacttgcaagtgtgaccctggcttcagtggactcaagtgtgagcaaattgtgaactgtacagccctggaatcccctgagcatggaagcctggtttgcagtcacccactgggaaacttcagctacaattcttcctgctctatcagctgtgataggggttacctgccaagcagcatggagaccatgcagtgtatgtcctctggagaatggagtgctcctattccagcctgcaatgtggttgagtgtgatgctgtgacaaatccagccaatgggttcgtggaatgtttccaaaaccctggaagcttcccatggaacacaacctgtacatttgactgtgaagaaggatttgaactaatgggagcccagagccttcagtgtacctcatctgggaattgggacaacgagaagccaacgtgtaaagctgtgacatgcagggccgtccgccagcctcagaatggctctgtgaggtgcagccattcccctgctggagagttcaccttcaaatcatcctgcaacttcacctgtgaggaaggcttcatgttgcagggaccagcccaggttgaatgcaccactcaagggcagtggacacagcaaatcccagtttgtgaagctttccagtgcacagccttgtccaaccccgagcgaggctacatgaattgtcttcctagtgcttctggcagtttccgttatgggtccagctgtgagttctcctgtgagcagggttttgtgttgaagggatccaaaaggctccaatgtggccccacaggggagtgggacaacgagaagcccacatgtgaagtggtaaaatgttcaagcctggcagttccgggaaagatcaacatgagctgcagtggggagcccgtgtttggcactgtgtgcaagttcgcctgtcctgaaggatggacgctcaatggctctgcagctcggacatgtggagccacaggacactggtctggcctgctacctacctgtgaagctcccactgagtccaacattcccttggtagctggactttctgctgctggactctccctcctgacattagcaccatttctcctctggcttcggaaatgcttacggaaagcaaagaaatttgttcctgccagcagctgccaaagccttgaatcagatggaagctaccaaaagccttcttacatcctttaagttcaaaagaatcagaaacaggtgcatctggggaactagagggatacactgaagttaacagagacagataactctcctcgggtctctggcccttcttgcctactatgccagatgcctttatggctgaaaccgcaacacccatcaccacttcaatagatcaaagtccagcaggcaaggacggccttcaactgaaaagactcagtgttccctttcctactctcaggatcaagaaagtgttggctaatgaagggaaaggatattttcttccaagcaaaggtgaagagaccaagactctgaaatctcagaattccttttctaactctcccttgctcgctgtaaaatcttggcacagaaacacaatattttgtggctttctttcttttgcccttcacagtgtttcgacagctgattacacagttgctgtcataagaatgaataataattatccagagtttagaggaaaaaaatgactaaaaatattataacttaaaaaaatgacagatgttgaatgcccacaggcaaatgcatggagggttgttaatggtgcaaatcctactgaatgctctgtgcgagggttactatgcacaatttaatcactttcatccctatgggattcagtgcttcttaaagagttcttaaggattgtgatatttttacttgcattgaatatattataatcttccatacttcttcattcaatacaagtgtggtagggacttaaaaaacttgtaaatgctgtcaactatgatatggtaaaagttacttattctagattaccccctcattgtttattaacaaattatgttacatctgttttaaatttatttcaaaaagggaaactattgtcccctagcaaggcatgatgttaaccagaataaagttctgagtgtttttactacagttgttttttgaaaacatggtagaattggagagtaaaaactgaatggaaggtttgtatattgtcagatattttttcagaaatatgtggtttccacgatgaaaaacttccatgaggccaaacgttttgaactaataaaagcataaatgcaaacacacaaaggtataattttatgaatgtctttgttggaaaagaatacagaaagatggatgtgctttgcattcctacaaagatgtttgtcagatatgatatgtaaacataattcttgtatattatggaagattttaaattcacaatagaaactcaccatgtaaaagagtcatctggtagatttttaacgaatgaagatgtctaatagttattccctatttgttttcttctgtatgttagggtgctctggaagagaggaatgcctgtgtgagcaagcatttatgtttatttataagcagatttaacaattccaaaggaatctccagttttcagttgatcactggcaatgaaaaattctcagtcagtaattgccaaagctgctctagccttgaggagtgtgagaatcaaaactctcctacacttccattaacttagcatgtgttgaaaaaaaagtttcagagaagttctggctgaacactggcaacaacaaagccaacagtcaaaacagagatgtgataaggatcagaacagcagaggttcttttaaaggggcagaaaaactctgggaaataagagagaacaactactgtgatcaggctatgtatggaatacagtgttattttctttgaaattgtttaagtgttgtaaatatttatgtaaactgcattagaaattagctgtgtgaaataccagtgtggtttgtgtttgagttttattgagaattttaaattataacttaaaatattttataatttttaaagtatatatttatttaagcttatgtcagacctatttgacataacactataaaggttgacaataaatgtgcttatgttt

SEQ ID NO: 27409 - DNA, 3497 bp, Homo sapiens
  source 1..3497: mol_type = unassigned DNA
agctgttcttggctgacttcacatcaaaactcctatactgacctgagacagaggcagcagtgatacccacctgagagatcctgtgtttgaacaactgcttcccaaaacggaaagtatttcaagcctaaacctttgggtgaaaagaactcttgaagtcatgattgcttcacagtttctctcagctctcactttggtgcttctcattaaagagagtggagcctggtcttacaacacctccacggaagctatgacttatgatgaggccagtgcttattgtcagcaaaggtacacacacctggttgcaattcaaaacaaagaagagattgagtacctaaactccatattgagctattcaccaagttattactggattggaatcagaaaagtcaacaatgtgtgggtctgggtaggaacccagaaacctctgacagaagaagccaagaactgggctccaggtgaacccaacaataggcaaaaagatgaggactgcgtggagatctacatcaagagagaaaaagatgtgggcatgtggaatgatgagaggtgcagcaagaagaagcttgccctatgctacacagctgcctgtaccaatacatcctgcagtggccacggtgaatgtgtagagaccatcaataattacacttgcaagtgtgaccctggcttcagtggactcaagtgtgagcaaattgtgaactgtacagccctggaatcccctgagcatggaagcctggtttgcagtcacccactgggaaacttcagctacaattcttcctgctctatcagctgtgataggggttacctgccaagcagcatggagaccatgcagtgtatgtcctctggagaatggagtgctcctattccagcctgcaatgtggttgagtgtgatgctgtgacaaatccagccaatgggttcgtggaatgtttccaaaaccctggaagcttcccatggaacacaacctgtacatttgactgtgaagaaggatttgaactaatgggagcccagagccttcagtgtacctcatctgggaattgggacaacgagaagccaacgtgtaaagctgtgacatgcagggccgtccgccagcctcagaatggctctgtgaggtgcagccattcccctgctggagagttcaccttcaaatcatcctgcaacttcacctgtgaggaaggcttcatgttgcagggaccagcccaggttgaatgcaccactcaagggcagtggacacagcaaatcccagtttgtgaagtggtaaaatgttcaagcctggcagttccgggaaagatcaacatgagctgcagtggggagcccgtgtttggcactgtgtgcaagttcgcctgtcctgaaggatggacgctcaatggctctgcagctcggacatgtggagccacaggacactggtctggcctgctacctacctgtgaagctcccactgagtccaacattcccttggtagctggactttctgctgctggactctccctcctgacattagcaccatttctcctctggcttcggaaatgcttacggaaagcaaagaaatttgttcctgccagcagctgccaaagccttgaatcagatggaagctaccaaaagccttcttacatcctttaagttcaaaagaatcagaaacaggtgcatctggggaactagagggatacactgaagttaacagagacagataactctcctcgggtctctggcccttcttgcctactatgccagatgcctttatggctgaaaccgcaacacccatcaccacttcaatagatcaaagtccagcaggcaaggacggccttcaactgaaaagactcagtgttccctttcctactctcaggatcaagaaagtgttggctaatgaagggaaaggatattttcttccaagcaaaggtgaagagaccaagactctgaaatctcagaattccttttctaactctcccttgctcgctgtaaaatcttggcacagaaacacaatattttgtggctttctttcttttgcccttcacagtgtttcgacagctgattacacagttgctgtcataagaatgaataataattatccagagtttagaggaaaaaaatgactaaaaatattataacttaaaaaaatgacagatgttgaatgcccacaggcaaatgcatggagggttgttaatggtgcaaatcctactgaatgctctgtgcgagggttactatgcacaatttaatcactttcatccctatgggattcagtgcttcttaaagagttcttaaggattgtgatatttttacttgcattgaatatattataatcttccatacttcttcattcaatacaagtgtggtagggacttaaaaaacttgtaaatgctgtcaactatgatatggtaaaagttacttattctagattaccccctcattgtttattaacaaattatgttacatctgttttaaatttatttcaaaaagggaaactattgtcccctagcaaggcatgatgttaaccagaataaagttctgagtgtttttactacagttgttttttgaaaacatggtagaattggagagtaaaaactgaatggaaggtttgtatattgtcagatattttttcagaaatatgtggtttccacgatgaaaaacttccatgaggccaaacgttttgaactaataaaagcataaatgcaaacacacaaaggtataattttatgaatgtctttgttggaaaagaatacagaaagatggatgtgctttgcattcctacaaagatgtttgtcagatatgatatgtaaacataattcttgtatattatggaagattttaaattcacaatagaaactcaccatgtaaaagagtcatctggtagatttttaacgaatgaagatgtctaatagttattccctatttgttttcttctgtatgttagggtgctctggaagagaggaatgcctgtgtgagcaagcatttatgtttatttataagcagatttaacaattccaaaggaatctccagttttcagttgatcactggcaatgaaaaattctcagtcagtaattgccaaagctgctctagccttgaggagtgtgagaatcaaaactctcctacacttccattaacttagcatgtgttgaaaaaaaagtttcagagaagttctggctgaacactggcaacaacaaagccaacagtcaaaacagagatgtgataaggatcagaacagcagaggttcttttaaaggggcagaaaaactctgggaaataagagagaacaactactgtgatcaggctatgtatggaatacagtgttattttctttgaaattgtttaagtgttgtaaatatttatgtaaactgcattagaaattagctgtgtgaaataccagtgtggtttgtgtttgagttttattgagaattttaaattataacttaaaatattttataatttttaaagtatatatttatttaagcttatgtcagacctatttgacataacactataaaggttgacaataaatgtgcttatgttta

SEQ ID NO: 27410 - DNA, 3500 bp, Homo sapiens
  source 1..3500: mol_type = unassigned DNA
agctgttcttggctgacttcacatcaaaactcctatactgacctgagacagaggcagcagtgatacccacctgagagatcctgtgtttgaacaactgcttcccaaaacggaaagtatttcaagcctaaacctttgggtgaaaagaactcttgaagtcatgattgcttcacagtttctctcagctctcactttggtgcttctcattaaagagagtggagcctggtcttacaacacctccacggaagctatgacttatgatgaggccagtgcttattgtcagcaaaggtacacacacctggttgcaattcaaaacaaagaagagattgagtacctaaactccatattgagctattcaccaagttattactggattggaatcagaaaagtcaacaatgtgtgggtctgggtaggaacccagaaacctctgacagaagaagccaagaactgggctccaggtgaacccaacaataggcaaaaagatgaggactgcgtggagatctacatcaagagagaaaaagatgtgggcatgtggaatgatgagaggtgcagcaagaagaagcttgccctatgctacacagctgcctgtaccaatacatcctgcagtggccacggtgaatgtgtagagaccatcaataattacacttgcaagtgtgaccctggcttcagtggactcaagtgtgagcaaatggttgagtgtgatgctgtgacaaatccagccaatgggttcgtggaatgtttccaaaaccctggaagcttcccatggaacacaacctgtacatttgactgtgaagaaggatttgaactaatgggagcccagagccttcagtgtacctcatctgggaattgggacaacgagaagccaacgtgtaaagctgtgacatgcagggccgtccgccagcctcagaatggctctgtgaggtgcagccattcccctgctggagagttcaccttcaaatcatcctgcaacttcacctgtgaggaaggcttcatgttgcagggaccagcccaggttgaatgcaccactcaagggcagtggacacagcaaatcccagtttgtgaagctgtgagatgcgatgctgtccaccagcccccgaagggtttggtgaggtgtgctcattcccctattggagaattcacctacaagtcctcttgtgccttcagctgtgaggagggatttgaattacatggatcaactcaacttgagtgcacatctcagggacaatggacagaagaggttccttcctgccaagtggtaaaatgttcaagcctggcagttccgggaaagatcaacatgagctgcagtggggagcccgtgtttggcactgtgtgcaagttcgcctgtcctgaaggatggacgctcaatggctctgcagctcggacatgtggagccacaggacactggtctggcctgctacctacctgtgaagctcccactgagtccaacattcccttggtagctggactttctgctgctggactctccctcctgacattagcaccatttctcctctggcttcggaaatgcttacggaaagcaaagaaatttgttcctgccagcagctgccaaagccttgaatcagatggaagctaccaaaagccttcttacatcctttaagttcaaaagaatcagaaacaggtgcatctggggaactagagggatacactgaagttaacagagacagataactctcctcgggtctctggcccttcttgcctactatgccagatgcctttatggctgaaaccgcaacacccatcaccacttcaatagatcaaagtccagcaggcaaggacggccttcaactgaaaagactcagtgttccctttcctactctcaggatcaagaaagtgttggctaatgaagggaaaggatattttcttccaagcaaaggtgaagagaccaagactctgaaatctcagaattccttttctaactctcccttgctcgctgtaaaatcttggcacagaaacacaatattttgtggctttctttcttttgcccttcacagtgtttcgacagctgattacacagttgctgtcataagaatgaataataattatccagagtttagaggaaaaaaatgactaaaaatattataacttaaaaaaatgacagatgttgaatgcccacaggcaaatgcatggagggttgttaatggtgcaaatcctactgaatgctctgtgcgagggttactatgcacaatttaatcactttcatccctatgggattcagtgcttcttaaagagttcttaaggattgtgatatttttacttgcattgaatatattataatcttccatacttcttcattcaatacaagtgtggtagggacttaaaaaacttgtaaatgctgtcaactatgatatggtaaaagttacttattctagattaccccctcattgtttattaacaaattatgttacatctgttttaaatttatttcaaaaagggaaactattgtcccctagcaaggcatgatgttaaccagaataaagttctgagtgtttttactacagttgttttttgaaaacatggtagaattggagagtaaaaactgaatggaaggtttgtatattgtcagatattttttcagaaatatgtggtttccacgatgaaaaacttccatgaggccaaacgttttgaactaataaaagcataaatgcaaacacacaaaggtataattttatgaatgtctttgttggaaaagaatacagaaagatggatgtgctttgcattcctacaaagatgtttgtcagatatgatatgtaaacataattcttgtatattatggaagattttaaattcacaatagaaactcaccatgtaaaagagtcatctggtagatttttaacgaatgaagatgtctaatagttattccctatttgttttcttctgtatgttagggtgctctggaagagaggaatgcctgtgtgagcaagcatttatgtttatttataagcagatttaacaattccaaaggaatctccagttttcagttgatcactggcaatgaaaaattctcagtcagtaattgccaaagctgctctagccttgaggagtgtgagaatcaaaactctcctacacttccattaacttagcatgtgttgaaaaaaaagtttcagagaagttctggctgaacactggcaacaacaaagccaacagtcaaaacagagatgtgataaggatcagaacagcagaggttcttttaaaggggcagaaaaactctgggaaataagagagaacaactactgtgatcaggctatgtatggaatacagtgttattttctttgaaattgtttaagtgttgtaaatatttatgtaaactgcattagaaattagctgtgtgaaataccagtgtggtttgtgtttgagttttattgagaattttaaattataacttaaaatattttataatttttaaagtatatatttatttaagcttatgtcagacctatttgacataacactataaaggttgacaataaatgtgcttatgttta

SEQ ID NO: 27411 - DNA, 3686 bp, Homo sapiens
  source 1..3686: mol_type = unassigned DNA
agctgttcttggctgacttcacatcaaaactcctatactgacctgagacagaggcagcagtgatacccacctgagagatcctgtgtttgaacaactgcttcccaaaacggaaagtatttcaagcctaaacctttgggtgaaaagaactcttgaagtcatgattgcttcacagtttctctcagctctcactttggtgcttctcattaaagagagtggagcctggtcttacaacacctccacggaagctatgacttatgatgaggccagtgcttattgtcagcaaaggtacacacacctggttgcaattcaaaacaaagaagagattgagtacctaaactccatattgagctattcaccaagttattactggattggaatcagaaaagtcaacaatgtgtgggtctgggtaggaacccagaaacctctgacagaagaagccaagaactgggctccaggtgaacccaacaataggcaaaaagatgaggactgcgtggagatctacatcaagagagaaaaagatgtgggcatgtggaatgatgagaggtgcagcaagaagaagcttgccctatgctacacagctgcctgtaccaatacatcctgcagtggccacggtgaatgtgtagagaccatcaataattacacttgcaagtgtgaccctggcttcagtggactcaagtgtgagcaaattgtgaactgtacagccctggaatcccctgagcatggaagcctggtttgcagtcacccactgggaaacttcagctacaattcttcctgctctatcagctgtgataggggttacctgccaagcagcatggagaccatgcagtgtatgtcctctggagaatggagtgctcctattccagcctgcaatgtggttgagtgtgatgctgtgacaaatccagccaatgggttcgtggaatgtttccaaaaccctggaagcttcccatggaacacaacctgtacatttgactgtgaagaaggatttgaactaatgggagcccagagccttcagtgtacctcatctgggaattgggacaacgagaagccaacgtgtaaagctgtgacatgcagggccgtccgccagcctcagaatggctctgtgaggtgcagccattcccctgctggagagttcaccttcaaatcatcctgcaacttcacctgtgaggaaggcttcatgttgcagggaccagcccaggttgaatgcaccactcaagggcagtggacacagcaaatcccagtttgtgaagctgtgagatgcgatgctgtccaccagcccccgaagggtttggtgaggtgtgctcattcccctattggagaattcacctacaagtcctcttgtgccttcagctgtgaggagggatttgaattacatggatcaactcaacttgagtgcacatctcagggacaatggacagaagaggttccttcctgccaagtggtaaaatgttcaagcctggcagttccgggaaagatcaacatgagctgcagtggggagcccgtgtttggcactgtgtgcaagttcgcctgtcctgaaggatggacgctcaatggctctgcagctcggacatgtggagccacaggacactggtctggcctgctacctacctgtgaagctcccactgagtccaacattcccttggtagctggactttctgctgctggactctccctcctgacattagcaccatttctcctctggcttcggaaatgcttacggaaagcaaagaaatttgttcctgccagcagctgccaaagccttgaatcagatggaagctaccaaaagccttcttacatcctttaagttcaaaagaatcagaaacaggtgcatctggggaactagagggatacactgaagttaacagagacagataactctcctcgggtctctggcccttcttgcctactatgccagatgcctttatggctgaaaccgcaacacccatcaccacttcaatagatcaaagtccagcaggcaaggacggccttcaactgaaaagactcagtgttccctttcctactctcaggatcaagaaagtgttggctaatgaagggaaaggatattttcttccaagcaaaggtgaagagaccaagactctgaaatctcagaattccttttctaactctcccttgctcgctgtaaaatcttggcacagaaacacaatattttgtggctttctttcttttgcccttcacagtgtttcgacagctgattacacagttgctgtcataagaatgaataataattatccagagtttagaggaaaaaaatgactaaaaatattataacttaaaaaaatgacagatgttgaatgcccacaggcaaatgcatggagggttgttaatggtgcaaatcctactgaatgctctgtgcgagggttactatgcacaatttaatcactttcatccctatgggattcagtgcttcttaaagagttcttaaggattgtgatatttttacttgcattgaatatattataatcttccatacttcttcattcaatacaagtgtggtagggacttaaaaaacttgtaaatgctgtcaactatgatatggtaaaagttacttattctagattaccccctcattgtttattaacaaattatgttacatctgttttaaatttatttcaaaaagggaaactattgtcccctagcaaggcatgatgttaaccagaataaagttctgagtgtttttactacagttgttttttgaaaacatggtagaattggagagtaaaaactgaatggaaggtttgtatattgtcagatattttttcagaaatatgtggtttccacgatgaaaaacttccatgaggccaaacgttttgaactaataaaagcataaatgcaaacacacaaaggtataattttatgaatgtctttgttggaaaagaatacagaaagatggatgtgctttgcattcctacaaagatgtttgtcagatatgatatgtaaacataattcttgtatattatggaagattttaaattcacaatagaaactcaccatgtaaaagagtcatctggtagatttttaacgaatgaagatgtctaatagttattccctatttgttttcttctgtatgttagggtgctctggaagagaggaatgcctgtgtgagcaagcatttatgtttatttataagcagatttaacaattccaaaggaatctccagttttcagttgatcactggcaatgaaaaattctcagtcagtaattgccaaagctgctctagccttgaggagtgtgagaatcaaaactctcctacacttccattaacttagcatgtgttgaaaaaaaagtttcagagaagttctggctgaacactggcaacaacaaagccaacagtcaaaacagagatgtgataaggatcagaacagcagaggttcttttaaaggggcagaaaaactctgggaaataagagagaacaactactgtgatcaggctatgtatggaatacagtgttattttctttgaaattgtttaagtgttgtaaatatttatgtaaactgcattagaaattagctgtgtgaaataccagtgtggtttgtgtttgagttttattgagaattttaaattataacttaaaatattttataatttttaaagtatatatttatttaagcttatgtcagacctatttgacataacactataaaggttgacaataaatgtgcttatgttta

SEQ ID NO: 27412 - DNA, 3686 bp, Homo sapiens
  source 1..3686: mol_type = unassigned DNA
agctgttcttggctgacttcacatcaaaactcctatactgacctgagacagaggcagcagtgatacccacctgagagatcctgtgtttgaacaactgcttcccaaaacggaaagtatttcaagcctaaacctttgggtgaaaagaactcttgaagtcatgattgcttcacagtttctctcagctctcactttggtgcttctcattaaagagagtggagcctggtcttacaacacctccacggaagctatgacttatgatgaggccagtgcttattgtcagcaaaggtacacacacctggttgcaattcaaaacaaagaagagattgagtacctaaactccatattgagctattcaccaagttattactggattggaatcagaaaagtcaacaatgtgtgggtctgggtaggaacccagaaacctctgacagaagaagccaagaactgggctccaggtgaacccaacaataggcaaaaagatgaggactgcgtggagatctacatcaagagagaaaaagatgtgggcatgtggaatgatgagaggtgcagcaagaagaagcttgccctatgctacacagctgcctgtaccaatacatcctgcagtggccacggtgaatgtgtagagaccatcaataattacacttgcaagtgtgaccctggcttcagtggactcaagtgtgagcaaattgtgaactgtacagccctggaatcccctgagcatggaagcctggtttgcagtcacccactgggaaacttcagctacaattcttcctgctctatcagctgtgataggggttacctgccaagcagcatggagaccatgcagtgtatgtcctctggagaatggagtgctcctattccagcctgcaatgtggttgagtgtgatgctgtgacaaatccagccaatgggttcgtggaatgtttccaaaaccctggaagcttcccatggaacacaacctgtacatttgactgtgaagaaggatttgaactaatgggagcccagagccttcagtgtacctcatctgggaattgggacaacgagaagccaacgtgtaaagctgtgacatgcagggccgtccgccagcctcagaatggctctgtgaggtgcagccattcccctgctggagagttcaccttcaaatcatcctgcaacttcacctgtgaggaaggcttcatgttgcagggaccagcccaggttgaatgcaccactcaagggcagtggacacagcaaatcccagtttgtgaagctttccagtgcacagccttgtccaaccccgagcgaggctacatgaattgtcttcctagtgcttctggcagtttccgttatgggtccagctgtgagttctcctgtgagcagggttttgtgttgaagggatccaaaaggctccaatgtggccccacaggggagtgggacaacgagaagcccacatgtgaagtggtaaaatgttcaagcctggcagttccgggaaagatcaacatgagctgcagtggggagcccgtgtttggcactgtgtgcaagttcgcctgtcctgaaggatggacgctcaatggctctgcagctcggacatgtggagccacaggacactggtctggcctgctacctacctgtgaagctcccactgagtccaacattcccttggtagctggactttctgctgctggactctccctcctgacattagcaccatttctcctctggcttcggaaatgcttacggaaagcaaagaaatttgttcctgccagcagctgccaaagccttgaatcagatggaagctaccaaaagccttcttacatcctttaagttcaaaagaatcagaaacaggtgcatctggggaactagagggatacactgaagttaacagagacagataactctcctcgggtctctggcccttcttgcctactatgccagatgcctttatggctgaaaccgcaacacccatcaccacttcaatagatcaaagtccagcaggcaaggacggccttcaactgaaaagactcagtgttccctttcctactctcaggatcaagaaagtgttggctaatgaagggaaaggatattttcttccaagcaaaggtgaagagaccaagactctgaaatctcagaattccttttctaactctcccttgctcgctgtaaaatcttggcacagaaacacaatattttgtggctttctttcttttgcccttcacagtgtttcgacagctgattacacagttgctgtcataagaatgaataataattatccagagtttagaggaaaaaaatgactaaaaatattataacttaaaaaaatgacagatgttgaatgcccacaggcaaatgcatggagggttgttaatggtgcaaatcctactgaatgctctgtgcgagggttactatgcacaatttaatcactttcatccctatgggattcagtgcttcttaaagagttcttaaggattgtgatatttttacttgcattgaatatattataatcttccatacttcttcattcaatacaagtgtggtagggacttaaaaaacttgtaaatgctgtcaactatgatatggtaaaagttacttattctagattaccccctcattgtttattaacaaattatgttacatctgttttaaatttatttcaaaaagggaaactattgtcccctagcaaggcatgatgttaaccagaataaagttctgagtgtttttactacagttgttttttgaaaacatggtagaattggagagtaaaaactgaatggaaggtttgtatattgtcagatattttttcagaaatatgtggtttccacgatgaaaaacttccatgaggccaaacgttttgaactaataaaagcataaatgcaaacacacaaaggtataattttatgaatgtctttgttggaaaagaatacagaaagatggatgtgctttgcattcctacaaagatgtttgtcagatatgatatgtaaacataattcttgtatattatggaagattttaaattcacaatagaaactcaccatgtaaaagagtcatctggtagatttttaacgaatgaagatgtctaatagttattccctatttgttttcttctgtatgttagggtgctctggaagagaggaatgcctgtgtgagcaagcatttatgtttatttataagcagatttaacaattccaaaggaatctccagttttcagttgatcactggcaatgaaaaattctcagtcagtaattgccaaagctgctctagccttgaggagtgtgagaatcaaaactctcctacacttccattaacttagcatgtgttgaaaaaaaagtttcagagaagttctggctgaacactggcaacaacaaagccaacagtcaaaacagagatgtgataaggatcagaacagcagaggttcttttaaaggggcagaaaaactctgggaaataagagagaacaactactgtgatcaggctatgtatggaatacagtgttattttctttgaaattgtttaagtgttgtaaatatttatgtaaactgcattagaaattagctgtgtgaaataccagtgtggtttgtgtttgagttttattgagaattttaaattataacttaaaatattttataatttttaaagtatatatttatttaagcttatgtcagacctatttgacataacactataaaggttgacaataaatgtgcttatgttta

SEQ ID NO: 27413 - DNA, 2436 bp, Homo sapiens
  source 1..2436: mol_type = unassigned DNA
ggaaggggagggaaaaggggaggaggaggaggatgtgagactgggttagagaaatgaaagaaagcaaggctttctgttgacattcagtgcagtctacctgcagcacagcacactccctttgggcaaggacctgagacccttgtgctaagtcaagaggctcaatgggctgcagaagaactagagaaggaccaagcaaagccatgatatttccatggaaatgtcagagcacccagagggacttatggaacatcttcaagttgtgggggtggacaatgctctgttgtgatttcctggcacatcatggaaccgactgctggacttaccattattctgaaaaacccatgaactggcaaagggctagaagattctgccgagacaattacacagatttagttgccatacaaaacaaggcggaaattgagtatctggagaagactctgcctttcagtcgttcttactactggataggaatccggaagataggaggaatatggacgtgggtgggaaccaacaaatctcttactgaagaagcagagaactggggagatggtgagcccaacaacaagaagaacaaggaggactgcgtggagatctatatcaagagaaacaaagatgcaggcaaatggaacgatgacgcctgccacaaactaaaggcagccctctgttacacagcttcttgccagccctggtcatgcagtggccatggagaatgtgtagaaatcatcaataattacacctgcaactgtgatgtggggtactatgggccccagtgtcagtttgtgattcagtgtgagcctttggaggccccagagctgggtaccatggactgtactcaccctttgggaaacttcagcttcagctcacagtgtgccttcagctgctctgaaggaacaaacttaactgggattgaagaaaccacctgtggaccatttggaaactggtcatctccagaaccaacctgtcaagtgattcagtgtgagcctctatcagcaccagatttggggatcatgaactgtagccatcccctggccagcttcagctttacctctgcatgtaccttcatctgctcagaaggaactgagttaattgggaagaagaaaaccatttgtgaatcatctggaatctggtcaaatcctagtccaatatgtcaaaaattggacaaaagtttctcaatgattaaggagggtgattataaccccctcttcattccagtggcagtcatggttactgcattctctgggttggcatttatcatttggctggcaaggagattaaaaaaaggcaagaaatccaagagaagtatgaatgacccatattaaatcgcccttggtgaaagaaaattcttggaatactaaaaatcatgagatcctttaaatccttccatgaaacgttttgtgtggtggcacctcctacgtcaaacatgaagtgtgtttccttcagtgcatctgggaagatttctacctgaccaacagttccttcagcttccatttcgcccctcatttatccctcaacccccagcccacaggtgtttatacagctcagctttttgtcttttctgaggagaaacaaataagaccataaagggaaaggattcatgtggaatataaagatggctgactttgctctttcttgactcttgttttcagtttcaattcagtgctgtacttgatgacagacacttctaaatgaagtgcaaatttgatacatatgtgaatatggactcagttttcttgcagatcaaatttcacgtcgtcttctgtatactgtggaggtacactcttatagaaagttcaaaaagtctacgctctcctttctttctaactccagtgaagtaatggggtcctgctcaagttgaaagagtcctatttgcactgtagcctcgccgtctgtgaattggaccatcctatttaactggcttcagcctccccaccttcttcagccacctctctttttcagttggctgacttccacacctagcatctcatgagtgccaagcaaaaggagagaagagagaaatagcctgcgctgttttttagtttgggggttttgctgtttccttttatgagacccattcctatttcttatagtcaatgtttcttttatcacgatattattagtaagaaaacatcactgaaatgctagctgcaagtgacatctctttgatgtcatatggaagagttaaaacaggtggagaaattccttgattcacaatgaaatgctctcctttcccctgcccccagaccttttatccacttacctagattctacatattctttaaatttcatctcaggcctccctcaaccccaccacttcttttataactagtcctttactaatccaacccatgatgagctcctcttcctggcttcttactgaaaggttaccctgtaacatgcaattttgcatttgaataaagcctgctttttaagtgttaa

SEQ ID NO: 27414 - DNA, 3169 bp, Homo sapiens
  source 1..3169: mol_type = unassigned DNA
ggcagtgagactgtaagcagtctgggttgggcagaaggcagaaaaccagcagagtcacagaggagatggccaactgccaaatagccatcttgtaccagagattccagagagtggtctttggaatttcccaactcctttgcttcagtgccctgatctctgaactaacaaaccagaaagaagtggcagcatggacttatcattacagcacaaaagcatactcatggaatatttcccgtaaatactgccagaatcgctacacagacttagtggccatccagaataaaaatgaaattgattacctcaataaggtcctaccctactacagctcctactactggattgggatccgaaagaacaataagacatggacatgggtgggaaccaaaaaggctctcaccaacgaggctgagaactgggctgataatgaacctaacaacaaaaggaacaacgaggactgcgtggagatatacatcaagagtccgtcagcccctggcaagtggaatgatgagcactgcttgaagaaaaagcacgcattgtgttacacagcctcctgccaggacatgtcctgcagcaaacaaggagagtgcctcgagaccatcgggaactacacctgctcctgttaccctggattctatgggccagaatgtgaatacgtgagagagtgtggagaacttgagctccctcaacacgtgctcatgaactgcagccaccctctgggaaacttctcttttaactcgcagtgcagcttccactgcactgacgggtaccaagtaaatgggcccagcaagctggaatgcttggcttctggaatctggacaaataagcctccacagtgtttagctgcccagtgcccacccctgaagattcctgaacgaggaaacatgacctgccttcattctgcaaaagcattccagcatcagtctagctgcagcttcagttgtgaagagggatttgcattagttggaccggaagtggtgcaatgcacagcctcgggggtatggacagccccagccccagtgtgtaaagctgtgcagtgtcagcacctggaagcccccagtgaaggaaccatggactgtgttcatccgctcactgcttttgcctatggctccagctgtaaatttgagtgccagcccggctacagagtgaggggcttggacatgctccgctgcattgactctggacactggtctgcacccttgccaacctgtgaggctatttcgtgtgagccgctggagagtcctgtccacggaagcatggattgctctccatccttgagagcgtttcagtatgacaccaactgtagcttccgctgtgctgaaggtttcatgctgagaggagccgatatagttcggtgtgataacttgggacagtggacagcaccagccccagtctgtcaagctttgcagtgccaggatctcccagttccaaatgaggcccgggtgaactgctcccaccccttcggtgcctttaggtaccagtcagtctgcagcttcacctgcaatgaaggcttgctcctggtgggagcaagtgtgctacagtgcttggctactggaaactggaattctgttcctccagaatgccaagccattccctgcacacctttgctaagccctcagaatggaacaatgacctgtgttcaacctcttggaagttccagttataaatccacatgtcaattcatctgtgacgagggatattctttgtctggaccagaaagattggattgtactcgatcgggacgctggacagactccccaccaatgtgtgaagccatcaagtgcccagaactctttgccccagagcagggcagcctggattgttctgacactcgtggagaattcaatgttggctccacctgccatttctcttgtgacaacggctttaagctggaggggcccaataatgtggaatgcacaacttctggaagatggtcagctactccaccaacctgcaaaggcatagcatcacttcctactccaggggtgcaatgtccagccctcaccactcctgggcagggaaccatgtactgtaggcatcatccgggaacctttggttttaataccacttgttactttggctgcaacgctggattcacactcataggagacagcactctcagctgcagaccttcaggacaatggacagcagtaactccagcatgcagagctgtgaaatgctcagaactacatgttaataagccaatagcgatgaactgctccaacctctggggaaacttcagttatggatcaatctgctctttccattgtctagagggccagttacttaatggctctgcacaaacagcatgccaagagaatggccactggtcaactaccgtgccaacctgccaagcaggaccattgactatccaggaagccctgacttactttggtggagcggtggcttctacgataggtctgataatgggtgggacgctcctggctttgctaagaaagcgtttcagacaaaaagatgatgggaaatgccccttgaatcctcacagccacctaggaacatatggagtttttacaaacgctgcatttgacccgagtccttaaggtttccataaacacccatgaatcaaagacatggaattaccttagattagctctggaccagcctgttggacccgctctggaccaaccctgtttcctgagtttgggattgtggtacaatctcaaattctcaacctaccaccccttcctgtcccacctcttctcttcctgtaacacaagccacagaagccaggagcaaatgtttctgcagtagtctctgtgctttgactcacctgttacttgaaataccagtgaaccaaagagactggagcatctgactcacaagaagaccagactgtggagaaataaaaatacctctttattttttgattgaaggaaggttttctccactttgttggaaagcaggtggcatctctaattggaagaaattcctgtagcatcttctggagtctccagtggttgctgttgatgaggcctcttggacctctgctctgaggcttccagagagtcctctggatggcaccagaggctgcagaaggccaagaatcaagctagaaggccacatgtcaccgtggaccttcctgccaccagtcactgtccctcaaatgacccaaagaccaatattcaaatgcgtaattaaaagaattttcccc

SEQ ID NO: 27415 - DNA, 2496 bp, Homo sapiens
  source 1..2496: mol_type = unassigned DNA
gagatggccaactgccaaatagccatcttgtaccagagattccagagagtggtctttggaatttcccaactcctttgcttcagtgccctgatctctgaactaacaaaccagaaagaagtggcagcatggacttatcattacagcacaaaagcatactcatggaatatttcccgtaaatactgccagaatcgctacacagacttagtggccatccagaataaaaatgaaattgattacctcaataaggtcctaccctactacagctcctactactggattgggatccgaaagaacaataagacatggacatgggtgggaaccaaaaaggctctcaccaacgaggctgagaactgggctgataatgaacctaacaacaaaaggaacaacgaggactgcgtggagatatacatcaagagtccgtcagcccctggcaagtggaatgatgagcactgcttgaagaaaaagcacgcattgtgttacacagcctcctgccaggacatgtcctgcagcaaacaaggagagtgcctcgagaccatcgggaactacacctgctcctgttaccctggattctatgggccagaatgtgaatacgtgagagagtgtggagaacttgagctccctcaacacgtgctcatgaactgcagccaccctctgggaaacttctcttttaactcgcagtgcagcttccactgcactgacgggtaccaagtaaatgggcccagcaagctggaatgcttggcttctggaatctggacaaataagcctccacagtgtttagctgcccagtgcccacccctgaagattcctgaacgaggaaacatgacctgccttcattctgcaaaagcattccagcatcagtctagctgcagcttcagttgtgaagagggatttgcattagttggaccggaagtggtgcaatgcacagcctcgggggtatggacagccccagccccagtgtgtaaagctatttcgtgtgagccgctggagagtcctgtccacggaagcatggattgctctccatccttgagagcgtttcagtatgacaccaactgtagcttccgctgtgctgaaggtttcatgctgagaggagccgatatagttcggtgtgataacttgggacagtggacagcaccagccccagtctgtcaagctttgcagtgccaggatctcccagttccaaatgaggcccgggtgaactgctcccaccccttcggtgcctttaggtaccagtcagtctgcagcttcacctgcaatgaaggcttgctcctggtgggagcaagtgtgctacagtgcttggctactggaaactggaattctgttcctccagaatgccaagccattccctgcacacctttgctaagccctcagaatggaacaatgacctgtgttcaacctcttggaagttccagttataaatccacatgtcaattcatctgtgacgagggatattctttgtctggaccagaaagattggattgtactcgatcgggacgctggacagactccccaccaatgtgtgaagccatcaagtgcccagaactctttgccccagagcagggcagcctggattgttctgacactcgtggagaattcaatgttggctccacctgccatttctcttgtgacaacggctttaagctggaggggcccaataatgtggaatgcacaacttctggaagatggtcagctactccaccaacctgcaaaggcatagcatcacttcctactccaggggtgcaatgtccagccctcaccactcctgggcagggaaccatgtactgtaggcatcatccgggaacctttggttttaataccacttgttactttggctgcaacgctggattcacactcataggagacagcactctcagctgcagaccttcaggacaatggacagcagtaactccagcatgcagagctgtgaaatgctcagaactacatgttaataagccaatagcgatgaactgctccaacctctggggaaacttcagttatggatcaatctgctctttccattgtctagagggccagttacttaatggctctgcacaaacagcatgccaagagaatggccactggtcaactaccgtgccaacctgccaagcaggaccattgactatccaggaagccctgacttactttggtggagcggtggcttctacgataggtctgataatgggtgggacgctcctggctttgctaagaaagcgtttcagacaaaaagatgatgggaaatgccccttgaatcctcacagccacctaggaacatatggagtttttacaaacgctgcatttgacccgagtccttaagaaatgataattatttaaatttctttggtctcatttccagagacctgtccttttcctggtctcctcattcagcctccatatgatcctgttgtgaacatcaagtttcctgctacactggacttaactataatgcatttgctgcaggtttccataaacacccatgaatcaaagacatggaattacctt

SEQ ID NO: 27416 - DNA, 2996 bp, Homo sapiens
  source 1..2996: mol_type = unassigned DNA
tgggcagaaggcagaaaaccagcagagtcacagaggagatggccaactgccaaatagccatcttgtaccagagattccagagagtggtctttggaatttcccaactcctttgcttcagtgccctgatctctgaactaacaaaccagaaagaagtggcagcatggacttatcattacagcacaaaagcatactcatggaatatttcccgtaaatactgccagaatcgctacacagacttagtggccatccagaataaaaatgaaattgattacctcaataaggtcctaccctactacagctcctactactggattgggatccgaaagaacaataagacatggacatgggtgggaaccaaaaaggctctcaccaacgaggctgagaactgggctgataatgaacctaacaacaaaaggaacaacgaggactgcgtggagatatacatcaagagtccgtcagcccctggcaagtggaatgatgagcactgcttgaagaaaaagcacgcattgtgttacacagcctcctgccaggacatgtcctgcagcaaacaaggagagtgcctcgagaccatcgggaactacacctgctcctgttaccctggattctatgggccagaatgtgaatacgtgagagagtgtggagaacttgagctccctcaacacgtgctcatgaactgcagccaccctctgggaaacttctcttttaactcgcagtgcagcttccactgcactgacgggtaccaagtaaatgggcccagcaagctggaatgcttggcttctggaatctggacaaataagcctccacagtgtttagctgtgcagtgtcagcacctggaagcccccagtgaaggaaccatggactgtgttcatccgctcactgcttttgcctatggctccagctgtaaatttgagtgccagcccggctacagagtgaggggcttggacatgctccgctgcattgactctggacactggtctgcacccttgccaacctgtgaggctatttcgtgtgagccgctggagagtcctgtccacggaagcatggattgctctccatccttgagagcgtttcagtatgacaccaactgtagcttccgctgtgctgaaggtttcatgctgagaggagccgatatagttcggtgtgataacttgggacagtggacagcaccagccccagtctgtcaagctttgcagtgccaggatctcccagttccaaatgaggcccgggtgaactgctcccaccccttcggtgcctttaggtaccagtcagtctgcagcttcacctgcaatgaaggcttgctcctggtgggagcaagtgtgctacagtgcttggctactggaaactggaattctgttcctccagaatgccaagccattccctgcacacctttgctaagccctcagaatggaacaatgacctgtgttcaacctcttggaagttccagttataaatccacatgtcaattcatctgtgacgagggatattctttgtctggaccagaaagattggattgtactcgatcgggacgctggacagactccccaccaatgtgtgaagccatcaagtgcccagaactctttgccccagagcagggcagcctggattgttctgacactcgtggagaattcaatgttggctccacctgccatttctcttgtgacaacggctttaagctggaggggcccaataatgtggaatgcacaacttctggaagatggtcagctactccaccaacctgcaaaggcatagcatcacttcctactccaggggtgcaatgtccagccctcaccactcctgggcagggaaccatgtactgtaggcatcatccgggaacctttggttttaataccacttgttactttggctgcaacgctggattcacactcataggagacagcactctcagctgcagaccttcaggacaatggacagcagtaactccagcatgcagagctgtgaaatgctcagaactacatgttaataagccaatagcgatgaactgctccaacctctggggaaacttcagttatggatcaatctgctctttccattgtctagagggccagttacttaatggctctgcacaaacagcatgccaagagaatggccactggtcaactaccgtgccaacctgccaagcaggaccattgactatccaggaagccctgacttactttggtggagcggtggcttctacgataggtctgataatgggtgggacgctcctggctttgctaagaaagcgtttcagacaaaaagatgatgggaaatgccccttgaatcctcacagccacctaggaacatatggagtttttacaaacgctgcatttgacccgagtccttaaagacctgtccttttcctggtctcctcattcagcctccatatgatcctgttgtgaacatcaagtttcctgctacactggacttaactataatgcatttgctgcaggtttccataaacacccatgaatcaaagacatggaattaccttagattagctctggaccagcctgttggacccgctctggaccaaccctgtttcctgagtttgggattgtggtacaatctcaaattctcaacctaccaccccttcctgtcccacctcttctcttcctgtaacacaagccacagaagccaggagcaaatgtttctgcagtagtctctgtgctttgactcacctgttacttgaaataccagtgaaccaaagagactggagcatctgactcacaagaagaccagactgtggagaaataaaaatacctctttattttttgattgaaggaaggttttctccactttgttggaaagcaggtggcatctctaattggaagaaattcctgtagcatcttctggagtctccagtggttgctgttgatgaggcctcttggacctctgctctgaggcttccagagagtcctctggatggcaccagaggctgcagaaggccaagaatcaagctagaaggccacatgtcaccgtggaccttcctgccacca

SEQ ID NO: 27417 - DNA, 2589 bp, Homo sapiens
  source 1..2589: mol_type = unassigned DNA
tgggcagaaggcagaaaaccagcagagtcacagaggagatggccaactgccaaatagccatcttgtaccagagattccagagagtggtctttggaatttcccaactcctttgcttcagtgccctgatctctgaactaacaaaccagaaagaagtggcagcatggacttatcattacagcacaaaagcatactcatggaatatttcccgtaaatactgccagaatcgctacacagacttagtggccatccagaataaaaatgaaattgattacctcaataaggtcctaccctactacagctcctactactggattgggatccgaaagaacaataagacatggacatgggtgggaaccaaaaaggctctcaccaacgaggctgagaactgggctgataatgaacctaacaacaaaaggaacaacgaggactgcgtggagatatacatcaagagtccgtcagcccctggcaagtggaatgatgagcactgcttgaagaaaaagcacgcattgtgttacacagcctcctgccaggacatgtcctgcagcaaacaaggagagtgcctcgagaccatcgggaactacacctgctcctgttaccctggattctatgggccagaatgtgaatacgtgagagagtgtggagaacttgagctccctcaacacgtgctcatgaactgcagccaccctctgggaaacttctcttttaactcgcagtgcagcttccactgcactgacgggtaccaagtaaatgggcccagcaagctggaatgcttggcttctggaatctggacaaataagcctccacagtgtttagctgcccagtgcccacccctgaagattcctgaacgaggaaacatgacctgccttcattctgcaaaagcattccagcatcagtctagctgcagcttcagttgtgaagagggatttgcattagttggaccggaagtggtgcaatgcacagcctcgggggtatggacagccccagccccagtgtgtaaagctatttcgtgtgagccgctggagagtcctgtccacggaagcatggattgctctccatccttgagagcgtttcagtatgacaccaactgtagcttccgctgtgctgaaggtttcatgctgagaggagccgatatagttcggtgtgataacttgggacagtggacagcaccagccccagtctgtcaagctttgcagtgccaggatctcccagttccaaatgaggcccgggtgaactgctcccaccccttcggtgcctttaggtaccagtcagtctgcagcttcacctgcaatgaaggcttgctcctggtgggagcaagtgtgctacagtgcttggctactggaaactggaattctgttcctccagaatgccaaggtaagagcatagcatcacttcctactccaggggtgcaatgtccagccctcaccactcctgggcagggaaccatgtactgtaggcatcatccgggaacctttggttttaataccacttgttactttggctgcaacgctggattcacactcataggagacagcactctcagctgcagaccttcaggacaatggacagcagtaactccagcatgcagagctgtgaaatgctcagaactacatgttaataagccaatagcgatgaactgctccaacctctggggaaacttcagttatggatcaatctgctctttccattgtctagagggccagttacttaatggctctgcacaaacagcatgccaagagaatggccactggtcaactaccgtgccaacctgccaagcaggaccattgactatccaggaagccctgacttactttggtggagcggtggcttctacgataggtctgataatgggtgggacgctcctggctttgctaagaaagcgtttcagacaaaaagatgatgggaaatgccccttgaatcctcacagccacctaggaacatatggagtttttacaaacgctgcatttgacccgagtccttaagtttccataaacacccatgaatcaaagacatggaattaccttagattagctctggaccagcctgttggacccgctctggaccaaccctgtttcctgagtttgggattgtggtacaatctcaaattctcaacctaccaccccttcctgtcccacctcttctcttcctgtaacacaagccacagaagccaggagcaaatgtttctgcagtagtctctgtgctttgactcacctgttacttgaaataccagtgaaccaaagagactggagcatctgactcacaagaagaccagactgtggagaaataaaaatacctctttattttttgattgaaggaaggttttctccactttgttggaaagcaggtggcatctctaattggaagaaattcctgtagcatcttctggagtctccagtggttgctgttgatgaggcctcttggacctctgctctgaggcttccagagagtcctctggatggcaccagaggctgcagaaggccaagaatcaagctagaaggccacatgtcaccgtggaccttcctgccaccagtcactgtccctcaaatgacccaaagaccaatattcaaatgcgtaattaaaagaattttcccc

SEQ ID NO: 27418 - DNA, 3171 bp, Homo sapiens
  source 1..3171: mol_type = unassigned DNA
ggaggcagtgagactgtaagcagtctgggttgggcagaaggcagaaaaccagcagagtcacagaggagatggccaactgccaaatagccatcttgtaccagagattccagagagtggtctttggaatttcccaactcctttgcttcagtgccctgatctctgaactaacaaaccagaaagaagtggcagcatggacttatcattacagcacaaaagcatactcatggaatatttcccgtaaatactgccagaatcgctacacagacttagtggccatccagaataaaaatgaaattgattacctcaataaggtcctaccctactacagctcctactactggattgggatccgaaagaacaataagacatggacatgggtgggaaccaaaaaggctctcaccaacgaggctgagaactgggctgataatgaacctaacaacaaaaggaacaacgaggactgcgtggagatatacatcaagagtccgtcagcccctggcaagtggaatgatgagcactgcttgaagaaaaagcacgcattgtgttacacagcctcctgccaggacatgtcctgcagcaaacaaggagagtgcctcgagaccatcgggaactacacctgctcctgttaccctggattctatgggccagaatgtgaatacgtgagagagtgtggagaacttgagctccctcaacacgtgctcatgaactgcagccaccctctgggaaacttctcttttaactcgcagtgcagcttccactgcactgacgggtaccaagtaaatgggcccagcaagctggaatgcttggcttctggaatctggacaaataagcctccacagtgtttagctgcccagtgcccacccctgaagattcctgaacgaggaaacatgacctgccttcattctgcaaaagcattccagcatcagtctagctgcagcttcagttgtgaagagggatttgcattagttggaccggaagtggtgcaatgcacagcctcgggggtatggacagccccagccccagtgtgtaaagctgtgcagtgtcagcacctggaagcccccagtgaaggaaccatggactgtgttcatccgctcactgcttttgcctatggctccagctgtaaatttgagtgccagcccggctacagagtgaggggcttggacatgctccgctgcattgactctggacactggtctgcacccttgccaacctgtgaggctatttcgtgtgagccgctggagagtcctgtccacggaagcatggattgctctccatccttgagagcgtttcagtatgacaccaactgtagcttccgctgtgctgaaggtttcatgctgagaggagccgatatagttcggtgtgataacttgggacagtggacagcaccagccccagtctgtcaagctttgcagtgccaggatctcccagttccaaatgaggcccgggtgaactgctcccaccccttcggtgcctttaggtaccagtcagtctgcagcttcacctgcaatgaaggcttgctcctggtgggagcaagtgtgctacagtgcttggctactggaaactggaattctgttcctccagaatgccaagccattccctgcacacctttgctaagccctcagaatggaacaatgacctgtgttcaacctcttggaagttccagttataaatccacatgtcaattcatctgtgacgagggatattctttgtctggaccagaaagattggattgtactcgatcgggacgctggacagactccccaccaatgtgtgaagccatcaagtgcccagaactctttgccccagagcagggcagcctggattgttctgacactcgtggagaattcaatgttggctccacctgccatttctcttgtgacaacggctttaagctggaggggcccaataatgtggaatgcacaacttctggaagatggtcagctactccaccaacctgcaaaggcatagcatcacttcctactccaggggtgcaatgtccagccctcaccactcctgggcagggaaccatgtactgtaggcatcatccgggaacctttggttttaataccacttgttactttggctgcaacgctggattcacactcataggagacagcactctcagctgcagaccttcaggacaatggacagcagtaactccagcatgcagagctgtgaaatgctcagaactacatgttaataagccaatagcgatgaactgctccaacctctggggaaacttcagttatggatcaatctgctctttccattgtctagagggccagttacttaatggctctgcacaaacagcatgccaagagaatggccactggtcaactaccgtgccaacctgccaagcaggaccattgactatccaggaagccctgacttactttggtggagcggtggcttctacgataggtctgataatgggtgggacgctcctggctttgctaagaaagcgtttcagacaaaaagatgatgggaaatgccccttgaatcctcacagccacctaggaacatatggagtttttacaaacgctgcatttgacccgagtccttaagtttccataaacacccatgaatcaaagacatggaattaccttagattagctctggaccagcctgttggacccgctctggaccaaccctgtttcctgagtttgggattgtggtacaatctcaaattctcaacctaccaccccttcctgtcccacctcttctcttcctgtaacacaagccacagaagccaggagcaaatgtttctgcagtagtctctgtgctttgactcacctgttacttgaaataccagtgaaccaaagagactggagcatctgactcacaagaagaccagactgtggagaaataaaaatacctctttattttttgattgaaggaaggttttctccactttgttggaaagcaggtggcatctctaattggaagaaattcctgtagcatcttctggagtctccagtggttgctgttgatgaggcctcttggacctctgctctgaggcttccagagagtcctctggatggcaccagaggctgcagaaggccaagaatcaagctagaaggccacatgtcaccgtggaccttcctgccaccagtcactgtccctcaaatgacccaaagaccaatattcaaatgcgtaattaaaagaattttcccc

SEQ ID NO: 27419 - DNA, 2611 bp, Homo sapiens
  source 1..2611: mol_type = unassigned DNA
ggcagtgagactgtaagcagtctgggttgggcagaaggcagaaaaccagcagagtcacagaggagatggccaactgccaaatagccatcttgtaccagagattccagagagtggtctttggaatttcccaactcctttgcttcagtgccctgatctctgaactaacaaaccagaaagaagtggcagcatggacttatcattacagcacaaaagcatactcatggaatatttcccgtaaatactgccagaatcgctacacagacttagtggccatccagaataaaaatgaaattgattacctcaataaggtcctaccctactacagctcctactactggattgggatccgaaagaacaataagacatggacatgggtgggaaccaaaaaggctctcaccaacgaggctgagaactgggctgataatgaacctaacaacaaaaggaacaacgaggactgcgtggagatatacatcaagagtccgtcagcccctggcaagtggaatgatgagcactgcttgaagaaaaagcacgcattgtgttacacagcctcctgccaggacatgtcctgcagcaaacaaggagagtgcctcgagaccatcgggaactacacctgctcctgttaccctggattctatgggccagaatgtgaatacgtgagagagtgtggagaacttgagctccctcaacacgtgctcatgaactgcagccaccctctgggaaacttctcttttaactcgcagtgcagcttccactgcactgacgggtaccaagtaaatgggcccagcaagctggaatgcttggcttctggaatctggacaaataagcctccacagtgtttagctgcccagtgcccacccctgaagattcctgaacgaggaaacatgacctgccttcattctgcaaaagcattccagcatcagtctagctgcagcttcagttgtgaagagggatttgcattagttggaccggaagtggtgcaatgcacagcctcgggggtatggacagccccagccccagtgtgtaaagctttgcagtgccaggatctcccagttccaaatgaggcccgggtgaactgctcccaccccttcggtgcctttaggtaccagtcagtctgcagcttcacctgcaatgaaggcttgctcctggtgggagcaagtgtgctacagtgcttggctactggaaactggaattctgttcctccagaatgccaagccattccctgcacacctttgctaagccctcagaatggaacaatgacctgtgttcaacctcttggaagttccagttataaatccacatgtcaattcatctgtgacgagggatattctttgtctggaccagaaagattggattgtactcgatcgggacgctggacagactccccaccaatgtgtgaaggcatagcatcacttcctactccaggggtgcaatgtccagccctcaccactcctgggcagggaaccatgtactgtaggcatcatccgggaacctttggttttaataccacttgttactttggctgcaacgctggattcacactcataggagacagcactctcagctgcagaccttcaggacaatggacagcagtaactccagcatgcagagctgtgaaatgctcagaactacatgttaataagccaatagcgatgaactgctccaacctctggggaaacttcagttatggatcaatctgctctttccattgtctagagggccagttacttaatggctctgcacaaacagcatgccaagagaatggccactggtcaactaccgtgccaacctgccaagcaggaccattgactatccaggaagccctgacttactttggtggagcggtggcttctacgataggtctgataatgggtgggacgctcctggctttgctaagaaagcgtttcagacaaaaagatgatgggaaatgccccttgaatcctcacagccacctaggaacatatggagtttttacaaacgctgcatttgacccgagtccttaaggtttccataaacacccatgaatcaaagacatggaattaccttagattagctctggaccagcctgttggacccgctctggaccaaccctgtttcctgagtttgggattgtggtacaatctcaaattctcaacctaccaccccttcctgtcccacctcttctcttcctgtaacacaagccacagaagccaggagcaaatgtttctgcagtagtctctgtgctttgactcacctgttacttgaaataccagtgaaccaaagagactggagcatctgactcacaagaagaccagactgtggagaaataaaaatacctctttattttttgattgaaggaaggttttctccactttgttggaaagcaggtggcatctctaattggaagaaattcctgtagcatcttctggagtctccagtggttgctgttgatgaggcctcttggacctctgctctgaggcttccagagagtcctctggatggcaccagaggctgcagaaggccaagaatcaagctagaaggccacatgtcaccgtggaccttcctgccaccagtcactgtccctcaaatgacccaaagaccaatattcaaatgcgtaattaaaagaattttcccc

SEQ ID NO: 27420 - DNA, 2617 bp, Homo sapiens
  source 1..2617: mol_type = unassigned DNA
ggcagtgagactgtaagcagtctgggttgggcagaaggcagaaaaccagcagagtcacagaggagatggccaactgccaaatagccatcttgtaccagagattccagagagtggtctttggaatttcccaactcctttgcttcagtgccctgatctctgaactaacaaaccagaaagaagtggcagcatggacttatcattacagcacaaaagcatactcatggaatatttcccgtaaatactgccagaatcgctacacagacttagtggccatccagaataaaaatgaaattgattacctcaataaggtcctaccctactacagctcctactactggattgggatccgaaagaacaataagacatggacatgggtgggaaccaaaaaggctctcaccaacgaggctgagaactgggctgataatgaacctaacaacaaaaggaacaacgaggactgcgtggagatatacatcaagagtccgtcagcccctggcaagtggaatgatgagcactgcttgaagaaaaagcacgcattgtgttacacagcctcctgccaggacatgtcctgcagcaaacaaggagagtgcctcgagaccatcgggaactacacctgctcctgttaccctggattctatgggccagaatgtgaatacgtgagagagtgtggagaacttgagctccctcaacacgtgctcatgaactgcagccaccctctgggaaacttctcttttaactcgcagtgcagcttccactgcactgacgggtaccaagtaaatgggcccagcaagctggaatgcttggcttctggaatctggacaaataagcctccacagtgtttagctgcccagtgcccacccctgaagattcctgaacgaggaaacatgacctgccttcattctgcaaaagcattccagcatcagtctagctgcagcttcagttgtgaagagggatttgcattagttggaccggaagtggtgcaatgcacagcctcgggggtatggacagccccagccccagtgtgtaaagctatttcgtgtgagccgctggagagtcctgtccacggaagcatggattgctctccatccttgagagcgtttcagtatgacaccaactgtagcttccgctgtgctgaaggtttcatgctgagaggagccgatatagttcggtgtgataacttgggacagtggacagcaccagccccagtctgtcaagctttgcagtgccaggatctcccagttccaaatgaggcccgggtgaactgctcccaccccttcggtgcctttaggtaccagtcagtctgcagcttcacctgcaatgaaggcttgctcctggtgggagcaagtgtgctacagtgcttggctactggaaactggaattctgttcctccagaatgccaaggtaagagcatagcatcacttcctactccaggggtgcaatgtccagccctcaccactcctgggcagggaaccatgtactgtaggcatcatccgggaacctttggttttaataccacttgttactttggctgcaacgctggattcacactcataggagacagcactctcagctgcagaccttcaggacaatggacagcagtaactccagcatgcagagctgtgaaatgctcagaactacatgttaataagccaatagcgatgaactgctccaacctctggggaaacttcagttatggatcaatctgctctttccattgtctagagggccagttacttaatggctctgcacaaacagcatgccaagagaatggccactggtcaactaccgtgccaacctgccaagcaggaccattgactatccaggaagccctgacttactttggtggagcggtggcttctacgataggtctgataatgggtgggacgctcctggctttgctaagaaagcgtttcagacaaaaagatgatgggaaatgccccttgaatcctcacagccacctaggaacatatggagtttttacaaacgctgcatttgacccgagtccttaaggtttccataaacacccatgaatcaaagacatggaattaccttagattagctctggaccagcctgttggacccgctctggaccaaccctgtttcctgagtttgggattgtggtacaatctcaaattctcaacctaccaccccttcctgtcccacctcttctcttcctgtaacacaagccacagaagccaggagcaaatgtttctgcagtagtctctgtgctttgactcacctgttacttgaaataccagtgaaccaaagagactggagcatctgactcacaagaagaccagactgtggagaaataaaaatacctctttattttttgattgaaggaaggttttctccactttgttggaaagcaggtggcatctctaattggaagaaattcctgtagcatcttctggagtctccagtggttgctgttgatgaggcctcttggacctctgctctgaggcttccagagagtcctctggatggcaccagaggctgcagaaggccaagaatcaagctagaaggccacatgtcaccgtggaccttcctgccaccagtcactgtccctcaaatgacccaaagaccaatattcaaatgcgtaattaaaagaattttcccc

SEQ ID NO: 27421 - DNA, 2983 bp, Homo sapiens
  source 1..2983: mol_type = unassigned DNA
ggcagtgagactgtaagcagtctgggttgggcagaaggcagaaaaccagcagagtcacagaggagatggccaactgccaaatagccatcttgtaccagagattccagagagtggtctttggaatttcccaactcctttgcttcagtgccctgatctctgaactaacaaaccagaaagaagtggcagcatggacttatcattacagcacaaaagcatactcatggaatatttcccgtaaatactgccagaatcgctacacagacttagtggccatccagaataaaaatgaaattgattacctcaataaggtcctaccctactacagctcctactactggattgggatccgaaagaacaataagacatggacatgggtgggaaccaaaaaggctctcaccaacgaggctgagaactgggctgataatgaacctaacaacaaaaggaacaacgaggactgcgtggagatatacatcaagagtccgtcagcccctggcaagtggaatgatgagcactgcttgaagaaaaagcacgcattgtgttacacagcctcctgccaggacatgtcctgcagcaaacaaggagagtgcctcgagaccatcgggaactacacctgctcctgttaccctggattctatgggccagaatgtgaatacgtgagagagtgtggagaacttgagctccctcaacacgtgctcatgaactgcagccaccctctgggaaacttctcttttaactcgcagtgcagcttccactgcactgacgggtaccaagtaaatgggcccagcaagctggaatgcttggcttctggaatctggacaaataagcctccacagtgtttagctgtgcagtgtcagcacctggaagcccccagtgaaggaaccatggactgtgttcatccgctcactgcttttgcctatggctccagctgtaaatttgagtgccagcccggctacagagtgaggggcttggacatgctccgctgcattgactctggacactggtctgcacccttgccaacctgtgaggctatttcgtgtgagccgctggagagtcctgtccacggaagcatggattgctctccatccttgagagcgtttcagtatgacaccaactgtagcttccgctgtgctgaaggtttcatgctgagaggagccgatatagttcggtgtgataacttgggacagtggacagcaccagccccagtctgtcaagctttgcagtgccaggatctcccagttccaaatgaggcccgggtgaactgctcccaccccttcggtgcctttaggtaccagtcagtctgcagcttcacctgcaatgaaggcttgctcctggtgggagcaagtgtgctacagtgcttggctactggaaactggaattctgttcctccagaatgccaagccattccctgcacacctttgctaagccctcagaatggaacaatgacctgtgttcaacctcttggaagttccagttataaatccacatgtcaattcatctgtgacgagggatattctttgtctggaccagaaagattggattgtactcgatcgggacgctggacagactccccaccaatgtgtgaagccatcaagtgcccagaactctttgccccagagcagggcagcctggattgttctgacactcgtggagaattcaatgttggctccacctgccatttctcttgtgacaacggctttaagctggaggggcccaataatgtggaatgcacaacttctggaagatggtcagctactccaccaacctgcaaaggcatagcatcacttcctactccaggggtgcaatgtccagccctcaccactcctgggcagggaaccatgtactgtaggcatcatccgggaacctttggttttaataccacttgttactttggctgcaacgctggattcacactcataggagacagcactctcagctgcagaccttcaggacaatggacagcagtaactccagcatgcagagctgtgaaatgctcagaactacatgttaataagccaatagcgatgaactgctccaacctctggggaaacttcagttatggatcaatctgctctttccattgtctagagggccagttacttaatggctctgcacaaacagcatgccaagagaatggccactggtcaactaccgtgccaacctgccaagcaggaccattgactatccaggaagccctgacttactttggtggagcggtggcttctacgataggtctgataatgggtgggacgctcctggctttgctaagaaagcgtttcagacaaaaagatgatgggaaatgccccttgaatcctcacagccacctaggaacatatggagtttttacaaacgctgcatttgacccgagtccttaaggtttccataaacacccatgaatcaaagacatggaattaccttagattagctctggaccagcctgttggacccgctctggaccaaccctgtttcctgagtttgggattgtggtacaatctcaaattctcaacctaccaccccttcctgtcccacctcttctcttcctgtaacacaagccacagaagccaggagcaaatgtttctgcagtagtctctgtgctttgactcacctgttacttgaaataccagtgaaccaaagagactggagcatctgactcacaagaagaccagactgtggagaaataaaaatacctctttattttttgattgaaggaaggttttctccactttgttggaaagcaggtggcatctctaattggaagaaattcctgtagcatcttctggagtctccagtggttgctgttgatgaggcctcttggacctctgctctgaggcttccagagagtcctctggatggcaccagaggctgcagaaggccaagaatcaagctagaaggccacatgtcaccgtggaccttcctgccaccagtcactgtccctcaaatgacccaaagaccaatattcaaatgcgtaattaaaagaattttcccc

SEQ ID NO: 27422 - DNA, 2983 bp, Homo sapiens
  source 1..2983: mol_type = unassigned DNA
ggcagtgagactgtaagcagtctgggttgggcagaaggcagaaaaccagcagagtcacagaggagatggccaactgccaaatagccatcttgtaccagagattccagagagtggtctttggaatttcccaactcctttgcttcagtgccctgatctctgaactaacaaaccagaaagaagtggcagcatggacttatcattacagcacaaaagcatactcatggaatatttcccgtaaatactgccagaatcgctacacagacttagtggccatccagaataaaaatgaaattgattacctcaataaggtcctaccctactacagctcctactactggattgggatccgaaagaacaataagacatggacatgggtgggaaccaaaaaggctctcaccaacgaggctgagaactgggctgataatgaacctaacaacaaaaggaacaacgaggactgcgtggagatatacatcaagagtccgtcagcccctggcaagtggaatgatgagcactgcttgaagaaaaagcacgcattgtgttacacagcctcctgccaggacatgtcctgcagcaaacaaggagagtgcctcgagaccatcgggaactacacctgctcctgttaccctggattctatgggccagaatgtgaatacgtgagagagtgtggagaacttgagctccctcaacacgtgctcatgaactgcagccaccctctgggaaacttctcttttaactcgcagtgcagcttccactgcactgacgggtaccaagtaaatgggcccagcaagctggaatgcttggcttctggaatctggacaaataagcctccacagtgtttagctgcccagtgcccacccctgaagattcctgaacgaggaaacatgacctgccttcattctgcaaaagcattccagcatcagtctagctgcagcttcagttgtgaagagggatttgcattagttggaccggaagtggtgcaatgcacagcctcgggggtatggacagccccagccccagtgtgtaaagctatttcgtgtgagccgctggagagtcctgtccacggaagcatggattgctctccatccttgagagcgtttcagtatgacaccaactgtagcttccgctgtgctgaaggtttcatgctgagaggagccgatatagttcggtgtgataacttgggacagtggacagcaccagccccagtctgtcaagctttgcagtgccaggatctcccagttccaaatgaggcccgggtgaactgctcccaccccttcggtgcctttaggtaccagtcagtctgcagcttcacctgcaatgaaggcttgctcctggtgggagcaagtgtgctacagtgcttggctactggaaactggaattctgttcctccagaatgccaagccattccctgcacacctttgctaagccctcagaatggaacaatgacctgtgttcaacctcttggaagttccagttataaatccacatgtcaattcatctgtgacgagggatattctttgtctggaccagaaagattggattgtactcgatcgggacgctggacagactccccaccaatgtgtgaagccatcaagtgcccagaactctttgccccagagcagggcagcctggattgttctgacactcgtggagaattcaatgttggctccacctgccatttctcttgtgacaacggctttaagctggaggggcccaataatgtggaatgcacaacttctggaagatggtcagctactccaccaacctgcaaaggcatagcatcacttcctactccaggggtgcaatgtccagccctcaccactcctgggcagggaaccatgtactgtaggcatcatccgggaacctttggttttaataccacttgttactttggctgcaacgctggattcacactcataggagacagcactctcagctgcagaccttcaggacaatggacagcagtaactccagcatgcagagctgtgaaatgctcagaactacatgttaataagccaatagcgatgaactgctccaacctctggggaaacttcagttatggatcaatctgctctttccattgtctagagggccagttacttaatggctctgcacaaacagcatgccaagagaatggccactggtcaactaccgtgccaacctgccaagcaggaccattgactatccaggaagccctgacttactttggtggagcggtggcttctacgataggtctgataatgggtgggacgctcctggctttgctaagaaagcgtttcagacaaaaagatgatgggaaatgccccttgaatcctcacagccacctaggaacatatggagtttttacaaacgctgcatttgacccgagtccttaaggtttccataaacacccatgaatcaaagacatggaattaccttagattagctctggaccagcctgttggacccgctctggaccaaccctgtttcctgagtttgggattgtggtacaatctcaaattctcaacctaccaccccttcctgtcccacctcttctcttcctgtaacacaagccacagaagccaggagcaaatgtttctgcagtagtctctgtgctttgactcacctgttacttgaaataccagtgaaccaaagagactggagcatctgactcacaagaagaccagactgtggagaaataaaaatacctctttattttttgattgaaggaaggttttctccactttgttggaaagcaggtggcatctctaattggaagaaattcctgtagcatcttctggagtctccagtggttgctgttgatgaggcctcttggacctctgctctgaggcttccagagagtcctctggatggcaccagaggctgcagaaggccaagaatcaagctagaaggccacatgtcaccgtggaccttcctgccaccagtcactgtccctcaaatgacccaaagaccaatattcaaatgcgtaattaaaagaattttcccc

SEQ ID NO: 27423 - DNA, 2713 bp, Homo sapiens
  source 1..2713: mol_type = unassigned DNA
cacagaggagatggccaactgccaaatagccatcttgtaccagagattccagagagtggtctttggaatttcccaactcctttgcttcagtgccctgatctctgaactaacaaaccagaaagaagtggcagcatggacttatcattacagcacaaaagcatactcatggaatatttcccgtaaatactgccagaatcgctacacagacttagtggccatccagaataaaaatgaaattgattacctcaataaggtcctaccctactacagctcctactactggattgggatccgaaagaacaataagacatggacatgggtgggaaccaaaaaggctctcaccaacgaggctgagaactgggctgataatgaacctaacaacaaaaggaacaacgaggactgcgtggagatatacatcaagagtccgtcagcccctggcaagtggaatgatgagcactgcttgaagaaaaagcacgcattgtgttacacagcctcctgccaggacatgtcctgcagcaaacaaggagagtgcctcgagaccatcgggaactacacctgctcctgttaccctggattctatgggccagaatgtgaatacgtgagagagtgtggagaacttgagctccctcaacacgtgctcatgaactgcagccaccctctgggaaacttctcttttaactcgcagtgcagcttccactgcactgacgggtaccaagtaaatgggcccagcaagctggaatgcttggcttctggaatctggacaaataagcctccacagtgtttagctgcccagtgcccacccctgaagattcctgaacgaggaaacatgacctgccttcattctgcaaaagcattccagcatcagtctagctgcagcttcagttgtgaagagggatttgcattagttggaccggaagtggtgcaatgcacagcctcgggggtatggacagccccagccccagtgtgtaaagctttgcagtgccaggatctcccagttccaaatgaggcccgggtgaactgctcccaccccttcggtgcctttaggtaccagtcagtctgcagcttcacctgcaatgaaggcttgctcctggtgggagcaagtgtgctacagtgcttggctactggaaactggaattctgttcctccagaatgccaagccattccctgcacacctttgctaagccctcagaatggaacaatgacctgtgttcaacctcttggaagttccagttataaatccacatgtcaattcatctgtgacgagggatattctttgtctggaccagaaagattggattgtactcgatcgggacgctggacagactccccaccaatgtgtgaaggcatagcatcacttcctactccaggggtgcaatgtccagccctcaccactcctgggcagggaaccatgtactgtaggcatcatccgggaacctttggttttaataccacttgttactttggctgcaacgctggattcacactcataggagacagcactctcagctgcagaccttcaggacaatggacagcagtaactccagcatgcagagctgtgaaatgctcagaactacatgttaataagccaatagcgatgaactgctccaacctctggggaaacttcagttatggatcaatctgctctttccattgtctagagggccagttacttaatggctctgcacaaacagcatgccaagagaatggccactggtcaactaccgtgccaacctgccaagcaggaccattgactatccaggaagccctgacttactttggtggagcggtggcttctacgataggtctgataatgggtgggacgctcctggctttgctaagaaagcgtttcagacaaaaagatgatgggaaatgccccttgaatcctcacagccacctaggaacatatggagtttttacaaacgctgcatttgacccgagtccttaagagacctgtccttttcctggtctcctcattcagcctccatatgatcctgttgtgaacatcaagtttcctgctacactggacttaactataatgcatttgctgcaggtttccataaacacccatgaatcaaagacatggaattaccttagattagctctggaccagcctgttggacccgctctggaccaaccctgtttcctgagtttgggattgtggtacaatctcaaattctcaacctaccaccccttcctgtcccacctcttctcttcctgtaacacaagccacagaagccaggagcaaatgtttctgcagtagtctctgtgctttgactcacctgttacttgaaataccagtgaaccaaagagactggagcatctgactcacaagaagaccagactgtggagaaataaaaatacctctttattttttgattgaaggaaggttttctccactttgttggaaagcaggtggcatctctaattggaagaaattcctgtagcatcttctggagtctccagtggttgctgttgatgaggcctcttggacctctgctctgaggcttccagagagtcctctggatggcaccagaggctgcagaaggccaagaatcaagctagaaggccacatgtcaccgtggaccttcctgccaccagtcactgtccctcaaatgacccaaagaccaatattcaaatgcgtaattaaaagaattttccccaaatgccgtgttcctctattttatggtttgttcagtaaggtctgtatacatca

SEQ ID NO: 27424 - DNA, 3205 bp, Homo sapiens
  source 1..3205: mol_type = unassigned DNA
gccaactgccaaatagccatcttgtaccagagattccagagagtggtctttggaatttcccaactcctttgcttcagtgccctgatctctgaactaacaaaccagaaagaagtggcagcatggacttatcattacagcacaaaagcatactcatggaatatttcccgtaaatactgccagaatcgctacacagacttagtggccatccagaataaaaatgaaattgattacctcaataaggtcctaccctactacagctcctactactggattgggatccgaaagaacaataagacatggacatgggtgggaaccaaaaaggctctcaccaacgaggctgagaactgggctgataatgaacctaacaacaaaaggaacaacgaggactgcgtggagatatacatcaagagtccgtcagcccctggcaagtggaatgatgagcactgcttgaagaaaaagcacgcattgtgttacacagcctcctgccaggacatgtcctgcagcaaacaaggagagtgcctcgagaccatcgggaactacacctgctcctgttaccctggattctatgggccagaatgtgaatacgtgagagagtgtggagaacttgagctccctcaacacgtgctcatgaactgcagccaccctctgggaaacttctcttttaactcgcagtgcagcttccactgcactgacgggtaccaagtaaatgggcccagcaagctggaatgcttggcttctggaatctggacaaataagcctccacagtgtttagctgcccagtgcccacccctgaagattcctgaacgaggaaacatgacctgccttcattctgcaaaagcattccagcatcagtctagctgcagcttcagttgtgaagagggatttgcattagttggaccggaagtggtgcaatgcacagcctcgggggtatggacagccccagccccagtgtgtaaagctgtgcagtgtcagcacctggaagcccccagtgaaggaaccatggactgtgttcatccgctcactgcttttgcctatggctccagctgtaaatttgagtgccagcccggctacagagtgaggggcttggacatgctccgctgcattgactctggacactggtctgcacccttgccaacctgtgaggctatttcgtgtgagccgctggagagtcctgtccacggaagcatggattgctctccatccttgagagcgtttcagtatgacaccaactgtagcttccgctgtgctgaaggtttcatgctgagaggagccgatatagttcggtgtgataacttgggacagtggacagcaccagccccagtctgtcaagctttgcagtgccaggatctcccagttccaaatgaggcccgggtgaactgctcccaccccttcggtgcctttaggtaccagtcagtctgcagcttcacctgcaatgaaggcttgctcctggtgggagcaagtgtgctacagtgcttggctactggaaactggaattctgttcctccagaatgccaagccattccctgcacacctttgctaagccctcagaatggaacaatgacctgtgttcaacctcttggaagttccagttataaatccacatgtcaattcatctgtgacgagggatattctttgtctggaccagaaagattggattgtactcgatcgggacgctggacagactccccaccaatgtgtgaagccatcaagtgcccagaactctttgccccagagcagggcagcctggattgttctgacactcgtggagaattcaatgttggctccacctgccatttctcttgtgacaacggctttaagctggaggggcccaataatgtggaatgcacaacttctggaagatggtcagctactccaccaacctgcaaaggcatagcatcacttcctactccaggggtgcaatgtccagccctcaccactcctgggcagggaaccatgtactgtaggcatcatccgggaacctttggttttaataccacttgttactttggctgcaacgctggattcacactcataggagacagcactctcagctgcagaccttcaggacaatggacagcagtaactccagcatgcagagctgtgaaatgctcagaactacatgttaataagccaatagcgatgaactgctccaacctctggggaaacttcagttatggatcaatctgctctttccattgtctagagggccagttacttaatggctctgcacaaacagcatgccaagagaatggccactggtcaactaccgtgccaacctgccaagcaggaccattgactatccaggaagccctgacttactttggtggagcggtggcttctacgataggtctgataatgggtgggacgctcctggctttgctaagaaagcgtttcagacaaaaagatgatgggaaatgccccttgaatcctcacagccacctaggaacatatggagtttttacaaacgctgcatttgacccgagtccttaagagacctgtccttttcctggtctcctcattcagcctccatatgatcctgttgtgaacatcaagtttcctgctacactggacttaactataatgcatttgctgcaggtttccataaacacccatgaatcaaagacatggaattaccttagattagctctggaccagcctgttggacccgctctggaccaaccctgtttcctgagtttgggattgtggtacaatctcaaattctcaacctaccaccccttcctgtcccacctcttctcttcctgtaacacaagccacagaagccaggagcaaatgtttctgcagtagtctctgtgctttgactcacctgttacttgaaataccagtgaaccaaagagactggagcatctgactcacaagaagaccagactgtggagaaataaaaatacctctttattttttgattgaaggaaggttttctccactttgttggaaagcaggtggcatctctaattggaagaaattcctgtagcatcttctggagtctccagtggttgctgttgatgaggcctcttggacctctgctctgaggcttccagagagtcctctggatggcaccagaggctgcagaaggccaagaatcaagctagaaggccacatgtcaccgtggaccttcctgccaccagtcactgtccctcaaatgacccaaagaccaatattcaaatgcgtaattaaaagaattttcccc

SEQ ID NO: 27425 - DNA, 2660 bp, Homo sapiens
  source 1..2660: mol_type = unassigned DNA
ggccaactgccaaatagccatcttgtaccagagattccagagagtggtctttggaatttcccaactcctttgcttcagtgccctgatctctgaactaacaaaccagaaagaagtggcagcatggacttatcattacagcacaaaagcatactcatggaatatttcccgtaaatactgccagaatcgctacacagacttagtggccatccagaataaaaatgaaattgattacctcaataaggtcctaccctactacagctcctactactggattgggatccgaaagaacaataagacatggacatgggtgggaaccaaaaaggctctcaccaacgaggctgagaactgggctgataatgaacctaacaacaaaaggaacaacgaggactgcgtggagatatacatcaagagtccgtcagcccctggcaagtggaatgatgagcactgcttgaagaaaaagcacgcattgtgttacacagcctcctgccaggacatgtcctgcagcaaacaaggagagtgcctcgagaccatcgggaactacacctgctcctgttaccctggattctatgggccagaatgtgaatacgtgagagagtgtggagaacttgagctccctcaacacgtgctcatgaactgcagccaccctctgggaaacttctcttttaactcgcagtgcagcttccactgcactgacgggtaccaagtaaatgggcccagcaagctggaatgcttggcttctggaatctggacaaataagcctccacagtgtttagctgcccagtgcccacccctgaagattcctgaacgaggaaacatgacctgccttcattctgcaaaagcattccagcatcagtctagctgcagcttcagttgtgaagagggatttgcattagttggaccggaagtggtgcaatgcacagcctcgggggtatggacagccccagccccagtgtgtaaagctatttcgtgtgagccgctggagagtcctgtccacggaagcatggattgctctccatccttgagagcgtttcagtatgacaccaactgtagcttccgctgtgctgaaggtttcatgctgagaggagccgatatagttcggtgtgataacttgggacagtggacagcaccagccccagtctgtcaagctttgcagtgccaggatctcccagttccaaatgaggcccgggtgaactgctcccaccccttcggtgcctttaggtaccagtcagtctgcagcttcacctgcaatgaaggcttgctcctggtgggagcaagtgtgctacagtgcttggctactggaaactggaattctgttcctccagaatgccaaggtaagagcatagcatcacttcctactccaggggtgcaatgtccagccctcaccactcctgggcagggaaccatgtactgtaggcatcatccgggaacctttggttttaataccacttgttactttggctgcaacgctggattcacactcataggagacagcactctcagctgcagaccttcaggacaatggacagcagtaactccagcatgcagagctgtgaaatgctcagaactacatgttaataagccaatagcgatgaactgctccaacctctggggaaacttcagttatggatcaatctgctctttccattgtctagagggccagttacttaatggctctgcacaaacagcatgccaagagaatggccactggtcaactaccgtgccaacctgccaagcaggaccattgactatccaggaagccctgacttactttggtggagcggtggcttctacgataggtctgataatgggtgggacgctcctggctttgctaagaaagcgtttcagacaaaaagatgatgggaaatgccccttgaatcctcacagccacctaggaacatatggagtttttacaaacgctgcatttgacccgagtccttaaagacctgtccttttcctggtctcctcattcagcctccatatgatcctgttgtgaacatcaagtttcctgctacactggacttaactataatgcatttgctgcaggtttccataaacacccatgaatcaaagacatggaattaccttagattagctctggaccagcctgttggacccgctctggaccaaccctgtttcctgagtttgggattgtggtacaatctcaaattctcaacctaccaccccttcctgtcccacctcttctcttcctgtaacacaagccacagaagccaggagcaaatgtttctgcagtagtctctgtgctttgactcacctgttacttgaaataccagtgaaccaaagagactggagcatctgactcacaagaagaccagactgtggagaaataaaaatacctctttattttttgattgaaggaaggttttctccactttgttggaaagcaggtggcatctctaattggaagaaattcctgtagcatcttctggagtctccagtggttgctgttgatgaggcctcttggacctctgctctgaggcttccagagagtcctctggatggcaccagaggctgcagaaggccaagaatcaagctagaaggccacatgtcaccgtggaccttcctgccaccagtcactgtccctcaaatgacccaaagaccaatattcaaatgcgtaattaaaagaattttccccaaatgcc

SEQ ID NO: 27426 - DNA, 2371 bp, Homo sapiens
  source 1..2371: mol_type = unassigned DNA
gtggtctttggaatttcccaactcctttgcttcagtgccctgatctctgaactaacaaaccagaaagaagtggcagcatggacttatcattacagcacaaaagcatactcatggaatatttcccgtaaatactgccagaatcgctacacagacttagtggccatccagaataaaaatgaaattgattacctcaataaggtcctaccctactacagctcctactactggattgggatccgaaagaacaataagacatggacatgggtgggaaccaaaaaggctctcaccaacgaggctgagaactgggctgataatgaacctaacaacaaaaggaacaacgaggactgcgtggagatatacatcaagagtccgtcagcccctggcaagtggaatgatgagcactgcttgaagaaaaagcacgcattgtgttacacagcctcctgccaggacatgtcctgcagcaaacaaggagagtgcctcgagaccatcgggaactacacctgctcctgttaccctggattctatgggccagaatgtgaatacgtgagagagtgtggagaacttgagctccctcaacacgtgctcatgaactgcagccaccctctgggaaacttctcttttaactcgcagtgcagcttccactgcactgacgggtaccaagtaaatgggcccagcaagctggaatgcttggcttctggaatctggacaaataagcctccacagtgtttagctgcccagtgcccacccctgaagattcctgaacgaggaaacatgacctgccttcattctgcaaaagcattccagcatcagtctagctgcagcttcagttgtgaagagggatttgcattagttggaccggaagtggtgcaatgcacagcctcgggggtatggacagccccagccccagtgtgtaaagctatttcgtgtgagccgctggagagtcctgtccacggaagcatggattgctctccatccttgagagcgtttcagtatgacaccaactgtagcttccgctgtgctgaaggtttcatgctgagaggagccgatatagttcggtgtgataacttgggacagtggacagcaccagccccagtctgtcaagctttgcagtgccaggatctcccagttccaaatgaggcccgggtgaactgctcccaccccttcggtgcctttaggtaccagtcagtctgcagcttcacctgcaatgaaggcttgctcctggtgggagcaagtgtgctacagtgcttggctactggaaactggaattctgttcctccagaatgccaagccattccctgcacacctttgctaagccctcagaatggaacaatgacctgtgttcaacctcttggaagttccagttataaatccacatgtcaattcatctgtgacgagggatattctttgtctggaccagaaagattggattgtactcgatcgggacgctggacagactccccaccaatgtgtgaagccatcaagtgcccagaactctttgccccagagcagggcagcctggattgttctgacactcgtggagaattcaatgttggctccacctgccatttctcttgtgacaacggctttaagctggaggggcccaataatgtggaatgcacaacttctggaagatggtcagctactccaccaacctgcaaaggcatagcatcacttcctactccaggggtgcaatgtccagccctcaccactcctgggcagggaaccatgtactgtaggcatcatccgggaacctttggttttaataccacttgttactttggctgcaacgctggattcacactcataggagacagcactctcagctgcagaccttcaggacaatggacagcagtaactccagcatgcagagctgtgaaatgctcagaactacatgttaataagccaatagcgatgaactgctccaacctctggggaaacttcagttatggatcaatctgctctttccattgtctagagggccagttacttaatggctctgcacaaacagcatgccaagagaatggccactggtcaactaccgtgccaacctgccaagcaggaccattgactatccaggaagccctgacttactttggtggagcggtggcttctacgataggtctgataatgggtgggacgctcctggctttgctaagaaagcgtttcagacaaaaagatgatgggaaatgccccttgaatcctcacagccacctaggaacatatggagtttttacaaacgctgcatttgacccgagtccttaaagacctgtccttttcctggtctcctcattcagcctccatatgatcctgttgtgaacatcaagtttcctgctacactggacttaactataatgcatttgctgcaggtttc

SEQ ID NO: 27427 - DNA, 3049 bp, Homo sapiens
  source 1..3049: mol_type = unassigned DNA
ggcagtgagactgtaagcagtctgggttgggcagaaggcagaaaaccagcagagtcacagaggagatggccaactgccaaatagccatcttgtaccagagattccagagagtggtctttggaatttcccaactcctttgcttcagtgccctgatctctgaactaacaaaccagaaagaagtggcagcatggacttatcattacagcacaaaagcatactcatggaatatttcccgtaaatactgccagaatcgctacacagacttagtggccatccagaataaaaatgaaattgattacctcaataaggtcctaccctactacagctcctactactggattgggatccgaaagaacaataagacatggacatgggtgggaaccaaaaaggctctcaccaacgaggctgagaactgggctgataatgaacctaacaacaaaaggaacaacgaggactgcgtggagatatacatcaagagtccgtcagcccctggcaagtggaatgatgagcactgcttgaagaaaaagcacgcattgtgttacacagcctcctgccaggacatgtcctgcagcaaacaaggagagtgcctcgagaccatcgggaactacacctgctcctgttaccctggattctatgggccagaatgtgaatacgtgagagagtgtggagaacttgagctccctcaacacgtgctcatgaactgcagccaccctctgggaaacttctcttttaactcgcagtgcagcttccactgcactgacgggtaccaagtaaatgggcccagcaagctggaatgcttggcttctggaatctggacaaataagcctccacagtgtttagctgcccagtgcccacccctgaagattcctgaacgaggaaacatgacctgccttcattctgcaaaagcattccagcatcagtctagctgcagcttcagttgtgaagagggatttgcattagttggaccggaagtggtgcaatgcacagcctcgggggtatggacagccccagccccagtgtgtaaagctgtgcagtgtcagcacctggaagcccccagtgaaggaaccatggactgtgttcatccgctcactgcttttgcctatggctccagctgtaaatttgagtgccagcccggctacagagtgaggggcttggacatgctccgctgcattgactctggacactggtctgcacccttgccaacctgtgaggctatttcgtgtgagccgctggagagtcctgtccacggaagcatggattgctctccatccttgagagcgtttcagtatgacaccaactgtagcttccgctgtgctgaaggtttcatgctgagaggagccgatatagttcggtgtgataacttgggacagtggacagcaccagccccagtctgtcaagctttgcagtgccaggatctcccagttccaaatgaggcccgggtgaactgctcccaccccttcggtgcctttaggtaccagtcagtctgcagcttcacctgcaatgaaggcttgctcctggtgggagcaagtgtgctacagtgcttggctactggaaactggaattctgttcctccagaatgccaagccattccctgcacacctttgctaagccctcagaatggaacaatgacctgtgttcaacctcttggaagttccagttataaatccacatgtcaattcatctgtgacgagggatattctttgtctggaccagaaagattggattgtactcgatcgggacgctggacagactccccaccaatgtgtgaagccatcaagtgcccagaactctttgccccagagcagggcagcctggattgttctgacactcgtggagaattcaatgttggctccacctgccatttctcttgtgacaacggctttaagctggaggggcccaataatgtggaatgcacaacttctggaagatggtcagctactccaccaacctgcaaaggcatagcatcacttcctactccaggggtgcaatgtccagccctcaccactcctgggcagggaaccatgtactgtaggcatcatccgggaacctttggttttaataccacttgttactttggctgcaacgctggattcacactcataggagacagcactctcagctgcagaccttcaggacaatggacagcagtaactccagcatgcagagctgtgaaatgctcagaactacatgttaataagccaatagcgatgaactgctccaacctctggggaaacttcagttatggatcaatctgctctttccattgtctagagggccagttacttaatggctctgcacaaacagcatgccaagagaatggccactggtcaactaccgtgccaacctgccaagatgatgggaaatgccccttgaatcctcacagccacctaggaacatatggagtttttacaaacgctgcatttgacccgagtccttaaggtttccataaacacccatgaatcaaagacatggaattaccttagattagctctggaccagcctgttggacccgctctggaccaaccctgtttcctgagtttgggattgtggtacaatctcaaattctcaacctaccaccccttcctgtcccacctcttctcttcctgtaacacaagccacagaagccaggagcaaatgtttctgcagtagtctctgtgctttgactcacctgttacttgaaataccagtgaaccaaagagactggagcatctgactcacaagaagaccagactgtggagaaataaaaatacctctttattttttgattgaaggaaggttttctccactttgttggaaagcaggtggcatctctaattggaagaaattcctgtagcatcttctggagtctccagtggttgctgttgatgaggcctcttggacctctgctctgaggcttccagagagtcctctggatggcaccagaggctgcagaaggccaagaatcaagctagaaggccacatgtcaccgtggaccttcctgccaccagtcactgtccctcaaatgacccaaagaccaatattcaaatgcgtaattaaaagaattttcccc

SEQ ID NO: 27428 - DNA, 1704 bp, Homo sapiens
  source 1..1704: mol_type = unassigned DNA
aatcatccgagaaccttggagggtggacagtgccccttttacagatgagaaaactgaggcttgaaggggagaagcagctgcctctggcggcatggcttctggctgcaggatgcccatggagttcgtggtgaccctaggcctgtgtctcggcttcctttgctgaacttgaacaggaagatggcagtgggggccagtggtctagaaggagataagatggctggtgccatgcctctgcaactcctcctgttgctgatcctactgggccctggcaacagcttgcagctgtgggacacctgggcagatgaagccgagaaagccttgggtcccctgcttgcccgggaccggagacaggccaccgaatatgagtacctagattatgatttcctgccagaaacggagcctccagaaatgctgaggaacagcactgacaccactcctctgactgggcctggaacccctgagtctaccactgtggagcctgctgcaaggcgttctactggcctggatgcaggaggggcagtcacagagctgaccacggagctggccaacatggggaacctgtccacggattcagcagctatggagatacagaccactcaaccagcagccacggaggcacagaccactcaaccagtgcccacggaggcacagaccactccactggcagccacagaggcacagacaactcgactgacggccacggaggcacagaccactccactggcagccacagaggcacagaccactccaccagcagccacggaagcacagaccactcaacccacaggcctggaggcacagaccactgcaccagcagccatggaggcacagaccactgcaccagcagccatggaagcacagaccactccaccagcagccatggaggcacagaccactcaaaccacagccatggaggcacagaccactgcaccagaagccacggaggcacagaccactcaacccacagccacggaggcacagaccactccactggcagccatggaggccctgtccacagaacccagtgccacagaggccctgtccatggaacctactaccaaaagaggtctgttcatacccttttctgtgtcctctgttactcacaagggcattcccatggcagccagcaatttgtccgtcaactacccagtgggggccccagaccacatctctgtgaagcagtgcctgctggccatcctaatcttggcgctggtggccactatcttcttcgtgtgcactgtggtgctggcggtccgcctctcccgcaagggccacatgtaccccgtgcgtaattactcccccaccgagatggtctgcatctcatccctgttgcctgatgggggtgaggggccctctgccacagccaatgggggcctgtccaaggccaagagcccgggcctgacgccagagcccagggaggaccgtgagggggatgacctcaccctgcacagcttcctcccttagctcactctgccatctgttttggcaagaccccacctccacgggctctcctgggccacccctgagtgcccagaccccattccacagctctgggcttcctcggagacccctggggatggggatcttcagggaaggaactctggccacccaaacaggacaagagcagcctggggccaagcagacgggcaagtggagccacctctttcctccctccgcggatgaagcccagccacatttcagccg

SEQ ID NO: 27429 - DNA, 2528 bp, Homo sapiens
  source 1..2528: mol_type = unassigned DNA
acacacagccattgggggttgctcggatccgggactgccgcagggggtgccacagcagtgcctggcagcgtgggctgggaccttgtcactaaagcagagaagccacttcttctgggcccacgaggcagctgtcccatgctctgctgagcacggtggtgccatgcctctgcaactcctcctgttgctgatcctactgggccctggcaacagcttgcagctgtgggacacctgggcagatgaagccgagaaagccttgggtcccctgcttgcccgggaccggagacaggccaccgaatatgagtacctagattatgatttcctgccagaaacggagcctccagaaatgctgaggaacagcactgacaccactcctctgactgggcctggaacccctgagtctaccactgtggagcctgctgcaaggcgttctactggcctggatgcaggaggggcagtcacagagctgaccacggagctggccaacatggggaacctgtccacggattcagcagctatggagatacagaccactcaaccagcagccacggaggcacagaccactccactggcagccacagaggcacagacaactcgactgacggccacggaggcacagaccactccactggcagccacagaggcacagaccactccaccagcagccacggaagcacagaccactcaacccacaggcctggaggcacagaccactgcaccagcagccatggaggcacagaccactgcaccagcagccatggaagcacagaccactccaccagcagccatggaggcacagaccactcaaaccacagccatggaggcacagaccactgcaccagaagccacggaggcacagaccactcaacccacagccacggaggcacagaccactccactggcagccatggaggccctgtccacagaacccagtgccacagaggccctgtccatggaacctactaccaaaagaggtctgttcatacccttttctgtgtcctctgttactcacaagggcattcccatggcagccagcaatttgtccgtcaactacccagtgggggccccagaccacatctctgtgaagcagtgcctgctggccatcctaatcttggcgctggtggccactatcttcttcgtgtgcactgtggtgctggcggtccgcctctcccgcaagggccacatgtaccccgtgcgtaattactcccccaccgagatggtctgcatctcatccctgttgcctgatgggggtgaggggccctctgccacagccaatgggggcctgtccaaggccaagagcccgggcctgacgccagagcccagggaggaccgtgagggggatgacctcaccctgcacagcttcctcccttagctcactctgccatctgttttggcaagaccccacctccacgggctctcctgggccacccctgagtgcccagaccccattccacagctctgggcttcctcggagacccctggggatggggatcttcagggaaggaactctggccacccaaacaggacaagagcagcctggggccaagcagacgggcaagtggagccacctctttcctccctccgcggatgaagcccagccacatttcagccgaggtccaaggcaggaggccatttacttgagacagattctctcctttttcctgtcccccatcttctctgggtccctctaacatctcccatggctctccccgcttctcctggtcactggagtctcctccccatgtacccaaggaagatggagctcccccatcccacacgcactgcactgccattgtcttttggttgccatggtcaccaaacaggaagtggacattctaagggaggagtactgaagagtgacggacttctgaggctgtttcctgctgctcctctgacttggggcagcttgggtcttcttgggcacctctctgggaaaacccagggtgaggttcagcctgtgagggctgggatgggtttcgtgggcccaagggcagacctttctttgggactgtgtggaccaaggagcttccatctagtgacaagtgacccccagctatcgcctcttgccttcccctgtggccactttccagggtggactctgtcttgttcactgcagtatcccaactgcaggtccagtgcaggcaataaatatgtgatggacaaacgatagcggaatccttcaaggtttcaaggctgtctccttcaggcagccttcccggaattctccatccctcagtgcaggatgggggctggtcctcagctgtctgccctcagcccctggccccccaggaagcctctttcatgggctgttaggttgacttcagttttgcctcttggacaacagggggtcttgtacatccttgggtgaccaggaaaagttcaggctatggggggccaaagggagggctgccccttccccaccagtgaccactttattccacttcctccattacccagttttggcccacagagtttggtcccccccaaacctcggaccaatatccctctaaacatcaatctatcctcctgtt

SEQ ID NO: 27430 - DNA, 2256 bp, Homo sapiens
  source 1..2256: mol_type = unassigned DNA
aaacaatggggtgtgggctgtcacatggccctgcctaagtaaccacattctcgcttcctccttccacacacagccattgggggttgctcggatccgggactgccgcagggggtgccacagcagtgcctggcagcgtgggctgggaccttgtcactaaagcagagaagccacttcttctgggcccacgaggcagctgtcccatgctctgctgagcacggtggtgccatgcctctgcaactcctcctgttgctgatcctactgggccctggcaacagcttgcagctgtgggacacctgggcagatgaagccgagaaagccttgggtcccctgcttgcccgggaccggagacaggccaccgaatatgagtacctagattatgatttcctgccagaaacggagcctccagaaatgctgaggaacagcactgacaccactcctctgactgggcctggaacccctgagtctaccactgtggagcctgctgcaaggcgttctactggcctggatgcaggaggggcagtcacagagctgaccacggagctggccaacatggggaacctgtccacggattcagcagctatggagatacagaccactcaaccagcagccacggaggcacagaccactcaaccagtgcccacggaggcacagaccactccactggcagccacagaggcacagacaactcgactgacggccacggaggcacagaccactccactggcagccacagaggcacagaccactccaccagcagccacggaagcacagaccactcaacccacaggcctggaggcacagaccactgcaccagcagccatggaggcacagaccactgcaccagcagccatggaagcacagaccactccaccagcagccatggaggcacagaccactcaaaccacagccatggaggcacagaccactgcaccagaagccacggaggcacagaccactcaacccacagccacggaggcacagaccactccactggcagccatggaggccctgtccacagaacccagtgccacagaggccctgtccatggaacctactaccaaaagaggtctgttcatacccttttctgtgtcctctgttactcacaagggcattcccatggcagccagcaatttgtccgtcaactacccagtgggggccccagaccacatctctgtgaagcagtgcctgctggccatcctaatcttggcgctggtggccactatcttcttcgtgtgcactgtggtgctggcggtccgcctctcccgcaagggccacatgtaccccgtgcgtaattactcccccaccgagatggtctgcatctcatccctgttgcctgatgggggtgaggggccctctgccacagccaatgggggcctgtccaaggccaagagcccgggcctgacgccagagcccagggaggaccgtgagggggatgacctcaccctgcacagcttcctcccttagctcactctgccatctgttttggcaagaccccacctccacgggctctcctgggccacccctgagtgcccagaccccattccacagctctgggcttcctcggagacccctggggatggggatcttcagggaaggaactctggccacccaaacaggacaagagcagcctggggccaagcagacgggcaagtggagccacctctttcctccctccgcggatgaagcccagccacatttcagccgaggtccaaggcaggaggccatttacttgagacagattctctcctttttcctgtcccccatcttctctgggtccctctaacatctcccatggctctccccgcttctcctggtcactggagtctcctccccatgtacccaaggaagatggagctcccccatcccacacgcactgcactgccattgtcttttggttgccatggtcaccaaacaggaagtggacattctaagggaggagtactgaagagtgacggacttctgaggctgtttcctgctgctcctctgacttggggcagcttgggtcttcttgggcacctctctgggaaaacccagggtgaggttcagcctgtgagggctgggatgggtttcgtgggcccaagggcagacctttctttgggactgtgtggaccaaggagcttccatctagtgacaagtgacccccagctatcgcctcttgccttcccctgtggccactttccagggtggactctgtcttgttcactgcagtatcccaactgcaggtccagtgcaggcaataaatatgtgatggacaaa

SEQ ID NO: 27431 - DNA, 1752 bp, Homo sapiens
  source 1..1752: mol_type = unassigned DNA
ataaattccctcccttcgctccttccccggaacagcggcctctgacaccagcacagcaaacccgccgggatcaaagtgtaccagtcggcagcatggctacgaaatgtgggaattgtggacccggctactccacccctctggaggccatgaaaggacccagggaagagatcgtctacctgccctgcatttaccgaaacacaggcactgaggccccagattatctggccactgtggatgttgaccccaagtctccccagtattgccaggtcatccaccggctgcccatgcccaacctgaaggacgagctgcatcactcaggatggaacacctgcagcagctgcttcggtgatagcaccaagtcgcgcaccaagctggtgctgcccagtctcatctcctctcgcatctatgtggtggacgtgggctctgagccccgggccccaaagctgcacaaggtcattgagcccaaggacatccatgccaagtgcgaactggcctttctccacaccagccactgcctggccagcggggaagtgatgatcagctccctgggagacgtcaagggcaatggcaaagggggttttgtgctgctggatggggagacgttcgaggtgaaggggacatgggagagacctgggggtgctgcaccgttgggctatgacttctggtaccagcctcgacacaatgtcatgatcagcactgagtgggcagctcccaatgtcttacgagatggcttcaaccccgctgatgtggaggctggactgtacgggagccacttatatgtatgggactggcagcgccatgagattgtgcagaccctgtctctaaaagatgggcttattcccttggagatccgcttcctgcacaacccagacgctgcccaaggctttgtgggctgcgcactcagctccaccatccagcgcttctacaagaacgagggaggtacatggtcagtggagaaggtgatccaggtgccccccaagaaagtgaagggctggctgctgcccgaaatgccaggcctgatcaccgacatcctgctctccctggacgaccgcttcctctacttcagcaactggctgcatggggacctgaggcagtatgacatctctgacccacagagaccccgcctcacaggacagctcttcctcggaggcagcattgttaagggaggccctgtgcaagtgctggaggacgaggaactaaagtcccagccagagcccctagtggtcaagggaaaacgggtggctggaggccctcagatgatccagctcagcctggatgggaagcgcctctacatcaccacgtcgctgtacagtgcctgggacaagcagttttaccctgatctcatcagggaaggctctgtgatgctgcaggttgatgtagacacagtaaaaggagggctgaagttgaaccccaacttcctggtggacttcgggaaggagccccttggcccagcccttgcccatgagctccgctaccctgggggcgattgtagctctgacatctggatttgaactccaccctcatcacccacactccctattttgggccctcacttccttggggacctggcttcattctgctctctcttggcacccgacccttggcagcatgtaccacacagccaagctgagactgtggcaatgtgttgagtcatatacatttactgaccactgttgcttgttgctcactgtgctgcttttccatgagctcttggaggcaccaagaaataaactcgtaaccctgtccttcaga

SEQ ID NO: 27432 - DNA, 1928 bp, Homo sapiens
  source 1..1928: mol_type = unassigned DNA
aacagcggcctctgacaccagcacagcaaacccgccgggatcaaagtgtaccagtcggcagcatgggtcatgtgtctccagctcttcccagcacaacctcaccctcctcagggctctgagggggcggagaggacaggccagagcgatgaggctggagtggggacctaggccagccgcactgccgtggcccgctgggatgtgtgctgcagaacgtgcggagggagccttcaccctccagagcgtggcccagccaatgcgccccattgcttccacagctacgaaatgtgggaattgtggacccggctactccacccctctggaggccatgaaaggacccagggaagagatcgtctacctgccctgcatttaccgaaacacaggcactgaggccccagattatctggccactgtggatgttgaccccaagtctccccagtattgccaggtcatccaccggctgcccatgcccaacctgaaggacgagctgcatcactcaggatggaacacctgcagcagctgcttcggtgatagcaccaagtcgcgcaccaagctggtgctgcccagtctcatctcctctcgcatctatgtggtggacgtgggctctgagccccgggccccaaagctgcacaaggtcattgagcccaaggacatccatgccaagtgcgaactggcctttctccacaccagccactgcctggccagcggggaagtgatgatcagctccctgggagacgtcaagggcaatggcaaagggggttttgtgctgctggatggggagacgttcgaggtgaaggggacatgggagagacctgggggtgctgcaccgttgggctatgacttctggtaccagcctcgacacaatgtcatgatcagcactgagtgggcagctcccaatgtcttacgagatggcttcaaccccgctgatgtggaggctggactgtacgggagccacttatatgtatgggactggcagcgccatgagattgtgcagaccctgtctctaaaagatgggcttattcccttggagatccgcttcctgcacaacccagacgctgcccaaggctttgtgggctgcgcactcagctccaccatccagcgcttctacaagaacgagggaggtacatggtcagtggagaaggtgatccaggtgccccccaagaaagtgaagggctggctgctgcccgaaatgccaggcctgatcaccgacatcctgctctccctggacgaccgcttcctctacttcagcaactggctgcatggggacctgaggcagtatgacatctctgacccacagagaccccgcctcacaggacagctcttcctcggaggcagcattgttaagggaggccctgtgcaagtgctggaggacgaggaactaaagtcccagccagagcccctagtggtcaagggaaaacgggtggctggaggccctcagatgatccagctcagcctggatgggaagcgcctctacatcaccacgtcgctgtacagtgcctgggacaagcagttttaccctgatctcatcagggaaggctctgtgatgctgcaggttgatgtagacacagtaaaaggagggctgaagttgaaccccaacttcctggtggacttcgggaaggagccccttggcccagcccttgcccatgagctccgctaccctgggggcgattgtagctctgacatctggatttgaactccaccctcatcacccacactccctattttgggccctcacttccttggggacctggcttcattctgctctctcttggcacccgacccttggcagcatgtaccacacagccaagctgagactgtggcaatgtgttgagtcatatacatttactgaccactgttgcttgttgctcactgtgctgcttttccatgagctcttggaggcaccaagaaataaactcgtaaccctgtccttc

SEQ ID NO: 27433 - DNA, 1530 bp, Homo sapiens
  source 1..1530: mol_type = unassigned DNA
agcggcctctgacaccagcacagcaaacccgccgggatcaaagtgtaccagtcggcagcatggctacgaaatgtgggaattgtggacccggctactccacccctctggaggccatgaaaggacccagggaagagatcgtctacctgccctgcatttaccgaaacacaggcactgaggccccagattatctggccactgtggatgttgaccccaagtctccccagtattgccaggtcattgagcccaaggacatccatgccaagtgcgaactggcctttctccacaccagccactgcctggccagcggggaagtgatgatcagctccctgggagacgtcaagggcaatggcaaagggggttttgtgctgctggatggggagacgttcgaggtgaaggggacatgggagagacctgggggtgctgcaccgttgggctatgacttctggtaccagcctcgacacaatgtcatgatcagcactgagtgggcagctcccaatgtcttacgagatggcttcaaccccgctgatgtggaggctggactgtacgggagccacttatatgtatgggactggcagcgccatgagattgtgcagaccctgtctctaaaagatgggcttattcccttggagatccgcttcctgcacaacccagacgctgcccaaggctttgtgggctgcgcactcagctccaccatccagcgcttctacaagaacgagggaggtacatggtcagtggagaaggtgatccaggtgccccccaagaaagtgaagggctggctgctgcccgaaatgccaggcctgatcaccgacatcctgctctccctggacgaccgcttcctctacttcagcaactggctgcatggggacctgaggcagtatgacatctctgacccacagagaccccgcctcacaggacagctcttcctcggaggcagcattgttaagggaggccctgtgcaagtgctggaggacgaggaactaaagtcccagccagagcccctagtggtcaagggaaaacgggtggctggaggccctcagatgatccagctcagcctggatgggaagcgcctctacatcaccacgtcgctgtacagtgcctgggacaagcagttttaccctgatctcatcagggaaggctctgtgatgctgcaggttgatgtagacacagtaaaaggagggctgaagttgaaccccaacttcctggtggacttcgggaaggagccccttggcccagcccttgcccatgagctccgctaccctgggggcgattgtagctctgacatctggatttgaactccaccctcatcacccacactccctattttgggccctcacttccttggggacctggcttcattctgctctctcttggcacccgacccttggcagcatgtaccacacagccaagctgagactgtggcaatgtgttgagtcatatacatttactgaccactgttgcttgttgctcactgtgctgcttttccatgagctcttggaggcaccaagaaataaactcgtaaccctgtccttc

SEQ ID NO: 27434 - DNA, 2562 bp, Homo sapiens
  source 1..2562: mol_type = unassigned DNA
cccgctgggggctcggcggccctctgaagcgggtggattggctggggtgcttcgctcagccaatccggacgcgcccgggcgtcgcggccccgcctcctccccggcgctctgggcccgtagcgctccgcgggaaggaggctggatgcccggcagcagtggggcggggatggaggcggccgtggcgccggggagggatgcgccggcacccgcggcgagtcagcccagcggctgcgggaaacacaactcgccggagaggaaagtttatatggactataatgcaacgactcccctggagccagaagttatccaggccatgaccaaggccatgtgggaagcctggggaaatcccagcagcccgtattcagcaggaagaaaggccaaggatattataaatgcagctcgggaaagcctcgcgaagatgataggggggaaacctcaagatataatcttcacttccgggggcactgagtcaaataatttagtaatccattctgtggtgaaacatttccacgcaaaccagacctcaaagggacacacaggtgggcaccacagcccagtgaagggggccaagccccatttcattacttcctcggtggaacacgactccatccggctgcccctggagcacctggtggaagaacaagtggcagcggtcacctttgtcccggtgtccaaggtgagcgggcaggcagaggtggacgacatcctcgcggcagtccgcccgaccacacgcctcgtgaccatcatgctggccaacaatgagactggcattgtcatgcctgtccctgaaatcagtcagcgcattaaagccctgaaccaggaacgggtggcagctgggctacctcccatcctcgtgcacacggatgctgcacaggccttggggaagcagcgcgtggatgtggaggacctgggcgtggacttccttacaatcgtggggcacaagttttatggtcccaggattggcgcactttatatacgaggacttggtgaatttacccctctctaccctatgctatttggaggtggacaagaacggaatttcaggccagggacagagaacaccccaatgattgctggccttgggaaggccgcggagctggtgacccagaactgcgaggcttatgaggcccacatgagggacgtccgcgactacctggaagagaggctggaagctgaattcggtcagaagagaatccatctgaatagccagtttccaggcacccagcggcttcccaatacctgtaacttttccatccggggaccccggcttcaaggccacgtggtgcttgcgcagtgccgagtgctgatggccagtgtgggggccgcgtgccactcggaccacggggaccagccgtccccagtgctgctgagctacggtgtccccttcgacgtggccaggaacgcgctccggctcagcgtgggccgcagcaccaccagggccgaggtggacctcgtcgtgcaggacctgaagcaggccgtggcgcagctggaggaccaggcctagcactggggccgccttccccaccccgcttctgggaagcccgtggcagggcacagggttgtccctccagttccctcctgagggctgtgccaggatgactgtctcatgccccctctgcattttgtcctggagtgccagcgagtgtgcacccccagtttccttccctggacccctgcagagctcacagggcccaggacaccaacgccgcataggactgcccacatgggaccgcccacataggaccgcccacataggaccgcccacatgggaccgcccacatgggaccgcccacatgggaccgcccacatagaaccgtcctccagtggtgaagcggaaacacttagctttatccaccctccccactgggaactgggcacgcctgttgtgagtgccctttcctggaaggtgtttttatctggaagatagaatccaagtatttataactcattgtcagccaaatgctatcatgaacgtaggaaacttgatttttttgttttgatcatggcctctacatgcacctttccagagtggtctcttctcaggccctttttagtccctttccaaagctgcccccaccaccctgctcctctggcctcagtgcacagtggcccccagcctcggccaggcctgctctgctcagcgcccaccgcccaccacccctcctgcttccccgagcctgaccctgttccgcccactggcaatcagggctgcgcacttccctgtccacggtccccaggccttcctgtcttgtcccttttgatcattattaactcagggtttcagctccaacctcgctgagttggtgcagctccaggtcattcctggggtgggaatcggatcatccctgactcagcttttaccttaattttatttgcagaggattcttttctcaaaatgctctggcatttggacacacatcacatgtcgatatttgcataggagtcattttcagtggaataacatttttaatgtgtggttttacggttcaaggaactacttgatgattttgaggaaacacttgccagaaactaaattaacgaataaaagatttcagtgcccga

SEQ ID NO: 27435 - DNA, 1083 bp, Homo sapiens
  source 1..1083: mol_type = unassigned DNA
ggcgctctgggcccgtagcgctccgcgggaaggaggctggatgcccggcagcagtggggcggggatggaggcggccgtggcgccggggagggatgcgccggcacccgcggcgagtcagcccagcggctgcgggaaacacaactcgccggagaggaaagtttatatggactataatgcaacgactcccctggagccagaagttatccaggccatgaccaaggccatgtgggaagcctggggaaatcccagcagcccgtattcagcaggaagaaaggccaaggatattataaatgcagctcgggaaagcctcgcgaagatgataggggggaaacctcaagatataatcttcacttccgggggcactgagtcaaataatttagtaatccattctgtggtgaaacatttccacgcaaaccagacctcaaagggacacacaggtgggcaccacagcccagtgaagggggccaagccccatttcattacttcctcggtggaacacgactccatccggctgcccctggagcacctggtggaagaacaagtggcagcctactcaatgtgaagatgatgaagatgaagacctttatgatgatctgcttccacttaattaatacggtcacctttgtcccggtgtccaaggtgagcgggcaggcagaggtggacgacatcctcgcggcagtccgcccgaccacacgcctcgtgaccatcatgctggccaacaatgagactggcattgtcatgcctgtccctgaaatcagtcagcgcattaaagccctgaaccaggaacgggtggcagctgggctacctcccatcctcgtgcacacggatgctgcacaggccttggggaagcagcgcgtggatgtggaggacctgggcgtggacttccttacaatcgtggggcacaagttttatggtcccaggattggcgcactttatatacgaggacttggtgaatttacccctctctaccctatgctatttggaggtggacaagaacggaatttcaggccagggacagagaacaccccaatgattgctggccttgggaaggtgagccctggtgagcttgaggagatgagttga

SEQ ID NO: 27436 - DNA, 1774 bp, Homo sapiens
  source 1..1774: mol_type = unassigned DNA
atgcccggcagcagtggggcggggatggaggcggccgtggcgccggggagggatgcgccggcacccgcggcgagtcagcccagcggctgcgggaaacacaactcgccggagaggaaagtttatatggactataatgcaacgactcccctggagccagaagttatccaggccatgaccaaggccatgtgggaagcctggggaaatcccagcagcccgtattcagcaggaagaaaggccaaggatattataaatgcagctcgggaaagcctcgcgaagatgataggggggaaacctcaagatataatcttcacttccgggggcactgagtcaaataatttagtaatccattctgtggtgaaacatttccacgcaaaccagacctcaaagggacacacaggtgggcaccacagcccagtgaagggggccaagccccatttcattacttcctcggtggaacacgactccatccggctgcccctggagcacctggtggaagaacaagtggcagcggtcacctttgtcccggtgtccaaggtgagcgggcaggcagaggtggacgacatcctcgcggcagtccgcccgaccacacgcctcgtgaccatcatgctggccaacaatgagactggcattgtcatgcctgtccctgaaatcagtcagcgcattaaagccctgaaccaggaacgggtggcagctgggctacctcccatcctcgtgcacacggatgctgcacaggccttggggaagcagcgcgtggatgtggaggacctgggcgtggacttccttacaatcgtggggcacaagttttatggtcccaggattggcgcactttatatacgaggacttggtgaatttacccctctctaccctatgctatttggaggtggacaagaacggaatttcaggccagggacagagaacaccccaatgattgctggccttgggaaggtgagccctggtgagcttgaggagatgagttgattgctttgtcatcagtgtccccagcggctctagtaggaatctggggctttagggagatcatattcgtgatctcataagcggactgacaagaaaaagcctggaatctgatttatcaacctggagagctgtactttttcagatctgtggattagtggcacttgtttagcatttaaaagggaaaaactccttgtctgtgtctcttctgacatgagaaacagtgatactgttacagcagaggtgaagtgtcaagctgcaggttcaccattcccaaaggcgtcggcagcccccgcaccatcgacgttctgtccccgattggtctgtggggtggccaatccagcacctgccaccagccctccactggggcctgtcctgcttctgcgacagtaaccaggctcaggttttgccgtgcgaaggcagaggtactggttacacctcggcgtctgcaggctgctccctcactgtgcggcctctggtcaaaggccaccaccttcaagcaaccctccatgaaccacagctacattggttcccccatgtcccctgctgtcaccctctatccctgacactgctttatttcccctatctgatgtttctctgtagtgtgttcagatgtatgccccaccttctgcttccccgagagcaggggcttggccatgtcggcctcagtatccccagtacagagaaagggcttagcgcccaggaggccgggccttgggaagagtatgaatggattccctgttacttagaatattcaaaattatattattaacagtgataactgtggctacatttactagaa

SEQ ID NO: 27437 - DNA, 1186 bp, Homo sapiens
  source 1..1186: mol_type = unassigned DNA
atgcccggcagcagtggggcggggatggaggcggccgtggcgccggggagggatgcgccggcacccgcggcgagtcagcccagcggctgcgggaaacacaactcgccggagaggaaagtttatatggactataatgcaacgactcccctggagccagaagttatccaggccatgaccaaggccatgtgggaagcctggggaaatcccagcagcccgtattcagcagcggtcacctttgtcccggtgtccaaggtgagcgggcaggcagaggtggacgacatcctcgcggcagtccgcccgaccacacgcctcgtgaccatcatgctggccaacaatgagactggcattgtcatgcctgtccctgaaatcagtcagcgcattaaagccctgaaccaggaacgggtggcagctgggctacctcccatcctcgtgcacacggatgctgcacaggccttggggaagcagcgcgtggatgtggaggacctgggcgtggacttccttacaatcgtggggcacaagttttatggtcccaggattggcgcactttatatacgaggacttggtgaatttacccctctctaccctatgctatttggaggtggacaagaacggaatttcaggccagggacagagaacaccccaatgattgctggccttgggaaggccgcggagctggtgacccagaactgcgaggcttatgaggcccacatgagggacgtccgcgactacctggaagagaggctggaagctgaattcggtcagaagagaatccatctgaatagccagtttccaggcacccagcggcttcccaatacctgtaacttttccatccggggaccccggcttcaaggccacgtggtgcttgcgcagtgccgagtgctgatggccagtgtgggggccgcgtgccactcggaccacggggaccagccgtccccagtgctgctgagctacggtgtccccttcgacgtggccaggaacgcgctccggctcagcgtgggccgcagcaccaccagggccgaggtggacctcgtcgtgcaggacctgaagcaggccgtggcgcagctggaggaccaggcctagcactggggccgccttccccaccccgcttctgggaagcccgtggcagggcacagggttgtccctccagttccctcctgagggctgtgccaggatgactgtctcatgc

SEQ ID NO: 27438 - DNA, 1261 bp, Homo sapiens
  source 1..1261: mol_type = unassigned DNA
gatggaggcggccgtggcgccggggagggatgcgccggcacccgcggcgagtcagcccagcggctgcgggaaacacaactcgccggagaggaaagtttatatggactataatgcaacgactcccctggagccagaagttatccaggccatgaccaaggccatgtgggaagcctggggaaatcccagcagcccgtattcagcaggaagaaaggccaaggatattataaatgcagctcgggaaagcctcgcgaagatgataggggggaaacctcaagatataatcttcacttccgggggcactgaggccgcggagctggtgacccagaactgcgaggcttatgaggcccacatgagggacgtccgcgactacctggaagagaggctggaagctgaattcggtcagaagagaatccatctgaatagccagtttccaggcacccagcggcttcccaatacctgtaacttttccatccggggaccccggcttcaaggccacgtggtgcttgcgcagtgccgagtgctgatggccagtgtgggggccgcgtgccactcggaccacggggaccagccgtccccagtgctgctgagctacggtgtccccttcgacgtggccaggaacgcgctccggctcagcgtgggccgcagcaccaccagggccgaggtggacctcgtcgtgcaggacctgaagcaggccgtggcgcagctggaggaccaggcctagcactggggccgccttccccaccccgcttctgggaagcccgtggcagggcacagggttgtccctccagttccctcctgagggctgtgccaggatgactgtctcatgccccctctgcattttgtcctggagtgccagcgagtgtgcacccccagtttccttccctggacccctgcagagctcacagggcccaggacaccaacgccgcataggactgcccacatgggaccgcccacataggaccgcccacataggaccgcccacatgggaccgcccacatgggaccgcccacatgggaccgcccacatagaaccgtcctccagtggtgaagcggaaacacttagctttatccaccctccccactgggaactgggcacgcctgttgtgagtgccctttcctggaaggtgtttttatctggaagatagaatccaagtatttataactcattgtcagccaaatgctatcatgaacgtaggaaacttgatttttttgttttgatcatggcctctacatgcacctttccagagtggtctcttctcagg

SEQ ID NO: 27439 - DNA, 2459 bp, Homo sapiens
  source 1..2459: mol_type = unassigned DNA
ggcgctctgggcccgtagcgctccgcgggaaggaggctggatgcccggcagcagtggggcggggatggaggcggccgtggcgccggggagggatgcgccggcacccgcggcgagtcagcccagcggctgcgggaaacacaactcgccggagaggaaagtttatatggactataatgcaacgactcccctggagccagaagttatccaggccatgaccaaggccatgtgggaagcctggggaaatcccagcagcccgtattcagcaggaagaaaggccaaggatattataaatgcagctcgggaaagcctcgcgaagatgataggggggaaacctcaagatataatcttcacttccgggggcactgagtcaaataatttagtaatccattctgtggtgaaacatttccacgcaaaccagacctcaaagggacacacaggtgggcaccacagcccagtgaagggggccaagccccatttcattacttcctcggtggaacacgactccatccggctgcccctggagcacctggtggaagaacaagtggcagcggtcacctttgtcccggtgtccaaggtgagcgggcaggcagaggtggacgacatcctcgcggcagtccgcccgaccacacgcctcgtgaccatcatgctggccaacaatgagactggcattgtcatgcctgtccctgaaatcagtcagcgcattaaagccctgaaccaggaacgggtggcagctgggctacctcccatcctcgtgcacacggatgctgcacaggccttggggaagcagcgcgtggatgtggaggacctgggcgtggacttccttacaatcgtggggcacaagttttatggtcccaggattggcgcactttatatacgaggacttggtgaatttacccctctctaccctatgctatttggaggtggacaagaacggaatttcaggccagggacagagaacaccccaatgattgctggccttgggaaggccgcggagctggtgacccagaactgcgaggcttatgaggcccacatgagggacgtccgcgactacctggaagagaggctggaagctgaattcggtcagaagagaatccatctgaatagccagtttccaggcacccagcggcttcccaatacctgtaacttttccatccggggaccccggcttcaaggccacgtggtgcttgcgcagtgccgagtgctgatggccagtgtgggggccgcgtgccactcggaccacggggaccagccgtccccagtgctgctgagctacggtgtccccttcgacgtggccaggaacgcgctccggctcagcgtgggccgcagcaccaccagggccgaggtggacctcgtcgtgcaggacctgaagcaggccgtggcgcagctggaggaccaggcctagcactggggccgccttccccaccccgcttctgggaagcccgtggcagggcacagggttgtccctccagttccctcctgagggctgtgccaggatgactgtctcatgccccctctgcattttgtcctggagtgccagcgagtgtgcacccccagtttccttccctggacccctgcagagctcacagggcccaggacaccaacgccgcataggactgcccacatgggaccgcccacataggaccgcccacataggaccgcccacatgggaccgcccacatgggaccgcccacatgggaccgcccacatagaaccgtcctccagtggtgaagcggaaacacttagctttatccaccctccccactgggaactgggcacgcctgttgtgagtgccctttcctggaaggtgtttttatctggaagatagaatccaagtatttataactcattgtcagccaaatgctatcatgaacgtaggaaacttgatttttttgttttgatcatggcctctacatgcacctttccagagtggtctcttctcaggccctttttagtccctttccaaagctgcccccaccaccctgctcctctggcctcagtgcacagtggcccccagcctcggccaggcctgctctgctcagcgcccaccgcccaccacccctcctgcttccccgagcctgaccctgttccgcccactggcaatcagggctgcgcacttccctgtccacggtccccaggccttcctgtcttgtcccttttgatcattattaactcagggtttcagctccaacctcgctgagttggtgcagctccaggtcattcctggggtgggaatcggatcatccctgactcagcttttaccttaattttatttgcagaggattcttttctcaaaatgctctggcatttggacacacatcacatgtcgatatttgcataggagtcattttcagtggaataacatttttaatgtgtggttttacggttcaaggaactacttgatgattttgaggaaacacttgccagaaactaaattaacgaataaaagatttcagtgcccg

SEQ ID NO: 27440 - DNA, 2762 bp, Homo sapiens
  source 1..2762: mol_type = unassigned DNA
gtggatccataaagaacccagccaacccgcagagggaggggaggggctgagctgtgaggagagcggggcccaagaaccatgtctacgcgggagtcctttaacccggaaagttacgaattggacaaaagcttccggctaaccagattcactgaactgaagggcacaggctgcaaagtgccccaagatgtcctgcaaaaattgctggaatctttacaggagaaccacttccaagaagatgagcagtttctgggagccgttatgccaaggcttggcattggaatggatacttgtgtcattcctttgaggcacggtgggctttccttggttcaaaccacagattacatttacccgatcgtagacgacccttacatgatgggcaggatagcgtgtgccaatgtcctcagtgacctctatgcaatgggggtcacggaatgtgacaatatgctgatgctccttggagtcagtaataaaatgaccgacagggaaagggataaagtgatgcctctgattatccaaggttttaaagacgcagctgaggaagcaggaacatctgtaacaggcggccaaacagtactaaacccctggattgtcctgggaggagtggctaccactgtctgccaacccaatgaatttatcatgccagacaatgcagtgccaggggacgtgctggtgctgacaaaacccctggggacacaggtggcagtggctgtgcaccagtggctggatatccctgagaaatggaataagattaaactagtggtcacccaagaagatgtagagctggcctaccaggaggcgatgatgaacatggcgaggctcaacaggacaggcggccttctgatctgtttaccacgtgagcaagcagctcggttctgtgcagagataaagtcccccaaatatggtgaaggccaccaagcatggattattgggattgtagagaagggcaaccgcacagccagaatcatagacaaaccccggatcatcgaggtcgcaccacaagtggccactcaaaatgtgaatcccacacccggggccacctcttaatctagacagaaatagctgtttggttttgtttttaaatagatctatttcccttatcacttcaattaaagactataaacaacaaaaatctcattgtgtctacacatcggggtgaccttaggtcggtttgtaagtggatacaattaataaaataaaatccattgcctttttttcctgttacattaactgaagatgcacctaatcttgaggcagcttctgagttgagaattatattgttatccaatactgttgattcattttgaatctttagacacttatctcttgccgcataggctttttaaaggtgctttcacatagcacaggcattacccgtagtcgtgtcaaatagcagttggtgtcttcattttatgtatatttatcatataagtctgatttttttttttaagcgtcttgaatggttttctggagagacagcattggtaagtggcacatgacggtatcccagtcataagagggttgcatgattcctttgagtgtttgatttgaaaagcctagtcttgtctctcaagagcatctcggacccagaacattctccagtagtgcattcagttcaacacagcaagtgcttcattgcatggaaaacactttgaagacaaaaaagaaatcttatttctttttttgtagccttcctgatatttacagtaataccattaactgttttatcgatagcaaaaaaggatactttttgcaatgttattagatgttctatagtgctacaaggaattgccttccgaatggaggttcatgtataatactcatttacaattcaatatataattacacaaataatttttaaatataatcaatagtaaagactgttctgtggatggtagtgtttaatacattttctattttgtacagtgatttcaggccttttgttttcttaaaatcagcagctgtttggcctaattcttagcattattttgtcctttgcgccagtacttttttgtgcacgctttttgtgatctgtgttaaaaacctgcattgccaacattgcagctcgaacttaaacttgttattcaaataaatatttaattttttaaattgctcttgtataatcagatgccccttttagtattattttagaagcgttgggagggttttgcctaaagtacaatttatcgggaaaaactagattttagttttataaaacttttaagtctttcatgggacctatattttcttgaattaaattttgtagttctagaataaataggcaatctaaaaaggtgttctctgtgttatgtaaagtggaggcttccttatattttaacctactaagcaatgaggagggattcctgtcattaagcacaagggcgctggatcctcaagtgcccatcttcgtgagagaaaaagcagcacatcctgcccatttctggtgctttctgctcacaggcaccaaagctgcacatgtaaactgacttcttgccaaaggaaatgacccctgggaagttcaagctcctggaagaggctttaactcggacgcgccctcctccaggaaccagtgggcagggcagccttcatgcatgtgtaactggacctccagccataagcatggtgtgcagtatggaagagcctgctacggaactgaaagtgattggacattttataggaattgatagagatgttggtcctcaaaagctacaaaccagtggtctgcaaaataaagtgtgttggaaacctctagtgagataaaccta

SEQ ID NO: 27441 - DNA, 3273 bp, Homo sapiens
  source 1..3273: mol_type = unassigned DNA
ggccgcacgccgccacccagcagccagggccgcctcttaaagggaggtggccggccttaaaggacccccgcgcgcccagccggcgggagcgcggcggcccggctcccgcagggccgcgccgaggcaggcgagcccccgcggcgcccaggcgcgggcccgggcccccgccgccgccgccgccgccgggcgcggcatttttattcaggcgacgcttaagggagcccggccgcgcccggtgcattgtgggagcggcccgcggcccgttttcgggaggaggcggagggcgcaaagcgagccggtggatccataaagaacccagccaacccgcagagggaggggaggggctgagctgtgaggagagcggggcccaagaaccatgtctacgcgggagtcctttaacccggaaagttacgaattggacaaaagcttccggctaaccagattcactgaactgaagggcacaggctgcaaagtgccccaagatgtcctgcaaaaattgctggaatctttacaggagaaccacttccaagaagatgagcagtttctgggagccgttatgccaaggcttggcattggaatggatacttgtgtcattcctttgaggcacggtgggctttccttggttcaaaccacagattacatttacccgatcgtagacgacccttacatgatgggcaggatagcgtgtgccaatgtcctcagtgacctctatgcaatgggggtcacggaatgtgacaatatgctgatgctccttggagtcagtaataaaatgaccgacagggaaagggataaagtgatgcctctgattatccaaggttttaaagacgcagctgaggaagcaggaacatctgtaacaggcggccaaacagtactaaacccctggattgtcctgggaggagtggctaccactgtctgccaacccaatgaatttatcatgccagacaatgcagtgccaggggacgtgctggtgctgacaaaacccctggggacacaggtggcagtggctgtgcaccagtggctggatatccctgagaaatggaataagattaaactagtggtcacccaagaagatgtagagctggcctaccaggaggcgatgatgaacatggcgaggctcaacaggacagctgcaggactcatgcacacgttcaatgcccacgccgccactgacatcacgggcttcgggattttgggccatgcgcagaacctggccaagcagcagaggaacgaggtgtcgtttgtaattcacaacctcccggtgctggccaagatggctgcggtgagcaaggcctgcggaaacatgttcggcctcatgcacgggacctgcccggagacttcaggcggccttctgatctgtttaccacgtgagcaagcagctcggttctgtgcagagataaagtcccccaaatatggtgaaggccaccaagcatggattattgggattgtagagaagggcaaccgcacagccagaatcatagacaaaccccggatcatcgaggtcgcaccacaagtggccactcaaaatgtgaatcccacacccggggccacctcttaatctagacagaaatagctgtttggttttgtttttaaatagatctatttcccttatcacttcaattaaagactataaacaacaaaaatctcattgtgtctacacatcggggtgaccttaggtcggtttgtaagtggatacaattaataaaataaaatccattgcctttttttcctgttacattaactgaagatgcacctaatcttgaggcagcttctgagttgagaattatattgttatccaatactgttgattcattttgaatctttagacacttatctcttgccgcataggctttttaaaggtgctttcacatagcacaggcattacccgtagtcgtgtcaaatagcagttggtgtcttcattttatgtatatttatcatataagtctgatttttttttttaagcgtcttgaatggttttctggagagacagcattggtaagtggcacatgacggtatcccagtcataagagggttgcatgattcctttgagtgtttgatttgaaaagcctagtcttgtctctcaagagcatctcggacccagaacattctccagtagtgcattcagttcaacacagcaagtgcttcattgcatggaaaacactttgaagacaaaaaagaaatcttatttctttttttgtagccttcctgatatttacagtaataccattaactgttttatcgatagcaaaaaaggatactttttgcaatgttattagatgttctatagtgctacaaggaattgccttccgaatggaggttcatgtataatactcatttacaattcaatatataattacacaaataatttttaaatataatcaatagtaaagactgttctgtggatggtagtgtttaatacattttctattttgtacagtgatttcaggccttttgttttcttaaaatcagcagctgtttggcctaattcttagcattattttgtcctttgcgccagtacttttttgtgcacgctttttgtgatctgtgttaaaaacctgcattgccaacattgcagctcgaacttaaacttgttattcaaataaatatttaattttttaaattgctcttgtataatcagatgccccttttagtattattttagaagcgttgggagggttttgcctaaagtacaatttatcgggaaaaactagattttagttttataaaacttttaagtctttcatgggacctatattttcttgaattaaattttgtagttctagaataaataggcaatctaaaaaggtgttctctgtgttatgtaaagtggaggcttccttatattttaacctactaagcaatgaggagggattcctgtcattaagcacaagggcgctggatcctcaagtgcccatcttcgtgagagaaaaagcagcacatcctgcccatttctggtgctttctgctcacaggcaccaaagctgcacatgtaaactgacttcttgccaaaggaaatgacccctgggaagttcaagctcctggaagaggctttaactcggacgcgccctcctccaggaaccagtgggcagggcagccttcatgcatgtgtaactggacctccagccataagcatggtgtgcagtatggaagagcctgctacggaactgaaagtgattggacattttataggaattgatagagatgttggtcctcaaaagctacaaaccagtggtctgcaaaataaagtgtgttggaaacctctagtgagataaaccta

SEQ ID NO: 27442 - DNA, 2384 bp, Homo sapiens
  source 1..2384: mol_type = unassigned DNA
cagcagccagggccgcctcttaaagggaggtggccggccttaaaggacccccgcgcgcccagccggcgggagcgcggcggcccggctcccgcagggccgcgccgaggcaggcgagcccccgcggcgcccaggcgcgggcccgggcccccgccgccgccgccgccgccgggcgcggcatttttattcaggcgacgcttaagggagcccggccgcgcccggtgcattgtgggagcggcccgcggcccgttttcgggaggaggcggagggcgcaaagcgagccggtggatccataaagaacccagccaacccgcagagggaggggaggggctgagctgtgaggagagcggggcccaagaaccatgtctacgcgggagtcctttaacccggaaagttacgaattggacaaaagcttccggctaaccagattcactgaactgaagggcacaggctgcaaagtgccccaagatgtcctgcaaaaattgctggaatctttacaggagaaccacttccaagaagatgagcagtttctgggagccgttatgccaaggcttggcattggaatggatacttgtgtcattcctttgaggcacggtgggctttccttggttcaaaccacagattacatttacccgatcgtagacgacccttacatgatgggcaggatagcgtgtgccaatgtcctcagtgacctctatgcaatgggggtcacggaatgtgacaatatgctgatgctccttggagtcagtaataaaatgaccgacagggaaagggataaagtgatgcctctgattatccaaggttttaaagacgcagctgaggaagcaggaacatctgtaacaggcggccaaacagtactaaacccctggattgtcctgggaggagtggctaccactgtctgccaacccaatgaatttatcatgccagacaatgcagtgccaggggacgtgctggtgctgacaaaacccctggggacacaggtggcagtggctgtgcaccagtggctggatatccctgagaaatggaataagattaaactagtggtcacccaagaagatgtagagctggcctaccaggaggcgatgatgaacatggcgaggctcaacaggacaggcggccttctgatctgtttaccacgtgagcaagcagctcggttctgtgcagagataaagtcccccaaatatggtgaaggccaccaagcatggattattgggattgtagagaagggcaaccgcacagccagaatcatagacaaaccccggatcatcgaggtcgcaccacaagtggccactcaaaatgtgaatcccacacccggggccacctcttaatctagacagaaatagctgtttggttttgtttttaaatagatctatttcccttatcacttcaattaaagactataaacaacaaaaatctcattgtgtctacacatcggggtgaccttaggtcggtttgtaagtggatacaattaataaaataaaatccattgcctttttttcctgttacattaactgaagatgcacctaatcttgaggcagcttctgagttgagaattatattgttatccaatactgttgattcattttgaatctttagacacttatctcttgccgcataggctttttaaaggtgctttcacatagcacaggcattacccgtagtcgtgtcaaatagcagttggtgtcttcattttatgtatatttatcatataagtctgatttttttttttaagcgtcttgaatggttttctggagagacagcattggtaagtggcacatgacggtatcccagtcataagagggttgcatgattcctttgagtgtttgatttgaaaagcctagtcttgtctctcaagagcatctcggacccagaacattctccagtagtgcattcagttcaacacagcaagtgcttcattgcatggaaaacactttgaagacaaaaaagaaatcttatttctttttttgtagccttcctgatatttacagtaataccattaactgttttatcgatagcaaaaaaggatactttttgcaatgttattagatgttctatagtgctacaaggaattgccttccgaatggaggttcatgtataatactcatttacaattcaatatataattacacaaataatttttaaatataatcaatagtaaagactgttctgtggatggtagtgtttaatacattttctattttgtacagtgatttcaggccttttgttttcttaaaatcagcagctgtttggcctaattcttagcattattttgtcctttgcgccagtacttttttgtgcacgctttttgtgatctgtgttaaaaacctgcattgccaacattgcagctcgaacttaaacttgttattcaaataaatatttaatttttt

SEQ ID NO: 27443 - DNA, 660 bp, Homo sapiens
  source 1..660: mol_type = unassigned DNA
cgggttccttgctcccctccccggccgcctccgacgcgggcgtcctggagagcgcgccccattgtgcggggccggcggggaggtggatccataaagaacccagccaacccgcagagggaggggaggggctgagctgtgaggagagcggggcccaagaaccatgtctacgcgggagtcctttaacccggaaagttacgaattggacaaaagcttccggctaaccagattcactgaactgaagggcacaggctgcaaagtgccccaagatgtcctgcaaaaattgctggaatctttacaggagaaccacttccaagaagatgagcagtttctgggagccgttatgccaaggcttggcattggaatggatacttgtgtcattcctttgaggcacggtgggctttccttggttcaaaccacagattacatttacccgatcgtagacgacccttacatgatgggcaggatagcgtgtgccaatgtcctcagtgacctctatgcaatgggggtcacggaatgtgacaatatgctgatgctccttggagtcagtaataaaatgaccgacagggaaagggataaagtgatgcctctgattatccaaggttttaaagacgcagctgaggaagcaggaacatctgtaacaggcggccaaacagtactaaa

SEQ ID NO: 27444 - DNA, 383 bp, Homo sapiens
  source 1..383: mol_type = unassigned DNA
cggagctgcttttcagccctaggggcgtgctcaagaatcccccgttactctgatcaaaggacttgctaagtttagaaataaagcgctttacaaatcaaatgcattggaatggatacttgtgtcattcctttgaggcacggtgggctttccttggttcaaaccacagattacatttacccgatcgtagacgacccttacatgatgggcaggatagcgtgtgccaatgtcctcagtgacctctatgcaatgggggtcacggaatgtgacaatatgctgatgctccttggagtcagtaataaaatgaccgacagggaaagggataaagtgatgcctctgattatccaaggttttaaagacgcagctgaggaagcaggaacatctgt

SEQ ID NO: 27445 - DNA, 1569 bp, Homo sapiens
  source 1..1569: mol_type = unassigned DNA
cgggaggaggcggagggcgcaaagcgagccggcattggaatggatacttgtgtcattcctttgaggcacggtgggctttccttggttcaaaccacagattacatttacccgatcgtagacgacccttacatgatgggcaggatagcgtgtgccaatgtcctcagtgacctctatgcaatgggggtcacggaatgtgacaatatgctgatgctccttggagtcagtaataaaatgaccgacagggaaagggataaagtgatgcctctgattatccaaggttttaaagacgcagctgaggaagcaggaacatctgtaacaggcggccaaacagtactaaacccctggattgtcctgggaggagtggctaccactgtctgccaacccaatgaatttatcatgccagacaatgcagtgccaggggacgtgctggtgctgacaaaacccctggggacacaggtggcagtggctgtgcaccagtggctggatatccctgagaaatggaataagattaaactagtggtcacccaagaagatgtagagctggcctaccaggaggcgatgatgaacatggcgaggctcaacaggacagctgcaggactcatgcacacgttcaatgcccacgccgccactgacatcacgggcttcgggattttgggccatgcgcagaacctggccaagcagcagaggaacgaggtgtcgtttgtaattcacaacctcccggtgctggccaagatggctgcggtgagcaaggcctgcggaaacatgttcggcctcatgcacgggacctgcccggagacttcaggcggccttctgatctgtttaccacgtgagcaagcagctcggttctgtgcagagataaagtcccccaaatatggtgaaggccaccaagcatggattattgggattgtagagaagggcaaccgcacagccagaatcatagacaaaccccggatcatcgaggtcgcaccacaagtggccactcaaaatgtgaatcccacacccggggccacctcttaatctagacagaaatagctgtttggttttgtttttaaatagatctatttcccttatcacttcaattaaagactataaacaacaaaaatctcattgtgtctacacatcggggtgaccttaggtcggtttgtaagtggatacaattaataaaataaaatccattgcctttttttcctgttacattaactgaagatgcacctaatcttgaggcagcttctgagttgagaattatattgttatccaatactgttgattcattttgaatctttagacacttatctcttgccgcataggctttttaaaggtgctttcacatagcacaggcattacccgtagtcgtgtcaaatagcagttggtgtcttcattttatgtatatttatcatataagtctgatttttttttttaagcgtcttgaatggttttctggagagacagcattggtaagtggcacatgacggtatcccagtcataagagggttgcatgattcctttgagtgtttgatttgaaaagcctagtcttgtctctcaagagcatctcggacccagaacattctc

SEQ ID NO: 27446 - DNA, 2689 bp, Homo sapiens
  source 1..2689: mol_type = unassigned DNA
cagcagccagggccgcctcttaaagggaggtggccggccttaaaggacccccgcgcgcccagccggcgggagcgcggcggcccggctcccgcagggccgcgccgaggcaggcgagcccccgcggcgcccaggcgcgggcccgggcccccgccgccgccgccgccgccgggcgcggcatttttattcaggcgacgcttaagggagcccggccgcgcccggtgcattgtgggagcggcccgcggcccgttttcgggaggaggcggagggcgcaaagcgagccggtggatccataaagaacccagccaacccgcagagggaggggaggggctgagctgtgaggagagcggggcccaagaaccatgtctacgcgggagtcctttaacccggaaagttacgaattggacaaaagcttccggctaaccagattcactgaactgaagggcacaggctgcaaagtgccccaagatgtcctgcaaaaattgctggaatctttacaggagaaccacttccaagaagatgagcagtttctgggagccgttatgccaaggcttggcattggaatggatacttgtgtcattcctttgaggcacggtgggctttccttggttcaaaccacagattacatttacccgatcgtagacgacccttacatgatgggcaggatagcgtgtgccaatgtcctcagtgacctctatgcaatgggggtcacggaatgtgacaatatgctgatgctccttggagtcagtaataaaatgaccgacagggaaagggataaagtgatgcctctgattatccaaggttttaaagacgcagctgaggaagcaggaacatctgtaacaggcggccaaacagtactaaacccctggattgtcctgggaggagtggctaccactgtctgccaacccaatgaatttatcatgccagacaatgcagtgccaggggacgtgctggtgctgacaaaacccctggggacacaggtggcagtggctgtgcaccagtggctggatatccctgagaaatggaataagattaaactagtggtcacccaagaagatgtagagctggcctaccaggaggcgatgatgaacatggcgaggctcaacaggacagctgcaggactcatgcacacgttcaatgcccacgccgccactgacatcacgggcttcgggattttgggccatgcgcagaacctggccaagcagcagaggaacgaggtgtcgtttgtaattcacaacctcccggtgctggccaagatggctgcggtgagcaaggcctgcggaaacatgttcggcctcatgcacgggacctgcccggagacttcagatgtgcagtaatttattagaggaaacataaatggaggataaacgggagatggagcaagcgtaggtagagagagccatcagacagcagtgcaggcggccttctgatctgtttaccacgtgagcaagcagctcggttctgtgcagagataaagtcccccaaatatggtgaaggccaccaagcatggattattgggattgtagagaagggcaaccgcacagccagaatcatagacaaaccccggatcatcgaggtcgcaccacaagtggccactcaaaatgtgaatcccacacccggggccacctcttaatctagacagaaatagctgtttggttttgtttttaaatagatctatttcccttatcacttcaattaaagactataaacaacaaaaatctcattgtgtctacacatcggggtgaccttaggtcggtttgtaagtggatacaattaataaaataaaatccattgcctttttttcctgttacattaactgaagatgcacctaatcttgaggcagcttctgagttgagaattatattgttatccaatactgttgattcattttgaatctttagacacttatctcttgccgcataggctttttaaaggtgctttcacatagcacaggcattacccgtagtcgtgtcaaatagcagttggtgtcttcattttatgtatatttatcatataagtctgatttttttttttaagcgtcttgaatggttttctggagagacagcattggtaagtggcacatgacggtatcccagtcataagagggttgcatgattcctttgagtgtttgatttgaaaagcctagtcttgtctctcaagagcatctcggacccagaacattctccagtagtgcattcagttcaacacagcaagtgcttcattgcatggaaaacactttgaagacaaaaaagaaatcttatttctttttttgtagccttcctgatatttacagtaataccattaactgttttatcgatagcaaaaaaggatactttttgcaatgttattagatgttctatagtgctacaaggaattgccttccgaatggaggttcatgtataatactcatttacaattcaatatataattacacaaataatttttaaatataatcaatagtaaagactgttctgtggatggtagtgtttaatacattttctattttgtacagtgatttcaggccttttgttttcttaaaatcagcagctgtttggcctaattcttagcattattttgtcctttgcgccagtacttttttgtgcacgctttttgtgatctgtgttaaaaacctgcattgccaacattgcagctcgaacttaaacttgttattcaaataaatatttaatttttt

SEQ ID NO: 27447 - DNA, 2089 bp, Homo sapiens
  source 1..2089: mol_type = unassigned DNA
aggaagattgtgcatgccgtgggtctgacggcttgagtagcgctagggagaatccctgcaggtaatatttgacttttgcttcatattaatctgagtggaaaataaaagggccctcttctcctctcgcttccctgccgggcaggcgccatggcggaagcctcggcgacgggcgcctgcggagaggcgatggcagcggcggaaggctcctcgggcccggcgggcttgactctgggccggctgacgggcttctccggcatgaagggcctggtgggtggccaggaagaggcgtcccaggaagccggcctgccggcaggagcgggccccagccccacctttccagccctgggcatcgggatggactcctgcgtcatccccctgaggcacgggggcctgtcactggtgcagaccacggacttcttttaccccttggtagaagatccctacatgatggggcgcatagcttgtgccaacgtgctgagtgacctctacgccatggggattactgagtgtgacaacatgttgatgttactcagcgtcagccagagtatgagtgaggaggaacgcgaaaaggtaacgccactcatggtcaaaggctttcgggatgcggctgaggaaggagggacggcagtgaccggtgggcaaacggtggtcaacccttggattataatcggtggagttgccactgtagtatgccaaccaaatgagttcataatgccggacagcgccgtcgttggggacgtgctggtgttaaccaaaccgttaggaacccaggttgctgtcaatgcccaccaatggctggataatcctgaaagatggaataaagtaaagatggtggtctccagagaagaggtggagctggcctatcaggaagccatgttcaatatggctaccctcaacagaactgctgcaggtttaatgcacacatttaatgcccatgcggccacagatatcacaggctttggcattctaggacactcccagaaccttgcaaaacaacaaagaaatgaagtgtcctttgttattcataatctgccaataattgccaagatggctgccgtcagcaaggccagtggacggtttgggcttcttcaaggaacctcagctgaaacctctgggggattactgatttgtctgccaagagaacaggcggctcgcttttgttctgaaatcaaatcctccaagtacggagagggtcaccaagcgtggatcgttggcattgtggaaaagggaaaccgaacggcccggatcattgacaagccgcgagttattgaagtcctgcctcgtggggccacagctgctgttcttgctcctgacagttcaaatgcctcctctgagcctagctcgtgagatgaaagaacagaagttgtttggaccttagagccattgtccacaatcacggatggttctcaagagttgattgtaagaaatttccaaagaaggctgcctgcatagtggttccggctgccctttctaggtgattggaatcagcccatctaaagcagtctttatatgcattccgaggccagagtaacattttgaactttggggggatatttgttcatcacttgggtagaagaggagcaaaaatacctctgttttctcttgccaaagtaagatgaagctattccaggttgagggatttttctttgcacggggttgattaatttctgcacagggagtgagattattaaagtaacacacacacaaagtaaattgcaaaatgaaaaaaattagaagcaaatgagttttggaccaatattgttgataaatctaaattgttaagagagatcttataatgcaacatcaaattctttattcaattttactgaagtactggctctttcctgctctggacaagaattgagcaacttgtctgatgactgggaaaggaggacctgcaaccatctgacttggtctctgttaatgacgtctctccctctaaaccccattaaggactgggagaggcagagcaagcctcagagcccaggcctcagtggtcattaagatgttaagtcttttgcggcagattcctggtgatttgatcaataaagagtaatttcttgctaaataaataaaagaaaccttgttg

SEQ ID NO: 27448 - DNA, 2235 bp, Homo sapiens
  source 1..2235: mol_type = unassigned DNA
gtgcatgccgtgggtctgacggcttgagtagcgctagggagaatccctgcaggtaatatttgacttttgcttcatattaatctgagtggaaaataaaagggccctcttctcctctcgcttccctgccgggcaggcgccatggcggaagcctcggcgacgggcgcctgcggagaggcgatggcagcggcggaaggctcctcgggcccggcgggcttgactctgggccggagcttctcgaactaccggcccttcgagccccaggcgttgggcctcagcccgagctggcggctgacgggcttctccggcatgaagggctgaggctgcaaggtcccgcaggaggcgctgctcaaactcctggcgggactgacgcggccggacgtgcggcccccgctgggccggggcctggtgggtggccaggaagaggcgtcccaggaagccggcctgccggcaggagcgggccccagccccacctttccagccctgggcatcgggatggactcctgcgtcatccccctgaggcacgggggcctgtcactggtgcagaccacggacttcttttaccccttggtagaagatccctacatgatggggcgcatagcttgtgccaacgtgctgagtgacctctacgccatggggattactgagtgtgacaacatgttgatgttactcagcgtcagccagagtatgagtgaggaggaacgcgaaaaggtaacgccactcatggtcaaaggctttcgggatgcggctgaggaaggagggacggcagtgaccggtgggcaaacggtggtcaacccttggattataatcggtggagttgccactgtagtatgccaaccaaatgagttcataatgccggacagcgccgtcgttggggacgtgctggtgttaaccaaaccgttaggaacccaggttgctgtcaatgcccaccaatggctggataatcctgaaagatggaataaagtaaagatggtggtctccagagaagaggtggagctggcctatcaggaagccatgttcaatatggctaccctcaacagaactgctgcaggtttaatgcacacatttaatgcccatgcggccacagatatcacaggctttggcattctaggacactcccagaaccttgcaaaacaacaaagaaatgaagtgtcctttgttattcataatctgccaataattgccaagatggctgccgtcagcaaggccagtggacggtttgggcttcttcaaggaacctcagctgaaacctctgggggattactgatttgtctgccaagagaacaggcggctcgcttttgttctgaaatcaaatcctccaagtacggagagggtcaccaagcgtggatcgttggcattgtggaaaagggaaaccgaacggcccggatcattgacaagccgcgagttattgaagtcctgcctcgtggggccacagctgctgttcttgctcctgacagttcaaatgcctcctctgagcctagctcgtgagatgaaagaacagaagttgtttggaccttagagccattgtccacaatcacggatggttctcaagagttgattgtaagaaatttccaaagaaggctgcctgcatagtggttccggctgccctttctaggtgattggaatcagcccatctaaagcagtctttatatgcattccgaggccagagtaacattttgaactttggggggatatttgttcatcacttgggtagaagaggagcaaaaatacctctgttttctcttgccaaagtaagatgaagctattccaggttgagggatttttctttgcacggggttgattaatttctgcacagggagtgagattattaaagtaacacacacacaaagtaaattgcaaaatgaaaaaaattagaagcaaatgagttttggaccaatattgttgataaatctaaattgttaagagagatcttataatgcaacatcaaattctttattcaattttactgaagtactggctctttcctgctctggacaagaattgagcaacttgtctgatgactgggaaaggaggacctgcaaccatctgacttggtctctgttaatgacgtctctccctctaaaccccattaaggactgggagaggcagagcaagcctcagagcccaggcctcagtggtcattaagatgttaagtcttttgcggcagattcctggtgatttgatcaataaagagtaatttcttgctaaataaataaaagaaaccttgttgaaaaacta

SEQ ID NO: 27449 - DNA, 1347 bp, Homo sapiens
  source 1..1347: mol_type = unassigned DNA
atggcggaagcctcggcgacgggcgcctgcggagaggcgatggcagcggcggaaggctcctcgggcccggcgggcttgactctgggccggagcttctcgaactaccggcccttcgagccccaggcgttgggcctcagcccgagctggcggctgacgggcttctccggcatgaagggctgaggctgcaaggtcccgcaggaggcgctgctcaaactcctggcgggactgacgcggccggacgtgcggcccccgctgggccggggcctggtgggtggccaggaagaggcgtcccaggaagccggcctgccggcaggagcgggccccagccccacctttccagccctgggcatcgggatggactcctgcgtcatccccctgaggcacgggggcctgtcactggtgcagaccacggacttcttttaccccttggtagaagatccctacatgatggggcgcatagcttgtgccaacgtgctgagtgacctctacgccatggggattactgagtgtgacaacatgttgatgttactcagcgtcagccagagtatgagtgaggaggaacgcgaaaaggtaacgccactcatggtcaaaggctttcgggatgcggctgaggaaggagggacggcagtgaccggtgggcaaacggtggtcaacccttggattataatcggtggagttgccactgtagtatgccaaccaaatgagttcataatgccggacagcgccgtcgttggggacgtgctggtgttaaccaaaccgttaggaacccaggttgctgtcaatgcccaccaatggctggataatcctgaaagatggaataaagtaaagatggtggtctccagagaagaggtggagctggcctatcaggaagccatgttcaatatggctaccctcaacagaactgctgcaggtttaatgcacacatttaatgcccatgcggccacagatatcacaggctttggcattctaggacactcccagaaccttgcaaaacaacaaagaaatgaagtgtcctttgttattcataatctgccaataattgccaagatggctgccgtcagcaaggccagtggacggtttgggcttcttcaaggaacctcagctgaaacctctgggggattactgatttgtctgccaagagaacaggcggctcgcttttgttctgaaatcaaatcctccaagtacggagagggtcaccaagcgtggatcgttggcattgtggaaaagggaaaccgaacggcccggatcattgacaagccgcgagttattgaagtcctgcctcgtggggccacagctgctgttcttgctcctgacagttcaaatgcctcctctgagcctagctcgtga

SEQ ID NO: 27450 - DNA, 2094 bp, Homo sapiens
  source 1..2094: mol_type = unassigned DNA
aaataagggagtccggcggctcctctatcaggaagattgtgcatgccgtgggtctgacggcttgagtagcgctagggagaatccctgcaggtaatatttgacttttgcttcatattaatctgagtggaaaataaaagggccctcttctcctctcgcttccctgccgggcaggcgccatggcggaagcctcggcgacgggcgcctgcggagaggcgatggcagcggcggaaggctcctcgggcccggcgggcttgactctgggccggagcttctcgaactaccggcccttcgagccccaggaagccggcctgccggcaggagcgggccccagccccacctttccagccctgggcatcgggatggactcctgcgtcatccccctgaggcacgggggcctgtcactggtgcagaccacggacttcttttaccccttggtagaagatccctacatgatggggcgcatagcttgtgccaacgtgctgagtgacctctacgccatggggattactgagtgtgacaacatgttgatgttactcagcgtcagccagagtatgagtgaggaggaacgcgaaaaggtaacgccactcatggtcaaaggctttcgggatgcggctgaggaaggagggacggcagtgaccggtgggcaaacggtggtcaacccttggattataatcggtggagttgccactgtagtatgccaaccaaatgagttcataatgccggacagcgccgtcgttggggacgtgctggtgttaaccaaaccgttaggaacccaggttgctgtcaatgcccaccaatggctggataatcctgaaagatggaataaagtaaagatggtggtctccagagaagaggtggagctggcctatcaggaagccatgttcaatatggctaccctcaacagaactgctgcaggtttaatgcacacatttaatgcccatgcggccacagatatcacaggctttggcattctaggacactcccagaaccttgcaaaacaacaaagaaatgaagtgtcctttgttattcataatctgccaataattgccaagatggctgccgtcagcaaggccagtggacggtttgggcttcttcaaggaacctcagctgaaacctctgggggattactgatttgtctgccaagagaacaggcggctcgcttttgttctgaaatcaaatcctccaagtacggagagggtcaccaagcgtggatcgttggcattgtggaaaagggaaaccgaacggcccggatcattgacaagccgcgagttattgaagtcctgcctcgtggggccacagctgctgttcttgctcctgacagttcaaatgcctcctctgagcctagctcgtgagatgaaagaacagaagttgtttggaccttagagccattgtccacaatcacggatggttctcaagagttgattgtaagaaatttccaaagaaggctgcctgcatagtggttccggctgccctttctaggtgattggaatcagcccatctaaagcagtctttatatgcattccgaggccagagtaacattttgaactttggggggatatttgttcatcacttgggtagaagaggagcaaaaatacctctgttttctcttgccaaagtaagatgaagctattccaggttgagggatttttctttgcacggggttgattaatttctgcacagggagtgagattattaaagtaacacacacacaaagtaaattgcaaaatgaaaaaaattagaagcaaatgagttttggaccaatattgttgataaatctaaattgttaagagagatcttataatgcaacatcaaattctttattcaattttactgaagtactggctctttcctgctctggacaagaattgagcaacttgtctgatgactgggaaaggaggacctgcaaccatctgacttggtctctgttaatgacgtctctccctctaaaccccattaaggactgggagaggcagagcaagcctcagagcccaggcctcagtggtcattaagatgttaagtcttttgcggcagattcctggtgatttgatcaataaagagtaatttcttgctaaataaataaaagaaaccttgttg

SEQ ID NO: 27451 - DNA, 4230 bp, Homo sapiens
  source 1..4230: mol_type = unassigned DNA
ccccgccccgctctttcgcttcccgggccgccggcagccgccgccagccgcagccatgggccgggcccggccgggccaacgcgggccgcccagccccggccccgccgcgcagcctcccgcgccaccgcgccgccgcgcccgttccctggcgctgctcggagccctgctggccgccgccgctgccgccgccgtccgggtctgcgcccgccacgccgaggcccaggcggccgcgcggcaggaactggcgctgaagaccctggggacagatggcctttttctcttttcctccttggacactgacggggatatgtacatcagccctgaggagttcaaacccattgctgagaagctaacagggtcaactcccgcggccagctgcgaggaggaggagttgccccctgaccctagcgaggagacgctcaccatagaagcccgattccagcctctgctcccggagaccatgaccaagagcaaagatggcttcctaggggtctcccgcctcgccctgtccggcctccgaaactggacagccgccgcctcaccaagtgcagtgtttgccacccgccacttccagcccttccttcccccgccaggccaggagctgggtgagccctggtggatcatccccagtgagctgagcatgttcactggctacctgtccaacaaccgcttctatccaccgccgcccaagggcaaggaggtcatcatccaccggctcctgagcatgttccaccctcggccctttgtgaagacccgctttgcccctcagggagctgtggcctgcctgactgccatcagcgacttctactacactgtgatgttccggatccatgccgagttccagctcagtgagccgcccgacttccccttttggttctcccctgctcagttcaccggccacatcatcctctccaaagacgccacccacgtccgcgacttccggctcttcgtgcccaaccacaggtctctgaatgtggacatggagtggctttacggggccagtgaaagcagcaacatggaggtggacatcggctacataccccagatggagctggaggccacgggcccctctgtgccctccgtgatcctggatgaggatggcagcatgatcgacagccacctgccttcaggggagcccctgcagtttgtgtttgaggagatcaagtggcagcaggagctgagctgggaggaggctgcccggcgcctggaggtggccatgtaccccttcaagaaggtctcctacttgccgttcactgaggccttcgaccgagccaaggctgagaacaagctggtgcactcaatcctgctgtggggggccctggatgaccaaagctgtcactgttcagggcggactctccgggagactgtcctggaaagttcgcccatcctcaccctgctcaacgagagcttcatcagcacctggtccctggtgaaggagctggaggaactgcagaacaaccaggagaactcgtcccaccagaagctggctggcctgcacctggagaagtacagcttccccgtggagatgatgatctgcctgcccaatggcaccgtggtccatcacatcaatgccaactacttcttggacatcacctccgtgaagcccgaggaaatcgagagcaatctcttcagcttctcatccacctttgaagacccgtccacggccacctacatgcagttcctgaaggagggactccggcgtggcctgcccctcctccagccctagagtgcctggacgggatctgatgcacaggcccccacgcctcagagccagagtggtcctcagcccatttcagactgcagatgccgcccactcccaccccactcctaggctgccttggagggtacaagatccactgagggtggccaccacagccttggctccatggtggcgggtagacaagggatgcctgggctgactgggcagaggaacctctagctctgactgtcactcggctctccctacccatttggctctggaagctgcttggcccccccagatcagggcctgggtgaactccctggacctttcctagccagccgcacagtctaggcccttgtggggtgaagaatggagggaggagcaggctaggaagacggggccaccaccctctccttgctttcagcccttcccacaggaaacatcaagaagccccagccaggaggggccaggctgccaaggcggctcccctgtttatctagagccttcgttcctggccataccccggactgccctcctgtgcctgatgtccccagctggggtcagtctcaacaggagccagtcttctggagcctctgggcagaaccctccatcagagtggaaatcagacgggaccccctgcagcttccctgaccacgccactgaccagctatctggggaagtttactgtgaaggggtttctgcctttagcaatggggttcactaagggggttcccgaggcccagggccaaggcactcccaccgcctaccttagcacagggtctctgcaggactgcgggagccagcgctcctgccgcccctcttgcccctcagaccttgcatccacagaagcacaacccagccaaacaccacagccttctccagagccggcactgtcccggcaaccaggggtgccccaggctagctcttctacctctggggcaccacggactccccttggccactcttgggactttggtccacgtcctgagccactgaccacggccagtctctctttttatatgtgcagaaaagtgtttttacacaaactttctcatggtttgtaggtatttttttataaccccagtgctgaggagaaaggaggggcagtggcttccccggcagcagccccatgatggctgaatccgaaatcctcgatgggtccagcttgatgtctttgcagctgcacctatgggaagaagtagtcctctcttccttctcctcttcagctttttaaaaacagtcctcagaggatccatgatccccagcactgtcccatcctccacaaaggcccacaggcatgcctgtactctctttcattaaggtcttgaagtcaggctgccccctccccagcccccagttctctccccaccccctcaccccacccggggctcactcagcctggcagaggaagaaggaaggcagacatctccgcagccactcctgggccttttatgtgccgagttaccccacttgccttgggcgtgtccactgagccttccccagccagtcttgttctcaattttgttttgttttgttttgagacggagtcttgctctgtcacccaggctggagtgctatggctcgatcttggctcactgcaacctccacctcccaggttcaagcaattctcttgcctcagcctcccgagtagctgggattacaggtgcatgccaccatggctggctaatttttgtatttttagtagagatggggtttcaccatattggtcaggctgatctggaacttctgacctcaggtgatccacctgcctcagcctcccaaagtgctgggattacaggcgtgagcaatcgtgcccagccttgttcttaattttgtatcatccagtcatcgctaatattacacgcaccttctcacttaatcctcacgacaagcctgtgaggcagatgctcattgttcccatcttgatgaaacttgagtctcagggaagtgaagtgacttgcccagggtcactcaggtagagttgagattcaaacccacatgtggctccaaagtctgcatctggatttgggggtgttttttggcatggcaccctcacctctctccctgcctgttttccccaaagtggaaaggaaggcctttcaaaccagagtgtctcactcccctctgacctccagaccagatggggcatgagccagccagctcagccaggctccctgtgtcctgggaggaagtgtccccatcccccatgccccttatggggagggagggcgtctgatgctctctctctgcctccccccccatcctgtcaggcacaggtgacgggggcagcccatgcgagcccttctcctgctgctctgggagggccagttccacattgagccagcctggtcccatggaaaatgatggcctgggctttctgaggccttatctgatgcctctgcagttcatgtcccccaccaggcctcgaggctcagggtgggagagggccccgggctgccctgtcactcctctaacacttccctcccctgtccccaacatgccctgtaataaaattagagaagactaac

SEQ ID NO: 27452 - DNA, 4332 bp, Homo sapiens
  source 1..4332: mol_type = unassigned DNA
ccccgccccgctctttcgcttcccgggccgccggcagccgccgccagccgcagccatgggccgggcccggccgggccaacgcgggccgcccagccccggccccgccgcgcagcctcccgcgccaccgcgccgccgcgcccgttccctggcgctgctcggagccctgctggccgccgccgctgccgccgccgtccgggtctgcgcccgccacgccgaggcccaggcggccgcgcggcaggaactggcgctgaagaccctggggacagatggcctttttctcttttcctccttggacactgacggggatatgtacatcagccctgaggagttcaaacccattgctgagaagctaacagggtcttgttctgtcacccagactggagtgcagtggtgcagtcacagctcactgcagcctcaacttccctggctcaattgatcctcctgcctcagcctcctgaggtcaactcccgcggccagctgcgaggaggaggagttgccccctgaccctagcgaggagacgctcaccatagaagcccgattccagcctctgctcccggagaccatgaccaagagcaaagatggcttcctaggggtctcccgcctcgccctgtccggcctccgaaactggacagccgccgcctcaccaagtgcagtgtttgccacccgccacttccagcccttccttcccccgccaggccaggagctgggtgagccctggtggatcatccccagtgagctgagcatgttcactggctacctgtccaacaaccgcttctatccaccgccgcccaagggcaaggaggtcatcatccaccggctcctgagcatgttccaccctcggccctttgtgaagacccgctttgcccctcagggagctgtggcctgcctgactgccatcagcgacttctactacactgtgatgttccggatccatgccgagttccagctcagtgagccgcccgacttccccttttggttctcccctgctcagttcaccggccacatcatcctctccaaagacgccacccacgtccgcgacttccggctcttcgtgcccaaccacaggtctctgaatgtggacatggagtggctttacggggccagtgaaagcagcaacatggaggtggacatcggctacataccccagatggagctggaggccacgggcccctctgtgccctccgtgatcctggatgaggatggcagcatgatcgacagccacctgccttcaggggagcccctgcagtttgtgtttgaggagatcaagtggcagcaggagctgagctgggaggaggctgcccggcgcctggaggtggccatgtaccccttcaagaaggtctcctacttgccgttcactgaggccttcgaccgagccaaggctgagaacaagctggtgcactcaatcctgctgtggggggccctggatgaccagtcctgctgaggttcagggcggactctccgggagactgtcctggaaagttcgcccatcctcaccctgctcaacgagagcttcatcagcacctggtccctggtgaaggagctggaggaactgcagaacaaccaggagaactcgtcccaccagaagctggctggcctgcacctggagaagtacagcttccccgtggagatgatgatctgcctgcccaatggcaccgtggtccatcacatcaatgccaactacttcttggacatcacctccgtgaagcccgaggaaatcgagagcaatctcttcagcttctcatccacctttgaagacccgtccacggccacctacatgcagttcctgaaggagggactccggcgtggcctgcccctcctccagccctagagtgcctggacgggatctgatgcacaggcccccacgcctcagagccagagtggtcctcagcccatttcagactgcagatgccgcccactcccaccccactcctaggctgccttggagggtacaagatccactgagggtggccaccacagccttggctccatggtggcgggtagacaagggatgcctgggctgactgggcagaggaacctctagctctgactgtcactcggctctccctacccatttggctctggaagctgcttggcccccccagatcagggcctgggtgaactccctggacctttcctagccagccgcacagtctaggcccttgtggggtgaagaatggagggaggagcaggctaggaagacggggccaccaccctctccttgctttcagcccttcccacaggaaacatcaagaagccccagccaggaggggccaggctgccaaggcggctcccctgtttatctagagccttcgttcctggccataccccggactgccctcctgtgcctgatgtccccagctggggtcagtctcaacaggagccagtcttctggagcctctgggcagaaccctccatcagagtggaaatcagacgggaccccctgcagcttccctgaccacgccactgaccagctatctggggaagtttactgtgaaggggtttctgcctttagcaatggggttcactaagggggttcccgaggcccagggccaaggcactcccaccgcctaccttagcacagggtctctgcaggactgcgggagccagcgctcctgccgcccctcttgcccctcagaccttgcatccacagaagcacaacccagccaaacaccacagccttctccagagccggcactgtcccggcaaccaggggtgccccaggctagctcttctacctctggggcaccacggactccccttggccactcttgggactttggtccacgtcctgagccactgaccacggccagtctctctttttatatgtgcagaaaagtgtttttacacaaactttctcatggtttgtaggtatttttttataaccccagtgctgaggagaaaggaggggcagtggcttccccggcagcagccccatgatggctgaatccgaaatcctcgatgggtccagcttgatgtctttgcagctgcacctatgggaagaagtagtcctctcttccttctcctcttcagctttttaaaaacagtcctcagaggatccatgatccccagcactgtcccatcctccacaaaggcccacaggcatgcctgtactctctttcattaaggtcttgaagtcaggctgccccctccccagcccccagttctctccccaccccctcaccccacccggggctcactcagcctggcagaggaagaaggaaggcagacatctccgcagccactcctgggccttttatgtgccgagttaccccacttgccttgggcgtgtccactgagccttccccagccagtcttgttctcaattttgttttgttttgttttgagacggagtcttgctctgtcacccaggctggagtgctatggctcgatcttggctcactgcaacctccacctcccaggttcaagcaattctcttgcctcagcctcccgagtagctgggattacaggtgcatgccaccatggctggctaatttttgtatttttagtagagatggggtttcaccatattggtcaggctgatctggaacttctgacctcaggtgatccacctgcctcagcctcccaaagtgctgggattacaggcgtgagcaatcgtgcccagccttgttcttaattttgtatcatccagtcatcgctaatattacacgcaccttctcacttaatcctcacgacaagcctgtgaggcagatgctcattgttcccatcttgatgaaacttgagtctcagggaagtgaagtgacttgcccagggtcactcaggtagagttgagattcaaacccacatgtggctccaaagtctgcatctggatttgggggtgttttttggcatggcaccctcacctctctccctgcctgttttccccaaagtggaaaggaaggcctttcaaaccagagtgtctcactcccctctgacctccagaccagatggggcatgagccagccagctcagccaggctccctgtgtcctgggaggaagtgtccccatcccccatgccccttatggggagggagggcgtctgatgctctctctctgcctccccccccatcctgtcaggcacaggtgacgggggcagcccatgcgagcccttctcctgctgctctgggagggccagttccacattgagccagcctggtcccatggaaaatgatggcctgggctttctgaggccttatctgatgcctctgcagttcatgtcccccaccaggcctcgaggctcagggtgggagagggccccgggctgccctgtcactcctctaacacttccctcccctgtccccaacatgccctgtaataaaattagagaagactaac

SEQ ID NO: 27453 - DNA, 4212 bp, Homo sapiens
  source 1..4212: mol_type = unassigned DNA
gcttcccgggccgccggcagccgccgccagccgcagccatgggccgggcccggccgggccaacgcgggccgcccagccccggccccgccgcgcagcctcccgcgccaccgcgccgccgcgcccgttccctggcgctgctcggagccctgctggccgccgccgctgccgccgccgtccgggtctgcgcccgccacgccgaggcccaggcggccgcgcggcaggaactggcgctgaagaccctggggacagatggcctttttctcttttcctccttggacactgacggggatatgtacatcagccctgaggagttcaaacccattgctgagaagctaacagggtcaactcccgcggccagctgcgaggaggaggagttgccccctgaccctagcgaggagacgctcaccatagaagcccgattccagcctctgctcccggagaccatgaccaagagcaaagatggcttcctaggggtctcccgcctcgccctgtccggcctccgaaactggacagccgccgcctcaccaagtgcagtgtttgccacccgccacttccagcccttccttcccccgccaggccaggagctgggtgagccctggtggatcatccccagtgagctgagcatgttcactggctacctgtccaacaaccgcttctatccaccgccgcccaagggcaaggaggtcatcatccaccggctcctgagcatgttccaccctcggccctttgtgaagacccgctttgcccctcagggagctgtggcctgcctgactgccatcagcgacttctactacactgtgatgttccggatccatgccgagttccagctcagtgagccgcccgacttccccttttggttctcccctgctcagttcaccggccacatcatcctctccaaagacgccacccacgtccgcgacttccggctcttcgtgcccaaccacaggtctctgaatgtggacatggagtggctttacggggccagtgaaagcagcaacatggaggtggacatcggctacataccccagatggagctggaggccacgggcccctctgtgccctccgtgatcctggatgaggatggcagcatgatcgacagccacctgccttcaggggagcccctgcagtttgtgtttgaggagatcaagtggcagcaggagctgagctgggaggaggctgcccggcgcctggaggtggccatgtaccccttcaagaaggtctcctacttgccgttcactgaggccttcgaccgagccaaggctgagaacaagctggtgcactcaatcctgctgtggggggccctggatgaccagtcctgctgaggttcagggcggactctccgggagactgtcctggaaagttcgcccatcctcaccctgctcaacgagagcttcatcagcacctggtccctggtgaaggagctggaggaactgcagaacaaccaggagaactcgtcccaccagaagctggctggcctgcacctggagaagtacagcttccccgtggagatgatgatctgcctgcccaatggcaccgtggtccatcacatcaatgccaactacttcttggacatcacctccgtgaagcccgaggaaatcgagagcaatctcttcagcttctcatccacctttgaagacccgtccacggccacctacatgcagttcctgaaggagggactccggcgtggcctgcccctcctccagccctagagtgcctggacgggatctgatgcacaggcccccacgcctcagagccagagtggtcctcagcccatttcagactgcagatgccgcccactcccaccccactcctaggctgccttggagggtacaagatccactgagggtggccaccacagccttggctccatggtggcgggtagacaagggatgcctgggctgactgggcagaggaacctctagctctgactgtcactcggctctccctacccatttggctctggaagctgcttggcccccccagatcagggcctgggtgaactccctggacctttcctagccagccgcacagtctaggcccttgtggggtgaagaatggagggaggagcaggctaggaagacggggccaccaccctctccttgctttcagcccttcccacaggaaacatcaagaagccccagccaggaggggccaggctgccaaggcggctcccctgtttatctagagccttcgttcctggccataccccggactgccctcctgtgcctgatgtccccagctggggtcagtctcaacaggagccagtcttctggagcctctgggcagaaccctccatcagagtggaaatcagacgggaccccctgcagcttccctgaccacgccactgaccagctatctggggaagtttactgtgaaggggtttctgcctttagcaatggggttcactaagggggttcccgaggcccagggccaaggcactcccaccgcctaccttagcacagggtctctgcaggactgcgggagccagcgctcctgccgcccctcttgcccctcagaccttgcatccacagaagcacaacccagccaaacaccacagccttctccagagccggcactgtcccggcaaccaggggtgccccaggctagctcttctacctctggggcaccacggactccccttggccactcttgggactttggtccacgtcctgagccactgaccacggccagtctctctttttatatgtgcagaaaagtgtttttacacaaactttctcatggtttgtaggtatttttttataaccccagtgctgaggagaaaggaggggcagtggcttccccggcagcagccccatgatggctgaatccgaaatcctcgatgggtccagcttgatgtctttgcagctgcacctatgggaagaagtagtcctctcttccttctcctcttcagctttttaaaaacagtcctcagaggatccatgatccccagcactgtcccatcctccacaaaggcccacaggcatgcctgtactctctttcattaaggtcttgaagtcaggctgccccctccccagcccccagttctctccccaccccctcaccccacccggggctcactcagcctggcagaggaagaaggaaggcagacatctccgcagccactcctgggccttttatgtgccgagttaccccacttgccttgggcgtgtccactgagccttccccagccagtcttgttctcaattttgttttgttttgttttgagacggagtcttgctctgtcacccaggctggagtgctatggctcgatcttggctcactgcaacctccacctcccaggttcaagcaattctcttgcctcagcctcccgagtagctgggattacaggtgcatgccaccatggctggctaatttttgtatttttagtagagatggggtttcaccatattggtcaggctgatctggaacttctgacctcaggtgatccacctgcctcagcctcccaaagtgctgggattacaggcgtgagcaatcgtgcccagccttgttcttaattttgtatcatccagtcatcgctaatattacacgcaccttctcacttaatcctcacgacaagcctgtgaggcagatgctcattgttcccatcttgatgaaacttgagtctcagggaagtgaagtgacttgcccagggtcactcaggtagagttgagattcaaacccacatgtggctccaaagtctgcatctggatttgggggtgttttttggcatggcaccctcacctctctccctgcctgttttccccaaagtggaaaggaaggcctttcaaaccagagtgtctcactcccctctgacctccagaccagatggggcatgagccagccagctcagccaggctccctgtgtcctgggaggaagtgtccccatcccccatgccccttatggggagggagggcgtctgatgctctctctctgcctccccccccatcctgtcaggcacaggtgacgggggcagcccatgcgagcccttctcctgctgctctgggagggccagttccacattgagccagcctggtcccatggaaaatgatggcctgggctttctgaggccttatctgatgcctctgcagttcatgtcccccaccaggcctcgaggctcagggtgggagagggccccgggctgccctgtcactcctctaacacttccctcccctgtccccaacatgccctgtaataaaattagagaagactaa

SEQ ID NO: 27454 - DNA, 2204 bp, Homo sapiens
  source 1..2204: mol_type = unassigned DNA
acagacaggcaggtgcaggagacggggtgagcgcttttgggctctagccccatggcagcatctaggggtgtgttacaattaatgctcttttagcagttgctgttcgcggatggctaagtgttaaaccagctcagtggagagtcagggtggcagccttttacgccctgtcctcttggtacccgggtctttgtctagcatccaggaagaatcaggtcctacagacttgaaggatggtgaatacagagattttattgaatgatggaggaggctttcagcaggatggatggggagctggaaagcggatggagtgagaagataatcttcccctggggtttggccatcccatggctgatctctctgacagtccccagccgaactcctctcgatgttcagacactctttctcctctctcctctgccacactgctctgctgctcttctgctcatggagcctgaggacaaccccagcaatgtggagaagcctggggcttgccctggctctctgtctcctcccatcgggaggaacagagagccaggaccaaagctccttatgtaagcaacccccagcctggagcataagagatcaagatccaatgctaaactccaatggttcagtgactgtggttgctcttcttcaagccagctgatacctgtgcatactgcaggcatctaaattagaagacctgcgagtaaaactgaagaaagaaggatattctaatatttcttatattgttgttaatcatcaaggaatctcttctcgattaaaatacacacatcttaagaataaggtttcagagcatattcctgtttatcaacaagaagaaaaccaaacagatgtctggactcttttaaatggaagcaaagatgacttcctcatatatgatagatgtggccgtcttgtatatcatcttggtttgcctttttccttcctaactttcccatatgtagaagaagccattaagattgcttactgtgaaaagaaatgtggaaactgctctctcacgactctcaaagatgaagacttttgtaaacgtgtatctttggctactgtggataaaacagttgaaactccatcgcctcattaccatcatgagcatcatcacaatcatggacatcagcaccttggcagcagtgagctttcagagaatcagcaaccaggagcaccaaatgctcctactcatcctgctcctccaggccttcatcaccaccataagcacaagggtcagcataggcagggtcacccagagaaccgagatatgccagcaagtgaagatttacaagatttacaaaagaagctctgtcgaaagagatgtataaatcaattactctgtaaattgcccacagattcagagttggctcctaggagctgatgctgccattgtcgacatctgatatttgaaaaaacagggtctgcaatcacctgacagtgtaaagaaaacctcccatctttatgtagctgacagggacttcgggcagaggagaacataactgaatcttgtcagtgacgtttgcctccagctgcctgacaaataagtcagcagcttatacccacagaagccagtgccagttgacgctgaaagaatcaggcaaaaaagtgagaatgaccttcaaactaaatatttaaaataggacatactccccaatttagtctagacacaatttcatttccagcatttttataaactaccaaattagtgaaccaaaaatagaaattagatttgtgcaaacatggagaaatctactgaattggcttccagattttaaattttatgtcatagaaatattgactcaaaccatattttttatgatggagcaactgaaaggtgattgcagcttttggttaatatgtctttttttttctttttccagtgttctatttgctttaatgagaatagaaacgtaaactatgacctaggggtttctgttggataattagcagtttagaatggaggaagaacaacaaagacatgctttccatttttttctttacttatctctcaaaacaatattactttgtcttttcaatcttctacttttaactaataaaataagtggattttgtattttaagatccagaaatacttaacacgtgaatattttgctaaaaaagcatatataactattttaaatatccatttatcttttgtatatctaagactcatcctgatttttactatcacacatgaataaagcctttgtatcttt

SEQ ID NO: 27455 - DNA, 787 bp, Homo sapiens
  source 1..787: mol_type = unassigned DNA
tgtggagctgccagagtaaagcaaagagaaaggaagcaggcccgttggaagtggttgtctacttgcaatatgtgctctgggctggacgcggtggctcacgcttgtaatcccagcactttgggaggccaaggcaggcggatcacgaggacaaccccagcaatgtggagaagcctggggcttgccctggctctctgtctcctcccatcgggaggaacagagagccaggaccaaagctccttatgtaagcaacccccagcctggagcataagagatcaagatccaatgctaaactccaatggttcagtgactgtggttgctcttcttcaagccagctgatacctgtgcatactgcaggcatctaaattagaagacctgcgagtaaaactgaagaaagaaggatattctaatatttcttatattgttgttaatcatcaaggaatctcttctcgattaaaatacacacatcttaagaataaggtttcagagcatattcctgtttatcaacaagaagaaaaccaaacagatgtctggactcttttaaatggaagcaaagatgacttcctcatatatgatagatgtggccgtcttgtatatcatcttggtttgcctttttccttcctaactttcccatatgtagaagaagccattaagattgcttactgtgaaaagaaatgtggaaactgctctctcacgactctcaaagatgaagacttttgtaaacgtgtatctttggctactgtggataaaacagttgaaactccatcgcctcattaccatcatgagcatc

SEQ ID NO: 27456 - DNA, 1853 bp, Homo sapiens
  source 1..1853: mol_type = unassigned DNA
gtggagctgccagagtaaagcaaagagaaaggaagcaggcccgttggaagtggttgtttaagttcttatcaagatatcatatataggacaaccccagcaatgtggagaagcctggggcttgccctggctctctgtctcctcccatcgggaggaacagagagccaggaccaaagctccttatgtaagcaacccccagcctggagcataagagatcaagatccaatgctaaactccaatggttcagtgactgtggttgctcttcttcaagccagctgatacctgtgcatactgcaggcatctaaattagaagacctgcgagtaaaactgaagaaagaaggatattctaatatttcttatattgttgttaatcatcaaggaatctcttctcgattaaaatacacacatcttaagaataaggtttcagagcatattcctgtttatcaacaagaagaaaaccaaacagatgtctggactcttttaaatggaagcaaagatgacttcctcatatatgatagatgtggccgtcttgtatatcatcttggtttgcctttttccttcctaactttcccatatgtagaagaagccattaagattgcttactgtgaaaagaaatgtggaaactgctctctcacgactctcaaagatgaagacttttgtaaacgtgtatctttggctactgtggataaaacagttgaaactccatcgcctcattaccatcatgagcatcatcacaatcatggacatcagcaccttggcagcagtgagctttcagagaatcagcaaccaggagcaccaaatgctcctactcatcctgctcctccaggccttcatcaccaccataagcacaagggtcagcataggcagggtcacccagagaaccgagatatgccagcaagtgaagatttacaagatttacaaaagaagctctgtcgaaagagatgtataaatcaattactctgtaaattgcccacagattcagagttggctcctaggagctgatgctgccattgtcgacatctgatatttgaaaaaacagggtctgcaatcacctgacagtgtaaagaaaacctcccatctttatgtagctgacagggacttcgggcagaggagaacataactgaatcttgtcagtgacgtttgcctccagctgcctgacaaataagtcagcagcttatacccacagaagccagtgccagttgacgctgaaagaatcaggcaaaaaagtgagaatgaccttcaaactaaatatttaaaataggacatactccccaatttagtctagacacaatttcatttccagcatttttataaactaccaaattagtgaaccaaaaatagaaattagatttgtgcaaacatggagaaatctactgaattggcttccagattttaaattttatgtcatagaaatattgactcaaaccatattttttatgatggagcaactgaaaggtgattgcagcttttggttaatatgtctttttttttctttttccagtgttctatttgctttaatgagaatagaaacgtaaactatgacctaggggtttctgttggataattagcagtttagaatggaggaagaacaacaaagacatgctttccatttttttctttacttatctctcaaaacaatattactttgtcttttcaatcttctacttttaactaataaaataagtggattttgtattttaagatccagaaatacttaacacgtgaatattttgctaaaaaagcatatataactattttaaatatccatttatcttttgtatatctaagactcatcctgatttttactatcacacatgaataaagcctttgtatctttctttctctaatgttgtatc

SEQ ID NO: 27457 - DNA, 1047 bp, Homo sapiens
  source 1..1047: mol_type = unassigned DNA
caggagcatgacgagggagagaggtcatcgaggctggggtgagacatctgacttaccgtcaggagccacgtcagtgcctcataaaatccaatctccattcaggacaaccccagcaatgtggagaagcctggggcttgccctggctctctgtctcctcccatcgggaggaacagagagccaggaccaaagctccttatgtaagcaacccccagcctggagcataagagatcaagatccaatgctaaactccaatggttcagtgactgtggttgctcttcttcaagccagctgatacctgtgcatactgcaggcatctaaattagaagacctgcgagtaaaactgaagaaagaaggatattctaatatttcttatattgttgttaatcatcaaggaatctcttctcgattaaaatacacacatcttaagaataaggtttcagagcatattcctgtttatcaacaagaagaaaaccaaacagatgtctggactcttttaaatggaagcaaagatgacttcctcatatatgatagatgtggccgtcttgtatatcatcttggtttgcctttttccttcctaactttcccatatgtagaagaagccattaagattgcttactgtgaaaagaaatgtggaaactgctctctcacgactctcaaagatgaagacttttgtaaacgtgtatctttggctactgtggataaaacagttgaaactccatcgcctcattaccatcatgagcatcatcacaatcatggacatcagcaccttggcagcagtgagctttcagagaatcagcaaccaggagcaccaaatgctcctactcatcctgctcctccaggccttcatcaccaccataagcacaagggtcagcataggcagggtcacccagagaaccgagatatgccagcaagtgaagatttacaagatttacaaaagaagctctgtcgaaagagatgtataaatcaattactctgtaaattgcccacagattcagagttggctcctaggagctgatgctgccattgtcgacatctgatatttgaaaa

SEQ ID NO: 27458 - DNA, 2243 bp, Homo sapiens
  source 1..2243: mol_type = unassigned DNA
gtcaaaatgttttccccatattatgcatggcagcacttgctactttcttttaagttgataacaatcagctcaggggtttgctctgcttgcaaggtcactgcaagaatgaacattgaactttggactatacctgaggggtgaggtaaacaacaggactataaatatcagagtgtgctgctgtggctttgtggagctgccagagtaaagcaaagagaaaggaagcaggcccgttggaagtggttgtgacaaccccagcaatgtggagaagcctggggcttgccctggctctctgtctcctcccatcgggaggaacagagagccaggaccaaagctccttatgtaagcaacccccagcctggagcataagagatcaagatccaatgctaaactccaatggttcagtgactgtggttgctcttcttcaagccagctgatacctgtgcatactgcaggcatctaaattagaagacctgcgagtaaaactgaagaaagaaggatattctaatatttcttatattgttgttaatcatcaaggaatctcttctcgattaaaatacacacatcttaagaataaggtttcagagcatattcctgtttatcaacaagaagaaaaccaaacagatgtctggactcttttaaatggaagcaaagatgacttcctcatatatgatagatgtggccgtcttgtatatcatcttggtttgcctttttccttcctaactttcccatatgtagaagaagccattaagattgcttactgtgaaaagaaatgtggaaactgctctctcacgactctcaaagatgaagacttttgtaaacgtgtatctttggctactgtggataaaacagttgaaactccatcgcctcattaccatcatgagcatcatcacaatcatggacatcagcaccttggcagcagtgagctttcagagaatcagcaaccaggagcaccaaatgctcctactcatcctgctcctccaggccttcatcaccaccataagcacaagggtcagcataggcagggtcacccagagaaccgagatatgccagcaagtgaagatttacaagatttacaaaagaagctctgtcgaaagagatgtataaatcaattactctgtaaattgcccacagattcagagttggctcctaggagctgatgctgccattgtcgacatctgatatttgaaaaaacagggtctgcaatcacctgacagtgtaaagaaaacctcccatctttatgtagctgacagggacttcgggcagaggagaacataactgaatcttgtcagtgacgtttgcctccagctgcctgacaaataagtcagcagcttatacccacagaagccagtgccagttgacgctgaaagaatcaggcaaaaaagtgagaatgaccttcaaactaaatatttaaaataggacatactccccaatttagtctagacacaatttcatttccagcatttttataaactaccaaattagtgaaccaaaaatagaaattagatttgtgcaaacatggagaaatctactgaattggcttccagattttaaattttatgtcatagaaatattgactcaaaccatattttttatgatggagcaactgaaaggtgattgcagcttttggttaatatgtctttttttttctttttccagtgttctatttgctttaatgagaatagaaacgtaaactatgacctaggggtttctgttggataattagcagtttagaatggaggaagaacaacaaagacatgctttccatttttttctttacttatctctcaaaacaatattactttgtcttttcaatcttctacttttaactaataaaataagtggattttgtattttaagatccagaaatacttaacacgtgaatattttgctaaaaaagcatatataactattttaaatatccatttatcttttgtatatctaagactcatcctgatttttactatcacacatgaataaagcctttgtatctttctttctctaatgttgtatcatactcttctaaaacttgagtggctgtcttaaaagatataaggggaaagataatattgtctgtctctatattgcttagtaagtatttccatagtcaatgatggtttaataggtaaaccaaaccctataaacctgacctcctttatggttaatactattaagcaagaatgcagtacagaattggatacagtacggatttgtccaaataaattcaataaaaaccttaaagctga

SEQ ID NO: 27459 - DNA, 888 bp, Homo sapiens
  source 1..888: mol_type = unassigned DNA
gggctggcgggtcgcgggttccttatcctccgccttggcgcctctccgcccaccgcccaccgcccctccctggcattggttggcgccaggggaagccgaggctccatcctttctgcgcaggttcccgccgcactcgcgcagacctagcgcgtccaggtgggaggttagtgtggcccgggcgtccgctcctcagcggatgtggcagccccgagccatggctctcgccgtccgagtcgtttattgtggcgcttgaggctacaagtccaagtatcttcagctcaagaagaagttagaagatgagttccccggccgcctggacatctgcggcgagggaactccccaggccaccgggttctttgaagtgatggtagccgggaagttgattcactctaagaagaaaggcgatggctacgtggacacagaaagcaagtttctgaagttggtggccgccatcaaagccgccttggctcagggctaatgcgccctgaaggcagagtccagggaccttgacccagcccctctcagcagacgcttcatgataggaaggactgaaaagtcttgtggacacctggtctttccctgatgttctcgtggctgctgttgggggcagagattgacgcccccggtctttgcctctgagcgggagagtctgtgtgtatgtgtcttccccggaatccacaccaccccaccctcctcctgtcccgtggtttcatcatatctctttgcataccccatgtcttccccagttgtcccctggagtttggggggacatcccgcctcaggcatccttctcaaggggaagccaagagaggcatcaggatgggtgggtttctgattgtggcaacgtttgcaaccgttcacgattcaataaatattggatgaatttaa

SEQ ID NO: 27460 - DNA, 881 bp, Homo sapiens
  source 1..881: mol_type = unassigned DNA
gcgggttccttatcctccgccttggcgcctctccgcccaccgcccaccgcccctccctggcattggttggcgccaggggaagccgaggctccatcctttctgcgcaggttcccgccgcactcgcgcagacctagcgcgtccaggtgggaggttagtgtggcccgggcgtccgctcctcagcggatgtggcagccccgagccatggctctcgccgtccgagtcgtttattgctgcggggccggaggctacaagtccaagtatcttcagctcaagaagaagttagaagatgagttccccggccgcctggacatctgcggcgagggaactccccaggccaccgggttctttgaagtgatggtagccgggaagttgattcactctaagaagaaaggcgatggctacgtggacacagaaagcaagtttctgaagttggtggccgccatcaaagccgccttggctcagggctaatgcgccctgaaggcagagtccagggaccttgacccagcccctctcagcagacgcttcatgataggaaggactgaaaagtcttgtggacacctggtctttccctgatgttctcgtggctgctgttgggggcagagattgacgcccccggtctttgcctctgagcgggagagtctgtgtgtatgtgtcttccccggaatccacaccaccccaccctcctcctgtcccgtggtttcatcatatctctttgcataccccatgtcttccccagttgtcccctggagtttggggggacatcccgcctcaggcatccttctcaaggggaagccaagagaggcatcaggatgggtgggtttctgattgtggcaacgtttgcaaccgttcacgattcaataaatattggatgaatttaactg

SEQ ID NO: 27461 - DNA, 1423 bp, Homo sapiens
  source 1..1423: mol_type = unassigned DNA
cagccctgaggaggggcggggcctcccggaggcggaagccgggattcgccctccggggagcgattggtcctcgggaggggcggggaggtggacgcgggtaccggcggtcgtcgggtcggcagcctttggtcagttggcagcggcaagcgcgctgcggttccggtggcgccatgtcgttctgcagcttcttcgggggcgaggttttccagaatcactttgaacctggcgtttacgtgtgtgccaagtgtggctatgagctgttctccagccgctcgaagtatgcacactcgtctccatggccggcgttcaccgagaccattcacgccgacagcgtggccaagcgtccggagcacaatagatctgaagccttgaaggtgtcctgtggcaagtgtggcaatgggttgggccacgagttcctgaacgacggccccaagccggggcagtcccgattctgaatattcagcagctcgctgaagtttgtccctaaaggcaaagaaacttctgcctcccagggtcactaggcgggcagcccacacccaccccagacggccaccacactgaggccacacgttggccattccaccttggagttggaaccctgggcgtcgagacaggaaggcagggcgcagtggttgaaacatcaggacactcccaaggccccggctctgaacaagaccttttcgtttcttggaaaagagactcatttgctgatggttcatgccttctgctgggacaggcctgggctgtgcagccacactgtcggctgacttagccccctgctcactctaggtgcctccaggaggtgagccctgggtgcagctggtctctgaatgacgttacaccctcaccttcttttcctggccctgtctctggactctcccctgtgaggcccaattccaagacagactctcgtcctcaccgaagcttaggcccacatctcccaggctgcttaggagacagaatggaaacggaggccgcccctgccagccgccctggccctggtcactgcatgatccgctctggtcaaacccttccaggccagccagagtggggatggtctgtgacctgctgggaaggcaggctgatggggcacacccttggcctctcgtccacgaggggagaaacctaaaccctgtttcacaatctgtgcggaagtagcttgcctcacttctgcttaggaaagcggctgttgctccataactctaaccagcacagggctgaggcctgcagtgcacacctgcagggaggcccttcccaaggtgtggtgactgtgccttactgtacatgctcggaggcctggccatataggagggtgggtgatgctgaaatcaccccccatcttaagtaattactttctggagtaatcaggtggaaatccatagacaaatgaaacattcagatgtactgtctttttttttgtttt

SEQ ID NO: 27462 - DNA, 839 bp, Homo sapiens
  source 1..839: mol_type = unassigned DNA
gcggcaagcgcgctgcggttccggtggcgccatgtcgttctgcagcttcttcgggggcgaggttttccagaatcactttgaacctggcgtttacgtgtgtgccaagtgtggctatgagctgttctccagccgctcgaagtatgcacactcgtctccatggccggcgttcaccgagaccattcacgccgacagcgtggccaagcgtccggagcacaatagatctgaagccttgaaggtgagaggccacaggggtgggggagggacgggggcggccagggagagcagagagccagtcccaccttcctccctctgcttgccccacagctccaggggcttagaggcgtctattccaggcctgttgcctctgccagggagctgccaccccaggctatcgggagagcctggccttctggtgcaaatgtgggaaacaggacaggtttcctgtacgggctccaggacaaaggtcaacctcttatgtcggcggtcagcttgggaaataggcgtgtgggaagaaacaccatctgccagccccagtaagggccttcactgtggctgtatcatggccagaagctcacccagctgccttgtgatctttccaggtgtcctgtggcaagtgtggcaatgggttgggccacgagttcctgaacgacggccccaagccggggcagtcccgattctgaatattcagcagctcgctgaagtttgtccctaaaggcaaagaaacttctgcctcccagggtcactaggcgggcagcccacacccaccccagacggccaccacactgaggccacacgttggccattccaccttggagttggaaccctgggcgtcgagacag

SEQ ID NO: 27463 - DNA, 6476 bp, Homo sapiens
  source 1..6476: mol_type = unassigned DNA
cagtttggcaagtcagtgcaagaggctgacttctgagaggcttccaggagcccgaagagaggacctccacgggagaagggagtgcgtgtgctcggttttgtttttttctctcttttttttttttttttctgaatgaacagctttgcccaagtgactgaaaaatacagcttcttcctgaatctaccggcgtagttgctgaagagcgctctagacaggacatggctctgaagactcactctttggaatgtcctcttgctcccggcttataaacaactgtcccgaggaaagaaaggttttacatagccaaatacagcctgacaaatggcacttcggaactgtgctttctgatgacaacgcgttcgatttctgacaaagcctctcgcacgctgcccctggagggaagtcctaagtaaaactcagaccctccttaaagtgaggagcgagggcttggacggtgaacacggcagcatggcatccgcggggcacattatcaccttgctcctgtggggttacttactggagctttggacaggaggtcatacagctgatactacccacccccggttacgcctgtcacataaagagctcttgaatctgaacagaacatcaatatttcatagcccttttggatttcttgatctccatacaatgctgctggatgaatatcaagagaggctcttcgtgggaggcagggaccttgtatattccctcagcttggagagaatcagtgacggctataaagagatacactggccgagtacagctctaaaaatggaagaatgcataatgaagggaaaagatgcgggtgaatgtgcaaattatgttcgggttttgcatcactataacaggacacaccttctgacctgtggtactggagcttttgatccagtttgtgccttcatcagagttggatatcatttggaggatcctctgtttcacctggaatcacccagatctgagagaggaaggggcagatgtccttttgaccccagctcctccttcatctccactttaattggtagtgaattgtttgctggactctacagtgactactggagcagagacgctgcgatcttccgcagcatggggcgactggcccatatccgcactgagcatgacgatgagcgtctgttgaaagaaccaaaatttgtaggttcatacatgattcctgacaatgaagacagagatgacaacaaagtatatttcttttttactgagaaggcactggaggcagaaaacaatgctcacgcaatttacaccagggtcgggcgactctgtgtgaatgatgtaggagggcagagaatactggtgaataagtggagcactttcctaaaagcgagactcgtttgctcagtaccaggaatgaatggaattgacacatattttgatgaattagaggacgtttttttgctacctaccagagatcataagaatccagtgatatttggactctttaacactaccagtaatatttttcgagggcatgctatatgtgtctatcacatgtctagcattcgggcagccttcaacggaccatatgcacataaggaaggacctgaataccactggtcagtctatgaaggaaaagtcccttatccaaggcctggttcttgtgccagcaaagtaaatggagggagatacggaaccaccaaggactatcctgatgatgccatccgatttgcaagaagtcatccactaatgtaccaggccataaaacctgcccataaaaaaccaatattggtaaaaacagatggaaaatataacctgaaacaaatagcagtagatcgagtggaagctgaggatggccaatatgacgtcttgtttattgggacagataatggaattgtgctgaaagtaatcacaatttacaaccaagaaatggaatcaatggaagaagtaattctagaagaacttcagatattcaaggatccagttcctattatttctatggagatttcttcaaagcggcaacagctgtatattggatctgcttctgctgtggctcaagtcagattccatcactgtgacatgtatggaagtgcttgtgctgactgctgcctggctcgagacccttactgtgcctgggatggcatatcctgctcccggtattacccaacaggcacacatgcaaaaaggcgtttccggagacaagatgttcgacatggaaatgcagctcagcagtgctttggacaacagtttgttggggatgctttggataagactgaagaacatctggcttatggcatagagaacaacagtactttgctggaatgtaccccacgatctttacaagcgaaagttatctggtttgtacagaaaggacgtgagacaagaaaagaggaggtgaagacagatgacagagtggttaagatggaccttggtttactcttcctaaggttacacaaatcagatgctgggacctatttttgccagacagtagagcatagctttgtccatacggtccgtaaaatcaccttggaggtagtggaagaggagaaagtcgaggatatgtttaacaaggacgatgaggaggacaggcatcacaggatgccttgtcctgctcagagtagcatctcgcagggagcaaaaccatggtacaaggaattcttgcagctgatcggttatagcaacttccagagagtggaagaatactgcgagaaagtatggtgcacagatagaaagaggaaaaagcttaaaatgtcaccctccaagtggaagtatgccaaccctcaggaaaagaagctccgttccaaacctgagcattaccgcctgcccaggcacacgctggactcctgatggggtgagactatctactgtcttttgaagaatttatatttggaaagtaaaaaagtaaaaaaataaatcatccaacttctttgcattacttaaaagagatttctgtaatacaggaatgactatgaaggtgttataataaattattctacatactcatttgactggataaactttacataaaattaactaattttttaaataaatgcattgcttaatggtttctcattatgtttatcaaaaaacaactgtagctgttattttcagtacttggctgcttttctgtgaaaattattattttacttttggaagacaagattattagaatattgaagaaaaattggagacttataatcatggtaaatataaaactaaatatgttttaatatttctgaatttttcttttccatcacaatgtaagatatgcagaatacaagatactttggcattctcatgtgaactttctgtactctttaaggattattttattagtgttgtttaagccatgagtgttaagtagcaggtgtgttgtgagtgctgtaacccatgaaaggaaaaatgtcattctgaggcttgtgcccttcgtaaaatattcattaaagtacattcacactatttttgctttataacacagtctttaattttcactcactgtggaaataaaaactaaggtaacttctcagaaagatatcaaatctcagaaagaatgtcaaatcagatgaagttatagttaggattctaactactgtaaaagatttttgcttccctcttgtggtaaaaaaaattatattctcacacatttcttttttctctacagacggatatctgtttaggaaagatttgaaagcagattatcagtaggtacatggatacatcaagttcatttgcagaaacaaataactgaaataaaaaacatgttaatccttgtatcatactttaatatgaaagtattgtttatagataatttatctcacaagtcaaaaatgaagattttgcagcactgaaaatctattaaagctccaaattttaagtttctaaataatcttcgctgaaatctaaaatatactataacaaccgtgttttatttgtgaaaaaaatattaaagtgatttgctctcaaatatcaaattttcttctctcttttatattaagagacagaaaattgtttcatgagttcacttaactactgagatattcagagcatttttacctctctcttaaatgttataaaaaacaattgtatttttaagaatgtttatttatcaaagtctttccttcttctattaaatatttagcaattacctttctaaaatatgaaattttgtaagatgttttcacctaaataaaaattgaaagcaagtggattacacaggagaaccattatgaacatttatttagatattaatcttaaacagtgtttatttcagttttcaaagttagcttataggttatacatttaagttaaagtgctcataatcacttgcaatttcattgtaaaatgaacaaatacataaatattttaagaaaaatttaagtttattcagataagtcaccatgcttcaaaagatctaagaaatgcaaatatactgaaaattgacatcctctgaaaattccacttgctatttacccaagaatccactggaggtcattactgccattaaataataactgaaaagactatgtagtgaaatgtatttttaaaaactatattcagtaaaagcctgctcaatttggagaaatagaaccacaaacacagatcacaggggccttacaaagtttatgtctgaacaaataagtcaattaagtacactttattgaaaattgccttccattaacacacaagaaagaaagcaggattttctcctgtatctgaattttaaaattaaaaaggcagataagacataaatagttatcattttaattgcaataacacagacaagtagttaatgatgataacaatggtgtaacttgtaaactaaatatttggtaactgaagcaataggcagaggaaaatagcttttctatgacacaagtcataagaagtccatatactgaagagcgtttgattaaaataaagtgactattaaccagaaaagaaacattttacataaaatgctaaaatttattataggaaaataaatcaaacccaaagaaagtttattcaatgctaatttgaaagaaaattgataagaaaactttgagggcccaagtccacaatttggtgagaccactaaattttacatataattatacacacacatatgtacatatatatgtatataatcttgcttcccgcctgtttatggcagtactgaagagaaatgggaaagaagagggagggagagagaaagacgaagggagagagaaagcagtttccaaggatatgtttcatgtcccaccattttctcagtttctccctctctctcccaacacacacacacacacacccctcacatactataaaataaatcttcactgccctatcaaaatacaaataaatcaatctatgctgttctgtccttcttgagaatctaaaacataccacaaaaatacatccccagtcttttgttctgtctgaggttagaattaattcaaattcagaatctgttgtgagaaatgcccaggctttaaaaattaaaaatggatggatcttctctgaactcagggagggcacatacttagatacctacaagacttggaggaattaagagttcacccttcatctcaccaaattttccccatttttctctttcttgtagaaggagagaaaccatgctctctagcaacattgagcaaaaatcataaccactcatctaatttctaagaggcacctccatcgagggccggtctcctgcttctttagacctcttctatctttgttacaggagaggacctgtggatagacttagttttgacataaaacaatgcccattcacctcctccttcagcacaacgtcacccattgggcaagagatccagatttgttaacaaaaaagattttacttcgtgattccacgtctataattctatattgctaattttttcttttgtgtgaattactgaatatttcagagcaaagctatcaacttggagaaacagggattaaaaataaggataaacactaataagagctctagaaaaaagggaacagaaagtctgcctgtttagtaagtggcaattccatacatattttagagttttttctatctaaaattagttaaatacttagaatgtttgtaatgagtgttcgatatttgctataggttttagggttttgtaaatcttcatagtaattataaacatttgtaaaatttgtaaaatactataagtcattttgagtgttggtgttaagcatgaaacaaacagcagctgttgtccttaaaaatgaattgacctggccgggcgcggtggctcacgcctgtaatcccagcactttgggaggccgaggcgggtggatcatgaggtcaggagatcgagaccatcctggctaacaaggtgaaaccccgtctctactaaaaatacaaaaaattagccgggcgcggtggcgggcgcctgtagtcccagctacttgggaggctgaggcaggagaatggcgtgaacccgggaagcggagcttgcagtgagccgagattgcgccactgcagtccgcagtccggcctgggcgacagagcgagactccgtctc

SEQ ID NO: 27464 - DNA, 2414 bp, Homo sapiens
  source 1..2414: mol_type = unassigned DNA
aaactaaacagtgtcctataggcagctatcagctcagcatgtgttgtttacttggaaagtgaaagaaagtctcccactttgccttcccttagatgaacagagctcttgaatctgaacagaacatcaatatttcatagcccttttggatttcttgatctccatacaatgctgctggatgaatatcaagagaggctcttcgtgggaggcagggaccttgtatattccctcagcttggagagaatcagtgacggctataaagagatacactggccgagtacagctctaaaaatggaagaatgcataatgaagggaaaagatgcgggtgaatgtgcaaattatgttcgggttttgcatcactataacaggacacaccttctgacctgtggtactggagcttttgatccagtttgtgccttcatcagagttggatatcatttggaggatcctctgtttcacctggaatcacccagatctgagagaggaaggggcagatgtccttttgaccccagctcctccttcatctccactttaattggtagtgaattgtttgctggactctacagtgactactggagcagagacgctgcgatcttccgcagcatggggcgactggcccatatccgcactgagcatgacgatgagcgtctgttgaaagaaccaaaatttgtaggttcatacatgattcctgacaatgaagacagagatgacaacaaagtatatttcttttttactgagaaggcactggaggcagaaaacaatgctcacgcaatttacaccagggtcgggcgactctgtgtgaatgatgtaggagggcagagaatactggtgaataagtggagcactttcctaaaagcgagactcgtttgctcagtaccaggaatgaatggaattgacacatattttgatgaattagaggacgtttttttgctacctaccagagatcataagaatccagtgatatttggactctttaacactaccagtaatatttttcgagggcatgctatatgtgtctatcacatgtctagcattcgggcagccttcaacggaccatatgcacataaggaaggacctgaataccactggtcagtctatgaaggaaaagtcccttatccaaggcctggttcttgtgccagcaaagtaaatggagggagatacggaaccaccaaggactatcctgatgatgccatccgatttgcaagaagtcatccactaatgtaccaggccataaaacctgcccataaaaaaccaatattggtaaaaacagatggaaaatataacctgaaacaaatagcagtagatcgagtggaagctgaggatggccaatatgacgtcttgtttattgggacagataatggaattgtgctgaaagtaatcacaatttacaaccaagaaatggaatcaatggaagaagtaattctagaagaacttcagatattcaaggatccagttcctattatttctatggagatttcttcaaagcggcaacagctgtatattggatctgcttctgctgtggctcaagtcagattccatcactgtgacatgtatggaagtgcttgtgctgactgctgcctggctcgagacccttactgtgcctgggatggcatatcctgctcccggtattacccaacaggcacacatgcaaaaaggcgtttccggagacaagatgttcgacatggaaatgcagctcagcagtgctttggacaacagtttgttggggatgctttggataagactgaagaacatctggcttatggcatagagaacaacagtactttgctggaatgtaccccacgatctttacaagcgaaagttatctggtttgtacagaaaggacgtgagacaagaaaagaggaggtgaagacagatgacagagtggttaagatggaccttggtttactcttcctaaggttacacaaatcagatgctgggacctatttttgccagacagtagagcatagctttgtccatacggtccgtaaaatcaccttggaggtagtggaagaggagaaagtcgaggatatgtttaacaaggacgatgaggaggacaggcatcacaggatgccttgtcctgctcagagtagcatctcgcagggagcaaaaccatggtacaaggaattcttgcagctgatcggttatagcaacttccagagagtggaagaatactgcgagaaagtatggtgcacagatagaaagaggaaaaagcttaaaatgtcaccctccaagtggaagtatgccaaccctcaggaaaagaagctccgttccaaacctgagcattaccgcctgcccaggcacacgctggactcctgatggggtgagactatctactgtcttttgaagaatttatatttggaaagtaaaaaagtaaaaaaataaatcatccaacttctttgcattacttaaaagagatt

SEQ ID NO: 27465 - DNA, 2922 bp, Homo sapiens
  source 1..2922: mol_type = unassigned DNA
ctagaaacagcaagtacgctgctcaaccctgcctgaactttcctgtaaacagccactgacagactgcatccctgctgggtggatcctgcgactcctagagggaatggcacttcttgtttttaattagcaaggtgaaaggtgaattaaaactagcagtttggcaagtcagtgcaagaggctgacttctgagaggcttccaggagcccgaagagaggacctccacgggagaagggagtgcgtgtgctcggttttgtttttttctctcttttttttttttttttctgaatgaacagctttgcccaagtgactgaaaaatacagcttcttcctgaatctaccggcgtagttgctgaagagcgctctagacaggacatggctctgaagactcactctttggaatgtcctcttgctcccggcttataaacaactgtcccgaggaaagaaaggttttacatagccaaatacagcctgacaaatggcacttcggaactgtgctttctgatgacaacgcgttcgatttctgacaaagcctctcgcacgctgcccctggagggaagtcctaagtaaaactcagaccctccttaaagtgaggagcgagggcttggacggtgaacacggcagcatggcatccgcggggcacattatcaccttgctcctgtggggttacttactggagctttggacaggaggtcatacagctgatactacccacccccggttacgcctgtcacataaagagctcttgaatctgaacagaacatcaatatttcatagcccttttggatttcttgatctccatacaatgctgctggatgaatatcaagagaggctcttcgtgggaggcagggaccttgtatattccctcagcttggagagaatcagtgacggctataaagagatacactggccgagtacagctctaaaaatggaagaatgcataatgaagggaaaagatgcgggtgaatgtgcaaattatgttcgggttttgcatcactataacaggacacaccttctgacctgtggtactggagcttttgatccagtttgtgccttcatcagagttggatatcatttggaggatcctctgtttcacctggaatcacccagatctgagagaggaaggggcagatgtccttttgaccccagctcctccttcatctccactttaattggtagtgaattgtttgctggactctacagtgactactggagcagagacgctgcgatcttccgcagcatggggcgactggcccatatccgcactgagcatgacgatgagcgtctgttgaaagaaccaaaatttgtaggttcatacatgattcctgacaatgaagacagagatgacaacaaagtatatttcttttttactgagaaggcactggaggcagaaaacaatgctcacgcaatttacaccagggtcgggcgactctgtgtgaatgatgtaggagggcagagaatactggtgaataagtggagcactttcctaaaagcgagactcgtttgctcagtaccaggaatgaatggaattgacacatattttgatgaattagaggacgtttttttgctacctaccagagatcataagaatccagtgatatttggactctttaacactaccagtaatatttttcgagggcatgctatatgtgtctatcacatgtctagcattcgggcagccttcaacggaccatatgcacataaggaaggacctgaataccactggtcagtctatgaaggaaaagtcccttatccaaggcctggttcttgtgccagcaaagtaaatggagggagatacggaaccaccaaggactatcctgatgatgccatccgatttgcaagaagtcatccactaatgtaccaggccataaaacctgcccataaaaaaccaatattggtaaaaacagatggaaaatataacctgaaacaaatagcagtagatcgagtggaagctgaggatggccaatatgacgtcttgtttattgggacagataatggaattgtgctgaaagtaatcacaatttacaaccaagaaatggaatcaatggaagaagtaattctagaagaacttcagatattcaaggatccagttcctattatttctatggagatttcttcaaagcggcaacagctgtatattggatctgcttctgctgtggctcaagtcagattccatcactgtgacatgtatggaagtgcttgtgctgactgctgcctggctcgagacccttactgtgcctgggatggcatatcctgctcccggtattacccaacaggcacacatgcaaaaaggcgtttccggagacaagatgttcgacatggaaatgcagctcagcagtgctttggacaacagtttgttggggatgctttggataagactgaagaacatctggcttatggcatagagaacaacagtactttgctggaatgtaccccacgatctttacaagcgaaagttatctggtttgtacagaaaggacgtgagacaagaaaagaggaggtgaagacagatgacagagtggttaagatggaccttggtttactcttcctaaggttacacaaatcagatgctgggacctatttttgccagacagtagagcatagctttgtccatacggtccgtaaaatcaccttggaggtagtggaagaggagaaagtcgaggatatgtttaacaaggacgatgaggaggacaggcatcacaggatgccttgtcctgctcagagtagcatctcgcagggagcaaaaccatggtacaaggaattcttgcagctgatcggttatagcaacttccagagagtggaagaatactgcgagaaagtatggtgcacagatagaaagaggaaaaagcttaaaatgtcaccctccaagtggaagtatgccaaccctcagcattaccgcctgcccaggcacacgctggactcctga

SEQ ID NO: 27466 - DNA, 3137 bp, Homo sapiens
  source 1..3137: mol_type = unassigned DNA
gggctgaggcactgagagaccggaaagcctggcattccagagggagggaaacgcagcggcatccccaggctccagagctccctggtgacagtctgtggctgagcatggccctcccagccctgggcctggacccctggagcctcctgggccttttcctcttccaactgcttcagctgctgctgccgacgacgaccgcggggggaggcgggcaggggcccatgcccagggtcagatactatgcaggggatgaacgtagggcacttagcttcttccaccagaagggcctccaggattttgacactctgctcctgagtggtgatggaaatactctctacgtgggggctcgagaagccattctggccttggatatccaggatccaggggtccccaggctaaagaacatgataccgtggccagccagtgacagaaaaaagagtgaatgtgcctttaagaagaagagcaatgagacacagtgtttcaacttcatccgtgtcctggtttcttacaatgtcacccatctctacacctgcggcaccttcgccttcagccctgcttgtaccttcattgaacttcaagattcctacctgttgcccatctcggaggacaaggtcatggagggaaaaggccaaagcccctttgaccccgctcacaagcatacggctgtcttggtggatgggatgctctattctggtactatgaacaacttcctgggcagtgagcccatcctgatgcgcacactgggatcccagcctgtcctcaagaccgacaacttcctccgctggctgcatcatgacgcctcctttgtggcagccatcccttcgacccaggtcgtctacttcttcttcgaggagacagccagcgagtttgacttctttgagaggctccacacatcgcgggtggctagagtctgcaagaatgacgtgggcggcgaaaagctgctgcagaagaagtggaccaccttcctgaaggcccagctgctctgcacccagccggggcagctgcccttcaacgtcatccgccacgcggtcctgctccccgccgattctcccacagctccccacatctacgcagtcttcacctcccagtggcaggttggcgggaccaggagctctgcggtttgtgccttctctctcttggacattgaacgtgtctttaaggggaaatacaaagagttgaacaaagaaacttcacgctggactacttataggggccctgagaccaacccccggccaggcagttgctcagtgggcccctcctctgataaggccctgaccttcatgaaggaccatttcctgatggatgagcaagtggtggggacgcccctgctggtgaaatctggcgtggagtatacacggcttgcagtggagacagcccagggccttgatgggcacagccatcttgtcatgtacctgggaaccaccacagggtcgctccacaaggctgtggtaagtggggacagcagtgctcatctggtggaagagattcagctgttccctgaccctgaacctgttcgcaacctgcagctggcccccacccagggtgcagtgtttgtaggcttctcaggaggtgtctggagggtgccccgagccaactgtagtgtctatgagagctgtgtggactgtgtccttgcccgggacccccactgtgcctgggaccctgagtcccgaacctgttgcctcctgtctgcccccaacctgaactcctggaagcaggacatggagcgggggaacccagagtgggcatgtgccagtggccccatgagcaggagccttcggcctcagagccgcccgcaaatcattaaagaagtcctggctgtccccaactccatcctggagctcccctgcccccacctgtcagccttggcctcttattattggagtcatggcccagcagcagtcccagaagcctcttccactgtctacaatggctccctcttgctgatagtgcaggatggagttgggggtctctaccagtgctgggcaactgagaatggcttttcataccctgtgatctcctactgggtggacagccaggaccagaccctggccctggatcctgaactggcaggcatcccccgggagcatgtgaaggtcccgttgaccagggtcagtggtggggccgccctggctgcccagcagtcctactggccccactttgtcactgtcactgtcctctttgccttagtgctttcaggagccctcatcatcctcgtggcctccccattgagagcactccgggctcggggcaaggttcagggctgtgagaccctgcgccctggggagaaggccccgttaagcagagagcaacacctccagtctcccaaggaatgcaggacctctgccagtgatgtggacgctgacaacaactgcctaggcactgaggtagcttaaactctaggcacaggccggggctgcggtgcaggcacctggccatgctggctgggcggcccaagcacagccctgactaggatgacagcagcacaaaagaccacctttctcccctgagaggagcttctgctactctgcatcactgatgacactcagcagggtgatgcacagcagtctgcctcccctatgggactcccttctaccaagcacatgagctctctaacagggtgggggctacccccagacctgctcctacactgatattgaagaacctggagaggatccttcagttctggccattccagggaccctccagaaacacagtgtttcaagagaccctaaaaaacctgcctgtcccaggaccctatggtaatgaacaccaaacatctaaacaatcatatgctaacatgccactcctggaaactccactctgaagctgccgctttggacaccaacactcccttctcccagggtcatgcagggatctgctccctcctgcttcccttaccagtcgtgcaccgctgactcccaggaagtctttcctgaagtctgaccacctttcttcttgcttcagttggggcagactctgatcccttctgccctggcagaatggcaggggtaatctgagccttcttcactcctttaccctagctgaccccttcacctctccccctcccttttcctttgttttgggattcagaaaactgcttgtcagagactgtttattttttattaaaaatataaggctta

SEQ ID NO: 27467 - DNA, 3249 bp, Homo sapiens
  source 1..3249: mol_type = unassigned DNA
aggatgatgaaagtgagaccgtcttagggcccttccagatagggaaccttctctgccccaatgccccacccctgccaccaatacacacgcttctgctgcctggggctctcctattggtcctcggggggatgtggtaagaactgctcacccagaaagtgcccgggtgcctgtttccccagagctccctggtgacagtctgtggctgagcatggccctcccagccctgggcctggacccctggagcctcctgggccttttcctcttccaactgcttcagctgctgctgccgacgacgaccgcggggggaggcgggcaggggcccatgcccagggtcagatactatgcaggggatgaacgtagggcacttagcttcttccaccagaagggcctccaggattttgacactctgctcctgagtggtgatggaaatactctctacgtgggggctcgagaagccattctggccttggatatccaggatccaggggtccccaggctaaagaacatgataccgtggccagccagtgacagaaaaaagagtgaatgtgcctttaagaagaagagcaatgagacacagtgtttcaacttcatccgtgtcctggtttcttacaatgtcacccatctctacacctgcggcaccttcgccttcagccctgcttgtaccttcattgaacttcaagattcctacctgttgcccatctcggaggacaaggtcatggagggaaaaggccaaagcccctttgaccccgctcacaagcatacggctgtcttggtggatgggatgctctattctggtactatgaacaacttcctgggcagtgagcccatcctgatgcgcacactgggatcccagcctgtcctcaagaccgacaacttcctccgctggctgcatcatgacgcctcctttgtggcagccatcccttcgacccaggtcgtctacttcttcttcgaggagacagccagcgagtttgacttctttgagaggctccacacatcgcgggtggctagagtctgcaagaatgacgtgggcggcgaaaagctgctgcagaagaagtggaccaccttcctgaaggcccagctgctctgcacccagccggggcagctgcccttcaacgtcatccgccacgcggtcctgctccccgccgattctcccacagctccccacatctacgcagtcttcacctcccagtggcaggttggcgggaccaggagctctgcggtttgtgccttctctctcttggacattgaacgtgtctttaaggggaaatacaaagagttgaacaaagaaacttcacgctggactacttataggggccctgagaccaacccccggccaggcagttgctcagtgggcccctcctctgataaggccctgaccttcatgaaggaccatttcctgatggatgagcaagtggtggggacgcccctgctggtgaaatctggcgtggagtatacacggcttgcagtggagacagcccagggccttgatgggcacagccatcttgtcatgtacctgggaaccaccacagggtcgctccacaaggctgtggtaagtggggacagcagtgctcatctggtggaagagattcagctgttccctgaccctgaacctgttcgcaacctgcagctggcccccacccagggtgcagtgtttgtaggcttctcaggaggtgtctggagggtgccccgagccaactgtagtgtctatgagagctgtgtggactgtgtccttgcccgggacccccactgtgcctgggaccctgagtcccgaacctgttgcctcctgtctgcccccaacctgaactcctggaagcaggacatggagcgggggaacccagagtgggcatgtgccagtggccccatgagcaggagccttcggcctcagagccgcccgcaaatcattaaagaagtcctggctgtccccaactccatcctggagctcccctgcccccacctgtcagccttggcctcttattattggagtcatggcccagcagcagtcccagaagcctcttccactgtctacaatggctccctcttgctgatagtgcaggatggagttgggggtctctaccagtgctgggcaactgagaatggcttttcataccctgtgatctcctactgggtggacagccaggaccagaccctggccctggatcctgaactggcaggcatcccccgggagcatgtgaaggtcccgttgaccagggtcagtggtggggccgccctggctgcccagcagtcctactggccccactttgtcactgtcactgtcctctttgccttagtgctttcaggagccctcatcatcctcgtggcctccccattgagagcactccgggctcggggcaaggttcagggctgtgagaccctgcgccctggggagaaggccccgttaagcagagagcaacacctccagtctcccaaggaatgcaggacctctgccagtgatgtggacgctgacaacaactgcctaggcactgaggtagcttaaactctaggcacaggccggggctgcggtgcaggcacctggccatgctggctgggcggcccaagcacagccctgactaggatgacagcagcacaaaagaccacctttctcccctgagaggagcttctgctactctgcatcactgatgacactcagcagggtgatgcacagcagtctgcctcccctatgggactcccttctaccaagcacatgagctctctaacagggtgggggctacccccagacctgctcctacactgatattgaagaacctggagaggatccttcagttctggccattccagggaccctccagaaacacagtgtttcaagagaccctaaaaaacctgcctgtcccaggaccctatggtaatgaacaccaaacatctaaacaatcatatgctaacatgccactcctggaaactccactctgaagctgccgctttggacaccaacactcccttctcccagggtcatgcagggatctgctccctcctgcttcccttaccagtcgtgcaccgctgactcccaggaagtctttcctgaagtctgaccacctttcttcttgcttcagttggggcagactctgatcccttctgccctggcagaatggcaggggtaatctgagccttcttcactcctttaccctagctgaccccttcacctctccccctcccttttcctttgttttgggattcagaaaactgcttgtcagagactgtttattttttattaaaaatataaggcttatgtatgat

SEQ ID NO: 27468 - DNA, 3135 bp, Homo sapiens
  source 1..3135: mol_type = unassigned DNA
agtgctggctttggcatgatgggcacctggagggccgcactcccgttccagccaggctgagccttctgtcccctgcctctggggcctgggaaccccccttcttctttctcctgaatggcacccccgccctagaatccagacaccgagtttcccactgtggctggttcaagggtatgtgagagctccctggtgacagtctgtggctgagcatggcccatgcccagggtcagatactatgcaggggatgaacgtagggcacttagcttcttccaccagaagggcctccaggattttgacactctgctcctgagtggtgatggaaatactctctacgtgggggctcgagaagccattctggccttggatatccaggatccaggggtccccaggctaaagaacatgataccgtggccagccagtgacagaaaaaagagtgaatgtgcctttaagaagaagagcaatgagacacagtgtttcaacttcatccgtgtcctggtttcttacaatgtcacccatctctacacctgcggcaccttcgccttcagccctgcttgtaccttcattgaacttcaagattcctacctgttgcccatctcggaggacaaggtcatggagggaaaaggccaaagcccctttgaccccgctcacaagcatacggctgtcttggtggatgggatgctctattctggtactatgaacaacttcctgggcagtgagcccatcctgatgcgcacactgggatcccagcctgtcctcaagaccgacaacttcctccgctggctgcatcatgacgcctcctttgtggcagccatcccttcgacccaggtcgtctacttcttcttcgaggagacagccagcgagtttgacttctttgagaggctccacacatcgcgggtggctagagtctgcaagaatgacgtgggcggcgaaaagctgctgcagaagaagtggaccaccttcctgaaggcccagctgctctgcacccagccggggcagctgcccttcaacgtcatccgccacgcggtcctgctccccgccgattctcccacagctccccacatctacgcagtcttcacctcccagtggcaggttggcgggaccaggagctctgcggtttgtgccttctctctcttggacattgaacgtgtctttaaggggaaatacaaagagttgaacaaagaaacttcacgctggactacttataggggccctgagaccaacccccggccaggcagttgctcagtgggcccctcctctgataaggccctgaccttcatgaaggaccatttcctgatggatgagcaagtggtggggacgcccctgctggtgaaatctggcgtggagtatacacggcttgcagtggagacagcccagggccttgatgggcacagccatcttgtcatgtacctgggaaccaccacagggtcgctccacaaggctgtggtaagtggggacagcagtgctcatctggtggaagagattcagctgttccctgaccctgaacctgttcgcaacctgcagctggcccccacccagggtgcagtgtttgtaggcttctcaggaggtgtctggagggtgccccgagccaactgtagtgtctatgagagctgtgtggactgtgtccttgcccgggacccccactgtgcctgggaccctgagtcccgaacctgttgcctcctgtctgcccccaacctgaactcctggaagcaggacatggagcgggggaacccagagtgggcatgtgccagtggccccatgagcaggagccttcggcctcagagccgcccgcaaatcattaaagaagtcctggctgtccccaactccatcctggagctcccctgcccccacctgtcagccttggcctcttattattggagtcatggcccagcagcagtcccagaagcctcttccactgtctacaatggctccctcttgctgatagtgcaggatggagttgggggtctctaccagtgctgggcaactgagaatggcttttcataccctgtgatctcctactgggtggacagccaggaccagaccctggccctggatcctgaactggcaggcatcccccgggagcatgtgaaggtcccgttgaccagggtcagtggtggggccgccctggctgcccagcagtcctactggccccactttgtcactgtcactgtcctctttgccttagtgctttcaggagccctcatcatcctcgtggcctccccattgagagcactccgggctcggggcaaggttcagggctgtgagaccctgcgccctggggagaaggccccgttaagcagagagcaacacctccagtctcccaaggaatgcaggacctctgccagtgatgtggacgctgacaacaactgcctaggcactgaggtagcttaaactctaggcacaggccggggctgcggtgcaggcacctggccatgctggctgggcggcccaagcacagccctgactaggatgacagcagcacaaaagaccacctttctcccctgagaggagcttctgctactctgcatcactgatgacactcagcagggtgatgcacagcagtctgcctcccctatgggactcccttctaccaagcacatgagctctctaacagggtgggggctacccccagacctgctcctacactgatattgaagaacctggagaggatccttcagttctggccattccagggaccctccagaaacacagtgtttcaagagaccctaaaaaacctgcctgtcccaggaccctatggtaatgaacaccaaacatctaaacaatcatatgctaacatgccactcctggaaactccactctgaagctgccgctttggacaccaacactcccttctcccagggtcatgcagggatctgctccctcctgcttcccttaccagtcgtgcaccgctgactcccaggaagtctttcctgaagtctgaccacctttcttcttgcttcagttggggcagactctgatcccttctgccctggcagaatggcaggggtaatctgagccttcttcactcctttaccctagctgaccccttcacctctccccctcccttttcctttgttttgggattcagaaaactgcttgtcagagactgtttattttttattaaaaatataaggctta

SEQ ID NO: 27469 - DNA, 2981 bp, Homo sapiens
  source 1..2981: mol_type = unassigned DNA
agctcccagtgctggctttggcatgatgggcacctggagggccgcactcccgttccagccaggctgagccttctgtcccctgcctctggggcctgggaaccccccttcttctttctcctgaatggcacccccgccctagaatccagacaccgagtttcccactgtggctggttcaagggtatgtgaggggatgaacgtagggcacttagcttcttccaccagaagggcctccaggattttgacactctgctcctgagtggtgatggaaatactctctacgtgggggctcgagaagccattctggccttggatatccaggatccaggggtccccaggctaaagaacatgataccgtggccagccagtgacagaaaaaagagtgaatgtgcctttaagaagaagagcaatgaggaacttcaagattcctacctgttgcccatctcggaggacaaggtcatggagggaaaaggccaaagcccctttgaccccgctcacaagcatacggctgtcttggtggatgggatgctctattctggtactatgaacaacttcctgggcagtgagcccatcctgatgcgcacactgggatcccagcctgtcctcaagaccgacaacttcctccgctggctgcatcatgacgcctcctttgtggcagccatcccttcgacccaggtcgtctacttcttcttcgaggagacagccagcgagtttgacttctttgagaggctccacacatcgcgggtggctagagtctgcaagaatgacgtgggcggcgaaaagctgctgcagaagaagtggaccaccttcctgaaggcccagctgctctgcacccagccggggcagctgcccttcaacgtcatccgccacgcggtcctgctccccgccgattctcccacagctccccacatctacgcagtcttcacctcccagtggcaggttggcgggaccaggagctctgcggtttgtgccttctctctcttggacattgaacgtgtctttaaggggaaatacaaagagttgaacaaagaaacttcacgctggactacttataggggccctgagaccaacccccggccaggcagttgctcagtgggcccctcctctgataaggccctgaccttcatgaaggaccatttcctgatggatgagcaagtggtggggacgcccctgctggtgaaatctggcgtggagtatacacggcttgcagtggagacagcccagggccttgatgggcacagccatcttgtcatgtacctgggaaccaccacagggtcgctccacaaggctgtggtaagtggggacagcagtgctcatctggtggaagagattcagctgttccctgaccctgaacctgttcgcaacctgcagctggcccccacccagggtgcagtgtttgtaggcttctcaggaggtgtctggagggtgccccgagccaactgtagtgtctatgagagctgtgtggactgtgtccttgcccgggacccccactgtgcctgggaccctgagtcccgaacctgttgcctcctgtctgcccccaacctgaactcctggaagcaggacatggagcgggggaacccagagtgggcatgtgccagtggccccatgagcaggagccttcggcctcagagccgcccgcaaatcattaaagaagtcctggctgtccccaactccatcctggagctcccctgcccccacctgtcagccttggcctcttattattggagtcatggcccagcagcagtcccagaagcctcttccactgtctacaatggctccctcttgctgatagtgcaggatggagttgggggtctctaccagtgctgggcaactgagaatggcttttcataccctgtgatctcctactgggtggacagccaggaccagaccctggccctggatcctgaactggcaggcatcccccgggagcatgtgaaggtcccgttgaccagggtcagtggtggggccgccctggctgcccagcagtcctactggccccactttgtcactgtcactgtcctctttgccttagtgctttcaggagccctcatcatcctcgtggcctccccattgagagcactccgggctcggggcaaggttcagggctgtgagaccctgcgccctggggagaaggccccgttaagcagagagcaacacctccagtctcccaaggaatgcaggacctctgccagtgatgtggacgctgacaacaactgcctaggcactgaggtagcttaaactctaggcacaggccggggctgcggtgcaggcacctggccatgctggctgggcggcccaagcacagccctgactaggatgacagcagcacaaaagaccacctttctcccctgagaggagcttctgctactctgcatcactgatgacactcagcagggtgatgcacagcagtctgcctcccctatgggactcccttctaccaagcacatgagctctctaacagggtgggggctacccccagacctgctcctacactgatattgaagaacctggagaggatccttcagttctggccattccagggaccctccagaaacacagtgtttcaagagaccctaaaaaacctgcctgtcccaggaccctatggtaatgaacaccaaacatctaaacaatcatatgctaacatgccactcctggaaactccactctgaagctgccgctttggacaccaacactcccttctcccagggtcatgcagggatctgctccctcctgcttcccttaccagtcgtgcaccgctgactcccaggaagtctttcctgaagtctgaccacctttcttcttgcttcagttggggcagactctgatcccttctgccctggcagaatggcaggggtaatctgagccttcttcactcctttaccctagctgaccccttcacctctccccctcccttttcctttgttttgggattcagaaaactgcttgtcagagactgtttattttttattaaaaatataaggctt

SEQ ID NO: 27470 - DNA, 3300 bp, Homo sapiens
  source 1..3300: mol_type = unassigned DNA
ccaggatctgtcacaactcgagaggtggaaattccggtttccctggcctagagctcccagtgctggctttggcatgatgggcacctggagggccgcactcccgttccagccaggctgagccttctgtcccctgcctctggggcctgggaaccccccttcttctttctcctgaatggcacccccgccctagaatccagacaccgagtttcccactgtggctggttcaagggtatgtgagagctccctggtgacagtctgtggctgagcatggccctcccagccctgggcctggacccctggagcctcctgggccttttcctcttccaactgcttcagctgctgctgccgacgacgaccgcggggggaggcgggcaggggcccatgcccagggtcagatactatgcaggggatgaacgtagggcacttagcttcttccaccagaagggcctccaggattttgacactctgctcctgagtggtgatggaaatactctctacgtgggggctcgagaagccattctggccttggatatccaggatccaggggtccccaggctaaagaacatgataccgtggccagccagtgacagaaaaaagagtgaatgtgcctttaagaagaagagcaatgagacacagtgtttcaacttcatccgtgtcctggtttcttacaatgtcacccatctctacacctgcggcaccttcgccttcagccctgcttgtaccttcattgaacttcaagattcctacctgttgcccatctcggaggacaaggtcatggagggaaaaggccaaagcccctttgaccccgctcacaagcatacggctgtcttggtggatgggatgctctattctggtactatgaacaacttcctgggcagtgagcccatcctgatgcgcacactgggatcccagcctgtcctcaagaccgacaacttcctccgctggctgcatcatgacgcctcctttgtggcagccatcccttcgacccaggtcgtctacttcttcttcgaggagacagccagcgagtttgacttctttgagaggctccacacatcgcgggtggctagagtctgcaagaatgacgtgggcggcgaaaagctgctgcagaagaagtggaccaccttcctgaaggcccagctgctctgcacccagccggggcagctgcccttcaacgtcatccgccacgcggtcctgctccccgccgattctcccacagctccccacatctacgcagtcttcacctcccagtggcaggttggcgggaccaggagctctgcggtttgtgccttctctctcttggacattgaacgtgtctttaaggggaaatacaaagagttgaacaaagaaacttcacgctggactacttataggggccctgagaccaacccccggccaggcagttgctcagtgggcccctcctctgataaggccctgaccttcatgaaggaccatttcctgatggatgagcaagtggtggggacgcccctgctggtgaaatctggcgtggagtatacacggcttgcagtggagacagcccagggccttgatgggcacagccatcttgtcatgtacctgggaaccaccacagggtcgctccacaaggctgtggtaagtggggacagcagtgctcatctggtggaagagattcagctgttccctgaccctgaacctgttcgcaacctgcagctggcccccacccagggtgcagtgtttgtaggcttctcaggaggtgtctggagggtgccccgagccaactgtagtgtctatgagagctgtgtggactgtgtccttgcccgggacccccactgtgcctgggaccctgagtcccgaacctgttgcctcctgtctgcccccaacctgaactcctggaagcaggacatggagcgggggaacccagagtgggcatgtgccagtggccccatgagcaggagccttcggcctcagagccgcccgcaaatcattaaagaagtcctggctgtccccaactccatcctggagctcccctgcccccacctgtcagccttggcctcttattattggagtcatggcccagcagcagtcccagaagcctcttccactgtctacaatggctccctcttgctgatagtgcaggatggagttgggggtctctaccagtgctgggcaactgagaatggcttttcataccctgtgatctcctactgggtggacagccaggaccagaccctggccctggatcctgaactggcaggcatcccccgggagcatgtgaaggtcccgttgaccagggtcagtggtggggccgccctggctgcccagcagtcctactggccccactttgtcactgtcactgtcctctttgccttagtgctttcaggagccctcatcatcctcgtggcctccccattgagagcactccgggctcggggcaaggttcagggctgtgagaccctgcgccctggggagaaggccccgttaagcagagagcaacacctccagtctcccaaggaatgcaggacctctgccagtgatgtggacgctgacaacaactgcctaggcactgaggtagcttaaactctaggcacaggccggggctgcggtgcaggcacctggccatgctggctgggcggcccaagcacagccctgactaggatgacagcagcacaaaagaccacctttctcccctgagaggagcttctgctactctgcatcactgatgacactcagcagggtgatgcacagcagtctgcctcccctatgggactcccttctaccaagcacatgagctctctaacagggtgggggctacccccagacctgctcctacactgatattgaagaacctggagaggatccttcagttctggccattccagggaccctccagaaacacagtgtttcaagagaccctaaaaaacctgcctgtcccaggaccctatggtaatgaacaccaaacatctaaacaatcatatgctaacatgccactcctggaaactccactctgaagctgccgctttggacaccaacactcccttctcccagggtcatgcagggatctgctccctcctgcttcccttaccagtcgtgcaccgctgactcccaggaagtctttcctgaagtctgaccacctttcttcttgcttcagttggggcagactctgatcccttctgccctggcagaatggcaggggtaatctgagccttcttcactcctttaccctagctgaccccttcacctctccccctcccttttcctttgttttgggattcagaaaactgcttgtcagagactgtttattttttattaaaaatataaggctta

SEQ ID NO: 27471 - DNA, 3130 bp, Homo sapiens
  source 1..3130: mol_type = unassigned DNA
ggcatgatgggcacctggagggccgcactcccgttccagccaggctgagccttctgtcccctgcctctggggcctgggaaccccccttcttctttctcctgaatggcacccccgccctagaatccagacaccgagtttcccactgtggctggttcaagggtatgtgagagctccctggtgacagtctgtggctgagcatggccctcccagccctgggcctggacccctggagcctcctgggccttttcctcttccaactgcttcagctgctgctgccgacgacgaccgcggggggaggcgggcaggggcccatgcccagggtcagatactatgcaggggatgaacgtagggcacttagcttcttccaccagaagggcctccaggattttgacactctgctcctgagtggtgatggaaatactctctacgtgggggctcgagaagccattctggccttggatatccaggatccaggggtccccaggctaaagaacatgataccgtggccagccagtgacagaaaaaagagtgaatgtgcctttaagaagaagagcaatgaggaacttcaagattcctacctgttgcccatctcggaggacaaggtcatggagggaaaaggccaaagcccctttgaccccgctcacaagcatacggctgtcttggtggatgggatgctctattctggtactatgaacaacttcctgggcagtgagcccatcctgatgcgcacactgggatcccagcctgtcctcaagaccgacaacttcctccgctggctgcatcatgacgcctcctttgtggcagccatcccttcgacccaggtcgtctacttcttcttcgaggagacagccagcgagtttgacttctttgagaggctccacacatcgcgggtggctagagtctgcaagaatgacgtgggcggcgaaaagctgctgcagaagaagtggaccaccttcctgaaggcccagctgctctgcacccagccggggcagctgcccttcaacgtcatccgccacgcggtcctgctccccgccgattctcccacagctccccacatctacgcagtcttcacctcccagtggcaggttggcgggaccaggagctctgcggtttgtgccttctctctcttggacattgaacgtgtctttaaggggaaatacaaagagttgaacaaagaaacttcacgctggactacttataggggccctgagaccaacccccggccaggcagttgctcagtgggcccctcctctgataaggccctgaccttcatgaaggaccatttcctgatggatgagcaagtggtggggacgcccctgctggtgaaatctggcgtggagtatacacggcttgcagtggagacagcccagggccttgatgggcacagccatcttgtcatgtacctgggaaccaccacagggtcgctccacaaggctgtggtaagtggggacagcagtgctcatctggtggaagagattcagctgttccctgaccctgaacctgttcgcaacctgcagctggcccccacccagggtgcagtgtttgtaggcttctcaggaggtgtctggagggtgccccgagccaactgtagtgtctatgagagctgtgtggactgtgtccttgcccgggacccccactgtgcctgggaccctgagtcccgaacctgttgcctcctgtctgcccccaacctgaactcctggaagcaggacatggagcgggggaacccagagtgggcatgtgccagtggccccatgagcaggagccttcggcctcagagccgcccgcaaatcattaaagaagtcctggctgtccccaactccatcctggagctcccctgcccccacctgtcagccttggcctcttattattggagtcatggcccagcagcagtcccagaagcctcttccactgtctacaatggctccctcttgctgatagtgcaggatggagttgggggtctctaccagtgctgggcaactgagaatggcttttcataccctgtgatctcctactgggtggacagccaggaccagaccctggccctggatcctgaactggcaggcatcccccgggagcatgtgaaggtcccgttgaccagggtcagtggtggggccgccctggctgcccagcagtcctactggccccactttgtcactgtcactgtcctctttgccttagtgctttcaggagccctcatcatcctcgtggcctccccattgagagcactccgggctcggggcaaggttcagggctgtgagaccctgcgccctggggagaaggccccgttaagcagagagcaacacctccagtctcccaaggaatgcaggacctctgccagtgatgtggacgctgacaacaactgcctaggcactgaggtagcttaaactctaggcacaggccggggctgcggtgcaggcacctggccatgctggctgggcggcccaagcacagccctgactaggatgacagcagcacaaaagaccacctttctcccctgagaggagcttctgctactctgcatcactgatgacactcagcagggtgatgcacagcagtctgcctcccctatgggactcccttctaccaagcacatgagctctctaacagggtgggggctacccccagacctgctcctacactgatattgaagaacctggagaggatccttcagttctggccattccagggaccctccagaaacacagtgtttcaagagaccctaaaaaacctgcctgtcccaggaccctatggtaatgaacaccaaacatctaaacaatcatatgctaacatgccactcctggaaactccactctgaagctgccgctttggacaccaacactcccttctcccagggtcatgcagggatctgctccctcctgcttcccttaccagtcgtgcaccgctgactcccaggaagtctttcctgaagtctgaccacctttcttcttgcttcagttggggcagactctgatcccttctgccctggcagaatggcaggggtaatctgagccttcttcactcctttaccctagctgaccccttcacctctccccctcccttttcctttgttttgggattcagaaaactgcttgtcagagactgtttattttttattaaaaatataaggctt

SEQ ID NO: 27472 - DNA, 975 bp, Homo sapiens
  source 1..975: mol_type = unassigned DNA
cccctgaacccaggtggtgacatgtgcacggtggtgcctgctgaaggtgggcaagggagctgagcagggaccgggggctactgtacctccttttcacctcctcccgcatctggagcccctcctcctccacatgtgcgaatccaggagccacagaaggggatgaacgtagggcacttagcttcttccaccagaagggcctccaggattttgacactctgctcctgagtggtgatggaaatactctctacgtgggggctcgagaagccattctggccttggatatccaggatccaggggtccccaggctaaagaacatgataccgtggccagccagtgacagaaaaaagagtgaatgtgcctttaagaagaagagcaatgagacacagtgtttcaacttcatccgtgtcctggtttcttacaatgtcacccatctctacacctgcggcaccttcgccttcagccctgcttgtaccttcattgaacttcaagattcctacctgttgcccatctcggaggacaaggtcatggagggaaaaggccaaagcccctttgaccccgctcacaagcatacggctgtcttggtggatgggatgctctattctggtactatgaacaacttcctgggcagtgagcccatcctgatgcgcacactgggatcccagcctgtcctcaagaccgacaacttcctccgctggctgcatcatgacgcctcctttgtggcagccatcccttcgacccaggtcgtctacttcttcttcgaggagacagccagcgagtttgacttctttgagaggctccacacatcgcgggtggctagagtctgcaagaatgacgtgggcggcgaaaagctgctgcagaagaagtggaccaccttcctgaaggcccagctgctctgcacccagccggggcagctgcccttcaacgtcatccgccacgcggtcctgctccccgccgattctcccacagctccccaca

SEQ ID NO: 27473 - DNA, 1057 bp, Homo sapiens
  source 1..1057: mol_type = unassigned DNA
gtccggtgcagactctgctggaagtcttggacgcctgggttagggtctccacttctgggctggggagctccctggtgacagtctgtggctgagcatggccctcccagccctgggcctggacccctggagcctcctgggccttttcctcttccaactgcttcagctgctgctgccgacgacgaccgcggggggaggcgggcaggggcccatgcccagggtcagatactatgcaggggatgaacgtagggcacttagcttcttccaccagaagggcctccaggattttgacactctgctcctgagtggtgatggaaatactctctacgtgggggctcgagaagccattctggccttggatatccaggatccaggggtccccaggctaaagaacatgataccgtggccagccagtgacagaaaaaagagtgaatgtgcctttaagaagaagagcaatgagacacagtgtttcaacttcatccgtgtcctggtttcttacaatgtcacccatctctacacctgcggcaccttcgccttcagccctgcttgtaccttcattgaacttcaagattcctacctgttgcccatctcggaggacaaggtcatggagggaaaaggccaaagcccctttgaccccgctcacaagcatacggctgtcttggtggatgggatgctctattctggtactatgaacaacttcctgggcagtgagcccatcctgatgcgcacactgggatcccagcctgtcctcaagaccgacaacttcctccgctggctgcatcatgacgcctcctttgtggcagccatcccttcgacccaggtcgtctacttcttcttcgaggagacagccagcgagtttgacttctttgagaggctccacacatcgcgggtggctagagtctgcaagaatgacgtgggcggcgaaaagctgctgcagaagaagtggaccaccttcctgaaggcccagctgctctgcacccagccggggcagctgcccttcaacgtcatccgccacgcggtcctgctccccgccgattctcccacagctccccacatctac

SEQ ID NO: 27474 - DNA, 897 bp, Homo sapiens
  source 1..897: mol_type = unassigned DNA
gcacctggagggccgcactcccgttccagccaggctgagccttctgtcccctgcctctggggcctgggaaccccccttcttctttctcctgaatggcacccccgccctagaatccagacaccgagtttcccactgtggctggttcaagggtatgtgagagctccctggtgacagtctgtggctgagcatggccctcccagccctgggcctggacccctggagcctcctgggccttttcctcttccaactgcttcagctgctgctgccgacgacgaccgcggggggaggcgggcaggggcccatgcccagggtcagatactatgcaggggatgaacgtagggcacttagcttcttccaccagaagggcctccaggattttgacactctgctcctgagtggtgatggaaatactctctacgtgggggctcgagaagccattctggccttggatatccaggatccaggggtccccaggctaaagaacatgataccgtggccagccagtgacagaaaaaagagtgaatgtgcctttaagaagaagagcaatgaggaacttcaagattcctacctgttgcccatctcggaggacaaggtcatggagggaaaaggccaaagcccctttgaccccgctcacaagcatacggctgtcttggtggatgggatgctctattctggtactatgaacaacttcctgggcagtgagcccatcctgatgcgcacactgggatcccagcctgtcctcaagaccgacaacttcctccgctggctgcatcatgacgcctcctttgtggcagccatcccttcgacccaggtcgtctacttcttcttcgaggagacagccagcgagtttgacttctttgagaggctccacacatcgcgggtggctagagtctgcaa

SEQ ID NO: 27475 - DNA, 3135 bp, Homo sapiens
  source 1..3135: mol_type = unassigned DNA
agtgctggctttggcatgatgggcacctggagggccgcactcccgttccagccaggctgagccttctgtcccctgcctctggggcctgggaaccccccttcttctttctcctgaatggcacccccgccctagaatccagacaccgagtttcccactgtggctggttcaagggtatgtgagagctccctggtgacagtctgtggctgagcatgggcccatgcccagggtcagatactatgcaggggatgaacgtagggcacttagcttcttccaccagaagggcctccaggattttgacactctgctcctgagtggtgatggaaatactctctacgtgggggctcgagaagccattctggccttggatatccaggatccaggggtccccaggctaaagaacatgataccgtggccagccagtgacagaaaaaagagtgaatgtgcctttaagaagaagagcaatgagacacagtgtttcaacttcatccgtgtcctggtttcttacaatgtcacccatctctacacctgcggcaccttcgccttcagccctgcttgtaccttcattgaacttcaagattcctacctgttgcccatctcggaggacaaggtcatggagggaaaaggccaaagcccctttgaccccgctcacaagcatacggctgtcttggtggatgggatgctctattctggtactatgaacaacttcctgggcagtgagcccatcctgatgcgcacactgggatcccagcctgtcctcaagaccgacaacttcctccgctggctgcatcatgacgcctcctttgtggcagccatcccttcgacccaggtcgtctacttcttcttcgaggagacagccagcgagtttgacttctttgagaggctccacacatcgcgggtggctagagtctgcaagaatgacgtgggcggcgaaaagctgctgcagaagaagtggaccaccttcctgaaggcccagctgctctgcacccagccggggcagctgcccttcaacgtcatccgccacgcggtcctgctccccgccgattctcccacagctccccacatctacgcagtcttcacctcccagtggcaggttggcgggaccaggagctctgcggtttgtgccttctctctcttggacattgaacgtgtctttaaggggaaatacaaagagttgaacaaagaaacttcacgctggactacttataggggccctgagaccaacccccggccaggcagttgctcagtgggcccctcctctgataaggccctgaccttcatgaaggaccatttcctgatggatgagcaagtggtggggacgcccctgctggtgaaatctggcgtggagtatacacggcttgcagtggagacagcccagggccttgatgggcacagccatcttgtcatgtacctgggaaccaccacagggtcgctccacaaggctgtggtaagtggggacagcagtgctcatctggtggaagagattcagctgttccctgaccctgaacctgttcgcaacctgcagctggcccccacccagggtgcagtgtttgtaggcttctcaggaggtgtctggagggtgccccgagccaactgtagtgtctatgagagctgtgtggactgtgtccttgcccgggacccccactgtgcctgggaccctgagtcccgaacctgttgcctcctgtctgcccccaacctgaactcctggaagcaggacatggagcgggggaacccagagtgggcatgtgccagtggccccatgagcaggagccttcggcctcagagccgcccgcaaatcattaaagaagtcctggctgtccccaactccatcctggagctcccctgcccccacctgtcagccttggcctcttattattggagtcatggcccagcagcagtcccagaagcctcttccactgtctacaatggctccctcttgctgatagtgcaggatggagttgggggtctctaccagtgctgggcaactgagaatggcttttcataccctgtgatctcctactgggtggacagccaggaccagaccctggccctggatcctgaactggcaggcatcccccgggagcatgtgaaggtcccgttgaccagggtcagtggtggggccgccctggctgcccagcagtcctactggccccactttgtcactgtcactgtcctctttgccttagtgctttcaggagccctcatcatcctcgtggcctccccattgagagcactccgggctcggggcaaggttcagggctgtgagaccctgcgccctggggagaaggccccgttaagcagagagcaacacctccagtctcccaaggaatgcaggacctctgccagtgatgtggacgctgacaacaactgcctaggcactgaggtagcttaaactctaggcacaggccggggctgcggtgcaggcacctggccatgctggctgggcggcccaagcacagccctgactaggatgacagcagcacaaaagaccacctttctcccctgagaggagcttctgctactctgcatcactgatgacactcagcagggtgatgcacagcagtctgcctcccctatgggactcccttctaccaagcacatgagctctctaacagggtgggggctacccccagacctgctcctacactgatattgaagaacctggagaggatccttcagttctggccattccagggaccctccagaaacacagtgtttcaagagaccctaaaaaacctgcctgtcccaggaccctatggtaatgaacaccaaacatctaaacaatcatatgctaacatgccactcctggaaactccactctgaagctgccgctttggacaccaacactcccttctcccagggtcatgcagggatctgctccctcctgcttcccttaccagtcgtgcaccgctgactcccaggaagtctttcctgaagtctgaccacctttcttcttgcttcagttggggcagactctgatcccttctgccctggcagaatggcaggggtaatctgagccttcttcactcctttaccctagctgaccccttcacctctccccctcccttttcctttgttttgggattcagaaaactgcttgtcagagactgtttattttttattaaaaatataaggctt

SEQ ID NO: 27476 - DNA, 11762 bp, Homo sapiens
  source 1..11762: mol_type = unassigned DNA
acttgccgggaaggcggcgccggtggcggctgctctccctgagcccgctcccgagcgctgctttcccgccgcgggtgggcttcgcagcctcaggccagccgcggcccttggcccgctgcagccccggccctccaccttccccgtgcaggggcggcccggccagtgtcgctcatcccgggacgctcccttctcccacccaggactgccccgcggagctggcttggacacccaactttgccacctcgagggtcgtctctgctgggcgcgaacctgcccacccaccggttggccgcgcgctcggggaccgtgctcgtggcccccaagccggtgcccccattctggaactcagcgagtagggggcggctctggggaagtggcagggggcggctgcagctgctgcctccacttccctagccaggtgctgaagaggatcctcggagccgctctggcccccaggcgctggatgactggcaccagcgctcctcgcacctgtgttggtgtgtgagacttgggctggagtgcccacgtggctgtggagtcagtgtgattcatgattgaggaaacgcgtcctccatcctctctctccttggcactttccacacatgaggagaagaagagcttctgtttagaagacacgtgcccagagtcagaggccccttgcccaccatgaagggaacctgtgttatagcatggctgttctcaagcctggggctgtggagactcgcccacccagaggcccagggtacgactcagtgccagagaaccgagcatccagtcatctcctataaagaaattggcccctggttacgggagttcagagcgaagaatgctgtggatttctcgcagttaacatttgacccaggacagaaagaacttgttgtaggagcaagaaactacctcttcaggttacagcttgaggatctgtctcttatccaggctgtggaatgggagtgtgatgaagctaccaaaaaggcctgttacagcaaaggcaaatcaaaggaggaatgtcagaactacatccgggtgcttctggtgggtggcgaccggttattcacctgtgggaccaatgcattcacgcctgtctgcaccaaccgctcgttgagcaacctgactgagatccatgatcagatcagtggcatggcccgctgtccctacagtccccagcacaattccacagcgctcctcacagctggtggggagctctatgctgctacagccatggattttccaggacgtgatcctgccatttaccgaagcctaggcattttacctcctctccgcacggcgcagtacaactccaaatggctcaatgagccaaactttgtgtcatcttatgacatcggaaattttacctacttctttttccgagaaaatgcagtagagcatgactgtgggaaaacagtgttctccagagctgcccgggtgtgcaagaacgatattggtgggcgcttcctgctggaagacacctggaccacattcatgaaggctcgcctgaactgctcccgtcctggggaagtccccttttactacaacgaattgcagagtactttcttcctgcctgagctggatttgatctatggcatctttaccaccaatgtgaacagcattgcggcctcagctgtgtgcgtcttcaacctgagcgccatcgcgcaggccttctctgggcccttcaagtaccaagaaaactcgcgctcggcctggctaccgtatcccaacccaaacccccacttccagtgtggcaccgtggaccagggcctgtacgtgaacctgaccgagagaaatctgcaggatgctcagaagttcattctgatgcatgaggtggtacagccagtgaccacagtgccctccttcatggaggacaatagccgcttttcccacgtggcagtcgacgtggtgcagggcagagaagcgctcgtccacatcatctatttggccacagattacggaaccattaagaaagtgcgggtacccctgaatcagacctcaagcagctgtttgctggaagagattgagctcttccctgagaggcggagggagcccatcaggagcctgcagatcctgcacagccagagtgtcctgttcgtgggcctgcgggagcacgtggtcaagatccccctgaagaggtgccagttctaccgcacacgcagcacctgcattggggcccaggacccttactgtggctgggatgtggtaatgaagaaatgcacaagcctggaggagagcctgagcatgacgcagtgggaacagagcatctctgcgtgtccgaccaggaatctcaccgtggatgggcactttggtgtgtggtctccgtggacgccttgcacgcacacagatggcagcgccgtgggatcctgcctctgtcgaacccgctcctgcgacagcccggccccgcagtgtggtggctggcagtgcgagggccctggcatggagatcgccaactgttccaggaacggaggctggactccctggacctcgtggtctccctgcagcactacctgtgggatcggcttccaggtgcggcagcgctcctgcagcaaccccactcccaggcacgggggccgggtgtgcgtgggacagaaccgcgaggaaagatactgcaatgaacatttgctatgtcccccacacatgttctggacaggctggggtccttgggaacggtgcacagcccaatgcgggggtggcattcaagctcgccgcaggatctgtgagaatgggcctgactgtgcaggctgcaatgtggagtaccagtcttgcaacaccaacccgtgtcctgagctgaagaagaccacgccctggacaccctggacacctgtcaacatctctgacaacggcggccactatgagcaacgattccgatacacatgcaaagcccgcctggctgatccgaatttgctggaagtgggaagacagagaatcgaaatgcggtactgttctagcgacggcaccagtggctgctccacagatgggctttctggggatttcctgcgtgctgggagatactctgcccacacggtcaacggggcttggtcagcctggacgtcgtggtcacagtgcagccgtgactgcagcaggggcattcggaaccggaagcgtgtttgcaacaaccccgaacccaagtatgggggaatgccttgccttggcccatctctggaataccaggaatgcaacattttgccctgcccagtggatggcgtgtggtcttgctggtccccctggacaaaatgttcagcaacatgcggcggtggacactatatgaggacccgctcttgctccaatccagccccggcctatggaggggacatctgcctggggctgcacacagaagaggcactctgcaacacgcagccctgcccagagagctggtcggagtggtcggactggtctgagtgtgaagcctctggcgtccaagtccgcgcccgccagtgcatcctcctgttccccatgggcagccagtgctccgggaacaccacggagagccggccgtgtgtgtttgactctaatttcatcccagaagtatctgtggcaagatccagtagcgtagaagagaaaaggtgtggagagttcaacatgttccacatgatcgccgtggggctgagcagctccatcctcggctgcctcctcaccctgctcgtctatacttactgccagcggtaccagcagcaatcccacgatgcgactgtcatccaccccgtctcacctgccccccttaataccagcataaccaaccacatcaacaaactggacaagtacgactcggtggaggccatcaaggcatttaacaaaaacaacttgatcctagaggaaagaaacaaatacttcaacccacatctcactgggaagacctattctaatgcctactttacagatctcaataattatgatgagtactaacagctttcatgtttttggcttcttgtaaatccccagttcctcaaggcctgtgccccatgactgcccatgtttctgaggcttcagagtcgaagtttggatacatttcaagtgcatttcaagccaccagagtgtcccattgctgccaaaaatacacgtctttaaaagcaacaaaaattgaaataagacatcgtgaaaatcttgaccattgttgaatgagccagggtgtgaagtttttaattgtgttcatcctatttttctgacaagtccattggtttgttttttgagcattattttataaatgtgccacccacattggaaggagtctttctttagaactttggagtgtaaatcttcatgatgttgtaattcaagaaaataggcactttctctgaaagacctgctccttccacaagaagtgcataggtccataatatttcataaaatgaagaaaaagaatgtggccaaacaattattcaccatggattgcccaactttccaaatctggataaagctgtgggattcttggaagcagcttgagtgttttcatcttgcctgggaagcccaggaattccacctggtccacaccggcagaagttacagtagactgtgaggcaccccaccttgctcctgatgcagtttctgtgccattgctggtgctggtggaggcagcggagcagaggctcaggcacaatgaagcgtggatgtgttctgcaggttgctgcaaaactcaccttattctgacttttggatttcatggcattccaggaagctccttgccatgctgttggcctggaagtccacctgtctggtccatagtgacgtcctgaagagccagtctgtaaaataaccaaccacttacttagcgtttggatagactccatgccttctctctccctgcaaagaaaaatcttgaacatttatgatgtcaattagtgaaagtattgaaaatactaaattataactaaaagcaactttttatgttattgaaaatattgaaagaactgatattaatgataatcattttatttttcatctctctgatatacccaatgtgtggcaatcagcccctaccacgagcattaataccatgtaaagctggctttctggagtctgccaggtccacacgaagtgctacccccagtttctgctgttacttgctgcctccaggccaggggagcaggagatgctcagctctggtgccttttcttttatttcagtgctgccttcccacccacccagtccattcaccctcacctctccctgcatggaggcaacagcatttcaagatgtaccttgggaagtcaggatagctggaagtaagggtttttgggatccctgtggtctcttcactgatcatcgataagcatttaagagtgtgctaacaccattcacagaggtccctggaaaaaaatatataattttctcacaaacaaccaatacataacctatggcagttggttgaataattattgaaaaaaagaacacgactgaaaaagttcatctgatgcctctgagcatgtgataaagtcctgggtagacacggaaacgtgttcttacaaatgaaccttcggatctatgaaagaaaatatagtagggggactaaggaacatagaattttattagcatatgtgattttacccttatctttgtttctaatttaaagaaacaatttcagaaagtgttagaagaattctatgtttaataatgaatattgttgagttcaaaatattctcatatacccagatttacagagatgacacagtattgaaatggcaggtgggctctgtaagttattttggattaatgacattcagggtctttgcagtggggacttcatgttgcctctcactcattcctcatatgtcagagtcttctgtctatatgcacatgctcaaagtccatactcagtaggggaaatctagccggatggttctccaattgttcctcggctggattttcatcatcagatatttcaactcatctcatcagtttcttgtaagaaaaaaacattttcactttgtagcacattttagttatttttgagtcttcttccctaatagtttgtaagcttaaagggacattttattttccctggtaaagaggattctaatatttcaagaatgtttcactggaattgatgggaaatggtttctaaatggcatcgaagctggtctttaatgagtcttttgcaatgacttgggaaaaacaccctccctcactacaggatcttcatgttgttaataatataaacaaacctttgaaattagcattgcaaaagaatcccatttttgtttcgtaccacactgttcaaaggaaaattgtttatctctcttcctttctctctctctcttatttgacagaatagcaagtgtttagataatttcagatatattctaagtattttaccagctgtggaataagttgtgtttgtccatcactgtgtagctaccgttcacatgttctggctctgtactccacgcttatcgcgtgaaccctcacatgttggactttcacagtgtgatctctcacctgtcttggaaactccttcataaagccgctcttccttaggcctgggctgtttggaagtcctggtgaaactttgcggttcacattttaaattcctgaatgaccttttcattctctctttctttatctttgtttttgtccttcattccctccttttgttcttccttcctgccttcttttcttctttcctttcttctttctttaattcttcctttcttcctattttcttggtacaagtggaacaaaaaccaacacatagttttaagctacacctttctgcacctgatgtaaaatgacattaatcactatttaacttctaaaattatttctgaatacagttggagataggctggttttcatgaggaagctggcttggctttagtcttacatttaaattctttgaaagtggctcccagtgctattcagggtcctttcttgaggccagactcatcaccatctactattgattttacagtgcactgacagtttacaggaaggagaagaacagaatttctgcacactacacaacatgtgggcttcctgtagctccagggacatgtagctttggtgaaactggggttttgtaacctctgaatgatatggacttagtgaattctaaggaactcagggggcacgtggtcaggctccaccgcacagaagagccacagtctccagactcatggcgttccctccagaactccccattcccctctgagcatatttctatgctgctgcttcttgtgacttacatgaggcatctcagcttcttcatgtttgtagggatggttccctaagcctgttcaagtaggctctcactagagttaccattcatatttgagaagaaaagaacatttaataaatgtatgtgtggggctgaggttctaaaggaattgaaaagagacgataaacattgaatgagggtgagggcatccctgctggggagaaacctctgtccctaggaagagtccgttcatgtcatgtggtttgggatgaaccaggggtctggccccatcgggtcacaggtgatggcaaatagaaaagaagcaaatggaggaaatagtcggataagtaggtgacgtgaaaggcaggacctggtcaccccagcaagtgctatggacagttcccggaaacggttgcccacttcacaggtccatgggtctgacccttggactctgccaggatcaactgcccagagtgccagagttttagccaaaggtgtacttacttccttatttatctgcaaaaggatggaaactgtgggagtcaaagcctattttgctgagtgttcccactggagtctctggtagaattagcaggtcatgctgtcaaaatcatggacaaaggctgggtgcagtggctcatgcctataatcccagcactttgggaggccaaggtgggcggatcacctgagctcaggagtttgagaccagcctgggcaacatggggaaactccatctctacaaaatatacaaaatattagccagccatcgtggtgcgtgcctgtggtcccagtttcttgggaggctgaggcgggagtatcatttgagccaggaggttgaggttgcagtgagctgagatcacatcactgcactccatcctgggtgacagagagagaccctgtctcaaaaaaaaaaaaaaagaacaaagtcttagcggggggtctctatgtccccaagtggctctctaaggggatccattagcgtataattgaatatcaaagggaattttaccttaaacatatatcaagtctatactcagctaatcgttttgtctaaacacagccttgttagcatttgaatttacaaatattcatttgcttatttgcagtgttccttttgcttttagaataaatcataaatatttccccaatactgtcaagatacttcttcaactttgtccctgaaccatcagctttctttagggtccgggtatcctttacacttcaatggggttttcttgtgtgtgtcattgggggtaactccattgacctcagcatttctatctcaagagatggctctggaacacagaaccagaggcaacaggtactaatggttgataaaattaacagcgactgcataaccattttccacatggcagggctgtgcttaagccccacacctccaataatcaatttctatgacggtactaataaccttaactatatgcaaattcttcaccacttatgatatggtacaaactggagtttacagatggccttggccttgcctagcccatttgttcatcctaacttcttcatcacttcctgatgcacttggggaagcatgttgacacaacgttaccaatatttgattacctatggttatctgcaattacctacgcttatcttatcagaccctagatgccatttgagccccttacttctttgggcagtgggtgaaatgggagaacatagagaaatgttcactttgacctaagaaacgcataaaagggaatgccatgcacaatgtaagataaaatgtttggggacaggggatcatcgtgaaatttatttctgctattctgccctattgaggtcattaattataatggatttaaagatttttttttaaactctacaaacactaagccaaggaattcaggttatctgctatgttaacctaataaagcaaaggaaaataagttgctttaatccttgcttgttaacctaataaagcaaaggaaaatatgttgctttaatccttgcttcttttctcttttggtaatagaaaaggtaaataagatgtaatgttgaactgctggtgatgatttctaaaacgactctttaaatactcctttcctatggacttatattaaagatgcattgtacacattgttttagcagatagatcaaagatatactcagtggtcatctgttgcattatcagaaatttgatacatgttacagaagcatgaggaagggaatcctatccacttttgaaaatagagttcacattgcaagcgacatagggcattatcaaaaccaattcagagcctggcacaaaatgtatacttcctagtgaaagctgtctcaaaacacagcctttttgatggatcatattagctcatatctgccatagaaaggcaatcaagcttactccctgcaatcggagtcaatatcaattcttgctcaagcaaacatgttttacagtgttggcgcaatggcaggaactagtcaagggcactttcagatctggaaagaggaaagaggaggtagaaaatcactcttttgtgtttcttaaactgtcaatcaagcaagaaaatttattccaccccttcatatttgctctaaaatctggggccagtagttgaaatgtgatcttgttctttctcagccttttggcaatttaatgccaaatattccaaatgttagatgaatggcagtaataaaatgattcaaatgtttgataaatacaagctgagagcaaaatctggactctgaaaaatcggaactattttatcatgttgctaaaatgagagcatcattttcttccctctctgtaagtgcggtagtttaatttcctagaaaaagttgctagtgccttgtttaagatgatcatttatcatttcatgtggatattattggtctaattagaaggagaagattgattggatttactttaaagaaaattattctcctatgtctctttgaactcaggaatagaaaatgaccaagaagcacatcatcttcagatgtgatttttgccctcactggggatgtagaaccagaataggtacaacatatgctcagaagagaggtgacttcagtattagccttctagaaactaacatcactttaatttttacatgttccaaaaaaaatcatagtgattgttctgtaataagaatgttaacgtgatgcctatagaagttagaggtttttgtttctgtttctcttcaggcaagtccatagatagaggaaaatcagacacaggctggtgacaactggtatagatacagtgagcatggaatgagaaccacctacaacattgcctgattatttttaagtttatatcaaaactgcttcacaagttcacaaaagttgtcactcttaatttgggttaagaaaagtaatagtattatctctgctgaagttgattgtttttctcttttaccatgactgttggccaaaagcaagctgaacctctgcactttgaaacaaagcacagtatgaatctttaacccaagcacttagtttcaccactgagattctacatcatctgcaagaaaatgcacaaacttttggtccaatgttggattcttcaaaagtgcatagcaaaacttttgtgctatgccgcttgatgtaacttttaaagatgttatcaaatgttaaatgcctcattctgcgttaatttgctgttggctgttttgtgaacacaaaataaacttgagatttttttttttttttttttttgtgaaactcctccaaagccaatttcagcccttggtaagcttgcagacagttactgatcttaaatttaattttaaaagacaatgtatcttaattataatttagctttttaaaacaatgagatagctttacatttcccctttgtttgaatgagaaaatggatcttgggttgctatgctagaacacttgtagattgctgggtcctttgtaagggggccatggacacaccacactttctttcaatccttacatttgaagcattgatattcttcaaaaccttcttgttacatgtgcgcaatagaaatttctaatgttcatgacttttatctttcctgtccatcaattcactggttgtaaatgcttcctgagagctgtctaggtctgtatcccagattgttgcttaatgacatctgacagatgcattgttttctgaaatcagcttaagacaccaattgtggcaactggaaactcattacctgctgcattggatcaactatggaagttggagcaggggtgggcggaggtcacctaaccaatcaatggaaggcaactcacacctgctccaagcctcagctttgagaaacaaacacgtttataagaaaaaatatatagctattattacagaagtgaatatgttgtgctctcttactgctcttggtgcattgacagtttctgtatctcaaccctattcatctttatgaaaaagcattctgaagatctatcctcagcactgctgagtgtgcagtcacactttcctaccaacccccttcttaccatctctagctgccatttgtggggggaacaaaacaagggaatcctgattgtgtacagtataaattgtattatattttttgtacttatgttttatgtaaatagtttgtctcattcaattgtatgtgagcattgaaataaatcctaccatttaggggacaattta

SEQ ID NO: 27477 - DNA, 935 bp, Homo sapiens
  source 1..935: mol_type = unassigned DNA
attcatacacacacacgacctgggatatgactagaaaaatatgctgctctaagccctccaagctctcctctatctccacaaagtgtaaccttaaagcactttccacacatgaggagaagaagagcttctgtttagaagacacgtgcccagagtcagaggccccttgcccaccatgaagggaacctgtgttatagcatggctgttctcaagcctggggctgtggagactcgcccacccagaggcccagggtacgactcagtgccagagaaccgagcatccagtcatctcctataaagaaattggcccctggttacgggagttcagagcgaagaatgctgtggatttctcgcagttaacatttgacccaggacagaaagaacttgttgtaggagcaagaaactacctcttcaggttacagcttgaggatctgtctcttatccaggctgtggaatgggagtgtgatgaagctaccaaaaaggcctgttacagcaaaggcaaatcaaaggaggaatgtcagaactacatccgggtgcttctggtgggtggcgaccggttattcacctgtgggaccaatgcattcacgcctgtctgcaccaaccgctcgttgagcaacctgactgagatccatgatcagatcagtggcatggcccgctgtccctacagtccccagcacaattccacagcgctcctcacagctggtggggagctctatgctgctacagccatggattttccaggacgtgatcctgccatttaccgaagcctaggcattttacctcctctccgcacggcgcagtacaactccaaatggctcaatgagccaaactttgtgtcatcttatgacatcggaaattttacctacttctttttccgagaaaatgcagtagagcatgactgtgggaaaacagtgttctccagagctgcccgggtgtgca

SEQ ID NO: 27478 - DNA, 3377 bp, Homo sapiens
  source 1..3377: mol_type = unassigned DNA
cagtctcggctgattgccgctgtcgctcccggggccacgggatgacgcctcctccgcccggacgtgccgcccccagcgcaccgcgcgcccgcgtccctggcccgccggctcggttggggcttccgctgcggctgcggctgctgctgctgctctgggcggccgccgcctccgcccagggccacctaaggagcggaccccgcatcttcgccgtctggaaaggccatgtagggcaggaccgggtggactttggccagactgagccgcacacggtgcttttccacgagccaggcagctcctctgtgtgggtgggaggacgtggcaaggtctacctctttgacttccccgagggcaagaacgcatctgtgcgcacggtgaatatcggctccacaaaggggtcctgtctggataagcgggactgcgagaactacatcactctcctggagaggcggagtgaggggctgctggcctgtggcaccaacgcccggcaccccagctgctggaacctggtgaatggcactgtggtgccacttggcgagatgagaggctacgcccccttcagcccggacgagaactccctggttctgtttgaaggggacgaggtgtattccaccatccggaagcaggaatacaatgggaagatccctcggttccgccgcatccggggcgagagtgagctgtacaccagtgatactgtcatgcagaacccacagttcatcaaagccaccatcgtgcaccaagaccaggcttacgatgacaagatctactacttcttccgagaggacaatcctgacaagaatcctgaggctcctctcaatgtgtcccgtgtggcccagttgtgcaggggggaccagggtggggaaagttcactgtcagtctccaagtggaacacttttctgaaagccatgctggtatgcagtgatgctgccaccaacaagaacttcaacaggctgcaagacgtcttcctgctccctgaccccagcggccagtggagggacaccagggtctatggtgttttctccaacccctggaactactcagccgtctgtgtgtattccctcggtgacattgacaaggtcttccgtacctcctcactcaagggctaccactcaagccttcccaacccgcggcctggcaagtgcctcccagaccagcagccgatacccacagagaccttccaggtggctgaccgtcacccagaggtggcgcagagggtggagcccatggggcctctgaagacgccattgttccactctaaataccactaccagaaagtggccgtccaccgcatgcaagccagccacggggagacctttcatgtgctttacctaactacagacaggggcactatccacaaggtggtggaaccgggggagcaggagcacagcttcgccttcaacatcatggagatccagcccttccgccgcgcggctgccatccagaccatgtcgctggatgctgagcggaggaagctgtatgtgagctcccagtgggaggtgagccaggtgcccctggacctgtgtgaggtctatggcgggggctgccacggttgcctcatgtcccgagacccctactgcggctgggaccaaggccgctgcatctccatctacagctccgaacggtcagtgctgcaatccattaatccagccgagccacacaaggagtgtcccaaccccaaaccagacaaggccccactgcagaaggtttccctggccccaaactctcgctactacctgagctgccccatggaatcccgccacgccacctactcatggcgccacaaggagaacgtggagcagagctgcgaacctggtcaccagagccccaactgcatcctgttcatcgagaacctcacggcgcagcagtacggccactacttctgcgaggcccaggagggctcctacttccgcgaggctcagcactggcagctgctgcccgaggacggcatcatggccgagcacctgctgggtcatgcctgtgccctggccgcctccctctggctgggggtgctgcccacactcactcttggcttgctggtccactagggcctcccgaggctgggcatgcctcaggcttctgcagcccagggcactagaacgtctcacactcagagccggctggcccgggagctccttgcctgccacttcttccaggggacagaataacccagtggaggatgccaggcctggagacgtccagccgcaggcggctgctgggccccaggtggcgcacggatggtgaggggctgagaatgagggcaccgactgtgaagctggggcatcgatgacccaagactttatcttctggaaaatatttttcagactcctcaaacttgactaaatgcagcgatgctcccagcccaagagcccatgggtcggggagtgggtttggataggagagctgggactccatctcgaccctggggctgaggcctgagtccttctggactcttggtacccacattgcctccttcccctccctctctcatggctgggtggctggtgttcctgaagacccagggctaccctctgtccagccctgtcctctgcagctccctctctggtcctgggtcccacaggacagccgccttgcatgtttattgaaggatgtttgctttccggacggaaggacggaaaaagctctatttttatgttaggcttatttcatgtatagctacttccgactgcatctgtatgaaaataccaaaactacatgcgggggggtgggtgggaaagggaggggctgggaagggatgggttggggagcgggggtgatcccagtctgaggctcccggggatgagataagagtctggagacgggcatgggttcttggagagtggcatgagctggctctgccctgggagcccggtctgagggggacgttgttggagcccctagtgttgggggtggttatgggagggggtggggtgagggaaacgggagaatgaaggagaaaactgagccctagtttcaccgtgttcatttggaaggacgagccgggtcctcagggggaggttccaggactctgcccttggcgttgagggttggggggcggggggcctcctcccttcctctcagcccccttccccaggggctgtgcttccatgctcctagcctcccaccttcgctcaggacatgttataacttaggctaaactgtgaaaattccggtggggatggcctgggccgagctctccaggcaggcggccctgcccccagccctgtccatccatttcaggggggagctgggcccttctccggctgtgtctggccacccagggcagtggctggggccagtggccttccagctttggcccctgcacctcttctcaatgcactttaataatgtaacatattactaataaacaagctatttattta

SEQ ID NO: 27479 - DNA, 3228 bp, Homo sapiens
  source 1..3228: mol_type = unassigned DNA
agtgcgtgcgcgcagctctgcgggtcccgggctgtccccgcgctgtccccgcgtggagcgtgtgggtttgggccatgtagggcaggaccgggtggactttggccagactgagccgcacacggtgcttttccacgagccaggcagctcctctgtgtgggtgggaggacgtggcaaggtctacctctttgacttccccgagggcaagaacgcatctgtgcgcacggtgaatatcggctccacaaaggggtcctgtctggataagcgggactgcgagaactacatcactctcctggagaggcggagtgaggggctgctggcctgtggcaccaacgcccggcaccccagctgctggaacctggtgaatggcactgtggtgccacttggcgagatgagaggctacgcccccttcagcccggacgagaactccctggttctgtttgaaggggacgaggtgtattccaccatccggaagcaggaatacaatgggaagatccctcggttccgccgcatccggggcgagagtgagctgtacaccagtgatactgtcatgcagaacccacagttcatcaaagccaccatcgtgcaccaagaccaggcttacgatgacaagatctactacttcttccgagaggacaatcctgacaagaatcctgaggctcctctcaatgtgtcccgtgtggcccagttgtgcaggggggaccagggtggggaaagttcactgtcagtctccaagtggaacacttttctgaaagccatgctggtatgcagtgatgctgccaccaacaagaacttcaacaggctgcaagacgtcttcctgctccctgaccccagcggccagtggagggacaccagggtctatggtgttttctccaacccctggaactactcagccgtctgtgtgtattccctcggtgacattgacaaggtcttccgtacctcctcactcaagggctaccactcaagccttcccaacccgcggcctggcaagtgcctcccagaccagcagccgatacccacagagaccttccaggtggctgaccgtcacccagaggtggcgcagagggtggagcccatggggcctctgaagacgccattgttccactctaaataccactaccagaaagtggccgtccaccgcatgcaagccagccacggggagacctttcatgtgctttacctaactacagacaggggcactatccacaaggtggtggaaccgggggagcaggagcacagcttcgccttcaacatcatggagatccagcccttccgccgcgcggctgccatccagaccatgtcgctggatgctgagcggaggaagctgtatgtgagctcccagtgggaggtgagccaggtgcccctggacctgtgtgaggtctatggcgggggctgccacggttgcctcatgtcccgagacccctactgcggctgggaccaaggccgctgcatctccatctacagctccgaacggtcagtgctgcaatccattaatccagccgagccacacaaggagtgtcccaaccccaaaccagacaaggccccactgcagaaggtttccctggccccaaactctcgctactacctgagctgccccatggaatcccgccacgccacctactcatggcgccacaaggagaacgtggagcagagctgcgaacctggtcaccagagccccaactgcatcctgttcatcgagaacctcacggcgcagcagtacggccactacttctgcgaggcccaggagggctcctacttccgcgaggctcagcactggcagctgctgcccgaggacggcatcatggccgagcacctgctgggtcatgcctgtgccctggccgcctccctctggctgggggtgctgcccacactcactcttggcttgctggtccactagggcctcccgaggctgggcatgcctcaggcttctgcagcccagggcactagaacgtctcacactcagagccggctggcccgggagctccttgcctgccacttcttccaggggacagaataacccagtggaggatgccaggcctggagacgtccagccgcaggcggctgctgggccccaggtggcgcacggatggtgaggggctgagaatgagggcaccgactgtgaagctggggcatcgatgacccaagactttatcttctggaaaatatttttcagactcctcaaacttgactaaatgcagcgatgctcccagcccaagagcccatgggtcggggagtgggtttggataggagagctgggactccatctcgaccctggggctgaggcctgagtccttctggactcttggtacccacattgcctccttcccctccctctctcatggctgggtggctggtgttcctgaagacccagggctaccctctgtccagccctgtcctctgcagctccctctctggtcctgggtcccacaggacagccgccttgcatgtttattgaaggatgtttgctttccggacggaaggacggaaaaagctctatttttatgttaggcttatttcatgtatagctacttccgactgcatctgtatgaaaataccaaaactacatgcgggggggtgggtgggaaagggaggggctgggaagggatgggttggggagcgggggtgatcccagtctgaggctcccggggatgagataagagtctggagacgggcatgggttcttggagagtggcatgagctggctctgccctgggagcccggtctgagggggacgttgttggagcccctagtgttgggggtggttatgggagggggtggggtgagggaaacgggagaatgaaggagaaaactgagccctagtttcaccgtgttcatttggaaggacgagccgggtcctcagggggaggttccaggactctgcccttggcgttgagggttggggggcggggggcctcctcccttcctctcagcccccttccccaggggctgtgcttccatgctcctagcctcccaccttcgctcaggacatgttataacttaggctaaactgtgaaaattccggtggggatggcctgggccgagctctccaggcaggcggccctgcccccagccctgtccatccatttcaggggggagctgggcccttctccggctgtgtctggccacccagggcagtggctggggccagtggccttccagctttggcccctgcacctcttctcaatgcactttaataatgtaacatattactaataaacaagctatttattt

SEQ ID NO: 27480 - DNA, 3333 bp, Homo sapiens
  source 1..3333: mol_type = unassigned DNA
agtctcggctgattgccgctgtcgctcccggggccacgggatgacgcctcctccgcccggacgtgccgcccccagcgcaccgcgcgcccgcgtccctggcccgccggctcggttggggcttccgctgcggctgcggctgctgctgctgctctgggcggccgccgcctccgcccagggccacctaaggagcggaccccgcatcttcgccgtctggaaaggccatgtagggcaggaccgggtggactttggccagactgagccgcacacggtgcttttccacgagccaggcagctcctctgtgtgggtgggaggacgtggcaaggtctacctctttgacttccccgagggcaagaacgcatctgtgcgcacggactgcgagaactacatcactctcctggagaggcggagtgaggggctgctggcctgtggcaccaacgcccggcaccccagctgctggaacctggtgaatggcactgtggtgccacttggcgagatgagaggctacgcccccttcagcccggacgagaactccctggttctgtttgaaggggacgaggtgtattccaccatccggaagcaggaatacaatgggaagatccctcggttccgccgcatccggggcgagagtgagctgtacaccagtgatactgtcatgcagaacccacagttcatcaaagccaccatcgtgcaccaagaccaggcttacgatgacaagatctactacttcttccgagaggacaatcctgacaagaatcctgaggctcctctcaatgtgtcccgtgtggcccagttgtgcaggggggaccagggtggggaaagttcactgtcagtctccaagtggaacacttttctgaaagccatgctggtatgcagtgatgctgccaccaacaagaacttcaacaggctgcaagacgtcttcctgctccctgaccccagcggccagtggagggacaccagggtctatggtgttttctccaacccctggaactactcagccgtctgtgtgtattccctcggtgacattgacaaggtcttccgtacctcctcactcaagggctaccactcaagccttcccaacccgcggcctggcaagtgcctcccagaccagcagccgatacccacagagaccttccaggtggctgaccgtcacccagaggtggcgcagagggtggagcccatggggcctctgaagacgccattgttccactctaaataccactaccagaaagtggccgtccaccgcatgcaagccagccacggggagacctttcatgtgctttacctaactacagacaggggcactatccacaaggtggtggaaccgggggagcaggagcacagcttcgccttcaacatcatggagatccagcccttccgccgcgcggctgccatccagaccatgtcgctggatgctgagcggaggaagctgtatgtgagctcccagtgggaggtgagccaggtgcccctggacctgtgtgaggtctatggcgggggctgccacggttgcctcatgtcccgagacccctactgcggctgggaccaaggccgctgcatctccatctacagctccgaacggtcagtgctgcaatccattaatccagccgagccacacaaggagtgtcccaaccccaaaccagacaaggccccactgcagaaggtttccctggccccaaactctcgctactacctgagctgccccatggaatcccgccacgccacctactcatggcgccacaaggagaacgtggagcagagctgcgaacctggtcaccagagccccaactgcatcctgttcatcgagaacctcacggcgcagcagtacggccactacttctgcgaggcccaggagggctcctacttccgcgaggctcagcactggcagctgctgcccgaggacggcatcatggccgagcacctgctgggtcatgcctgtgccctggccgcctccctctggctgggggtgctgcccacactcactcttggcttgctggtccactagggcctcccgaggctgggcatgcctcaggcttctgcagcccagggcactagaacgtctcacactcagagccggctggcccgggagctccttgcctgccacttcttccaggggacagaataacccagtggaggatgccaggcctggagacgtccagccgcaggcggctgctgggccccaggtggcgcacggatggtgaggggctgagaatgagggcaccgactgtgaagctggggcatcgatgacccaagactttatcttctggaaaatatttttcagactcctcaaacttgactaaatgcagcgatgctcccagcccaagagcccatgggtcggggagtgggtttggataggagagctgggactccatctcgaccctggggctgaggcctgagtccttctggactcttggtacccacattgcctccttcccctccctctctcatggctgggtggctggtgttcctgaagacccagggctaccctctgtccagccctgtcctctgcagctccctctctggtcctgggtcccacaggacagccgccttgcatgtttattgaaggatgtttgctttccggacggaaggacggaaaaagctctatttttatgttaggcttatttcatgtatagctacttccgactgcatctgtatgaaaataccaaaactacatgcgggggggtgggtgggaaagggaggggctgggaagggatgggttggggagcgggggtgatcccagtctgaggctcccggggatgagataagagtctggagacgggcatgggttcttggagagtggcatgagctggctctgccctgggagcccggtctgagggggacgttgttggagcccctagtgttgggggtggttatgggagggggtggggtgagggaaacgggagaatgaaggagaaaactgagccctagtttcaccgtgttcatttggaaggacgagccgggtcctcagggggaggttccaggactctgcccttggcgttgagggttggggggcggggggcctcctcccttcctctcagcccccttccccaggggctgtgcttccatgctcctagcctcccaccttcgctcaggacatgttataacttaggctaaactgtgaaaattccggtggggatggcctgggccgagctctccaggcaggcggccctgcccccagccctgtccatccatttcaggggggagctgggcccttctccggctgtgtctggccacccagggcagtggctggggccagtggccttccagctttggcccctgcacctcttctcaatgcactttaataatgtaacatattactaataaacaagctatttattt

SEQ ID NO: 27481 - DNA, 1266 bp, Homo sapiens
  source 1..1266: mol_type = unassigned DNA
aaggaagatataaatgacaaggtcggctcagctctcagacaaggttttccaagcaagatgaagcccaacatcatctttgtactttccctgctcctcatcttggagaagcaagcagctgtgatgggacaaaaaggtggatcaaaaggccgattaccaagtgaattttcccaatttccacacggacaaaagggccagcactattctggacaaaaaggcaagcaacaaactgaatccaaaggcagtttttctattcaatacacatatcatgtagatgccaatgatcatgaccagtcccgaaaaagtcagcaatatgatttgaatgccctacataagacgacaaaatcacaacgacatctaggtggaagtcaacaactgctccataataaacaagaaggcagagaccatgataaatcaaaaggtcattttcacagggtagttatacaccataaaggaggcaaagctcatcgtgggacacaaaatccttctcaagatcaggggaatagcccatctggaaagggaatatccagtcaatattcaaacacagaagaaaggctgtgggttcatggactaagtaaagaacaaacttccgtctctggtgcacaaaaaggtagaaaacaaggcggatcccaaagcagttatgttctccaaactgaagagctagtagctaacaaacaacaacgtgagactaaaaattctcatcaaaataaagggcattaccaaaatgtggttgaagtgagagaggaacattcaagtaaagtacaaacctcactctgtcctgcgcaccaagacaaactccaacatggatccaaagacattttttctacccaagatgagctcctagtatataacaagaatcaacaccagacaaaaaatctcaatcaagatcaacagcatggccgaaaggcaaataaaatatcataccaatcttcaagtacggaagaaagacgactccactatggagaaaatggtgtgcagaaagatgtatcccaacgcagtatttatagccaaactgaaaagctagtagcaggcaagtctcaaatccaggcaccaaatcctaagcaagagccatggcatggtgaaaatgcaaaaggagagtctggccaatctacaaatagagaacaagacctactcagtcatgaacaaaaaggcagacaccaacatggatctcatgggggattggatattgtaattatagagcaggaagatgacagtgatcgtcatttggcacaacatcttaacaacgaccgaaacccattatttacataa

SEQ ID NO: 27482 - DNA, 1662 bp, Homo sapiens
  source 1..1662: mol_type = unassigned DNA
aaggaagatataaatgacaaggtcggctcagctctcagacaaggttttccaagcaagatgaagcccaacatcatctttgtactttccctgctcctcatcttggagaagcaagcagctgtgatgggacaaaaaggtggatcaaaaggccgattaccaagtgaattttcccaatttccacacggacaaaagggccagcactattctggacaaaaaggcaagcaacaaactgaatccaaaggcagtttttctattcaatacacatatcatgtagatgccaatgatcatgaccagtcccgaaaaagtcagcaatatgatttgaatgccctacataagacgacaaaatcacaacgacatctaggtggaagtcaacaactgctccataataaacaagaaggcagagaccatgataaatcaaaaggtcattttcacagggtagttatacaccataaaggaggcaaagctcatcgtgggacacaaaatccttctcaagatcaggggaatagcccatctggaaagggaatatccagtcaatattcaaacacagaagaaaggctgtgggttcatggactaagtaaagaacaaacttccgtctctggtgcacaaaaaggtagaaaacaaggcggatcccaaagcagttatgttctccaaactgaagagctagtagctaacaaacaacaacgtgagactaaaaattctcatcaaaataaagggcattaccaaaatgtggttgaagtgagagaggaacattcaagtaaagtacaaacctcactctgtcctgcgcaccaagacaaactccaacatggatccaaagacattttttctacccaagatgagctcctagtatataacaagaatcaacaccagacaaaaaatctcaatcaagatcaacagcatggccgaaaggcaaataaaatatcataccaatcttcaagtacagaagaaagacgactccactatggagaaaatggtgtgcagaaagatgtatcccaaagcagtatttatagccaaactgaagagaaagcacagggcaagtctcaaaaacagataacaattcccagtcaagagcaagagcatagccaaaaggcaaataaaatatcataccaatcttcaagtacggaagaaagacgactccactatggagaaaatggtgtgcagaaagatgtatcccaacgcagtatttatagccaaactgaaaagctagtagcaggcaagtctcaaatccaggcaccaaatcctaagcaagagccatggcatggtgaaaatgcaaaaggagagtctggccaatctacaaatagagaacaagacctactcagtcatgaacaaaaaggcagacaccaacatggatctcatgggggattggatattgtaattatagagcaggaagatgacagtgatcgtcatttggcacaacatcttaacaacgaccgaaacccattatttacataaacctaccattcggtaaccatgtgaaaggatggaccaatatcaaggtgtcagttgacctcagtgaattctgtgatgtttctgagatgcagactcccgtgtagtttcagattcttggtccatggatgacaccacctgcccatgcttccttgaattaggctttcctaacctgaagcgccttcaaacttccaataaagagatcattttctgcttcatctg

SEQ ID NO: 27483 - DNA, 2051 bp, Homo sapiens
  source 1..2051: mol_type = unassigned DNA
gacatttcagctccacccatagcacacccactcaaggaacatataaatgaagagatccgctcagttctcagacaagatttttcaagcaagatgaagtccatcatcctctttgtcctttccctgctccttatcttggagaagcaagcagctgtgatgggacaaaaaggtggatcaaaaggccaattgccaagcggatcttcccaatttccacatggacaaaagggccagcactattttggacaaaaagaccaacaacatactaaatccaaaggcagtttttctattcaacacacatatcatgtagacatcaatgatcatgactggacccgaaaaagtcagcaatatgatttgaatgccctacataaggcgacaaaatcaaaacaacacctaggtggaagtcaacaactgctcaattataaacaagaaggcagagaccatgataaatcaaaaggtcattttcacatgatagttatacatcataaaggaggccaagctcatcatgggacacaaaatccttctcaagatcaggggaatagcccatctggaaagggattatccagtcaatgttcaaacacagaaaaaaggctatgggttcatggactaagtaaagaacaagcttcagcctctggtgcacaaaaaggtagaacacaaggtggatcccaaagcagttatgttctccaaactgaagaactagtagttaacaaacaacaacgtgagactaaaaattctcatcaaaataaagggcattaccaaaatgtggttgacgtgagagaggaacattcaagtaaactacaaacttcactccatcctgcacatcaagacagactccaacatggacccaaagacatttttactacccaagatgagctcctagtatataacaagaatcaacaccagacaaaaaatctcagtcaagatcaagagcatggccggaaggcacataaaatatcatacccgtcttcacgtacagaagaaagacaacttcaccatggagaaaagagtgtacagaaagatgtatccaaaggcagcatttctatccaaactgaagagaaaatacatggcaagtctcaaaaccaggtaacaattcatagtcaagatcaagagcatggccataaggaaaataaaatatcataccaatcttcaagtacagaagaaagacatctcaactgtggagaaaagggcatccagaaaggtgtatccaaaggcagtatttcgatccaaactgaagagcaaatacatggcaagtctcaaaaccaggtaagaattcctagtcaagctcaagagtatggccataaggaaaataaaatatcataccaatcttcgagtacagaagaaagacgtctcaacagtggagaaaaggatgtacagaaaggtgtatccaaaggcagtatttctatccaaactgaagagaaaatacatggcaagtctcaaaaccaggtaacaattcctagtcaagatcaagagcatggccataaggaaaataaaatgtcataccaatcttcaagtacagaagaaagacgactcaactatggaggaaagagcacgcagaaagatgtatcccaaagcagtatttctttccaaattgaaaagctagtagaaggcaagtctcaaatccagacaccaaatcctaatcaagatcaatggtctggccaaaatgcaaaaggaaagtctggtcaatctgcagatagcaaacaagacctactcagtcatgaacaaaaaggcagatacaaacaggaatccagtgagtcacataatattgtaattactgagcatgaggttgcccaagatgatcatttgacacaacaatataatgaagacagaaatccaatatctacatagccctgttgcttagcaaccacttgaaaagctggaccaatagcaaggtgtcacccgacctcagtgaagtctttgatgtttctgagaggcagactcccatgtggtcccagatccttggtccatggatgacaccaccttcccatgcttccttgcattaggctttctaaacccggagccccttcaaacttccaataaagggatcattttctgcttta

SEQ ID NO: 27484 - DNA, 11100 bp, Homo sapiens
  source 1..11100: mol_type = unassigned DNA
cttccgctggtggcctagagcggggcccggtatggaggtgggctagaggccgacgccagccagagagcgaaatgttcttttggggccagagtctgggcatatatgaatgcaaatccgtgtttgttcacaactaagcccagctgagacgatcacttttctgtaggccatttgtccaggtacagaatgagcacatgttgttggtgtacgccaggtggtgcttccaccattgacttcctaaagcgctatgcttccaacactccgtccggtgaatttcaaacagccgacgaagacctctgctactgcttggagtgtgtggctgagtaccacaaagcaagagatgaattgccattcttgcatgaggttttatgggaattagaaaccttacgtctcataaatcactttgaaaaatccatgaaggcagaaattggagatgatgatgagttatatatagtagacaataatggagagatgccactgtttgacatcactgggcaagactttgaaaataagcttcgagttcctcttcttgaaatactgaaatatccttacttgcttctacatgaacgtgttaacgagttatgtgttgaagcactttgtcggatggaacaagccaattgctcctttcaggtgtttgataaacatccagggatctatttgtttttagtccatcccaatgaaatggttcggcgttgggctatcttgactgcaagaaacttggggaaagtggacagagatgattattatgacttacaagaagttttactttgcctttttaaagtcattgagttggggcttttagagagtccagacatttatacttcttctgtcctagagaagggtaaactgattcttctgccctcacacatgtatgatactaccaactacaaaagctattggttaggtatttgcatgttgctgaccattcttgaggaacaagccatggattccctgttgttgggctcagacaaacaaaatgattttatgcaatcgatacttcacactatggagagggaagcagatgatgatagtgtggatcctttctggccagcgttacactgttttatggtgattctggatcgccttggatctaaggtctggggtcaacttatggatcctattgtggcatttcaaaccattatcaacaacgcaagctacaatagagagatccgacatatacggaacagctctgtaaggaccaagttagaaccggagtcctatttggatgatatggtgacttgcagccagatcgtatacaattataatcctgaaaagaccaaaaaggattctggatggagaacagccatttgcccagattattgtcctaacatgtatgaagaaatggaaacattagccagtgtacttcagtcagatattggtcaagacatgcgtgttcataacagcacatttctatggttcatcccttttgtccagtccctcatggatcttaaggatttgggtgtggcttacatagcacaggttgttaatcatctgtactctgaagtcaaagaagtcctcaaccaaacagatgctgtgtgtgacaaagtcactgaattttttcttctaattttggtatcagtgattgaactgcatagaaataaaaaatgtttgcatttgctgtgggtaagttcccagcaatgggtggaagccgtcgtcaaatgtgccaagcttcctaccactgcgtttacacggagttctgagaaatcatctggaaattgctccaaaggaacagcaatgatatcttcactgtcattgcattccatgccatctaactctgtacaacttgcttatgtgcagctgattagaagtctccttaaagaaggttatcagcttgggcagcagtctctttgcaagcgattctgggataagctcaacttattccttagaggaaatttatctctaggttggcagttgactagtcaggaaacccatgagctacaaagttgcttaaagcaaattattagaaacataaaattcaaagcacctccatgtaacacttttgtggatctgacttctgcatgtaaaatctctcctgcatcttataataaagaagaaagtgaacaaatggggaagacgtctagaaaagatatgcattgtttggaagcttccagcccaacattttctaaagaaccaatgaaagtgcaagacagtgtattgatcaaagcagataacactatagaaggtgacaataatgagcaaaattatataaaggatgtgaaactagaggaccatctcttagctgggtcatgcttaaagcagagtagtaaaaacatttttactgaaagagctgaagatcaaattaaaataagtacaaggaagcagaagtctgtaaaagagatctcttcatatacaccaaaggactgtacttcaagaaatggtccagaaaggggatgtgacagaggaataatagtatcaacacgtttgttgactgattctagcactgatgctttggaaaaagtgtccacatcgaatgaagatttctctttaaaggatgatgctcttgctaaaacctcaaaacgaaaaactaaggtacagaaagatgaaatctgtgcaaagttatcacatgtaataaagaagcaacacaggaagagtactttggtcgataatactatcaatttagatgaaaatttgactgtatctaacattgagagtttctattcaaggaaagatacaggagttcagaaaggagatggtttcatacacaatctttctttagaccctagtggtgttctggatgataagaatggagaacaaaaatctcaaaacaatgtattgccaaaagagaaacaattaaagaatgaagaattagttattttctctttccatgaaaacaattgtaaaatacaggaatttcatgttgatggtaaagaattgatcccttttacagaaatgaccaatgcttcagagaagaaatcatctccctttaaagatcttatgactgtacctgaatcaagagatgaggagatgagtaatagtaccagtgtgatttattctaacttgacaagagaacaggcccctgacatcagtcctaaatctgacaccttaacggattctcagatagacagagaccttcacaaattatctttactagctcaagccagtgttattacgttcccatccgattcacctcagaactcatcgcagctgcaaaggaaagtaaaagaagataaaagatgtttcacagctaaccaaaataatgttggagatacctcccgtggacaggttattattatttcagattctgatgatgatgatgatgaaagaatcctgagtcttgagaaactcactaaacaggacaaaatatgccttgagagggaacatccagagcagcacgtttcaacagttaatagtaaggaggaaaagaatccagtaaaggaagaaaagacagagactctttttcagtttgaggaatctgattctcagtgttttgagtttgaaagttcatctgaagtgttttcagtttggcaagatcatccagacgataataattcagttcaagatggtgagaaaaaatgtttggctcctatagccaatactacaaatggtcagggttgtacagattatgtatctgaagttgttaaaaaaggagcagagggcattgaagaacacacaagaccacggagtatttctgttgaagaattttgtgaaattgaagtaaaaaagcctaagagaaaacgatctgaaaaaccaatggctgaagatcctgtgaggccttcatcttctgtcagaaatgagggccagtctgatactaataagagagatcttgtgggaaatgattttaaaagtattgatagaaggacttcaactcccaattcacgtattcagagagccactacggtttcacaaaagaagtcttcaaagctttgtacttgtacagaacccatcaggaaagttccagtttctaagacccctaagaaaactcattcagatgccaaaaaaggacagaatagaagttcaaattacctaagttgtagaacaactcctgctatagtgccgccaaagaaatttcgtcagtgtcctgagccaacttcaacagctgagaaacttggcctgaaaaagggtcctcgtaaggcatatgagttgtcccagcggtctttggattatgtagctcaattacgtgatcatggcaaaactgttggagtagttgatacccgaaaaaagactaaattaatttctcctcagaacctgtctgtcagaaataataagaaacttctgactagtcaagaacttcagatgcaaaggcagatcagacccaaatcacaaaaaaatagacgaagactttctgattgtgaaagtacagatgttaaaagagcagggtcacatacagcacagaattctgacatatttgtaccagaatctgataggtcagattataattgtacaggaggaactgaggtacttgccaacagtaacagaaaacagttaataaaatgcatgccttctgaaccagaaaccataaaagcaaaacatgggtctccagcaactgatgatgcttgccctttgaaccagtgtgattctgtagtgttaaatggaacagtaccaacaaatgaagtaattgtctccacttcagaagaccctctgggtggaggtgatccaacagcacgtcatatagagatggcagctttgaaagaaggagagcctgactccagcagtgatgcagaggaagataacttatttttaacccaaaatgatcctgaagatatggatttatgttcacaaatggagaatgacaattataaactcattgaactaattcatggaaaagatacagttgaggttgaagaagattctgtaagtcggcctcagttggaatctttgagtggcacaaagtgtaagtacaaagattgtcttgaaaccacaaaaaaccagggtgaatactgcccaaaacactctgaagtgaaagcagcagatgaagatgtatttcgtaaacctggcttgcctcctcctgcatctaaacctttgagacctaccactaagatttttagctcaaagagtacttcacgaattgctggtctttctaaatctttggaaacttcttcagcactttcaccgtctctaaaaaataagtcaaaggggatacagtcgattttgaaagtaccacagccagttcccctcatagctcagaagccagttggtgaaatgaagaattcgtgcaatgttcttcatcctcagtctccgaataattccaacaggcaaggttgcaaagttccatttggtgaaagcaaatattttccatcttcctctccagtaaacattcttttgtcatcacagtctgtctctgacaccttcgttaaagaggtcttaaaatggaaatatgaaatgtttttgaactttggtcagtgtgggccccctgcaagtctttgtcagtccatctcaagacctgtgcctgtcagatttcacaattatggagattattttaatgtttttttccctttgatggtattgaatacttttgaaacagtggcacaagaatggctcaactctccaaatagagagaatttctatcagttgcaagtacgaaaatttcctgccgattatataaaatactgggagtttgcagtttatctggaagaatgtgaactggctaaacagctttatccaaaggaaaacgatttggtgtttttagctcctgagagaataaatgaagagaagaaagatacagagagaaatgacatacaagatctccacgaatatcattctggttatgttcataaatttcgccgcacgtcagtcatgcgtaatgggaaaactgagtgttacctttccatccagactcaagagaactttccggccaatttaaacgaacttgtgaattgtattgtaatcagttctctggtaactacacaaaggaagttgaaagccatgtctctgttgggtagtcggaaccaactggctagagctgttctgaatccaaaccctatggacttctgtacaaaagatttactgactacaacatctgagagaattattgcgtacttaagagatttcaatgaagatcaaaagaaagcaatagaaactgcatatgctatggtgaaacactcaccatcagttgccaaaatctgcttgattcatggaccacctggaacaggaaaatcaaaaactattgttggcctcctctatcgtctactgacagagaaccagaggaaggggcattcagacgaaaactccaatgccaaaatcaaacaaaaccgtgtcctcgtgtgtgcaccttccaatgcagctgttgatgaactcatgaaaaaaattatccttgaattcaaagaaaaatgtaaagacaagaagaatcctttaggaaactgtggagatataaatttagtacgactgggtccagaaaagtctattaatagtgaggttctaaagttcagtttggacagccaagtaaaccacagaatgaaaaaagagttaccttctcatgttcaggcgatgcataaaagaaaggaatttctagattatcagctggatgagctttcccggcagcgagctctatgccgaggtggacgggaaatacagaggcaagaattagatgaaaacatttccaaagtttctaaggaaaggcaggaacttgcttctaaaattaaagaggttcaaggacgcccacagaaaacacagagtatcatcatcttagagtcccatatcatctgctgcacgttgagcacaagtggtggtttactacttgagtctgctttccgtgggcaagggggtgtccccttcagctgtgtcattgttgatgaggctggacagtcttgtgaaattgagactcttactccactcatccatcgctgcaataagctcatcctagtaggagatcctaagcagctccctccgacagtcatctctatgaaagcacaggagtatggctacgaccagtcaatgatggctcgcttctgcagactgctggaagagaatgtagaacacaacatgatcagcaggctgcccattctacagctcactgttcagtacaggatgcatccagacatatgcctcttcccttctaattatgtttataacagaaacttaaaaacaaatagacagacagaagccattcgatgttcatcagattggccatttcagccataccttgtgtttgatgttggagatggttcagaaagacgggataatgactcatatataaatgttcaagaaataaaactggtgatggaaataattaagcttattaaagacaaaagaaaggatgttagttttcgaaacattggcataataactcattacaaggcccagaagacgatgattcagaaggatttggacaaagagttcgatagaaaaggaccagcagaagtagacactgtggatgcattccagggtcggcagaaggattgtgttattgttacgtgtgtcagagcaaatagcatccaaggttcaattggattcctggcaagtttgcagagattgaatgtcaccatcacacgagccaagtacagcctcttcatcctcggacatttgaggaccctgatggaaaaccagcattggaatcagctgattcaggatgctcagaagcgtggtgccattattaagacctgtgacaaaaactatagacatgatgcagtgaagattctgaaactcaagcctgtgctgcagagaagtctcactcaccctcctaccatagccccagaggggtccagaccccagggtggtttgcccagcagcaagctagacagtggatttgccaagacatctgttgctgcttctctataccacacaccctctgactccaaggaaattactcttactgttacttcaaaggaccctgaaagacctcctgttcatgaccaacttcaggacccacgactgctgaagaggatgggcattgaggtcaaaggaggaatattcctttgggatccacaaccctcgagcccccagcatcctggagcaacacctcctacgggcgagccgggcttccctgtcgttcaccaggacctgagccatatacagcagcccgctgctgtagtggctgctctgagcagccacaaacctcccgtgcggggcgaacctccagctgccagtcccgaggcttccacgtgtcagagcaaatgtgatgacccggaagaggagctctgtcacaggagagaggccagggctttcagtgaaggggagcaggagaagtgtggttccgagacccatcacaccaggaggaactctaggtgggacaagaggacactggagcaggaggacagcagttccaagaaaagaaagcttttataggaaagcccagtgacatgggccagcagccacagcatattgtaaactgaagatgaccagctcgtgggaccatctagataagcttgttttttgtaaggagtttgtgtgctgttggaaaacatggaaaatgcatccttaacacctgagcctctggtcatcttcagtattttctgtcatttgcaaaagctttcagagggcattgtgtatccgtaataatgtccttgaagtcagagactggaaatgttgatctcttagtcttctatagacaaggaggtcagactggagtgaatgttgtaaaagttgaaatgtatatttgtatagcaaataacaaaatccttttaaaatttaatctagtagaccgcttttctttccccctgtttaaaatgttaatcagttttcaacagaacaaactttatattaccaaaaaaaaaaagatgggaggagggcgggtcctttcaaccattgttagagcaagacagataattatttaacagcctagcttggaataagctgagttagtgctggtgggtcaggtgtctctggctctattaaaaaaagcaaaaacccccccaaaaacctggagtctcctaggggacactttgggcagcacggttatgttaggtaaagtcttgctgacatggtgcatttttagatagagtgcattggcccagggtattatatttctgtgatgagttcatttacctgtttcagtatgcacatagttccctagctaaaattcctaatcttcttgagagagaagaatatggagtgaaagaataattcttgagctatcattcaaatgctcccagcatattgtgagccttgtgtgactggtgaggtacagacatttggttgccaaatgctagattagcgctgggtcagctgtggaagaatcgcctcagcttacagattgtcagacagatctaactagttttccagaaagcctgggaagctgtgtgttcaacatttcccaagggattctgatcaccaggcagcttgggaaccactggggcaggccaaatagaatattttgggcgggaaagaagcacccgatttaaaatgaagcgtaaccagaggagttcagaactgggaagagagtggtagacttcctgtgatcttcagaaatcatctacctggtaaaaatacatgctgtttagaatatctgataggtgtttccagctactattagaggtgatagtgcttttgtgggggaaaaaattggtcatggtgaatggagatcgaggaagctcgggacaagggaggggtgggctgcctgattttgtccagttttccaaatatccacgcagtgaactggagtatcctaaacatgagaatgtacagttgacagttgtaaaaactagggatctgtagtgaatgctgtgcagccccatatctcatttgggggtaggaaaatagctgaagattcatgtgcattatttgacatttcctttgtcatctgctttttaagcaaaaaagggttttgtgttagaaattctacttgagcagattataaagagctttaaaaaacaactttcggttgccaaaagtttgagcatttgatttcattacctgtgtctccctcactggtgtccagacggtcaactgaatactcctgaaacccagggagcaggtgacttcctggagtgctttgtccccagagtcagccactgcttcctctgtgggggtggagagtttgtctttggccatgcagtgtgcgacagttcaggacgggtagggatgggtcccattctgtctgggtcaagggctctatcagcttcttccatgtgcctttgggaagaaatctcgttactttaagtttgctttcctgttatcttgatgaagtgcccattttagcagacacttgtagtgctgaccacttagggaatgtacaaactcctaagcttctaaagggaggcatggcaaaaacgttggggtcaggatgtctctcacgctgctcatgttaatactattaacacatgatttgagaaataagttttctctaaaatgcatattttgccgccacacactgaacaatattatttccagtgaagtttgatgcctgttcttacgttgtgttcacctgttggttcaccactcagcagatctgattctgcaagaattaatggtagaactagatcatcctttctaacagacgagcctgtgtcctgtgacggcctttcacagcggaatgcagttgtacctcacattacttttgaaacttcactcgttccagttggtacaagtatttgccaaagccatttcctatgttcaccgtggcccctcctgatgtggctgtcagcgcagcgttgttgaacagggctattctttttacaaggtgtgaagtgtggctcttcgcttcgtctttgccatggcattaaaagaaagttccctgtcttctttcaatattagttatttcaaatgaatatgtgctacttaaaagcttgttttgtttctttgtatataatttgccttggatttattgtgcacagtttgttgagttgtatgtttttgtgaattatcaggagtaaatttgacaagtacatgtgaataacctcctgtaaatgaattttataacaaaaatgtactgaactattttttaaagttgtgcagattagcaattttttgctatagctttgacttttctatgctgtgaattaatagctgcgatttggcaaacagccctgttgtctttgttaaaccctaaattttaagaggaaatggcagaattaaaagcagaaacaagaagatggacatggattagaggttatgtattatgaagtaaactacaaggtactaacatcatttcgtctgccatttggtttgctttatgctgaaattacttggtggggatttgtgcaattcagatataaaaagtttcattatcca

SEQ ID NO: 27485 - DNA, 11103 bp, Homo sapiens
  source 1..11103: mol_type = unassigned DNA
cttccgctggtggcctagagcggggcccggtatggaggtgggctagaggccgacgccagccagagagcgaaatgttcttttggggccagagtctgggcatatatgaatgcaaatccgtgtttgttcacaactaagcccagctgagacgatcacttttctgtaggccatttgtccaggtacagaatgagcacatgttgttggtgtacgccaggtggtgcttccaccattgacttcctaaagcgctatgcttccaacactccgtccggtgaatttcaaacagccgacgaagacctctgctactgcttggagtgtgtggctgagtaccacaaagcaagagatgaattgccattcttgcatgaggttttatgggaattagaaaccttacgtctcataaatcactttgaaaaatccatgaaggcagaaattggagatgatgatgagttatatatagtagacaataatggagagatgccactgtttgacatcactgggcaagactttgaaaataagcttcgagttcctcttcttgaaatactgaaatatccttacttgcttctacatgaacgtgttaacgagttatgtgttgaagcactttgtcggatggaacaagccaattgctcctttcaggtgtttgataaacatccagggatctatttgtttttagtccatcccaatgaaatggttcggcgttgggctatcttgactgcaagaaacttggggaaagtggacagagatgattattatgacttacaagaagttttactttgcctttttaaagtcattgagttggggcttttagagagtccagacatttatacttcttctgtcctagagaagggtaaactgattcttctgccctcacacatgtatgatactaccaactacaaaagctattggttaggtatttgcatgttgctgaccattcttgaggaacaagccatggattccctgttgttgggctcagacaaacaaaatgattttatgcaatcgatacttcacactatggagagggaagcagatgatgatagtgtggatcctttctggccagcgttacactgttttatggtgattctggatcgccttggatctaaggtctggggtcaacttatggatcctattgtggcatttcaaaccattatcaacaacgcaagctacaatagagagatccgacatatacggaacagctctgtaaggaccaagttagaaccggagtcctatttggatgatatggtgacttgcagccagatcgtatacaattataatcctgaaaagaccaaaaaggattctggatggagaacagccatttgcccagattattgtcctaacatgtatgaagaaatggaaacattagccagtgtacttcagtcagatattggtcaagacatgcgtgttcataacagcacatttctatggttcatcccttttgtccagtccctcatggatcttaaggatttgggtgtggcttacatagcacaggttgttaatcatctgtactctgaagtcaaagaagtcctcaaccaaacagatgctgtgtgtgacaaagtcactgaattttttcttctaattttggtatcagtgattgaactgcatagaaataaaaaatgtttgcatttgctgtgggtaagttcccagcaatgggtggaagccgtcgtcaaatgtgccaagcttcctaccactgcgtttacacggagttctgagaaatcatctggaaattgctccaaaggaacagcaatgatatcttcactgtcattgcattccatgccatctaactctgtacaacttgcttatgtgcagctgattagaagtctccttaaagaaggttatcagcttgggcagcagtctctttgcaagcgattctgggataagctcaacttattccttagaggaaatttatctctaggttggcagttgactagtcaggaaacccatgagctacaaagttgcttaaagcaaattattagaaacataaaattcaaagcacctccatgtaacacttttgtggatctgacttctgcatgtaaaatctctcctgcatcttataataaagaagaaagtgaacaaatggggaagacgtctagaaaagatatgcattgtttggaagcttccagcccaacattttctaaagaaccaatgaaagtgcaagacagtgtattgatcaaagcagataacactatagaaggtgacaataatgagcaaaattatataaaggatgtgaaactagaggaccatctcttagctgggtcatgcttaaagcagagtagtaaaaacatttttactgaaagagctgaagatcaaattaaaataagtacaaggaagcagaagtctgtaaaagagatctcttcatatacaccaaaggactgtacttcaagaaatggtccagaaaggggatgtgacagaggaataatagtatcaacacgtttgttgactgattctagcactgatgctttggaaaaagtgtccacatcgaatgaagatttctctttaaaggatgatgctcttgctaaaacctcaaaacgaaaaactaaggtacagaaagatgaaatctgtgcaaagttatcacatgtaataaagaagcaacacaggaagagtactttggtcgataatactatcaatttagatgaaaatttgactgtatctaacattgagagtttctattcaaggaaagatacaggagttcagaaaggagatggtttcatacacaatctttctttagaccctagtggtgttctggatgataagaatggagaacaaaaatctcaaaacaatgtattgccaaaagagaaacaattaaagaatgaagaattagttattttctctttccatgaaaacaattgtaaaatacaggaatttcatgttgatggtaaagaattgatcccttttacagaaatgaccaatgcttcagagaagaaatcatctccctttaaagatcttatgactgtacctgaatcaagagatgaggagatgagtaatagtaccagtgtgatttattctaacttgacaagagaacaggcccctgacatcagtcctaaatctgacaccttaacggattctcagatagacagagaccttcacaaattatctttactagctcaagccagtgttattacgttcccatccgattcacctcagaactcatcgcagctgcaaaggaaagtaaaagaagataaaagatgtttcacagctaaccaaaataatgttggagatacctcccgtggacaggttattattatttcagattctgatgatgatgatgatgaaagaatcctgagtcttgagaaactcactaaacaggacaaaatatgccttgagagggaacatccagagcagcacgtttcaacagttaatagtaaggaggaaaagaatccagtaaaggaagaaaagacagagactctttttcagtttgaggaatctgattctcagtgttttgagtttgaaagttcatctgaagtgttttcagtttggcaagatcatccagacgataataattcagttcaagatggtgagaaaaaatgtttggctcctatagccaatactacaaatggtcagggttgtacagattatgtatctgaagttgttaaaaaaggagcagagggcattgaagaacacacaagaccacggagtatttctgttgaagaattttgtgaaattgaagtaaaaaagcctaagagaaaacgatctgaaaaaccaatggctgaagatcctgtgaggccttcatcttctgtcagaaatgagggccagtctgatactaataagagagatcttgtgggaaatgattttaaaagtattgatagaaggacttcaactcccaattcacgtattcagagagccactacggtttcacaaaagaagtcttcaaagctttgtacttgtacagaacccatcaggaaagttccagtttctaagacccctaagaaaactcattcagatgccaaaaaaggacagaatagaagttcaaattacctaagttgtagaacaactcctgctatagtgccgccaaagaaatttcgtcagtgtcctgagccaacttcaacagctgagaaacttggcctgaaaaagggtcctcgtaaggcatatgagttgtcccagcggtctttggattatgtagctcaattacgtgatcatggcaaaactgttggagtagttgatacccgaaaaaagactaaattaatttctcctcagaacctgtctgtcagaaataataagaaacttctgactagtcaagaacttcagatgcaaaggcagatcagacccaaatcacaaaaaaatagacgaagactttctgattgtgaaagtacagatgttaaaagagcagggtcacatacagcacagaattctgacatatttgtaccagaatctgataggtcagattataattgtacaggaggaactgaggtacttgccaacagtaacagaaaacagttaataaaatgcatgccttctgaaccagaaaccataaaagcaaaacatgggtctccagcaactgatgatgcttgccctttgaaccagtgtgattctgtagtgttaaatggaacagtaccaacaaatgaagtaattgtctccacttcagaagaccctctgggtggaggtgatccaacagcacgtcatatagagatggcagctttgaaagaaggagagcctgactccagcagtgatgcagaggaagataacttatttttaacccaaaatgatcctgaagatatggatttatgttcacaaatggagaatgacaattataaactcattgaactaattcatggaaaagatacagttgaggttgaagaagattctgtaagtcggcctcagttggaatctttgagtggcacaaagtgtaagtacaaagattgtcttgaaaccacaaaaaaccagggtgaatactgcccaaaacactctgaagtgaaagcagcagatgaagatgtatttcgtaaacctggcttgcctcctcctgcatctaaacctttgagacctaccactaagatttttagctcaaagagtacttcacgaattgctggtctttctaaatctttggaaacttcttcagcactttcaccgtctctaaaaaataagtcaaaggggatacagtcgattttgaaagtaccacagccagttcccctcatagctcagaagccagttggtgaaatgaagaattcgtgcaatgttcttcatcctcagtctccgaataattccaacaggcaaggttgcaaagttccatttggtgaaagcaaatattttccatcttcctctccagtaaacattcttttgtcatcacagtctgtctctgacaccttcgttaaagaggtcttaaaatggaaatatgaaatgtttttgaactttggtcagtgtgggccccctgcaagtctttgtcagtccatctcaagacctgtgcctgtcagatttcacaattatggagattattttaatgtttttttccctttgatggtattgaatacttttgaaacagtggcacaagaatggctcaactctccaaatagagagaatttctatcagttgcaagtacgaaaatttcctgccgattatataaaatactgggagtttgcagtttatctggaagaatgtgaactggctaaacagctttatccaaaggaaaacgatttggtgtttttagctcctgagagaataaatgaagagaagaaagatacagagagaaatgacatacaagatctccacgaatatcattctggttatgttcataaatttcgccgcacgtcagtcatgcgtaatgggaaaactgagtgttacctttccatccagactcaagagaactttccggccaatttaaacgaacttgtgaattgtattgtaatcagttctctggtaactacacaaaggaagttgaaagccatgtctctgttgggtagtcggaaccaactggctagagctgttctgaatccaaaccctatggacttctgtacaaaagatttactgactacaacatctgagagaattattgcgtacttaagagatttcaatgaagatcaaaagaaagcaatagaaactgcatatgctatggtgaaacactcaccatcagttgccaaaatctgcttgattcatggaccacctggaacaggaaaatcaaaaactattgttggcctcctctatcgtctactgacagagaaccagaggaaggggcattcagacgaaaactccaatgccaaaatcaaacaaaaccgtgtcctcgtgtgtgcaccttccaatgcagctgttgatgaactcatgaaaaaaattatccttgaattcaaagaaaaatgtaaagacaagaagaatcctttaggaaactgtggagatataaatttagtacgactgggtccagaaaagtctattaatagtgaggttctaaagttcagtttggacagccaagtaaaccacagaatgaaaaaagagttaccttctcatgttcaggcgatgcataaaagaaaggaatttctagattatcagctggatgagctttcccggcagcgagctctatgccgaggtggacgggaaatacagaggcaagaattagatgaaaacatttccaaagtttctaaggaaaggcaggaacttgcttctaaaattaaagaggttcaaggacgcccacagaaaacacagagtatcatcatcttagagtcccatatcatctgctgcacgttgagcacaagtggtggtttactacttgagtctgctttccgtgggcaagggggtgtccccttcagctgtgtcattgttgatgaggctggacagtcttgtgaaattgagactcttactccactcatccatcgctgcaataagctcatcctagtaggagatcctaagcagctccctccgacagtcatctctatgaaagcacaggagtatggctacgaccagtcaatgatggctcgcttctgcagactgctggaagagaatgtagaacacaacatgatcagcaggctgcccattctacagctcactgttcagtacaggatgcatccagacatatgcctcttcccttctaattatgtttataacagaaacttaaaaacaaatagacagacagaagccattcgatgttcatcagattggccatttcagccataccttgtgtttgatgttggagatggttcagaaagacgggataatgactcatatataaatgttcaagaaataaaactggtgatggaaataattaagcttattaaagacaaaagaaaggatgttagttttcgaaacattggcataataactcattacaaggcccagaagacgatgattcagaaggatttggacaaagagttcgatagaaaaggaccagcagaagtagacactgtggatgcattccagggtcggcagaaggattgtgttattgttacgtgtgtcagagcaaatagcatccaaggttcaattggattcctggcaagtttgcagagattgaatgtcaccatcacacgagccaagtacagcctcttcatcctcggacatttgaggaccctgatgcaacttcttcctaggagcttttgtgtacacgtgaaccattcgccttttttcagcccagaacccaagtatctacactgggctctcaaggaaaaccagcattggaatcagctgattcaggatgctcagaagcgtggtgccattattaagacctgtgacaaaaactatagacatgatgcagtgaagattctgaaactcaagcctgtgctgcagagaagtctcactcaccctcctaccatagccccagaggggtccagaccccagggtggtttgcccagcagcaagctagacagtggatttgccaagacatctgttgctgcttctctataccacacaccctctgactccaaggaaattactcttactgttacttcaaaggaccctgaaagacctcctgttcatgaccaacttcaggacccacgactgctgaagaggatgggcattgaggtcaaaggaggaatattcctttgggatccacaaccctcgagcccccagcatcctggagcaacacctcctacgggcgagccgggcttccctgtcgttcaccaggacctgagccatatacagcagcccgctgctgtagtggctgctctgagcagccacaaacctcccgtgcggggcgaacctccagctgccagtcccgaggcttccacgtgtcagagcaaatgtgatgacccggaagaggagctctgtcacaggagagaggccagggctttcagtgaaggggagcaggagaagtgtggttccgagacccatcacaccaggaggaactctaggtgggacaagaggacactggagcaggaggacagcagttccaagaaaagaaagcttttataggaaagcccagtgacatgggccagcagccacagcatattgtaaactgaagatgaccagctcgtgggaccatctagataagcttgttttttgtaaggagtttgtgtgctgttggaaaacatggaaaatgcatccttaacacctgagcctctggtcatcttcagtattttctgtcatttgcaaaagctttcagagggcattgtgtatccgtaataatgtccttgaagtcagagactggaaatgttgatctcttagtcttctatagacaaggaggtcagactggagtgaatgttgtaaaagttgaaatgtatatttgtatagcaaataacaaaatccttttaaaatttaatctagtagaccgcttttctttccccctgtttaaaatgttaatcagttttcaacagaacaaactttatattaccaaaaaaaaaaagatgggaggagggcgggtcctttcaaccattgttagagcaagacagataattatttaacagcctagcttggaataagctgagttagtgctggtgggtcaggtgtctctggctctattaaaaaaagcaaaaacccccccaaaaacctggagtctcctaggggacactttgggcagcacggttatgttaggtaaagtcttgctgacatggtgcatttttagatagagtgcattggcccagggtattatatttctgtgatgagttcatttacctgtttcagtatgcacatagttccctagctaaaattcctaatcttcttgagagagaagaatatggagtgaaagaataattcttgagctatcattcaaatgctcccagcatattgtgagccttgtgtgactggtgaggtacagacatttggttgccaaatgctagattagcgctgggtcagctgtggaagaatcgcctcagcttacagattgtcagacagatctaactagttttccagaaagcctgggaagctgtgtgttcaacatttcccaagggattctgatcaccaggcagcttgggaaccactggggcaggccaaatagaatattttgggcgggaaagaagcacccgatttaaaatgaagcgtaaccagaggagttcagaactgggaagagagtggtagacttcctgtgatcttcagaaatcatctacctggtaaaaatacatgctgtttagaatatctgataggtgtttccagctactattagaggtgatagtgcttttgtgggggaaaaaattggtcatggtgaatggagatcgaggaagctcgggacaagggaggggtgggctgcctgattttgtccagttttccaaatatccacgcagtgaactggagtatcctaaacatgagaatgtacagttgacagttgtaaaaactagggatctgtagtgaatgctgtgcagccccatatctcatttgggggtaggaaaatagctgaagattcatgtgcattatttgacatttcctttgtcatctgctttttaagcaaaaaagggttttgtgttagaaattctacttgagcagattataaagagctttaaaaaacaactttcggttgccaaaagtttgagcatttgatttcattacctgtgtctccctcactggtgtccagacggtcaactgaatactcctgaaacccagggagcaggtgacttcctggagtgctttgtccccagagtcagccactgcttcctctgtgggggtggagagtttgtctttggccatgcagtgtgcgacagttcaggacgggtagggatgggtcccattctgtctgggtcaagggctctatcagcttcttccatgtgcctttgggaagaaatctcgttactttaagtttgctttcctgttatcttgatgaagtgcccattttagcagacacttgtagtgctgaccacttagggaatgtacaaactcctaagcttctaaagggaggcatggcaaaaacgttggggtcaggatgtctctcacgctgctcatgttaatactattaacacatgatttgagaaataagttttctctaaaatgcatattttgccgccacacactgaacaatattatttccagtgaagtttgatgcctgttcttacgttgtgttcacctgttggttcaccactcagcagatctgattctgcaagaattaatggtagaactagatcatcctttctaacagacgagcctgtgtcctgtgacggcctttcacagcggaatgcagttgtacctcacattacttttgaaacttcactcgttccagttggtacaagtatttgccaaagccatttcctatgttcaccgtggcccctcctgatgtggctgtcagcgcagcgttgttgaacagggctattctttttacaaggtgtgaagtgtggctcttcgcttcgtctttgccatggcattaaaagaaagttccctgtcttctttcaatattagttatttcaaatgaatatgtgctacttaaaagcttgttttgtttctttgtatataatttgccttggatttattgtgcacagtttgttgagttgtatgtttttgtgaattatcaggagtaaatttgacaagtacatgtgaataacctcctgtaaatgaattttataacaaaaatgtactgaactattttttaaagttgtgcagattagcaattttttgctatagctttgacttttctatgctgtgaattaatagctgcgatttggcaaacagccctgttgtctttgttaaaccctaaattttaagaggaaatggcagaattaaaagcagaaacaagaagatggacatggattagaggttatgtattatgaagtaaactacaaggtactaacatca

SEQ ID NO: 27486 - DNA, 10917 bp, Homo sapiens
  source 1..10917: mol_type = unassigned DNA
cttccgctggtggcctagagcggggcccggtatggaggtgggctagaggccgacgccagccagagagcgaaatgttcttttggggccagagtctgggcatatatgaatgcaaatccgtgtttgttcacaactaagcccagctgagacgatcacttttctgtaggccatttgtccaggtacagaatgagcacatgttgttggtgtacgccaggtggtgcttccaccattgacttcctaaagcgctatgcttccaacactccgtccggtgaatttcaaacagccgacgaagacctctgctactgcttggagtgtgtggctgagtaccacaaagcaagagatgaattgccattcttgcatgaggttttatgggaattagaaaccttacgtctcataaatcactttgaaaaatccatgaaggcagaaattggagatgatgatgagttatatatagtagacaataatggagagatgccactgtttgacatcactgggcaagactttgaaaataagcttcgagttcctcttcttgaaatactgaaatatccttacttgcttctacatgaacgtgttaacgagttatgtgttgaagcactttgtcggatggaacaagccaattgctcctttcaggtgtttgataaacatccagggatctatttgtttttagtccatcccaatgaaatggttcggcgttgggctatcttgactgcaagaaacttggggaaagtggacagagatgattattatgacttacaagaagttttactttgcctttttaaagtcattgagttggggcttttagagagtccagacatttatacttcttctgtcctagagaagggtaaactgattcttctgccctcacacatgtatgatactaccaactacaaaagctattggttaggtatttgcatgttgctgaccattcttgaggaacaagccatggattccctgttgttgggctcagacaaacaaaatgattttatgcaatcgatacttcacactatggagagggaagcagatgatgatagtgtggatcctttctggccagcgttacactgttttatggtgattctggatcgccttggatctaaggtctggggtcaacttatggatcctattgtggcatttcaaaccattatcaacaacgcaagctacaatagagagatccgacatatacggaacagctctgtaaggaccaagttagaaccggagtcctatttggatgatatggtgacttgcagccagatcgtatacaattataatcctgaaaagaccaaaaaggattctggatggagaacagccatttgcccagattattgtcctaacatgtatgaagaaatggaaacattagccagtgtacttcagtcagatattggtcaagacatgcgtgttcataacagcacatttctatggttcatcccttttgtccagtccctcatggatcttaaggatttgggtgtggcttacatagcacaggttgttaatcatctgtactctgaagtcaaagaagtcctcaaccaaacagatgctgtgtgtgacaaagtcactgaattttttcttctaattttggtatcagtgattgaactgcatagaaataaaaaatgtttgcatttgctgtgggtaagttcccagcaatgggtggaagccgtcgtcaaatgtgccaagcttcctaccactgcgtttacacggagttctgagaaatcatctggaaattgctccaaaggaacagcaatgatatcttcactgtcattgcattccatgccatctaactctgtacaacttgcttatgtgcagctgattagaagtctccttaaagaaggttatcagcttgggcagcagtctctttgcaagcgattctgggataagctcaacttattccttagaggaaatttatctctaggttggcagttgactagtcaggaaacccatgagctacaaagttgcttaaagcaaattattagaaacataaaattcaaagcacctccatgtaacacttttgtggatctgacttctgcatgtaaaatctctcctgcatcttataataaagaagaaagtgaacaaatggggaagacgtctagaaaagatatgcattgtttggaagcttccagcccaacattttctaaagaaccaatgaaagtgcaagacagtgtattgatcaaagcagataacactatagaaggtgacaataatgagcaaaattatataaaggatgtgaaactagaggaccatctcttagctgggtcatgcttaaagcagagtagtaaaaacatttttactgaaagagctgaagatcaaattaaaataagtacaaggaagcagaagtctgtaaaagagatctcttcatatacaccaaaggactgtacttcaagaaatggtccagaaaggggatgtgacagaggaataatagtatcaacacgtttgttgactgattctagcactgatgctttggaaaaagtgtccacatcgaatgaagatttctctttaaaggatgatgctcttgctaaaacctcaaaacgaaaaactaaggtacagaaagatgaaatctgtgcaaagttatcacatgtaataaagaagcaacacaggaagagtactttggtcgataatactatcaatttagatgaaaatttgactgtatctaacattgagagtttctattcaaggaaagatacaggagttcagaaaggagatggtttcatacacaatctttctttagaccctagtggtgttctggatgataagaatggagaacaaaaatctcaaaacaatgtattgccaaaagagaaacaattaaagaatgaagaattagttattttctctttccatgaaaacaattgtaaaatacaggaatttcatgttgatggtaaagaattgatcccttttacagaaatgaccaatgcttcagagaagaaatcatctccctttaaagatcttatgactgtacctgaatcaagagatgaggagatgagtaatagtaccagtgtgatttattctaacttgacaagagaacaggcccctgacatcagtcctaaatctgacaccttaacggattctcagatagacagagaccttcacaaattatctttactagctcaagccagtgttattacgttcccatccgattcacctcagaactcatcgcagctgcaaaggaaagtaaaagaagataaaagatgtttcacagctaaccaaaataatgttggagatacctcccgtggacaggttattattatttcagattctgatgatgatgatgatgaaagaatcctgagtcttgagaaactcactaaacaggacaaaatatgccttgagagggaacatccagagcagcacgtttcaacagttaatagtaaggaggaaaagaatccagtaaaggaagaaaagacagagactctttttcagtttgaggaatctgattctcagtgttttgagtttgaaagttcatctgaagtgttttcagtttggcaagatcatccagacgataataattcagttcaagatggtgagaaaaaatgtttggctcctatagccaatactacaaatggtcagggttgtacagattatgtatctgaagttgttaaaaaaggagcagagggcattgaagaacacacaagaccacggagtatttctgttgaagaattttgtgaaattgaagtaaaaaagcctaagagaaaacgatctgaaaaaccaatggctgaagatcctgtgaggccttcatcttctgtcagaaatgagggccagtctgatactaataagagagatcttgtgggaaatgattttaaaagtattgatagaaggacttcaactcccaattcacgtattcagagagccactacggtttcacaaaagaagtcttcaaagctttgtacttgtacagaacccatcaggaaagttccagtttctaagacccctaagaaaactcattcagatgccaaaaaaggacagaatagaagttcaaattacctaagttgtagaacaactcctgctatagtgccgccaaagaaatttcgtcagtgtcctgagccaacttcaacagctgagaaacttggcctgaaaaagggtcctcgtaaggcatatgagttgtcccagcggtctttggattatgtagctcaattacgtgatcatggcaaaactgttggagtagttgatacccgaaaaaagactaaattaatttctcctcagaacctgtctgtcagaaataataagaaacttctgactagtcaagaacttcagatgcaaaggcagatcagacccaaatcacaaaaaaatagacgaagactttctgattgtgaaagtacagatgttaaaagagcagggtcacatacagcacagaattctgacatatttgtaccagaatctgataggtcagattataattgtacaggaggaactgaggtacttgccaacagtaacagaaaacagttaataaaatgcatgccttctgaaccagaaaccataaaagcaaaacatgggtctccagcaactgatgatgcttgccctttgaaccagtgtgattctgtagtgttaaatggaacagtaccaacaaatgaagtaattgtctccacttcagaagaccctctgggtggaggtgatccaacagcacgtcatatagagatggcagctttgaaagaaggagagcctgactccagcagtgatgcagaggaagataacttatttttaacccaaaatgatcctgaagatatggatttatgttcacaaatggagaatgacaattataaactcattgaactaattcatggaaaagatacagttgaggttgaagaagattctgtaagtcggcctcagttggaatctttgagtggcacaaagtgtaagtacaaagattgtcttgaaaccacaaaaaaccagggtgaatactgcccaaaacactctgaagtgaaagcagcagatgaagatgtatttcgtaaacctggcttgcctcctcctgcatctaaacctttgagacctaccactaagatttttagctcaaagagtacttcacgaattgctggtctttctaaatctttggaaacttcttcagcactttcaccgtctctaaaaaataagtcaaaggggatacagtcgattttgaaagtaccacagccagttcccctcatagctcagaagccagttggtgaaatgaagaattcgtgcaatgttcttcatcctcagtctccgaataattccaacaggcaaggttgcaaagttccatttggtgaaagcaaatattttccatcttcctctccagtaaacattcttttgtcatcacagtctgtctctgacaccttcgttaaagaggtcttaaaatggaaatatgaaatgtttttgaactttggtcagtgtgggccccctgcaagtctttgtcagtccatctcaagacctgtgcctgtcagatttcacaattatggagattattttaatgtttttttccctttgatggtattgaatacttttgaaacagtggcacaagaatggctcaactctccaaatagagagaatttctatcagttgcaagtacgaaaatttcctgccgattatataaaatactgggagtttgcagtttatctggaagaatgtgaactggctaaacagctttatccaaaggaaaacgatttggtgtttttagctcctgagagaataaatgaagagaagaaagatacagagagaaatgacatacaagatctccacgaatatcattctggttatgttcataaatttcgccgcacgtcagtcatgcgtaatgggaaaactgagtgttacctttccatccagactcaagagaactttccggccaatttaaacgaacttgtgaattgtattgtaatcagttctctggtaactacacaaaggaagttgaaagccatgtctctgttgggtagtcggaaccaactggctagagctgttctgaatccaaaccctatggacttctgtacaaaagatttactgactacaacatctgagagaattattgcgtacttaagagatttcaatgaagatcaaaagaaagcaatagaaactgcatatgctatggtgaaacactcaccatcagttgccaaaatctgcttgattcatggaccacctggaacaggaaaatcaaaaactattgttggcctcctctatcgtctactgacagagaaccagaggaaggggcattcagacgaaaactccaatgccaaaatcaaacaaaaccgtgtcctcgtgtgtgcaccttccaatgcagctgttgatgaactcatgaaaaaaattatccttgaattcaaagaaaaatgtaaagacaagaagaatcctttaggaaactgtggagatataaatttagtacgactgggtccagaaaagtctattaatagtgaggttctaaagttcagtttggacagccaagtaaaccacagaatgaaaaaagagttaccttctcatgttcaggcgatgcataaaagaaaggaatttctagattatcagctggatgagctttcccggcagcgagctctatgccgaggtggacgggaaatacagaggcaagaattagatgaaaacatttccaaagtttctaaggaaaggcaggaacttgcttctaaaattaaagaggttcaaggacgcccacagaaaacacagagtatcatcatcttagagtcccatatcatctgctgcacgttgagcacaagtggtggtttactacttgagtctgctttccgtgggcaagggggtgtccccttcagctgtgtcattgttgatgaggctggacagtcttgtgaaattgagactcttactccactcatccatcgctgcaataagctcatcctagtaggagatcctaagcagctccctccgacagtcatctctatgaaagcacaggagtatggctacgaccagtcaatgatggctcgcttctgcagactgctggaagagaatgtagaacacaacatgatcagcaggctgcccattctacagctcactgttcagtacaggatgcatccagacatatgcctcttcccttctaattatgtttataacagaaacttaaaaacaaatagacagacagaagccattcgatgttcatcagattggccatttcagccataccttgtgtttgatgttggagatggttcagaaagacgggataatgactcatatataaatgttcaagaaataaaactggtgatggaaataattaagcttattaaagacaaaagaaaggatgttagttttcgaaacattggcataataactcattacaaggcccagaagacgatgattcagaaggatttggacaaagagttcgatagaaaaggattcctggcaagtttgcagagattgaatgtcaccatcacacgagccaagtacagcctcttcatcctcggacatttgaggaccctgatggaaaaccagcattggaatcagctgattcaggatgctcagaagcgtggtgccattattaagacctgtgacaaaaactatagacatgatgcagtgaagattctgaaactcaagcctgtgctgcagagaagtctcactcaccctcctaccatagccccagaggggtccagaccccagggtggtttgcccagcagcaagctagacagtggatttgccaagacatctgttgctgcttctctataccacacaccctctgactccaaggaaattactcttactgttacttcaaaggaccctgaaagacctcctgttcatgaccaacttcaggacccacgactgctgaagaggatgggcattgaggtcaaaggaggaatattcctttgggatccacaaccctcgagcccccagcatcctggagcaacacctcctacgggcgagccgggcttccctgtcgttcaccaggacctgagccatatacagcagcccgctgctgtagtggctgctctgagcagccacaaacctcccgtgcggggcgaacctccagctgccagtcccgaggcttccacgtgtcagagcaaatgtgatgacccggaagaggagctctgtcacaggagagaggccagggctttcagtgaaggggagcaggagaagtgtggttccgagacccatcacaccaggaggaactctaggtgggacaagaggacactggagcaggaggacagcagttccaagaaaagaaagcttttataggaaagcccagtgacatgggccagcagccacagcatattgtaaactgaagatgaccagctcgtgggaccatctagataagcttgttttttgtaaggagtttgtgtgctgttggaaaacatggaaaatgcatccttaacacctgagcctctggtcatcttcagtattttctgtcatttgcaaaagctttcagagggcattgtgtatccgtaataatgtccttgaagtcagagactggaaatgttgatctcttagtcttctatagacaaggaggtcagactggagtgaatgttgtaaaagttgaaatgtatatttgtatagcaaataacaaaatccttttaaaatttaatctagtagaccgcttttctttccccctgtttaaaatgttaatcagttttcaacagaacaaactttatattaccaaaaaaaaaaagatgggaggagggcgggtcctttcaaccattgttagagcaagacagataattatttaacagcctagcttggaataagctgagttagtgctggtgggtcaggtgtctctggctctattaaaaaaagcaaaaacccccccaaaaacctggagtctcctaggggacactttgggcagcacggttatgttaggtaaagtcttgctgacatggtgcatttttagatagagtgcattggcccagggtattatatttctgtgatgagttcatttacctgtttcagtatgcacatagttccctagctaaaattcctaatcttcttgagagagaagaatatggagtgaaagaataattcttgagctatcattcaaatgctcccagcatattgtgagccttgtgtgactggtgaggtacagacatttggttgccaaatgctagattagcgctgggtcagctgtggaagaatcgcctcagcttacagattgtcagacagatctaactagttttccagaaagcctgggaagctgtgtgttcaacatttcccaagggattctgatcaccaggcagcttgggaaccactggggcaggccaaatagaatattttgggcgggaaagaagcacccgatttaaaatgaagcgtaaccagaggagttcagaactgggaagagagtggtagacttcctgtgatcttcagaaatcatctacctggtaaaaatacatgctgtttagaatatctgataggtgtttccagctactattagaggtgatagtgcttttgtgggggaaaaaattggtcatggtgaatggagatcgaggaagctcgggacaagggaggggtgggctgcctgattttgtccagttttccaaatatccacgcagtgaactggagtatcctaaacatgagaatgtacagttgacagttgtaaaaactagggatctgtagtgaatgctgtgcagccccatatctcatttgggggtaggaaaatagctgaagattcatgtgcattatttgacatttcctttgtcatctgctttttaagcaaaaaagggttttgtgttagaaattctacttgagcagattataaagagctttaaaaaacaactttcggttgccaaaagtttgagcatttgatttcattacctgtgtctccctcactggtgtccagacggtcaactgaatactcctgaaacccagggagcaggtgacttcctggagtgctttgtccccagagtcagccactgcttcctctgtgggggtggagagtttgtctttggccatgcagtgtgcgacagttcaggacgggtagggatgggtcccattctgtctgggtcaagggctctatcagcttcttccatgtgcctttgggaagaaatctcgttactttaagtttgctttcctgttatcttgatgaagtgcccattttagcagacacttgtagtgctgaccacttagggaatgtacaaactcctaagcttctaaagggaggcatggcaaaaacgttggggtcaggatgtctctcacgctgctcatgttaatactattaacacatgatttgagaaataagttttctctaaaatgcatattttgccgccacacactgaacaatattatttccagtgaagtttgatgcctgttcttacgttgtgttcacctgttggttcaccactcagcagatctgattctgcaagaattaatggtagaactagatcatcctttctaacagacgagcctgtgtcctgtgacggcctttcacagcggaatgcagttgtacctcacattacttttgaaacttcactcgttccagttggtacaagtatttgccaaagccatttcctatgttcaccgtggcccctcctgatgtggctgtcagcgcagcgttgttgaacagggctattctttttacaaggtgtgaagtgtggctcttcgcttcgtctttgccatggcattaaaagaaagttccctgtcttctttcaatattagttatttcaaatgaatatgtgctacttaaaagcttgttttgtttctttgtatataatttgccttggatttattgtgcacagtttgttgagttgtatgtttttgtgaattatcaggagtaaatttgacaagtacatgtgaataacctcctgtaaatgaattttataacaaaaatgtactgaactattttttaaagttgtgcagattagcaattttttgctatagctttgacttttctatgctgtgaattaatagctgcgatttggcaaacagccctgttgtctttgttaaaccctaaattttaagaggaaatggcagaattaaaagcagaaacaagaagatggacatggattagaggttatgtattatgaagtaaactacaaggtactaacatca

SEQ ID NO: 27487 - DNA, 5730 bp, Homo sapiens
  source 1..5730: mol_type = unassigned DNA
gtggcacaagaatggctcaactctccaaatagagagaatttctatcagttgcaagtacgaaaatttcctgccgattatataaaatactgggagtttgcagtttatctggaagaatgtgaactggctaaacagctttatccaaaggaaaacgatttggtgtttttagctcctgagagaataaatgaagagaagaaagatacagagagaaatgacatacaagatctccacgaatatcattctggttatgttcataaatttcgccgcacgtcagtcatgcgtaatgggaaaactgagtgttacctttccatccagactcaagagaactttccggccaatttaaacgaacttgtgaattgtattgtaatcagttctctggtaactacacaaaggaagttgaaagccatgtctctgttgggtagtcggaaccaactggctagagctgttctgaatccaaaccctatggacttctgtacaaaagatttactgactacaacatctgagagaattattgcgtacttaagagatttcaatgaagatcaaaagaaagcaatagaaactgcatatgctatggtgaaacactcaccatcagttgccaaaatctgcttgattcatggaccacctggaacaggaaaatcaaaaactattgttggcctcctctatcgtctactgacagagaaccagaggaaggggcattcagacgaaaactccaatgccaaaatcaaacaaaaccgtgtcctcgtgtgtgcaccttccaatgcagctgttgatgaactcatgaaaaaaattatccttgaattcaaagaaaaatgtaaagacaagaagaatcctttaggaaactgtggagatataaatttagtacgactgggtccagaaaagtctattaatagtgaggttctaaagttcagtttggacagccaagtaaaccacagaatgaaaaaagagttaccttctcatgttcaggcgatgcataaaagaaaggaatttctagattatcagctggatgagctttcccggcagcgagctctatgccgaggtggacgggaaatacagaggcaagaattagatgaaaacatttccaaagtttctaaggaaaggcaggaacttgcttctaaaattaaagaggttcaaggacgcccacagaaaacacagagtatcatcatcttagagtcccatatcatctgctgcacgttgagcacaagtggtggtttactacttgagtctgctttccgtgggcaagggggtgtccccttcagctgtgtcattgttgatgaggctggacagtcttgtgaaattgagactcttactccactcatccatcgctgcaataagctcatcctagtaggagatcctaagcagctccctccgacagtcatctctatgaaagcacaggagtatggctacgaccagtcaatgatggctcgcttctgcagactgctggaagagaatgtagaacacaacatgatcagcaggctgcccattctacagctcactgttcagtacaggatgcatccagacatatgcctcttcccttctaattatgtttataacagaaacttaaaaacaaatagacagacagaagccattcgatgttcatcagattggccatttcagccataccttgtgtttgatgttggagatggttcagaaagacgggataatgactcatatataaatgttcaagaaataaaactggtgatggaaataattaagcttattaaagacaaaagaaaggatgttagttttcgaaacattggcataataactcattacaaggcccagaagacgatgattcagaaggatttggacaaagagttcgatagaaaaggaccagcagaagtagacactgtggatgcattccagggtcggcagaaggattgtgttattgttacgtgtgtcagagcaaatagcatccaaggttcaattggattcctggcaagtttgcagagattgaatgtcaccatcacacgagccaagtacagcctcttcatcctcggacatttgaggaccctgatgcaacttcttcctaggagcttttgtgtacacgtgaaccattcgccttttttcagcccagaacccaagtatctacactgggctctcaaggaaaaccagcattggaatcagctgattcaggatgctcagaagcgtggtgccattattaagacctgtgacaaaaactatagacatgatgcagtgaagattctgaaactcaagcctgtgctgcagagaagtctcactcaccctcctaccatagccccagaggggtccagaccccagggtggtttgcccagcagcaagctagacagtggatttgccaagacatctgttgctgcttctctataccacacaccctctgactccaaggaaattactcttactgttacttcaaaggaccctgaaagacctcctgttcatgaccaacttcaggacccacgactgctgaagaggatgggcattgaggtcaaaggaggaatattcctttgggatccacaaccctcgagcccccagcatcctggagcaacacctcctacgggcgagccgggcttccctgtcgttcaccaggacctgagccatatacagcagcccgctgctgtagtggctgctctgagcagccacaaacctcccgtgcggggcgaacctccagctgccagtcccgaggcttccacgtgtcagagcaaatgtgatgacccggaagaggagctctgtcacaggagagaggccagggctttcagtgaaggggagcaggagaagtgtggttccgagacccatcacaccaggaggaactctaggtgggacaagaggacactggagcaggaggacagcagttccaagaaaagaaagcttttataggaaagcccagtgacatgggccagcagccacagcatattgtaaactgaagatgaccagctcgtgggaccatctagataagcttgttttttgtaaggagtttgtgtgctgttggaaaacatggaaaatgcatccttaacacctgagcctctggtcatcttcagtattttctgtcatttgcaaaagctttcagagggcattgtgtatccgtaataatgtccttgaagtcagagactggaaatgttgatctcttagtcttctatagacaaggaggtcagactggagtgaatgttgtaaaagttgaaatgtatatttgtatagcaaataacaaaatccttttaaaatttaatctagtagaccgcttttctttccccctgtttaaaatgttaatcagttttcaacagaacaaactttatattaccaaaaaaaaaaagatgggaggagggcgggtcctttcaaccattgttagagcaagacagataattatttaacagcctagcttggaataagctgagttagtgctggtgggtcaggtgtctctggctctattaaaaaaagcaaaaacccccccaaaaacctggagtctcctaggggacactttgggcagcacggttatgttaggtaaagtcttgctgacatggtgcatttttagatagagtgcattggcccagggtattatatttctgtgatgagttcatttacctgtttcagtatgcacatagttccctagctaaaattcctaatcttcttgagagagaagaatatggagtgaaagaataattcttgagctatcattcaaatgctcccagcatattgtgagccttgtgtgactggtgaggtacagacatttggttgccaaatgctagattagcgctgggtcagctgtggaagaatcgcctcagcttacagattgtcagacagatctaactagttttccagaaagcctgggaagctgtgtgttcaacatttcccaagggattctgatcaccaggcagcttgggaaccactggggcaggccaaatagaatattttgggcgggaaagaagcacccgatttaaaatgaagcgtaaccagaggagttcagaactgggaagagagtggtagacttcctgtgatcttcagaaatcatctacctggtaaaaatacatgctgtttagaatatctgataggtgtttccagctactattagaggtgatagtgcttttgtgggggaaaaaattggtcatggtgaatggagatcgaggaagctcgggacaagggaggggtgggctgcctgattttgtccagttttccaaatatccacgcagtgaactggagtatcctaaacatgagaatgtacagttgacagttgtaaaaactagggatctgtagtgaatgctgtgcagccccatatctcatttgggggtaggaaaatagctgaagattcatgtgcattatttgacatttcctttgtcatctgctttttaagcaaaaaagggttttgtgttagaaattctacttgagcagattataaagagctttaaaaaacaactttcggttgccaaaagtttgagcatttgatttcattacctgtgtctccctcactggtgtccagacggtcaactgaatactcctgaaacccagggagcaggtgacttcctggagtgctttgtccccagagtcagccactgcttcctctgtgggggtggagagtttgtctttggccatgcagtgtgcgacagttcaggacgggtagggatgggtcccattctgtctgggtcaagggctctatcagcttcttccatgtgcctttgggaagaaatctcgttactttaagtttgctttcctgttatcttgatgaagtgcccattttagcagacacttgtagtgctgaccacttagggaatgtacaaactcctaagcttctaaagggaggcatggcaaaaacgttggggtcaggatgtctctcacgctgctcatgttaatactattaacacatgatttgagaaataagttttctctaaaatgcatattttgccgccacacactgaacaatattatttccagtgaagtttgatgcctgttcttacgttgtgttcacctgttggttcaccactcagcagatctgattctgcaagaattaatggtagaactagatcatcctttctaacagacgagcctgtgtcctgtgacggcctttcacagcggaatgcagttgtacctcacattacttttgaaacttcactcgttccagttggtacaagtatttgccaaagccatttcctatgttcaccgtggcccctcctgatgtggctgtcagcgcagcgttgttgaacagggctattctttttacaaggtgtgaagtgtggctcttcgcttcgtctttgccatggcattaaaagaaagttccctgtcttctttcaatattagttatttcaaatgaatatgtgctacttaaaagcttgttttgtttctttgtatataatttgccttggatttattgtgcacagtttgttgagttgtatgtttttgtgaattatcaggagtaaatttgacaagtacatgtgaataacctcctgtaaatgaattttataacaaaaatgtactgaactattttttaaagttgtgcagattagcaattttttgctatagctttgacttttctatgctgtgaattaatagctgcgatttggcaaacagccctgttgtctttgttaaaccctaaattttaagaggaaatggcagaattaaaagcagaaacaagaagatggacatggattagaggttatgtattatgaagtaaactacaaggtactaacatcatttcgtctgccatttggtttgctttatgctgaaattacttggtggggatttgtgcaattcagatataaaaagtttcattatcca

SEQ ID NO: 27488 - DNA, 5490 bp, Homo sapiens
  source 1..5490: mol_type = unassigned DNA
aaatacgccaacttcctcctggagcgccatctgagaaggtctgcgcatgtgcacgaacgagaagtgttttttttgttttgttttgttttgttttgttttttgtcccaaggcgctgccgtaccgtccaggcggcgagttgcattctggttccgtcgtgtgtctggcgtgtggagctagtgctcccgcttattcgccactgtcgccaccgctgtcatgaaccgcgagagcttcgcggcgggagagcggctggtgtcgccggcttacgtgcggcagggctgtgaggcccgccgctcgcatgagcacctcatacggctgcttctggagaaggttcattcatggcattggacgatccggtgatatttctgctgtgcaaccaaaagctgcaggctctagccttttgaacaaaattaccaattctttggtcctggacattataaagctggctggtgtccatacagtagccaactgctttgtagttcctatggcaactggtatgagtctaactctgtgtttcttaacattacgacacaaaagaccaaaggcaaagtatattatatggccacgaatagaccagaagtcctgctttaaatccatgatcactgcaggttttgagcctgtggtgatagaaaatgttttggaaggtgacgagctgcgtacagacctgaaagcagtggaggctaaagtccaggaacttgggcctgattgcattctgtgtattcattctactacatcctgttttgctccaagggtgcctgatagattagaagaactggctgtgatttgtgctaattatgacattccacatatagttaataatgcttatggagtgcagtcttcaaagtgtatgcatctcattcagcagggggctcgagttggtagaatagatgcttttgttcagagcttggacaaaaattttatggttccagtaggtggtgctataattgctggctttaatgattcattcattcaggaaatcagcaagatgtatccaggaagagcttcagcttcaccttctttagatgtccttattactttattgtcacttggatcaaatggctataagaagctactaaaagaaagaaaggaaatgttttcatatttgtccaaccaaataaagaagttgtcagaagcctacaatgaaagactgttgcatacacctcacaatcccatatctttagctatgacacttaaaacactagatgaacaccgtgacaaagctgtcactcagcttggctcgatgctttttaccagacaggtttctggagccagggttgtgcctcttgggtccatgcaaactgtgagtggctatactttcagaggctttatgtcacatacaaataattacccttgtgcttacctcaatgctgcatcagccatcggaatgaagatgcaggatgtggacctgttcataaagagacttgacaggtgtttaaaggcagtaagaaaagaacgaagtaaagagagtgatgacaattatgacaaaactgaagatgtggatattgaagaaatggctttaaaactagataatgtacttcttgacacataccaggatgcttcttcatgacatgcgaagggtttcttcttgatcatttgaaagaaatgataaggctgtagtacaagcaagcagtttaaagataagacttgagatttttgaattgagaatttcatgggaatattcagtcaaggagcagactttggtctgaactagccattgatgattgttaagtttcccattcttagactgcatcaatccttgtgatccttaacaggttataatatacaattagcatttttctaattgttagaatatctgtcaattaagcatcatgactcagataatttttactagtgtaatgacagtaaaattacttcaattctctttgaaatgtagagtgcttcctcctaaccattctttaccgtttctgatcacacagaattgagaaagatctcttaggccactagttactagttgtttgttgagatgtgtaagtcacagtgtgcctgtaaaatgggcattccccaaggaagcagagtcaaggtataaactttcgttttgactcaaaagcagtgggtctcaactggggatgattcgcttatctgaacagcatctgcagacatttttggttgtcacaactggtgggatgctgttaacatctagaggatagaggccagggtgctactcaacatcctacaatgcatgggacaactcccacaacaaagaattatccagcccaaaatgtcattagtgctgaggttgagaaatactcctctaaagtagataaactccttgagtaaagagaagtttaccatagcaactttcagtagtacttcaaagaagatagctgtataaatgtcatcaaactatactatatagagaatcttaagtgataaccagggtcacggattccaaacatgtcattataaattgttttatatggtgctcactggtgcatttttccttttggataagggaaaacattattccacttactgtttttgctttaagcagcctgcatatattggttagtttgttcagatgttgtgcacagacatcatcaaaattagctaacatgggtatttttgaacatatttttgccaggaagatgaaaatcacatagtatgataaacaggtgtattcccctctacttgcccatgtgctcatttttctgagtctgaaattccagacttactggctttaacaataatttttgttgttaatttaagaaatagacttacttaagactattttaagaaatagagatgtcatagcctgaagatttactgaagcttctgaacatgccaccatgccaaagctatgtttctcaaacccagctctgtggatcatgttcctaaaagatgctcatggggagaaaatgtttacagacaaataattttgggagctgcctttgcaaacctgcctgttggcatattgaaggctctaagaattccttcactaaataacccagttttaatatatccttatccaaagagaaactcatttttttaaagtgaaatatttgttaacagcccattgaacatacttttaaaaacactatggtagagaatgctgtgttgccttctgggctgcatttttcttattgatttggaattgtaacctatgtatgagaaagggattttctggtattttggtgacgttgtacattgtcccagactgtttgtaaacatgaggtcagacatgtgtaaggtagacgcctatggccactggcttgaccaccttggaagtcaatgactattttgagatgaagtatttaactatgaatatcatgaaggttatttaaaaatgtatttattttatctttggggttcaaacattaaaaaaatttacataggtgtagtaactcatttcaagggaataaatgctggattaaaaagtgtaaatttttcatgagaatttgggactaaattgctgaaccaataaagctgaagagttgcaacctctagagtcaaaaaagggattgaaatgttgttgcaaatgtaaatgctggcagtgcagcttgctatacatgtaagccaaaattgttttatagaacaagtgatctatattgttgtgatcatcatttagcttaagaaaggccagagctgggagagtagcaaatgttttctcatctgcagtgtatcagcagttcttgggcttcagctgctgaatagataataattctaattgaacataaattacatgaactcacatgtgaatgatagatatgttacaatatttcattcctgatgcagaaaatcagctgtggtttttattattaaccctttctttttcagtggttttggaattctagctctattcctcctggcttaaaatttgagggcatagaattcacaagagtttttgaagagttctgtctattcaggctttcctttgtccccaccctagtgtcattttcactcactcccatttctacacataagtattaaaaaggatgtatttattataattcgctagtactgattggtaagcctcataattggcctttgttatctttgtactgtgacgaaggcagtggatgatacattaccaatcattgccgaagataacctcttctatctttttgacccaactacccttattaaaactatcaggtaaaatattggagttaggtttttaaagtcattgggctgtggcagtgtgcttagaaaagaaaatggtggaacatagaatattcttttggtcactacacaatgtgttacttatacatggcagggaagggaattttaaatcaaactcgcagtttggttcttaggtcctctgctgatgaattctcgctctatcagggaatgatatgtgacgccagccttaggaacctggtgttcaactgtaaatctttctatttagctttttgtattagttgaatgaagttatagaatatgaattattgaatacagttctgttcagccaataggcacttgatatacagaatggtaaatttaaatataaattaaatttttctaatattatgatcagcacttcactgtggttctgtgtctttaaccacctcataataagaactgttattgaggactgggctacagaatgtgcttagactacatctatggcttccatagattttagtaaaatttaaacagataatttgtgtttactgctgatgttactttaatattgaattagtagttcatcctgagagttatatttcacagaggaaaataaccaacagctgaaaacaacaataataaagctctggtgagtctgactcatactcggagaaagtttttggaatacatacacatttggtgcatataagagttgggtttccttttcccactttctgagatgtactaacctctgccagacccttaaatgattttgttatgttttgcatttttgaggccaaccttattttgtaactgaaaaaagtccagttttgcatacacagaaatttggtcattttagaagtctcacaacctgaataatttgataataattgaatatgctattaacagctttttaagaaaaggttctattagtcagttttttccttgtctgtcatattatgttggttaatgtctcttatggccaatcttagtaaacagacctaacactcactgcatccttttgtgccttactttttactttccttttgcccttttggtatgtgcgcatgtaagatggtaagtttaaggctaatgaatatatgtttgtaatttcctactcactactctgcagttaaagctaaggccttaggcaaaatctagaaatgtttatattgttttgttttttatcaagtggtgtcaacttgagaaatacaaagaaaggctatgcttaactgtataaccgtgggggattttagccatgagaatatgaagctgatgtcagcctgctaacctgttttaccaaaaggaaaagatgtttccaaaaatgttttcggtgtagactgtttaaagatgaaaataaattatataatttattatatgaaataaatttttgataagtcactgacagta

SEQ ID NO: 27489 - DNA, 5496 bp, Homo sapiens
  source 1..5496: mol_type = unassigned DNA
attctggttccgtcgtgtgtctggcgtgtggagctagtgctcccgcttattcgccactgtcgccaccgctgtcatgaaccgcgagagcttcgcggcgggagagcggctggtgtcgccggcttacgtgcggcagggctgtgaggcccgccgctcgcatgagcacctcatacggctgcttctggagaagggcaagtgtccagagaatggctgggatgaaagtacacttgaactctttttacatgaacttgcaatcatggacagcaacaatttcttaggcaattgtggtgtgggagaaagggaagggagagtggcatccgcactggttgctcgtcgtcattacaggttcattcatggcattggacgatccggtgatatttctgctgtgcaaccaaaagctgcaggctctagccttttgaacaaaattaccaattctttggtcctggacattataaagctggctggtgtccatacagtagccaactgctttgtagttcctatggcaactggtatgagtctaactctgtgtttcttaacattacgacacaaaagaccaaaggcaaagtatattatatggccacgaatagaccagaagtcctgctttaaatccatgatcactgcaggttttgagcctgtggtgatagaaaatgttttggaaggtgacgagctgcgtacagacctgaaagcagtggaggctaaagtccaggaacttgggcctgattgcattctgtgtattcattctactacatcctgttttgctccaagggtgcctgatagattagaagaactggctgtgatttgtgctaattatgacattccacatatagttaataatgcttatggagtgcagtcttcaaagtgtatgcatctcattcagcagggggctcgagttggtagaatagatgcttttgttcagagcttggacaaaaattttatggttccagtaggtggtgctataattgctggctttaatgattcattcattcaggaaatcagcaagatgtatccaggaagagcttcagcttcaccttctttagatgtccttattactttattgtcacttggatcaaatggctataagaagctactaaaagaaagaaaggaaatgttttcatatttgtccaaccaaataaagaagttgtcagaagcctacaatgaaagactgttgcatacacctcacaatcccatatctttagctatgacacttaaaacactagatgaacaccgtgacaaagctgtcactcagcttggctcgatgctttttaccagacaggtttctggagccagggttgtgcctcttgggtccatgcaaactgtgagtggctatactttcagaggctttatgtcacatacaaataattacccttgtgcttacctcaatgctgcatcagccatcggaatgaagatgcaggatgtggacctgttcataaagagacttgacaggtgtttaaaggcagtaagaaaagaacgaagtaaagagagtgatgacaattatgacaaaactgaagatgtggatattgaagaaatggctttaaaactagataatgtacttcttgacacataccaggatgcttcttcatgacatgcgaagggtttcttcttgatcatttgaaagaaatgataaggctgtagtacaagcaagcagtttaaagataagacttgagatttttgaattgagaatttcatgggaatattcagtcaaggagcagactttggtctgaactagccattgatgattgttaagtttcccattcttagactgcatcaatccttgtgatccttaacaggttataatatacaattagcatttttctaattgttagaatatctgtcaattaagcatcatgactcagataatttttactagtgtaatgacagtaaaattacttcaattctctttgaaatgtagagtgcttcctcctaaccattctttaccgtttctgatcacacagaattgagaaagatctcttaggccactagttactagttgtttgttgagatgtgtaagtcacagtgtgcctgtaaaatgggcattccccaaggaagcagagtcaaggtataaactttcgttttgactcaaaagcagtgggtctcaactggggatgattcgcttatctgaacagcatctgcagacatttttggttgtcacaactggtgggatgctgttaacatctagaggatagaggccagggtgctactcaacatcctacaatgcatgggacaactcccacaacaaagaattatccagcccaaaatgtcattagtgctgaggttgagaaatactcctctaaagtagataaactccttgagtaaagagaagtttaccatagcaactttcagtagtacttcaaagaagatagctgtataaatgtcatcaaactatactatatagagaatcttaagtgataaccagggtcacggattccaaacatgtcattataaattgttttatatggtgctcactggtgcatttttccttttggataagggaaaacattattccacttactgtttttgctttaagcagcctgcatatattggttagtttgttcagatgttgtgcacagacatcatcaaaattagctaacatgggtatttttgaacatatttttgccaggaagatgaaaatcacatagtatgataaacaggtgtattcccctctacttgcccatgtgctcatttttctgagtctgaaattccagacttactggctttaacaataatttttgttgttaatttaagaaatagacttacttaagactattttaagaaatagagatgtcatagcctgaagatttactgaagcttctgaacatgccaccatgccaaagctatgtttctcaaacccagctctgtggatcatgttcctaaaagatgctcatggggagaaaatgtttacagacaaataattttgggagctgcctttgcaaacctgcctgttggcatattgaaggctctaagaattccttcactaaataacccagttttaatatatccttatccaaagagaaactcatttttttaaagtgaaatatttgttaacagcccattgaacatacttttaaaaacactatggtagagaatgctgtgttgccttctgggctgcatttttcttattgatttggaattgtaacctatgtatgagaaagggattttctggtattttggtgacgttgtacattgtcccagactgtttgtaaacatgaggtcagacatgtgtaaggtagacgcctatggccactggcttgaccaccttggaagtcaatgactattttgagatgaagtatttaactatgaatatcatgaaggttatttaaaaatgtatttattttatctttggggttcaaacattaaaaaaatttacataggtgtagtaactcatttcaagggaataaatgctggattaaaaagtgtaaatttttcatgagaatttgggactaaattgctgaaccaataaagctgaagagttgcaacctctagagtcaaaaaagggattgaaatgttgttgcaaatgtaaatgctggcagtgcagcttgctatacatgtaagccaaaattgttttatagaacaagtgatctatattgttgtgatcatcatttagcttaagaaaggccagagctgggagagtagcaaatgttttctcatctgcagtgtatcagcagttcttgggcttcagctgctgaatagataataattctaattgaacataaattacatgaactcacatgtgaatgatagatatgttacaatatttcattcctgatgcagaaaatcagctgtggtttttattattaaccctttctttttcagtggttttggaattctagctctattcctcctggcttaaaatttgagggcatagaattcacaagagtttttgaagagttctgtctattcaggctttcctttgtccccaccctagtgtcattttcactcactcccatttctacacataagtattaaaaaggatgtatttattataattcgctagtactgattggtaagcctcataattggcctttgttatctttgtactgtgacgaaggcagtggatgatacattaccaatcattgccgaagataacctcttctatctttttgacccaactacccttattaaaactatcaggtaaaatattggagttaggtttttaaagtcattgggctgtggcagtgtgcttagaaaagaaaatggtggaacatagaatattcttttggtcactacacaatgtgttacttatacatggcagggaagggaattttaaatcaaactcgcagtttggttcttaggtcctctgctgatgaattctcgctctatcagggaatgatatgtgacgccagccttaggaacctggtgttcaactgtaaatctttctatttagctttttgtattagttgaatgaagttatagaatatgaattattgaatacagttctgttcagccaataggcacttgatatacagaatggtaaatttaaatataaattaaatttttctaatattatgatcagcacttcactgtggttctgtgtctttaaccacctcataataagaactgttattgaggactgggctacagaatgtgcttagactacatctatggcttccatagattttagtaaaatttaaacagataatttgtgtttactgctgatgttactttaatattgaattagtagttcatcctgagagttatatttcacagaggaaaataaccaacagctgaaaacaacaataataaagctctggtgagtctgactcatactcggagaaagtttttggaatacatacacatttggtgcatataagagttgggtttccttttcccactttctgagatgtactaacctctgccagacccttaaatgattttgttatgttttgcatttttgaggccaaccttattttgtaactgaaaaaagtccagttttgcatacacagaaatttggtcattttagaagtctcacaacctgaataatttgataataattgaatatgctattaacagctttttaagaaaaggttctattagtcagttttttccttgtctgtcatattatgttggttaatgtctcttatggccaatcttagtaaacagacctaacactcactgcatccttttgtgccttactttttactttccttttgcccttttggtatgtgcgcatgtaagatggtaagtttaaggctaatgaatatatgtttgtaatttcctactcactactctgcagttaaagctaaggccttaggcaaaatctagaaatgtttatattgttttgttttttatcaagtggtgtcaacttgagaaatacaaagaaaggctatgcttaactgtataaccgtgggggattttagccatgagaatatgaagctgatgtcagcctgctaacctgttttaccaaaaggaaaagatgtttccaaaaatgttttcggtgtagactgtttaaagatgaaaataaattatataatttattatatgaaataaatttttgataagtca

SEQ ID NO: 27490 - DNA, 1480 bp, Homo sapiens
  source 1..1480: mol_type = unassigned DNA
ggtcccgccccccgcggccgcaccgcctcctgcctggtctcgggtgccagcgccgccggcggagaacaggagcatggagggcgggctggggcgtgctgtgtgcttgctgaccggggcctcccgcggcttcggccggacgctggccccgctcctggcctcgctgctgtcgcccggctccgtgcttgtccttagcgcccgcaacgacgaggcactgcgccagctggaggccgagctgggcgccgagcggtctggcctgcgcgtggtgcgggtgcccgccgacctgggcgccgaggccggcttgcagcagctgctcggcgccctgcgcgagctcccccggcccaaggggctgcagcgactgctgcttatcaacaacgcgggctctcttggggatgtgtccaaaggcttcgtggacctgagtgactccactcaagtgaacaactactgggcactgaacttgacctccatgctctgcctgacttccagcgtcctgaaggccttcccggacagtcctggcctcaacagaaccgtggttaacatctcgtccctctgtgccctgcaacctttcaaaggctgggcgctgtactgtgcaggaaaggctgctcgtgatatgctgttccaggtcctggcgctggaggaacctaatgtgagggtgctgaactatgccccaggtcctctggacacagacatgcagcagttggcccgggagacctccgtggacccagacatgcgaaaagggctgcaggagctgaaggcaaaggggaagctggtggattgcaaggtgtcagcccagaaactgctgagcttactggaaaaggacgagttcaagtctggagcccacgtggacttctatgacaaataagcccatgtttttggcttcctgaacctttttgcccccacttttagacataccccagagccctgtggctccccacaccctgccataggggcagtcctgccttacacatagaagcattcatgcctgctgccctgccctcaggcacagccagctgtgagctcccaggtcattggccttaccagttgtcaggagtctgtgctgtgcaccctgggttataaggaggcttaggagagaggttatgggtattggtgtctctatccccaggaatagaacttaaggggtgggaagaacaggaaaagaagctggaacacagaagagaggaggttgtgtctcttgctcatagcaagcctgtgggtagaggaaagagtgatctggtgtcgaataggaggacccatgtagattcgcagatggcctggatgggaggaagggcagacggtacatgtcccagcccacatagatgccccttgctgagggtagcaggaccttctgttgaactttgtgtcctcactctgatgtctccttccttcagaatctaccacccctcccccaggctgggagaaggggctcctgggtgtctgtatacacgccaaaggcagatacaaataaaatacagattgtcctttc

SEQ ID NO: 27491 - DNA, 1592 bp, Homo sapiens
  source 1..1592: mol_type = unassigned DNA
ccctgctaacaaagggagccacttccttcctctctgcacataccccatgtctcaccacgatgatggagctacagtgggacttggaatccagatgtgtgaaggatggagggttgaagccgcactcagcttcctgccccaccagaggaagtggggagagacggcaggtgcagtgatggctggcggagtcatggacaaggagtacgtgggttttgctgccctccccaaccagctgcaccgcaagtctgtcaagaaggggtttgacttcacgctaatggtggcaggggagtcaggcctagggaaatccaccctcatcaacagcctcttcctcaccaacctctatgaggatcgccaggtgccagaggccagtgctcgcttgacacagaccctggccattgagcgccggggcgtagagattgaggaagggggtgtgaaagtgaagctgacccttgtggacacacctggctttggggactcagtggactgctctgactgctggcttccggtggtgaaattcatcgaggagcaatttgagcagtaccttagggatgagagtggcctgaaccggaagaacatccaggactcccgagtccactgctgcctctacttcatctcacccttcggccgggggctccggcccctagatgtggccttcctccgggcagtacacgagaaagtcaacatcatcccagtcattggcaaagcggatgctctgatgccccaggaaacccaggccctcaagcagaagatccgggatcagttgaaggaagaggagatccacatctaccagttccccgaatgtgactctgatgaagatgaagacttcaagaggcaggatgcagagatgaaggaaagcatcccttttgcagtcgtgggatcatgcgaggtggtgagggatggcgggaaccggccggtgaggggacgccgctactcctgggggaccgtggaggtggagaacccacatcactgcgatttcctgaacctgcgacggatgctggtgcagacacacctgcaggacctgaaagaggtgacgcacgatctgctctacgagggctaccgggcccgctgcctacagagcctggcccggcctggggctcgcgatcgagccagccgcagtaagctttcccgccagagcgccacagagatcccgctgcccatgctgcctctggcggacaccgagaagctgatccgcgagaaagacgaagagctgcgccgcatgcaagagatgctggagaagatgcaggcccaaatgcagcagagccaggcccagggcgagcagtcagacgccctctgaggccacgccccgcccggccttacctcggctccgccttcagtcggcctcttgtccaatccccgcgccccacactgcccagcgccccccgggacctccgcgggtgccgccctcgcgcgggctagggggaggttctcccagcctgagtccgtagccccgccccggcgctggtcccgcccacccagacaccgcccacttcccggcccggggcctgcacaatctccgaccgcatcactgtcttccggagtcccccttcttctcccagactctgtcttcaataaaaactgagcttcccgcggccacg

SEQ ID NO: 27492 - DNA, 1589 bp, Homo sapiens
  source 1..1589: mol_type = unassigned DNA
ccctgctaacaaagggagccacttccttcctctctgcacataccccatgtctcaccacgatgatggagctacagtgggacttggaatccagatgtgtgaaggatggagggttgaagccgcactcagcttcctgccccaccagaggaagtggggagagacggcaggtgcagtgatggctggcggagtcatggacaaggagtacgtgggttttgctgccctccccaaccagctgcaccgcaagtctgtcaagaaggggtttgacttcacgctaatggtggcaggggagtcaggcctagggaaatccaccctcatcaacagcctcttcctcaccaacctctatgaggatcgccaggtgccagaggccagtgctcgcttgacacagaccctggccattgagcgccggggcgtagagattgaggaagggggtgtgaaagtgaagctgacccttgtggacacacctggctttggggactcagtggactgctctgactgctggcttccggtggtgaaattcatcgaggagcaatttgagcagtaccttagggatgagagtggcctgaaccggaagaacatccaggactcccgagtccactgctgcctctacttcatctcacccttcggccgggggctccggcccctagatgtggccttcctccgggcagtacacgagaaagtcaacatcatcccagtcattggcaaagcggatgctctgatgccccaggaaacccaggccctcaagcagaagatccgggatcagttgaaggaagaggagatccacatctaccagttccccgaatgtgactctgatgaagatgaagacttcaagaggcaggatgcagagatgaaggaaagcatcccttttgcagtcgtgggatcatgcgaggtggtgagggatggcgggaaccggccggtgaggggacgccgctactcctgggggaccgtggaggtggagaacccacatcactgcgatttcctgaacctgcgacggatgctggtgcagacacacctgcaggacctgaaagaggtgacgcacgatctgctctacgagggctaccgggcccgctgcctacagagcctggcccggcctggggctcgcgatcgagccagccgcagtaagctttcccgccagagcgccacagagatcccgctgcccatgctgcctctggcggacaccgagaagctgatccgcgagaaagacgaagagctgcgccgcatgcaagagatgctggagaagatgcaggcccaaatgcagcagagccaggcccagggcgagcagtcagacgccctctgaggccacgccccgcccggccttacctcggctccgccttcagtcggcctcttgtccaatccccgcgccccacactgcccagcgccccccgggacctccgcgggtgccgccctcgcgcgggctagggggaggttctcccagcctgagtccgtagccccgccccggcgctggtcccgcccacccagacaccgcccacttcccggcccggggcctgcacaatctccgaccgcatcactgtcttccggagtcccccttcttctcccagactctgtcttcaataaaaactgagcttcccgcggcc

SEQ ID NO: 27493 - DNA, 1379 bp, Homo sapiens
  source 1..1379: mol_type = unassigned DNA
gccctccggccttcccgccgccgtcgccgggaccagccgctcggggccgggctgatacagccgcttcaccgtgcccctgcccgcgaccatggcctcctccgaggtggcgcggcacctgctctttcagtctcacatggcaacgaaaacaacttgtatgtcttcacaaggatcagatgatgaacagatactaccaaccaatagttgactacatagatgctcagtttgaggcctatctccaagaagaactgaagattaagcgttctctctttacctaccatgattctcgcatccatgtgtgtctctacttcatttcaccgacaggccactctctgaagacacttgatctcttaaccatgaagaaccttgacagcaaggtaaacattataccagtgattgccaaagcagatacggtttctaaaactgaattacagaagtttaagatcaagctcatgagtgaattggtcagcaatggcgtccagatataccagttcccaacggatgatgacactattgctaaggtcaacgctgcaatgaatggacagttgccgtttgctgttgtgggaagtatggatgaggtaaaagtcggaaacaagatggtcaaagctcgccagtacccttggggtgttgtacaagtggaaaatgaaaaccactgtgactttgtaaagctgcgggaaatgctcatttgtacaaatatggaggacctgcgagagcagacccataccaggcactatgagctttacaggcgctgcaaactggaggaaatgggctttacagatgtgggcccagaaaacaagccagtcagtgttcaagagacctatgaagccaaaagacatgagttccatggtgaacgtcagaggaaggaagaagaaatgaaacagatgtttgtgcagcgagtaaaggagaaagaagccatattgaaagaagctgagagagagctacaggccaaatttgagcaccttaagagacttcaccaagaagagagaatgaagcttgaagaaaagagaagacttttggaagaagaaataattgctttctctaaaaagaaagctacctccgagatatttcacagccagtcctttctggcaacaggcagcaacctgaggaaggacaaggaccgtaagaactccaattttttgtaaaacagaagttccagagcacagaaggtcatcatcacaagcaaactttattaaaaaaaaactagaagtgtgctttgattttgctgttatttgttttatcacttctatatttggtgaacagccacagttactgatatttatggaaaagtactttcaagtacaaggtcaatacataagccagagtgaatgatactacaagttgagcatctctaattcaaaaatctgaaatccagaagcttcaaa

SEQ ID NO: 27494 - DNA, 3117 bp, Homo sapiens
  source 1..3117: mol_type = unassigned DNA
cacttccggcctcgcgagggccgcaatcactgctccgcagttcccgcctgcattcctcgcgccgtcttcctggagtcccagctctccttcagcccgccccaacgctgacgctcagtcctcaggcgtcgagggtagctcctgtgaggggctcgcttggcgcaggcaaaacgctcagcgcgcaccacagggcgtccgccccaaccccgcccccggaggcctccagctcggccccgcccctgtcccttccccgtcgcggaggcagcctagcctcgcgccccgcccgttgcttctgccctccggccttcccgccgccgtcgccgggaccagccgctcggggccgggctgatacagccgcttcaccgtgcccctgcccgcgaccatggcctcctccgaggtggcgcggcacctgctctttcagtctcacatggcaacgaaaacaacttgtatgtcttcacaaggatcagatgatgaacagataaaaagagaaaacattcgttcgttgactatgtctggccatgttggttttgagagtttgcctgatcagctggtgaacagatccattcagcaaggtttctgctttaatattctctgtgtgggggaaactggaattggaaaatcaacactgattgacacattgtttaatactaattttgaagactatgaatcctcacatttttgcccaaatgttaaacttaaagctcagacatatgaactccaggaaagtaatgttcaattgaaattgaccattgtgaatacagtgggatttggtgaccaaataaataaagaagagagctaccaaccaatagttgactacatagatgctcagtttgaggcctatctccaagaagaactgaagattaagcgttctctctttacctaccatgattctcgcatccatgtgtgtctctacttcatttcaccgacaggccactctctgaagacacttgatctcttaaccatgaagaaccttgacagcaaggtaaacattataccagtgattgccaaagcagatacggtttctaaaactgaattacagaagtttaagatcaagctcatgagtgaattggtcagcaatggcgtccagatataccagttcccaacggatgatgacactattgctaaggtcaacgctgcaatgaatggacagttgccgtttgctgttgtgggaagtatggatgaggtaaaagtcggaaacaagatggtcaaagctcgccagtacccttggggtgttgtacaagtggaaaatgaaaaccactgtgactttgtaaagctgcgggaaatgctcatttgtacaaatatggaggacctgcgagagcagacccataccaggcactatgagctttacaggcgctgcaaactggaggaaatgggctttacagatgtgggcccagaaaacaagccagtcagctacaggccaaatttgagcaccttaagagacttcaccaagaagagagaatgaagcttgaagaaaagagaagacttttggaagaagaaataattgctttctctaaaaagaaagctacctccgagatatttcacagccagtcctttctggcaacaggcagcaacctgaggaaggacaaggaccgtaagaactccaattttttgtaaaacagaagttccagagcacagaaggtcatcatcacaagcaaactttattaaaaaaaaactagaagtgtgctttgattttgctgttatttgttttatcacttctatatttggtgaacagccacagttactgatatttatggaaaagtactttcaagtacaaggtcaatacataagccagagtgaatgatactacaagttgagcatctctaattcaaaaatctgaaatccagaagcttcaaaatctgaatctttttgagcactgacttgaccccacaagtggaaaattccccacccgacacctttgctttctgatggttcagtttaaacagattttgtttcttgcacaaaatttttgtataaattactttcaggctatatgtataaggtggatgtgaaacatgaattatgtaattagagtcgggtcccgttgtgtatatgcagatattccaaacctgaaatccaaaacacttctggtccctagcattttggataagggatactcagcttgtacctatatattcatatatattcactgttgttagaaatgtttaagttgctgttctgtgatgaatctaaatcttttctcttgctaccaagctattgtcactgcagtgcattataccaaagagcgaagtcagtgccactgaaaatacagaacccattaatatcgtggctatctgattacatttatattccaagatgaaccttttttatatatgctaaaaattttggggaatatgttttgggatgtattatggagctaaaactctaacctcttaatagttttatagaacttaaaaattttttatacaattacccaattggtgatatgatcttaagcttttgtgtcagattatttaatatgatgacttcatgctttattatgccttattatggctgacgtattactgtggtgaaacaaaatatctttaaaagttaaaacatccagatatataagctattttttcctaaggataaagtacctttgagcatgagtgtatcacagctttcattaggaaaacttttcattacatacttgtttaaactctgtcttccagggtaaaaataataaggttgaatcattttattaaaaatactttttaagaaaataactatgaacatctgaatattaaagatataaaaatgcacataattcatatttcaggtggtatttgcattcagtgccttactggtattctcagaacattttaatgatttctaacatttcttaacagtcatagatatatacattttcattttttgtacttgaatattctaaataaaactgacatttactcttgacaaataaaacatatatttactaaaatgtgtttaattttcctttctgaaaactctcattttaaaaacgttcatttaattatgtatttgaattattttggagatgaggtattttatgagtattttcagacaatgaaacttattagtctgtgtcagattctgagcaatcatagagtcatctaagttgtaaataaaaccttgcatagc

SEQ ID NO: 27495 - DNA, 3091 bp, Homo sapiens
  source 1..3091: mol_type = unassigned DNA
gtcttcctggagtcccagctctccttcagcccgccccaacgctgacgctcagtcctcaggcgtcgagggtagctcctgtgaggggctcgcttggcgcaggcaaaacgctcagcgcgcaccacagggcgtccgccccaaccccgcccccggaggcctccagctcggccccgcccctgtcccttccccgtcgcggaggcagcctagcctcgcgccccgcccgttgcttctgccctccggccttcccgccgccgtcgccgggaccagccgctcggggccgggctgatacagccgcttcaccgtgcccctgcccgcgaccatggcctcctccgaggtggcgcggcacctgctctttcagtctcacatggcaacgaaaacaacttgtatgtcttcacaaggatcagatgatgaacagataaaaagagaaaacattcgttcgttgactatgtctggccatgttggttttgagagtttgcctgatcagctggtgaacagatccattcagcaaggtttctgctttaatattctctgtgtgggggaaactggaattggaaaatcaacactgattgacacattgtttaatactaattttgaagactatgaatcctcacatttttgcccaaatgttaaacttaaagctcagacatatgaactccaggaaagtaatgttcaattgaaattgaccattgtgaatacagtgggatttggtgaccaaataaataaagaagagagctaccaaccaatagttgactacatagatgctcagtttgaggcctatctccaagaagaactgaagattaagcgttctctctttacctaccatgattctcgcatccatgtgtgtctctacttcatttcaccgacaggccactctctgaagacacttgatctcttaaccatgaagaaccttgacagcaaggtaaacattataccagtgattgccaaagcagatacggtttctaaaactgaattacagaagtttaagatcaagctcatgagtgaattggtcagcaatggcgtccagatataccagttcccaacggatgatgacactattgctaaggtcaacgctgcaatgaatggacagttgccgtttgctgttgtgggaagtatggatgaggtaaaagtcggaaacaagatggtcaaagctcgccagtacccttggggtgttgtacaagtggaaaatgaaaaccactgtgactttgtaaagctgcgggaaatgctcatttgtacaaatatggaggacctgcgagagcagacccataccaggcactatgagctttacaggcgctgcaaactggaggaaatgggctttacagatgtgggcccagaaaacaagccagtcagtgttcaagagacctatgaagccaaaagacatgagttccatggtgaacgtcagaggaaggaagaagaaatgaaacagatgtttgtgcagcgagtaaaggagaaagaagccatattgaaagaagctgagagagagctacaggccaaatttgagcaccttaagagacttcaccaagaagagagaatgaagcttgaagaaaagagaagacttttggaagaagaaataattgctttctctaaaaagaaagctacctccgagatatttcacagccagtcctttctggcaacaggcagcaacctgaggaaggacaaggaccgtaagaaggaaccaggctgtcgattcgaactcctgtgcattgatgtcagagcttgtgaaaccaatggtggacgtaaagacgcagagaaagctccaattttttgtaaaacagaagttccagagcacagaaggtcatcatcacaagcaaactttattaaaaaaaaactagaagtgtgctttgattttgctgttatttgttttatcacttctatatttggtgaacagccacagttactgatatttatggaaaagtactttcaagtacaaggtcaatacataagccagagtgaatgatactacaagttgagcatctctaattcaaaaatctgaaatccagaagcttcaaaatctgaatctttttgagcactgacttgaccccacaagtggaaaattccccacccgacacctttgctttctgatggttcagtttaaacagattttgtttcttgcacaaaatttttgtataaattactttcaggctatatgtataaggtggatgtgaaacatgaattatgtaattagagtcgggtcccgttgtgtatatgcagatattccaaacctgaaatccaaaacacttctggtccctagcattttggataagggatactcagcttgtacctatatattcatatatattcactgttgttagaaatgtttaagttgctgttctgtgatgaatctaaatcttttctcttgctaccaagctattgtcactgcagtgcattataccaaagagcgaagtcagtgccactgaaaatacagaacccattaatatcgtggctatctgattacatttatattccaagatgaaccttttttatatatgctaaaaattttggggaatatgttttgggatgtattatggagctaaaactctaacctcttaatagttttatagaacttaaaaattttttatacaattacccaattggtgatatgatcttaagcttttgtgtcagattatttaatatgatgacttcatgctttattatgccttattatggctgacgtattactgtggtgaaacaaaatatctttaaaagttaaaacatccagatatataagctattttttcctaaggataaagtacctttgagcatgagtgtatcacagctttcattaggaaaacttttcattacatacttgtttaaactctgtcttccagggtaaaaataataaggttgaatcattttattaaaaatactttttaagaaaataactatgaacatctgaatattaaagatataaaaatgcacataattcatatttcaggtggtatttgcattcagtgccttactggtattctcagaacattttaatgatttctaacatttcttaacagtcatagatatatacattttcattttttgtacttgaatattctaaataaaactgacatttactcttgacaaataaaacatatatttactaaaa

SEQ ID NO: 27496 - DNA, 3071 bp, Homo sapiens
  source 1..3071: mol_type = unassigned DNA
cacttccggcctcgcgagggccgcaatcactgctccgcagttcccgcctgcattcctcgcgccgtcttcctggagtcccagctctccttcagcccgccccaacgctgacgctcagtcctcaggcgtcgagggtagctcctgtgaggggctcgcttggcgcaggcaaaacgctcagcgcgcaccacagggcgtccgccccaaccccgcccccggaggcctccagctcggccccgcccctgtcccttccccgtcgcggaggcagcctagcctcgcgccccgcccgttgcttctgccctccggccttcccgccgccgtcgccgggaccagccgctcggggccgggctgatacagccgcttcaccgtgcccctgcccgcgaccatggcctcctccgaggtggcgcggcacctgctctttcagtctcacatggcaacgaaaacaacttgtatgtcttcacaaggatcagatgatgaacagataaaaagagaaaacattcgttcgttgactatgtctggccatgttggttttgagagtttgcctgatcagctggtgaacagatccattcagcaaggtttctgctttaatattctctgtgtgggggaaactggaattggaaaatcaacactgattgacacattgtttaatactaattttgaagactatgaatcctcacatttttgcccaaatgttaaacttaaagctcagacatatgaactccaggaaagtaatgttcaattgaaattgaccattgtgaatacagtgggatttggtgaccaaataaataaagaagagagctaccaaccaatagttgactacatagatgctcagtttgaggcctatctccaagaagaactgaagattaagcgttctctctttacctaccatgattctcgcatccatgtgtgtctctacttcatttcaccgacaggccactctctgaagacacttgatctcttaaccatgaagaaccttgacagcaaggtaaacattataccagtgattgccaaagcagatacggtttctaaaactgaattacagaagtttaagatcaagctcatgagtgaattggtcagcaatggcgtccagatataccagttcccaacggatgatgacactattgctaaggtcaacgctgcaatgaatggacagttgccgtttgctgttgtgggaagtatggatgaggtaaaagtcggaaacaagatggtcaaagctcgccagtacccttggggtgttgtacaagtggaaaatgaaaaccactgtgactttgtaaagctgcgggaaatgctcatttgtacaaatatggaggacctgcgagagcagacccataccaggcactatgagctttacaggcgctgcaaactggaggaaatgggctttacagatgtgggcccagaaaacaagccagtcagtgttcaagagacctatgaagccaaaagacatgagttccatggtgaacgtcagaggaaggaagaagaaatgaaacagatgtttgtgcagcgagtaaaggagaaagaagccatattgaaagaagctgagagagagctacaggccaaatttgagcaccttaagagacttcaccaagaagagagaatgaagcttgaagaaaagagaagacttttggaagaagaaataattgctttctctaaaaagaaagctacctccgagatatttcacagccagtcctttctggcaacaggcagcaacctgaggaaggacaaggaccgtaagaactccaattttttgtaaaacagaagttccagagcacagaaggtcatcatcacaagcaaactttattaaaaaaaaactagaagtgtgctttgattttgctgttatttgttttatcacttctatatttggtgaacagccacagttactgatatttatggaaaagtactttcaagtacaaggtcaatacataagccagagtgaatgatactacaagttgagcatctctaattcaaaaatctgaaatccagaagcttcaaaatctgaatctttttgagcactgacttgaccccacaagtggaaaattccccacccgacacctttgctttctgatggttcagtttaaacagattttgtttcttgcacaaaatttttgtataaattactttcaggctatatgtataaggtggatgtgaaacatgaattatgtaattagagtcgggtcccgttgtgtatatgcagatattccaaacctgaaatccaaaacacttctggtccctagcattttggataagggatactcagcttgtacctatatattcatatatattcactgttgttagaaatgtttaagttgctgttctgtgatgaatctaaatcttttctcttgctaccaagctattgtcactgcagtgcattataccaaagagcgaagtcagtgccactgaaaatacagaacccattaatatcgtggctatctgattacatttatattccaagatgaaccttttttatatatgctaaaaattttggggaatatgttttgggatgtattatggagctaaaactctaacctcttaatagttttatagaacttaaaaattttttatacaattacccaattggtgatatgatcttaagcttttgtgtcagattatttaatatgatgacttcatgctttattatgccttattatggctgacgtattactgtggtgaaacaaaatatctttaaaagttaaaacatccagatatataagctattttttcctaaggataaagtacctttgagcatgagtgtatcacagctttcattaggaaaacttttcattacatacttgtttaaactctgtcttccagggtaaaaataataaggttgaatcattttattaaaaatactttttaagaaaataactatgaacatctgaatattaaagatataaaaatgcacataattcatatttcaggtggtatttgcattcagtgccttactggtattctcagaacattttaatgatttctaacatttcttaacagtcatagatatatacattttcattttttgtacttgaatattctaaataaaactgacatttactcttgacaaataaaacatatatttactaaaa

SEQ ID NO: 27497 - DNA, 2719 bp, Homo sapiens
  source 1..2719: mol_type = unassigned DNA
cccgttgcttctgccctccggccttcccgccgccgtcgccgggaccagccgctcggggccgggctgatacagccgcttcaccgtgcccctgcccgcgaccatggcctcctccgaggtggcgcggcacctgaaaagagaaaacattcgttcgttgactatgtctggccatgttggttttgagagtttgcctgatcagctggtgaacagatccattcagcaaggtttctgctttaatattctctgtgtgggggaaactggaattggaaaatcaacactgattgacacattgtttaatactaattttgaagactatgaatcctcacatttttgcccaaatgttaaacttaaagctcagacatatgaactccaggaaagtaatgttcaattgaaattgaccattgtgaatacagtgggatttggtgaccaaataaataaagaagagagctaccaaccaatagttgactacatagatgctcagtttgaggcctatctccaagaagaactgaagattaagcgttctctctttacctaccatgattctcgcatccatgtgtgtctctacttcatttcaccgacaggccactctctgaagacacttgatctcttaaccatgaagaaccttgacagcaaggtaaacattataccagtgattgccaaagcagatacggtttctaaaactgaattacagaagtttaagatcaagctcatgagtgaattggtcagcaatggcgtccagatataccagttcccaacggatgatgacactattgctaaggtcaacgctgcaatgaatggacagttgccgtttgctgttgtgggaagtatggatgaggtaaaagtcggaaacaagatggtcaaagctcgccagtacccttggggtgttgtacaagtggaaaatgaaaaccactgtgactttgtaaagctgcgggaaatgctcatttgtacaaatatggaggacctgcgagagcagacccataccaggcactatgagctttacaggcgctgcaaactggaggaaatgggctttacagatgtgggcccagaaaacaagccagtcagtgttcaagagacctatgaagccaaaagacatgagttccatggtgaacgtcagaggaaggaagaagaaatgaaacagatgtttgtgcagcgagtaaaggagaaagaagccatattgaaagaagctgagagagagctacaggccaaatttgagcaccttaagagacttcaccaagaagagagaatgaagcttgaagaaaagagaagacttttggaagaagaaataattgctttctctaaaaagaaagctacctccgagatatttcacagccagtcctttctggcaacaggcagcaacctgaggaaggacaaggaccgtaagaactccaattttttgtaaaacagaagttccagagcacagaaggtcatcatcacaagcaaactttattaaaaaaaaactagaagtgtgctttgattttgctgttatttgttttatcacttctatatttggtgaacagccacagttactgatatttatggaaaagtactttcaagtacaaggtcaatacataagccagagtgaatgatactacaagttgagcatctctaattcaaaaatctgaaatccagaagcttcaaaatctgaatctttttgagcactgacttgaccccacaagtggaaaattccccacccgacacctttgctttctgatggttcagtttaaacagattttgtttcttgcacaaaatttttgtataaattactttcaggctatatgtataaggtggatgtgaaacatgaattatgtaattagagtcgggtcccgttgtgtatatgcagatattccaaacctgaaatccaaaacacttctggtccctagcattttggataagggatactcagcttgtacctatatattcatatatattcactgttgttagaaatgtttaagttgctgttctgtgatgaatctaaatcttttctcttgctaccaagctattgtcactgcagtgcattataccaaagagcgaagtcagtgccactgaaaatacagaacccattaatatcgtggctatctgattacatttatattccaagatgaaccttttttatatatgctaaaaattttggggaatatgttttgggatgtattatggagctaaaactctaacctcttaatagttttatagaacttaaaaattttttatacaattacccaattggtgatatgatcttaagcttttgtgtcagattatttaatatgatgacttcatgctttattatgccttattatggctgacgtattactgtggtgaaacaaaatatctttaaaagttaaaacatccagatatataagctattttttcctaaggataaagtacctttgagcatgagtgtatcacagctttcattaggaaaacttttcattacatacttgtttaaactctgtcttccagggtaaaaataataaggttgaatcattttattaaaaatactttttaagaaaataactatgaacatctgaatattaaagatataaaaatgcacataattcatatttcaggtggtatttgcattcagtgccttactggtattctcagaacattttaatgatttctaacatttcttaacagtcatagatatatacattttcattttttgtacttgaatattctaaataaaactgacatttactcttgacaaataaaacatatatttact

SEQ ID NO: 27498 - DNA, 1605 bp, Homo sapiens
  source 1..1605: mol_type = unassigned DNA
ccgcgaccatggcctcctccgaggtggcgcggcacctgctctttcagtctcacatggcaacgaaaacaacttgtatgtcttcacaaggatcagatgatgaacagataaaaagagaaaacattcgttcgttgactatgtctggccatgttggttttgagagtttgcctgatcagctggtgaacagatccattcagcaaggtttctgctttaatattctctgtgtgggggaaactggaattggaaaatcaacactgattgacacattgtttaatactaattttgaagactatgaatcctcacatttttgcccaaatgttaaacttaaagctcagacatatgaactccaggaaagtaatgttcaattgaaattgaccattgtgaatacagtgggatttggtgaccaaataaataaagaagagagctaccaaccaatagttgactacatagatgctcagtttgaggcctatctccaagaagaactgaagattaagcgttctctctttacctaccatgattctcgcatccatgtgtgtctctacttcatttcaccgacaggccactctctgaagacacttgatctcttaaccatgaagaaccttgacagcaaggtaaacattataccagtgattgccaaagcagatacggtttctaaaactgaattacagaagtttaagatcaagctcatgagtgaattggtcagcaatggcgtccagatataccagttcccaacggatgatgacactattgctaaggtcaacgctgcaatgaatggacagttgccgtttgctgttgtgggaagtatggatgaggtaaaagtcggaaacaagatggtcaaagctcgccagtacccttggggtgttgtacaagtggaaaatgaaaaccactgtgactttgtaaagctgcgggaaatgctcatttgtacaaatatggaggacctgcgagagcagacccataccaggcactatgagctttacaggcgctgcaaactggaggaaatgggctttacagatgtgggcccagaaaacaagccagtcagtgttcaagagacctatgaagccaaaagacatgagttccatggtgaacgtcagaggaaggaagaagaaatgaaacagatgtttgtgcagcgagtaaaggagaaagaagccatattgaaagaagctgagagagagctacaggccaaatttgagcaccttaagagacttcaccaagaagagagaatgaagcttgaagaaaagagaagacttttggaagaagaaataattgctttctctaaaaagaaagctacctccgagatatttcacagccagtcctttctggcaacaggcagcaacctgaggaaggacaaggaccgtaagaagtaagaggcccagccaccctccctggcagccctgcccacacttgtcacattgccctgtcggatcttcctagcgcttcttacttctgcttccttatgctttgtcttccttctccaactaaatgtcagctcctggagaggagagaccttgtccctcttgttcactgctgtttccccagcatccagaacagcacctggcacatgttatgtgttcagtatttgccaaaatgaatgaatgaacaaaataaaaa

SEQ ID NO: 27499 - DNA, 1782 bp, Homo sapiens
  source 1..1782: mol_type = unassigned DNA
gccctccggccttcccgccgccgtcgccgggaccagccgctcggggccgggctgatacagccgcttcaccgtgcccctgcccgcgaccatggcctcctccgaggtggcgcggcacctgtgacgtctctccagtgaccttagtttgagtcacttggactcagaatcatgaagtcagcttcttgcagcctcaccttttctgctgtccttgcatttacatctctttcagtctcacatggcaacgaaaacaacttgtatgtcttcacaaggatcagatgatgaacagataaaaagagaaaacattcgttcgttgactatgtctggccatgttggttttgagagtttgcctgatcagctggtgaacagatccattcagcaaggtttctgctttaatattctctgtgtgggggaaactggaattggaaaatcaacactgattgacacattgtttaatactaattttgaagactatgaatcctcacatttttgcccaaatgttaaacttaaagctcagacatatgaactccaggaaagtaatgttcaattgaaattgaccattgtgaatacagtgggatttggtgaccaaataaataaagaagagagctaccaaccaatagttgactacatagatgctcagtttgaggcctatctccaagaagaactgaagattaagcgttctctctttacctaccatgattctcgcatccatgtgtgtctctacttcatttcaccgacaggccactctctgaagacacttgatctcttaaccatgaagaaccttgacagcaaggtaaacattataccagtgattgccaaagcagatacggtttctaaaactgaattacagaagtttaagatcaagctcatgagtgaattggtcagcaatggcgtccagatataccagttcccaacggatgatgacactattgctaaggtcaacgctgcaatgaatggacagttgccgtttgctgttgtgggaagtatggatgaggtaaaagtcggaaacaagatggtcaaagctcgccagtacccttggggtgttgtacaagtggaaaatgaaaaccactgtgactttgtaaagctgcgggaaatgctcatttgtacaaatatggaggacctgcgagagcagacccataccaggcactatgagctttacaggcgctgcaaactggaggaaatgggctttacagatgtgggcccagaaaacaagccagtcagtgttcaagagacctatgaagccaaaagacatgagttccatggtgaacgtcagaggaaggaagaagaaatgaaacagatgtttgtgcagcgagtaaaggagaaagaagccatattgaaagaagctgagagagagctacaggccaaatttgagcaccttaagagacttcaccaagaagagagaatgaagcttgaagaaaagagaagacttttggaagaagaaataattgctttctctaaaaagaaagctacctccgagatatttcacagccagtcctttctggcaacaggcagcaacctgaggaaggacaaggaccgtaagaaggaaccaggctgtcgattcgaactcctgtgcattgatgtcagagcttgtgaaaccaatggtggacgtaaagacgcagagaaaggtagagagggccacagtgcaagggggcagccatgagtagcatgtggatgataatcgcaaggcgtgtaggtttgggctccaattttttgtaaaacagaagttccagagcacagaaggtcatcatcacaagcaaactttattaaaaaaaaactagaagtgtgctt

SEQ ID NO: 27500 - DNA, 1393 bp, Homo sapiens
  source 1..1393: mol_type = unassigned DNA
agtcctcaggcgtcgagggtagctcctgtgaggggctcgcttggcgcaggcaaaacgctcagcgcgcaccacagggcgtccgccccaaccccgcccccggaggcctccagctcggccccgcccctgtcccttccccgtcgcggaggcagcctagcctcgcgccccgcccgttgcttctgccctccggccttcccgccgccgtcgccgggaccagccgctcggggccgggctgatacagccgcttcaccgtgcccctgcccgcgaccatggcctcctccgaggtggcgcggcacctgctctttcagtctcacatggcaacgaaaacaacttgtatgtcttcacaaggatcagatgatgaacagatagtaaacattataccagtgattgccaaagcagatacggtttctaaaactgaattacagaagtttaagatcaagctcatgagtgaattggtcagcaatggcgtccagatataccagttcccaacggatgatgacactattgctaaggtcaacgctgcaatgaatggacagttgccgtttgctgttgtgggaagtatggatgaggtaaaagtcggaaacaagatggtcaaagctcgccagtacccttggggtgttgtacaagtggaaaatgaaaaccactgtgactttgtaaagctgcgggaaatgctcatttgtacaaatatggaggacctgcgagagcagacccataccaggcactatgagctttacaggcgctgcaaactggaggaaatgggctttacagatgtgggcccagaaaacaagccagtcagtgttcaagagacctatgaagccaaaagacatgagttccatggtgaacgtcagaggaaggaagaagaaatgaaacagatgtttgtgcagcgagtaaaggagaaagaagccatattgaaagaagctgagagagagctacaggccaaatttgagcaccttaagagacttcaccaagaagagagaatgaagcttgaagaaaagagaagacttttggaagaagaaataattgctttctctaaaaagaaagctacctccgagatatttcacagccagtcctttctggcaacaggcagcaacctgaggaaggacaaggaccgtaagaagtaagaggcccagccaccctccctggcagccctgcccacacttgtcacattgccctgtcggatcttcctagcgcttcttacttctgcttccttatgctttgtcttccttctccaactaaatgtcagctcctggagaggagagaccttgtccctcttgttcactgctgtttccccagcatccagaacagcacctggcacatgttatgtgttcagtatttgccaaaatgaatgaatgaacaaaataaaaatacatcacagtgtgaaaaggatcagttagct

SEQ ID NO: 27501 - DNA, 5593 bp, Homo sapiens
  source 1..5593: mol_type = unassigned DNA
cgggtggccatgttgctctaataaagcgggaggggcggcggcgtggggggagcagatgccgctggctgccagcgggacgccggcgagcagagcgcagccgcgagggaggcgcgagggaggcgagccggagcccgagcactagcagcagccggagtcggcgtaaagcacccgggcgcagccggagccggtgccgcagctgcgatggccgtggccgtggggagaccgtctaatgaagagcttcgaaacttgtctttgtctggccatgtgggatttgacagcctccctgaccagctggtcaacaagtctacttctcaaggattctgtttcaacatcctttgtgttggtgagacaggcattggcaaatccacgttaatggacactttgttcaacaccaaatttgaaagtgacccagctactcacaatgaaccaggtgttcggttaaaagccagaagttatgagcttcaggaaagcaatgtacggctgaagttaaccattgttgacaccgtgggatttggagaccagataaataaagatgacagctataagccgatagtagaatatattgatgcccagttcgaggcctacctgcaagaggaattgaagattaaacgttctctcttcaactaccatgacacgaggatccatgcctgcctctactttattgcccctactggacattcactaaagtccctggatctggtcaccatgaaaaagctggacagtaaggtgaacatcattccaataattgcaaaagctgacaccattgccaagaatgaactgcacaaattcaagagtaagatcatgagtgaactggtcagcaatggggtccagatatatcagtttcccactgatgaagaaacggtggcagagattaacgcaacaatgagtgtccatctcccatttgcagtggttggcagcaccgaagaggtgaagattggcaacaagatggcaaaggccaggcagtacccctggggtgtggtgcaggttgagaatgaaaatcattgcgattttgtgaaacttcgagagatgctgatccgcgtgaacatggaggacttgcgagagcagactcacacccgccactatgaattgtaccgacgctgtaagcttgaagagatggggttcaaggacactgaccctgacagcaaacccttcagtcttcaggagacatatgaagcaaaaaggaatgaattcctgggagaactgcagaagaaagaagaagaaatgagacaaatgtttgttatgagagtgaaggagaaagaagctgaacttaaggaggcagagaaagagcttcacgagaagtttgaccttctaaagcggacacaccaagaagaaaagaagaaagtggaagacaagaagaaggagcttgaggaggaggtgaacaacttccagaagaagaaagcagcggctcagttactacagtcccaggcccagcaatctggggcccagcaaaccaagaaagacaaggataagaaaaatgcaagcttcacataaagcctggcaagccaaggatgttcccgcattcacctgcttttgcagtaatatcgtatctctgccatgtgtgttctttagttttattttattttattttatttttttacccttcctcaaacaccagtaactattattaactcgttttgctgaatgttgttgggtggtagaaaatgatagaacaagggaataaccgcgaatgctctgtgcagctggactctgtttccggaaagtaaatgatttgctttttatgcctgttctgaatggcagcacgaagcaggcctgttacttgtatgtcgctttggacagaggaaagtggggtaaaatgctacctgtacgtctgacatgaaaacttctcaccgcctcagcagctgaactaaaaacctgaatagccatgacaagagtttgcattttcttgatgattcatctccatgagtgcacaatccctgaactcactgtcttttctccacacttgtcctaagccaaggtagatttgtacgtagacagactggtgagcaagcattatattttatttttacccttgcatgacattttcattttaatcaataacattatttggcctgagcttgtgggtctgttcagactgtctcctctcatggtttgaaactgcatctgaatgcctgccttcaatcctggccaagttggagtagactggtatgagaaaactatgattagttcacatttactggtgcatccttgatcctctcacagatagaggtcttaaaggttggatcatgtaacattgcttagtagaagaatcttcttctaaggatgatgggctttctacagcctgcttaccactaacagtaaggaatctttcataaacacacctcagtttgttcccagtgggcttagagggaggacctgatgactgattccaggatacttgtacttctaataacatttttcatgaatcatgagaaaatttccacagatacttcccttagaaaatttgctataaactctgtatcattggtagcacaaatttgagcgaggccttgtcaattttaaggtggaaataggaaggaccacaacatgacccgtaagtcaagaaggtagacatttcatatccagcttccttgcttagtctcctttcagtatttggcaataaaagaaagaagaaatagaacagctgaagtctcaaatcattgtctggaattttcctcaccttggctagctccacctgctctttgtctaaggcccttgcctcatcagggattagaactggcccatatgccagaacctgtactaaatgcctaatttgtatggaagagtgcatatttaatctcttttctatactgctcctttctgatgcttatcctttcatctgtgtgattgttttttcccctctactaacaagatcctcccagctttctctctacatgtagaaaggataacatttctcatgaacccactgcccctctgcattttcctcactggttagagattaagtaaataggatagaatatgctgcgtctcccctgacacacactttcttttttgaatgagcaagtctccattttgatttcagcaaagattttttctccttttctttgtcctcaaccatacttagaggaaagaaggaatggtcttccatgaactgattatgcttaattaagcaaagtaaggaaattagtttcatggaagcctaaacaaagctggaatagaaactacacactagacacagcagtagtcatagtcttcacaggtttaggagctactggaccaacattcttgtttttgcttttgtttttttaaataattctagtctggagctaactgtggagcagccaaatagtagctggcatgttgattcaaaccatgggctgaatttgctcataggctgtgcatcagacaaaagcttgaatatttgtgttgtatgcttgttccaaccaccgcttgtgtgagcatttttgtggcttgtacagaaagtacacttttaaattgtctcttgcatcactaaaatttttttaaaatgagcataacaacgaaaggcatccagctgactttttgattccaagattattgattggattgacttttttgcattaaatttttcccagcaaaataaatcatatggcgagtcagggaataaaaagtcaaaagaaacaaatagaagcttttttttttaaaaaatgtattgcttctgaacttttttctgccactgctccctagccctgtttagtttgttattgctgcttttcttttttctttctgtatctatgcctttttttcacagtagtccttggctctgcacggaataaatgataccctcaaatctaattggatgtgctttcgcctttgcatgtaagtacggtagtaagaaacctttgagatctttctgacttttcaaaattagagaaagcaaatgggatggatagattttttttttcttttcaaggggggcaggaaggtaatggtttgagtagcctttgtttaaaaaaaagactaaatatatttaaaaggccacatttatatttttttcacaagaaccacataataaattccacttcttgacctgaatttggaaatccgaaattactaatccaggccaggtgtggtggctcatgcctgtaatcccagcactttgagaggccgaggtgggcagatcacttgaggcctggagttcaagaccaccttggcgaacacggtgaaaccccgtctctacaaaaaatacaaaaattagccaggcgtggtggcacgtgcctgtagtcccagctacttgggaggctaagtcaggagaattgcttgaacttgggagatggaggttgcagtgagccaagattgcaccactgcattccaacctgggtgatgaagtgagactctccaaaaaaaaaaaagaaattattaatccctgcctgtgctctacatagcctcatgggcatcattggatagctcagagggcccttgattctggcaaggcaaataaagccagaatgagaaattaccatcttctactagagaaaaccaagagaaaaatttttatgctaggatgcctttatgaccacttaattttttaatcttagtttaatggtctctccctggtgctaactgctgacagtggccacctcttttttggggattgaggggcctacataactagctggccttaccccatatcttttgttcaaacataataccatctttttgcttcttctgaactttagatctccataacacatgtactgtagaatgtgatggaaaagcattgatgagaatttattggcagttcagattgtgttttcccaacttaggctctttattaattggttaaggttttctccaaaaagggcatttcaacaatgggaattatttaatgtaacagtgggcacagattacttatcttccttctctgctttgtgactcaccagcagtaacacacacaatccacatcttgtgcacctcaaatgaacagacttggtttccttgctttcttgacatttccatgactgtttcacatacaaactattgggtgaggtttttcagctgttaccgacccacgtcctgctgtctctgtgtggtcctacaaaaactgtccattcccacccctttgctttgccatttgcaagagtctggaattgtcaggtctcagcttcgaaaagtcctggttccactgacaggacacattctttagtgggaattaagacctacaaagtctagtttgtatgtaggtatgaagggaattttttaaataaattgaaaagctgtgaacagcattagaactttgtctatttcttaattttaaaatatgctgatatgccttaaactgtagttgtagatccttgtcattttgctgtttgaaaataaccaatgtgttttctaaaactgtcgtgtaatctactttcattgttaatgcagaattgtcatatatgtaagctgcatgttagacatttgtcttttttaaactaaagtaattgtattgatgtgaagcatatcattttttcaaatatgaaagtgatcacttagcaacatgcttggtaatttggcatctgttaaggtaggagagtggtgaacagataatctatgcatatatcactagtgccaagacataaagcgggggaaaatatatttttacccaaacatt

SEQ ID NO: 27502 - DNA, 2615 bp, Homo sapiens
  source 1..2615: mol_type = unassigned DNA
ggagcagatgccgctggctgccagcgggacgccggcgagcagagcgcagccgcgagggaggcgcgagggaggcgagccggagcccgagcactagcagcagccggagtcggcgtaaagcacccgggcgcagccggagccggtgccgcagctgcgatggccgtggccgtggggagaccgtctaatgaagagcttcgaaacttgtctttgtctggccatgtgggatttgacagcctccctgaccagctggtcaacaagtctacttctcaaggattctgtttcaacatcctttgtgttggtgagacaggcattggcaaatccacgttaatggacactttgttcaacaccaaatttgaaagtgacccagctactcacaatgaaccaggtgttcggttaaaagccagaagttatgagcttcaggaaagcaatgtacggctgaagttaaccattgttgacaccgtgggatttggagaccagataaataaagatgacagctataagccgatagtagaatatattgatgcccagttcgaggcctacctgcaagaggaattgaagattaaacgttctctcttcaactaccatgacacgaggatccatgcctgcctctactttattgcccctactggacattcactaaagtccctggatctggtcaccatgaaaaagctggacagtaaggtgaacatcattccaataattgcaaaagctgacaccattgccaagaatgaactgcacaaattcaagagtaagatcatgagtgaactggtcagcaatggggtccagatatatcagtttcccactgatgaagaaacggtggcagagattaacgcaacaatgagtgtccatctcccatttgcagtggttggcagcaccgaagaggtgaagattggcaacaagatggcaaaggccaggcagtacccctggggtgtggtgcaggttgagaatgaaaatcattgcgattttgtgaaacttcgagagatgctgatccgcgtgaacatggaggacttgcgagagcagactcacacccgccactatgaattgtaccgacgctgtaagcttgaagagatggggttcaaggacactgaccctgacagcaaacccttcagtcttcaggagacatatgaagcaaaaaggaatgaattcctgggagaactgcagaagaaagaagaagaaatgagacaaatgtttgttatgagagtgaaggagaaagaagctgaacttaaggaggcagagaaagagcttcacgagaagtttgaccttctaaagcggacacaccaagaagaaaagaagaaagtggaagacaagaagaaggagcttgaggaggaggtgaacaacttccagaagaagaaagcagcggctcagttactacagtcccaggcccagcaatctggggcccagcaaaccaagaaagacaaggataagaaaaagtaagcaggtgtcacccccctgtatcggggacctctaacaatttattcctcttgcatgtctctacttttcccatttacagactggaaactggtcctttaccagaaagataaaagcaagtattttctctacagtgcagggaagatgatgaaggtttttaaatttttttaaaaggtacacaaagattaatttataaaactttaccacaattgaccaagcaatcaggcctggaggaacctgttgtctccagtagcatcttccacaccaacactaggagtctcaaagaagacaggttgatgtctcttcagcaccctctgaagacaattctcatgactcttgatagagagcatcctaaaatcacaattgttaaaattattttcctattctgtgttgtaagacttcgtaagccagtcactgaaattctcgttcccaaaatgaaacatttggaagagctgctagtggccactagtttcctcaaaattcaatatgatgaattgttttattgtgaaatgggatccaaatgcctatccagttgacacctctgccaacctcaagccaaacctaaacccattcataaaaggttttttttaaatagggtcttaatgtcatgtgccaaagggtcagattctgctcttgagttggtcacttcctgtgatactccagtagcagctgcctgaaaccagtgggagatttaggcctcccttgacattctcctgtgatttgaagctctcctttgaatcatcataaagcctagttttatgtcaatgctatcggttttgacaggaagcacgatggtaagaataccactaacgaaaacctttgtggtgtctcaatgacaaatatgcagatgccaccctcctttgtctaatgtacggtgctttagggcagctatttaatataaagcaactcagaacttgtttcaggaagtgttgctctttcgccttacatgccaaggttctagggaaaaagctgaccatatgtaaaaacattgatgctcaagcacataaagaattacattctttaaacatagagtacataggatcaagtctctgcacaataattgagatgtgttatagggaaaagtgagcacagtgctattgtccacttagtcttggtgaatgtgcagtaggctcacccctaaggaatctcatgttgcctgcagtaaaaataaaaatggactgctacaatga

SEQ ID NO: 27503 - DNA, 5422 bp, Homo sapiens
  source 1..5422: mol_type = unassigned DNA
atggaggagaggaaaccagctcatgtgctgagaagttttaaatatgctgcatttatgaatgaagagcttcgaaacttgtctttgtctggccatgtgggatttgacagcctccctgaccagctggtcaacaagtctacttctcaaggattctgtttcaacatcctttgtgttggtgagacaggcattggcaaatccacgttaatggacactttgttcaacaccaaatttgaaagtgacccagctactcacaatgaaccaggtgttcggttaaaagccagaagttatgagcttcaggaaagcaatgtacggctgaagttaaccattgttgacaccgtgggatttggagaccagataaataaagatgacagctataagccgatagtagaatatattgatgcccagttcgaggcctacctgcaagaggaattgaagattaaacgttctctcttcaactaccatgacacgaggatccatgcctgcctctactttattgcccctactggacattcactaaagtccctggatctggtcaccatgaaaaagctggacagtaaggtgaacatcattccaataattgcaaaagctgacaccattgccaagaatgaactgcacaaattcaagagtaagatcatgagtgaactggtcagcaatggggtccagatatatcagtttcccactgatgaagaaacggtggcagagattaacgcaacaatgagtgtccatctcccatttgcagtggttggcagcaccgaagaggtgaagattggcaacaagatggcaaaggccaggcagtacccctggggtgtggtgcaggttgagaatgaaaatcattgcgattttgtgaaacttcgagagatgctgatccgcgtgaacatggaggacttgcgagagcagactcacacccgccactatgaattgtaccgacgctgtaagcttgaagagatggggttcaaggacactgaccctgacagcaaacccttcagtcttcaggagacatatgaagcaaaaaggaatgaattcctgggagaactgcagaagaaagaagaagaaatgagacaaatgtttgttatgagagtgaaggagaaagaagctgaacttaaggaggcagagaaagagcttcacgagaagtttgaccttctaaagcggacacaccaagaagaaaagaagaaagtggaagacaagaagaaggagcttgaggaggaggtgaacaacttccagaagaagaaagcagcggctcagttactacagtcccaggcccagcaatctggggcccagcaaaccaagaaagacaaggataagaaaaatgcaagcttcacataaagcctggcaagccaaggatgttcccgcattcacctgcttttgcagtaatatcgtatctctgccatgtgtgttctttagttttattttattttattttatttttttacccttcctcaaacaccagtaactattattaactcgttttgctgaatgttgttgggtggtagaaaatgatagaacaagggaataaccgcgaatgctctgtgcagctggactctgtttccggaaagtaaatgatttgctttttatgcctgttctgaatggcagcacgaagcaggcctgttacttgtatgtcgctttggacagaggaaagtggggtaaaatgctacctgtacgtctgacatgaaaacttctcaccgcctcagcagctgaactaaaaacctgaatagccatgacaagagtttgcattttcttgatgattcatctccatgagtgcacaatccctgaactcactgtcttttctccacacttgtcctaagccaaggtagatttgtacgtagacagactggtgagcaagcattatattttatttttacccttgcatgacattttcattttaatcaataacattatttggcctgagcttgtgggtctgttcagactgtctcctctcatggtttgaaactgcatctgaatgcctgccttcaatcctggccaagttggagtagactggtatgagaaaactatgattagttcacatttactggtgcatccttgatcctctcacagatagaggtcttaaaggttggatcatgtaacattgcttagtagaagaatcttcttctaaggatgatgggctttctacagcctgcttaccactaacagtaaggaatctttcataaacacacctcagtttgttcccagtgggcttagagggaggacctgatgactgattccaggatacttgtacttctaataacatttttcatgaatcatgagaaaatttccacagatacttcccttagaaaatttgctataaactctgtatcattggtagcacaaatttgagcgaggccttgtcaattttaaggtggaaataggaaggaccacaacatgacccgtaagtcaagaaggtagacatttcatatccagcttccttgcttagtctcctttcagtatttggcaataaaagaaagaagaaatagaacagctgaagtctcaaatcattgtctggaattttcctcaccttggctagctccacctgctctttgtctaaggcccttgcctcatcagggattagaactggcccatatgccagaacctgtactaaatgcctaatttgtatggaagagtgcatatttaatctcttttctatactgctcctttctgatgcttatcctttcatctgtgtgattgttttttcccctctactaacaagatcctcccagctttctctctacatgtagaaaggataacatttctcatgaacccactgcccctctgcattttcctcactggttagagattaagtaaataggatagaatatgctgcgtctcccctgacacacactttcttttttgaatgagcaagtctccattttgatttcagcaaagattttttctccttttctttgtcctcaaccatacttagaggaaagaaggaatggtcttccatgaactgattatgcttaattaagcaaagtaaggaaattagtttcatggaagcctaaacaaagctggaatagaaactacacactagacacagcagtagtcatagtcttcacaggtttaggagctactggaccaacattcttgtttttgcttttgtttttttaaataattctagtctggagctaactgtggagcagccaaatagtagctggcatgttgattcaaaccatgggctgaatttgctcataggctgtgcatcagacaaaagcttgaatatttgtgttgtatgcttgttccaaccaccgcttgtgtgagcatttttgtggcttgtacagaaagtacacttttaaattgtctcttgcatcactaaaatttttttaaaatgagcataacaacgaaaggcatccagctgactttttgattccaagattattgattggattgacttttttgcattaaatttttcccagcaaaataaatcatatggcgagtcagggaataaaaagtcaaaagaaacaaatagaagcttttttttttaaaaaatgtattgcttctgaacttttttctgccactgctccctagccctgtttagtttgttattgctgcttttcttttttctttctgtatctatgcctttttttcacagtagtccttggctctgcacggaataaatgataccctcaaatctaattggatgtgctttcgcctttgcatgtaagtacggtagtaagaaacctttgagatctttctgacttttcaaaattagagaaagcaaatgggatggatagattttttttttcttttcaaggggggcaggaaggtaatggtttgagtagcctttgtttaaaaaaaagactaaatatatttaaaaggccacatttatatttttttcacaagaaccacataataaattccacttcttgacctgaatttggaaatccgaaattactaatccaggccaggtgtggtggctcatgcctgtaatcccagcactttgagaggccgaggtgggcagatcacttgaggcctggagttcaagaccaccttggcgaacacggtgaaaccccgtctctacaaaaaatacaaaaattagccaggcgtggtggcacgtgcctgtagtcccagctacttgggaggctaagtcaggagaattgcttgaacttgggagatggaggttgcagtgagccaagattgcaccactgcattccaacctgggtgatgaagtgagactctccaaaaaaaaaaaagaaattattaatccctgcctgtgctctacatagcctcatgggcatcattggatagctcagagggcccttgattctggcaaggcaaataaagccagaatgagaaattaccatcttctactagagaaaaccaagagaaaaatttttatgctaggatgcctttatgaccacttaattttttaatcttagtttaatggtctctccctggtgctaactgctgacagtggccacctcttttttggggattgaggggcctacataactagctggccttaccccatatcttttgttcaaacataataccatctttttgcttcttctgaactttagatctccataacacatgtactgtagaatgtgatggaaaagcattgatgagaatttattggcagttcagattgtgttttcccaacttaggctctttattaattggttaaggttttctccaaaaagggcatttcaacaatgggaattatttaatgtaacagtgggcacagattacttatcttccttctctgctttgtgactcaccagcagtaacacacacaatccacatcttgtgcacctcaaatgaacagacttggtttccttgctttcttgacatttccatgactgtttcacatacaaactattgggtgaggtttttcagctgttaccgacccacgtcctgctgtctctgtgtggtcctacaaaaactgtccattcccacccctttgctttgccatttgcaagagtctggaattgtcaggtctcagcttcgaaaagtcctggttccactgacaggacacattctttagtgggaattaagacctacaaagtctagtttgtatgtaggtatgaagggaattttttaaataaattgaaaagctgtgaacagcattagaactttgtctatttcttaattttaaaatatgctgatatgccttaaactgtagttgtagatccttgtcattttgctgtttgaaaataaccaatgtgttttctaaaactgtcgtgtaatctactttcattgttaatgcagaattgtcatatatgtaagctgcatgttagacatttgtcttttttaaactaaagtaattgtattgatgtgaagcatatcattttttcaaatatgaaagtgatcacttagcaacatgcttggtaatttggcatctgttaaggtaggagagtggtgaacagataatctatgcatatatcactagtgccaagacataaagcgggggaaaatatatttttacccaaacatt

SEQ ID NO: 27504 - DNA, 1294 bp, Homo sapiens
  source 1..1294: mol_type = unassigned DNA
ccatcacacacaccaggccctgccaggacaaggcagctcctggaagctccaccaggacccacgtccaccaggcatctcgaacccttggcccccatggaccccctgaggcgctccccctctccctgcctgtcctcgcagccctccagccccagcaccccaccctgcgagatgcttggtcctgtgggcattgaggctgtgctggaccagctgaagatcaaggctatgaagatggggtttgagttcaacatcatggtggtggggcaaagcgggctgggcaagtccacgatggtgaacacgctgttcaagtccaaagtgtggaagtcaaacccaccgggcttgggggtgcccacaccccagacgctgcagctgcattcactgacccatgtcatagaggagaagggtgtgaagctgaagctgacggtgacggacacgcccggcttcggggaccagatcaacaatgacaactgctgggaccccatcctgggctacatcaacgagcaatacgagcagtacctgcaggaggagatcctcatcacccgccagcgccacatcccagacacccgggtgcactgctgcgtgtactttgtaccacccactgggcactgcctgcggcccctggacattgagttcctgcagcggctgtgccggactgtgaatgtggtgcccgtgattgccagggccgacagcctgaccatggaggagcgagaggccttcaggcgcaggatccagcagaacctgaggacccactgcatcgacgtctacccccagatgtgctttgacgaggacatcaatgacaaaatcctcaacagcaagttacgggaccgaatcccttttgccgtggtaggggctgaccaagagcacctggtgaacgggaggtgtgtcctgggccggaagaccaagtggggcatcattgaagtggagaacatggcgcactgtgaatttcctctcctgagagacctgcttatccgctcccacctccaagacctgaaggacataacccacaacatccactatgagaactaccgcgtcatcagactcaatgaaagccacctgctgccccgcgggcccggctgggtgaacctggccccggcctccccaggacagctgaccaccccccggaccttcaaggtctgcaggggggcccatgacgattctgatgatgagttctgaccaccggcggatcccggggctgctgggcttcctgagtccccagcggctctcaacacacacctatgtaccagagcatctattaaatgtgagccttgctttttatgaaaagctgtgctttgaaaac

SEQ ID NO: 27505 - DNA, 1386 bp, Homo sapiens
  source 1..1386: mol_type = unassigned DNA
cttgggcccctggttctacttggggattattgtattattaggctggggtcattgtggggattagaagggtaacagctcctgctcctgctgcagagaagcctccaggtgggggtcacagcaagtgcagatggagctcagattcttcggttaactgtcaccctctcccctcccccatcacacacaccaggccctgccaggacaaggcagctcctggaagctccaccaggacccacgtccaccaggcatctcgaacccttggcccccatggaccccctgaggcgctccccctctccctgcctgtcctcgcagccctccagccccagcaccccaccctgcgagatgcttggtcctgtgggcattgaggctgtgctggaccagctgaagatcaaggctatgaagatggggtttgagttcaacatcatggtggtggggcaaagcgggctgggcaagtccacgatggtgaacacgctgttcaagtccaaagtgtggaagtcaaacccaccgggcttgggggtgcccacaccccagacgctgcagctgcattcactgacccatgtcatagaggagaagggtgtgaagctgaagctgacggtgacggacacgcccggcttcggggaccagatcaacaatgacaactgcctgcggcccctggacattgagttcctgcagcggctgtgccggactgtgaatgtggtgcccgtgattgccagggccgacagcctgaccatggaggagcgagaggccttcaggcgcaggatccagcagaacctgaggacccactgcatcgacgtctacccccagatgtgctttgacgaggacatcaatgacaaaatcctcaacagcaagttacgggaccgaatcccttttgccgtggtaggggctgaccaagagcacctggtgaacgggaggtgtgtcctgggccggaagaccaagtggggcatcattgaagtggagaacatggcgcactgtgaatttcctctcctgagagacctgcttatccgctcccacctccaagacctgaaggacataacccacaacatccactatgagaactaccgcgtcatcagactcaatgaaagccacctgctgccccgcgggcccggctgggtgaacctggccccggcctccccaggacagctgaccaccccccggaccttcaaggtctgcaggggggcccatgacgattctgatgatgagttctgaccaccggcggatcccggggctgctgggcttcctgagtccccagcggctctcaacacacacctatgtaccagagcatctattaaatgtgagccttgctttttatgaaaagctgtgctttgaaaacaaaaggcattttgtaaatgacttctttgagctatccacaaataaaaaggctgggtgtca

SEQ ID NO: 27506 - DNA, 3785 bp, Homo sapiens
  source 1..3785: mol_type = unassigned DNA
acagtgaatatttatttggtccacaactggggacagtagaaaggacaccagcttggaatcagttcggacctgtgtctgctgcacagctgaatccctgggaaactcttttagtgtagcatggcagaaagaacaatggctatgcccacacaaatacctgctgatggagatacacaaaaagaaaataatattcgttgtttaactacgattggacattttggttttgaatgtttgcccaatcagttggtgagcagatctatccgacaaggattcacttttaatattctctgtgtgggggagactggaattggaaaatcgacactgatagacacattgtttaatactaacttgaaagataacaaatcctcacatttttactcaaatgttggacttcaaattcagacatatgaacttcaggaaagcaatgttcagttgaaattgactgttgtggagacagtagggtatggtgatcaaatagacaaagaagccagctaccaaccaatagttgactacatagatgcccaatttgaggcctatcttcaagaagaactgaagattaaacgttccttgtttgagtaccatgattctcgcgtccacgtgtgtctttacttcatttcacctacaggacattccctgaagtctcttgatctattaacaatgaagaaccttgacagtaaggtgaatattataccactgattgccaaagcagacactatttctaaaaatgatttacagacgtttaagaataagataatgagtgaattgattagcaatggcatccagatatatcagctcccaacagatgaagaaactgctgctcaagcgaactcctcagttagtgggctgttaccctttgctgtggtagggagtacagatgaagtgaaagttggaaaaaggatggtcagaggccgtcactacccttggggagttttgcaagtggaaaatgaaaatcactgtgacttcgttaagctccgagatatgcttctttgtaccaatatggaaaatctaaaagaaaaaacccacactcagcactatgaatgttataggtaccaaaaactgcagaaaatgggctttacagatgtgggtccaaacaaccagccagttagttttcaagaaatctttgaagccaaaagacaagagttctatgatcaatgtcagagggaagaagaagagttgaaacagagatttatgcagcgagtcaaggagaaagaagcaacatttaaagaagctgaaaaagagctgcaggacaagttcgagcatcttaaaatgattcaacaggaggagataaggaagctcgaggaagagaaaaaacaactggaaggagaaatcatagatttttataaaatgaaagctgcctccgaagcactgcagactcagctgagcaccgatacaaagaaagacaaacatcgtaagaaataatagtttctcttactattctgagagccctatcattctacatcgcaacttcctgtgagattgtctttgtagcatttaactctgaagttctcattttaaaaattggcttgcttattgtatattttccccaactaaagtgtgaactcctagcggggtgtggtggctcatgcctgtaatcccagcactttgggaggctgaggcgggtggaccacctgaggtcaggagttcaaaaccagcctgaccaaaatgatgaaaccctgcctctactaaaaatacaaaaattagctgggtttggtggccggtacctgtaatcccagccacttgggaggctgaggcaggagaatcacttgaaccccggaggtggaggttgcagtgagccaagatctcaccattgtactccagcctgggtgacaagagcaaaactccgcctcaaaaaaaaaaaaaaaaaaaaaagtatgaactcccagaaggcagatcctgtgtccctcttttcagattctgtatcttggcacttaggacgtacactaacacaaatatgactttcaatcaatatttgccaaaatgaaaaaacaaaagaaacacgtagcatcatgtaaaaggagctggttaggtggagaaatttatttaccatagtcctgcttttggatccagtagtgacttttaacttttatatccaaatagaagctggaggctttgttggggactcataggcataaaatgttaagttatacaaatctaattaataggcctattttcctttttaagttctactactgataatttcttgacagtttttatgataaaaggttggaatttgataagaactcccatgcttttgtgtcagacttaaaactgatattagaataaagaattcaaaagctagagaaagagttgcatttgaatgataatattatgtgttacagatttggggtatatgccaaagttatcaaagttgtagaaaataaggccaggtgtggtggctcacacctgtaatcccagcactttgggaggccgaggtgggcggatcacttgcggtcaggagcttgagaacagcccggccaacatgacgaaaccccatctctactaataatacaaaagttagccgggtgtggtgttgtgcacctgtagtccctgctactcggaaagctgaggcaggagaatcgcttgtagccaggaggcagaggttgtagtgagcagagattgcgccactgcactccagcctgggtgacagagcgctgagtcaccacacctggtataagccactgtgcctgacccacaatgacttttatacatattgttaaatcatcttacagattttataatttgggggaagaaaaattttactaaatgatcttttaatggaaactctacaagaaccagaatctttgctttgttcacttatgtatccattcctaggcctagaaaaatgtctgacgcatagcagcaattattcattgaataaatggacccagcaatagtacattagctatgccatatgcatacattaaaaatgtagattattgactttcaaaagataattaatgtaacttcttactgcttctgaacatgtttgtgagttatattgctgagggacctttatcttctcattctttcatcttaatccaatgttattaaaactgaaactgaaatcaccaatattattccatatttaaaaataacatctaccttataaaaattatcattgtgctgcatttgagaatagactttttaggtaataatggtataatccatagggtttttgagggcacagaaggattcatgctaacagaacattttattttctattttccaagagctataaaacatgatattatatgatactataaggcatatttttattttccataattttttctaaaaaaaattagtgttggttttccatataacttttaactttataagtaaatatttgtctctttcagctccagtttcatgtgaaatagagtttccagatttatgtagcatggaaagttttaatacgtcagttactgatttttgccagtcattttctcaattatttacttcttttatctttagttgattttttttgtagtgacaagttttgtttctattctcatttccttttgtgtatattctatgtagatttcgtttttggttactatgaaaattacatataacatcctggagttataacattctgatttgaatttatttcaacttaacttcaatcacataccaaaattctactgctatataggtctactctttttaggttattgatgtaacaaattgtatctttattcattgtacaccacctaacagatttataattacattttatgcatttgtcttttaaatcctgtagaaaataaaaagcggagttacaaacc

SEQ ID NO: 27507 - DNA, 3613 bp, Homo sapiens
  source 1..3613: mol_type = unassigned DNA
gatcatcgagacggcggcggtggtgggctagacgagtttcgcgcggccgctcgccgtcccccgcccagtcgtactcggcgccccagctcggtgctgccgccatcttcttggaggacaggaggagaggcgaaggctccccctccccgtgatcgctccgcactcccgccaccacctgccctcccgcgaccgcctctctcctcctcagtgggcacttgtctccttctaacaaacggccttccccccactccagttacccaccgcaaggcgaagattctcattacctgttccactcttataagcataagaaaaccgagctcataagcatacagaaactgctgtaaaagaagaagttgtgggtatttttttttttttttttgtctggaggaatggggacaccaaaactcatttggcagcagaggtgagacgaagcttcacaaaagatgtctaagcaacagccaactcagtttataaatccagaaacacctggctatgttggatttgcaaacctccccaatcaagttcaccgaaaatcagtgaaaaaaggttttgagttcacactgatggtggtcggtgaatcaggtctaggaaaatcgactctcataaacagcctattcctaactgatctgtacccagaaagagtcatacctggagcagcagaaaaaattgaaagaactgtccagattgaggcttcaactgttgaaattgaagagcgaggggtcaagctacgcctgacagtggtagatacccctggctatggtgacgctatcaactgcagagattgttttaagacaattatctcctatattgatgagcaatttgagaggtacctgcatgacgagagcggcttgaacaggcggcacatcattgataatagggtgcattgttgcttttactttatttcaccttttggacatggacttaagcccttagatgtggcgtttatgaaggcaatacacaacaaggtgaatattgtgcctgtcattgcaaaagctgacactctcaccctgaaggaacgggagcggctgaagaaaaggattctggatgaaattgaagaacataacatcaaaatctatcacttacctgatgcagaatcagatgaagatgaagattttaaagagcagactagacttctcaaggctagcatcccattctctgtggttggatccaatcagttgattgaagccaaaggaaagaaggtcagaggccgcctctacccctggggtgttgtggaagtggagaacccagagcacaatgactttctgaagctgagaaccatgctcatcacccacatgcaggatctccaggaggtgacccaggaccttcattatgaaaacttccgttctgagagactcaagagaggcggcaggaaagtggagaatgaggacatgaataaagaccagatcttgctggaaaaagaagctgagctccgccgcatgcaagagatgattgcaaggatgcaggcgcagatgcagatgcagatgcagggcggggatggcgatggcggggctctcgggcaccacgtgtaaggtgatgtgcacatatcaagaagtcagagaaaacactttcctggataaaaaagaaaacattccagatgcatgatccagctgtgtgttttcaatccttgggagggtgccatccacattttaacagtacctgtgcctgagaatttaatttttaaaagactttgatgtgtttttgtatgaagtacttttaacgtatgtatttcattgctgtgtcacactctgtgttttgtgaggtgaatgtcttccttttctttctccctaaccactaatgttagaattgatttccaagaatcggcatgtatacttaatactgaatttctttgatttaactgacttaacaactgactaaccattgatgagcactcctgatttttatctagaacattcagatttaccataatgttccttagtggtagaggtgtgtgcctagtgatgtagaaagatacactgacttggtgcaaggccatctgcttaccacatcacaccacttggagatctttgcttccttgcttttatgtttgtacacaacacctaaaaccagttttgctgctataattctatactgttgattcgtctgcgattttatctgttaaccaaataaaacataatagaatttcctaatgagatatatctttatacttaaacagcttttttagaggtgagttttaaagaagtctcttaattctgatgctaggttgtttttaaaaccactatgcaaagaactcaccacaagccaccttttgtagtgttctccactaatactggttatcctgtgctacagagaaaatcaaagcagtcataagctccagttttcgtattgcaaataagactcttacctacaaaatgagattcagtgaactaatttggtttttactcaaccaaattaaaaatttttttaaggaaaattagcagttggtctattcagaatcaaacctttttatattttatactgcactttagtgtattttctgtcactgtaggtatagaagatctgcctcccctgtggaaattggggtctgttggtgggcgtgcccctgaagcctggcttgggttgaaaagtgttcccgccctaaggccttggtgccctgaacctctgatgcctaccgggttctcctgatttgagtttcctttaaatactccctttttgagtaattttctgatgggaggaaagtagcagtcatcatctttttgtgtgcaggctgtctcatttatttttagccattgtcgtttcattcattttgtgtaatataaaccgtgtgtcatgtcaaagtgaaagacatttcaaatctgtagcataggctagtgggcaggtccgcacagtcgaagccacacctggtctgttttctgtgcactgtagccttagtgtcacctttcttcttgtgtctccttatggtacactccagcggttgccttttttatcatttctactgaagttgggaaattcaaccccagaaattgacagatgaaaggagacaatggttgtgtagggagatggagaaaatgcttaatctgaggatgagacagggttttttcatttttgtgggggctagaaaaaacataaaatgaggcagttaaataataatagttaatgaaggtgtgctacagaaaataatctggtgttcttgctaactttgcccttcactgttgcttaattgtgaacagccaaaagctatatgttatggcttattgtgtgaaggtaactaagaagtggtgttccatgacttcagagtacatccatgcggagtccattatttgagtttgacatttaataactttgctggaaaatctgtaaaaaagaaaaacaagtttgctagtgactaagccccgcatatgtgagtgaaagtacttcaggcacgctgcctcctggtaacagctatgcagggagggaggacccacactgctacacttctgatcccctttggttttactacccaaatctaaatagatacttttgataatagataactgctcttttactaagacatagtctctacctatagaaatgtattttgaaaacacttattttacacagcaattttgtatccatttaaactaaccttttatcaataaagcactattgtttagatatt

SEQ ID NO: 27508 - DNA, 3315 bp, Homo sapiens
  source 1..3315: mol_type = unassigned DNA
gacgcaatccgcctgcgcgctgggcggggcggggcgggctggggcgggctgtgagcggaccgcgagcgctgggcgggtccgcggcgcggtcggtcggcgcctgttctcgggctgtttggcggacgaagcttcacaaaagatgtctaagcaacagccaactcagtttataaatccagaaacacctggctatgttggatttgcaaacctccccaatcaagttcaccgaaaatcagtgaaaaaaggttttgagttcacactgatggtggtcggtgaatcaggtctaggaaaatcgactctcataaacagcctattcctaactgatctgtacccagaaagagtcatacctggagcagcagaaaaaattgaaagaactgtccagattgaggcttcaactgttgaaattgaagagcgaggggtcaagctacgcctgacagtggtagatacccctggctatggtgacgctatcaactgcagagattgttttaagacaattatctcctatattgatgagcaatttgagaggtacctgcatgacgagagcggcttgaacaggcggcacatcattgataatagggtgcattgttgcttttactttatttcaccttttggacatggacttaagcccttagatgtggcgtttatgaaggcaatacacaacaaggtgaatattgtgcctgtcattgcaaaagctgacactctcaccctgaaggaacgggagcggctgaagaaaaggattctggatgaaattgaagaacataacatcaaaatctatcacttacctgatgcagaatcagatgaagatgaagattttaaagagcagactagacttctcaaggctagcatcccattctctgtggttggatccaatcagttgattgaagccaaaggaaagaaggtcagaggccgcctctacccctggggtgttgtggaagtggagaacccagagcacaatgactttctgaagctgagaaccatgctcatcacccacatgcaggatctccaggaggtgacccaggaccttcattatgaaaacttccgttctgagagactcaagagaggcggcaggaaagtggagaatgaggacatgaataaagaccagatcttgctggaaaaagaagctgagctccgccgcatgcaagagatgattgcaaggatgcaggcgcagatgcagatgcagatgcagggcggggatggcgatggcggggctctcgggcaccacgtgtaaggtgatgtgcacatatcaagaagtcagagaaaacactttcctggataaaaaagaaaacattccagatgcatgatccagctgtgtgttttcaatccttgggagggtgccatccacattttaacagtacctgtgcctgagaatttaatttttaaaagactttgatgtgtttttgtatgaagtacttttaacgtatgtatttcattgctgtgtcacactctgtgttttgtgaggtgaatgtcttccttttctttctccctaaccactaatgttagaattgatttccaagaatcggcatgtatacttaatactgaatttctttgatttaactgacttaacaactgactaaccattgatgagcactcctgatttttatctagaacattcagatttaccataatgttccttagtggtagaggtgtgtgcctagtgatgtagaaagatacactgacttggtgcaaggccatctgcttaccacatcacaccacttggagatctttgcttccttgcttttatgtttgtacacaacacctaaaaccagttttgctgctataattctatactgttgattcgtctgcgattttatctgttaaccaaataaaacataatagaatttcctaatgagatatatctttatacttaaacagcttttttagaggtgagttttaaagaagtctcttaattctgatgctaggttgtttttaaaaccactatgcaaagaactcaccacaagccaccttttgtagtgttctccactaatactggttatcctgtgctacagagaaaatcaaagcagtcataagctccagttttcgtattgcaaataagactcttacctacaaaatgagattcagtgaactaatttggtttttactcaaccaaattaaaaatttttttaaggaaaattagcagttggtctattcagaatcaaacctttttatattttatactgcactttagtgtattttctgtcactgtaggtatagaagatctgcctcccctgtggaaattggggtctgttggtgggcgtgcccctgaagcctggcttgggttgaaaagtgttcccgccctaaggccttggtgccctgaacctctgatgcctaccgggttctcctgatttgagtttcctttaaatactccctttttgagtaattttctgatgggaggaaagtagcagtcatcatctttttgtgtgcaggctgtctcatttatttttagccattgtcgtttcattcattttgtgtaatataaaccgtgtgtcatgtcaaagtgaaagacatttcaaatctgtagcataggctagtgggcaggtccgcacagtcgaagccacacctggtctgttttctgtgcactgtagccttagtgtcacctttcttcttgtgtctccttatggtacactccagcggttgccttttttatcatttctactgaagttgggaaattcaaccccagaaattgacagatgaaaggagacaatggttgtgtagggagatggagaaaatgcttaatctgaggatgagacagggttttttcatttttgtgggggctagaaaaaacataaaatgaggcagttaaataataatagttaatgaaggtgtgctacagaaaataatctggtgttcttgctaactttgcccttcactgttgcttaattgtgaacagccaaaagctatatgttatggcttattgtgtgaaggtaactaagaagtggtgttccatgacttcagagtacatccatgcggagtccattatttgagtttgacatttaataactttgctggaaaatctgtaaaaaagaaaaacaagtttgctagtgactaagccccgcatatgtgagtgaaagtacttcaggcacgctgcctcctggtaacagctatgcagggagggaggacccacactgctacacttctgatcccctttggttttactacccaaatctaaatagatacttttgataatagataactgctcttttactaagacatagtctctacctatagaaatgtattttgaaaacacttattttacacagcaattttgtatccatttaaactaaccttttatcaataaagcactattgtttagatattaaa

SEQ ID NO: 27509 - DNA, 3278 bp, Homo sapiens
  source 1..3278: mol_type = unassigned DNA
atgccgtggataagcgaggggagagcgactaggccctgtctgcgggtaccttcggcgaggagaggcgacgaaggtctgcaccagcgagacgaagcttcacaaaagatgtctaagcaacagccaactcagtttataaatccagaaacacctggctatgttggatttgcaaacctccccaatcaagttcaccgaaaatcagtgaaaaaaggttttgagttcacactgatggtggtcggtgaatcaggtctaggaaaatcgactctcataaacagcctattcctaactgatctgtacccagaaagagtcatacctggagcagcagaaaaaattgaaagaactgtccagattgaggcttcaactgttgaaattgaagagcgaggggtcaagctacgcctgacagtggtagatacccctggctatggtgacgctatcaactgcagagattgttttaagacaattatctcctatattgatgagcaatttgagaggtacctgcatgacgagagcggcttgaacaggcggcacatcattgataatagggtgcattgttgcttttactttatttcaccttttggacatggacttaagcccttagatgtggcgtttatgaaggcaatacacaacaaggtgaatattgtgcctgtcattgcaaaagctgacactctcaccctgaaggaacgggagcggctgaagaaaaggattctggatgaaattgaagaacataacatcaaaatctatcacttacctgatgcagaatcagatgaagatgaagattttaaagagcagactagacttctcaaggctagcatcccattctctgtggttggatccaatcagttgattgaagccaaaggaaagaaggtcagaggccgcctctacccctggggtgttgtggaagtggagaacccagagcacaatgactttctgaagctgagaaccatgctcatcacccacatgcaggatctccaggaggtgacccaggaccttcattatgaaaacttccgttctgagagactcaagagaggcggcaggaaagtggagaatgaggacatgaataaagaccagatcttgctggaaaaagaagctgagctccgccgcatgcaagagatgattgcaaggatgcaggcgcagatgcagatgcagatgcagggcggggatggcgatggcggggctctcgggcaccacgtgtaaggtgatgtgcacatatcaagaagtcagagaaaacactttcctggataaaaaagaaaacattccagatgcatgatccagctgtgtgttttcaatccttgggagggtgccatccacattttaacagtacctgtgcctgagaatttaatttttaaaagactttgatgtgtttttgtatgaagtacttttaacgtatgtatttcattgctgtgtcacactctgtgttttgtgaggtgaatgtcttccttttctttctccctaaccactaatgttagaattgatttccaagaatcggcatgtatacttaatactgaatttctttgatttaactgacttaacaactgactaaccattgatgagcactcctgatttttatctagaacattcagatttaccataatgttccttagtggtagaggtgtgtgcctagtgatgtagaaagatacactgacttggtgcaaggccatctgcttaccacatcacaccacttggagatctttgcttccttgcttttatgtttgtacacaacacctaaaaccagttttgctgctataattctatactgttgattcgtctgcgattttatctgttaaccaaataaaacataatagaatttcctaatgagatatatctttatacttaaacagcttttttagaggtgagttttaaagaagtctcttaattctgatgctaggttgtttttaaaaccactatgcaaagaactcaccacaagccaccttttgtagtgttctccactaatactggttatcctgtgctacagagaaaatcaaagcagtcataagctccagttttcgtattgcaaataagactcttacctacaaaatgagattcagtgaactaatttggtttttactcaaccaaattaaaaatttttttaaggaaaattagcagttggtctattcagaatcaaacctttttatattttatactgcactttagtgtattttctgtcactgtaggtatagaagatctgcctcccctgtggaaattggggtctgttggtgggcgtgcccctgaagcctggcttgggttgaaaagtgttcccgccctaaggccttggtgccctgaacctctgatgcctaccgggttctcctgatttgagtttcctttaaatactccctttttgagtaattttctgatgggaggaaagtagcagtcatcatctttttgtgtgcaggctgtctcatttatttttagccattgtcgtttcattcattttgtgtaatataaaccgtgtgtcatgtcaaagtgaaagacatttcaaatctgtagcataggctagtgggcaggtccgcacagtcgaagccacacctggtctgttttctgtgcactgtagccttagtgtcacctttcttcttgtgtctccttatggtacactccagcggttgccttttttatcatttctactgaagttgggaaattcaaccccagaaattgacagatgaaaggagacaatggttgtgtagggagatggagaaaatgcttaatctgaggatgagacagggttttttcatttttgtgggggctagaaaaaacataaaatgaggcagttaaataataatagttaatgaaggtgtgctacagaaaataatctggtgttcttgctaactttgcccttcactgttgcttaattgtgaacagccaaaagctatatgttatggcttattgtgtgaaggtaactaagaagtggtgttccatgacttcagagtacatccatgcggagtccattatttgagtttgacatttaataactttgctggaaaatctgtaaaaaagaaaaacaagtttgctagtgactaagccccgcatatgtgagtgaaagtacttcaggcacgctgcctcctggtaacagctatgcagggagggaggacccacactgctacacttctgatcccctttggttttactacccaaatctaaatagatacttttgataatagataactgctcttttactaagacatagtctctacctatagaaatgtattttgaaaacacttattttacacagcaattttgtatccatttaaactaaccttttatcaataaagcactattgtttagatatt

SEQ ID NO: 27510 - DNA, 3701 bp, Homo sapiens
  source 1..3701: mol_type = unassigned DNA
acctcgggccccacaccagaaggagaaagctaggggccgcgccagctccgccctcccccgcggggcggcgggccccagcccgggcacaggaaggccacgtccccggggagggacgcccgactcgatggtctgcgcagggcccgtcggccccacgtgacgtgcgcgcagccaatcccagagaggccccccgatcatcgagacggcggcggtggtgggctagacgagtttcgcgcggccgctcgccgtcccccgcccagtcgtactcggcgccccagctcggtgctgccgccatcttcttggaggacaggaggagaggcgaaggctccccctccccgtgatcgctccgcactcccgccaccacctgccctcccgcgaccgcctctctcctcctcagtgggcacttgtctccttctaacaaacggccttccccccactccagttacccaccgcaaggcgaagattctcattacctgttccactcttataagcataagaaaaccgagctcataagacgaagcttcacaaaagatgtctaagcaacagccaactcagtttataaatccagaaacacctggctatgttggatttgcaaacctccccaatcaagttcaccgaaaatcagtgaaaaaaggttttgagttcacactgatggtggtcggtgaatcaggtctaggaaaatcgactctcataaacagcctattcctaactgatctgtacccagaaagagtcatacctggagcagcagaaaaaattgaaagaactgtccagattgaggcttcaactgttgaaattgaagagcgaggggtcaagctacgcctgacagtggtagatacccctggctatggtgacgctatcaactgcagagattgttttaagacaattatctcctatattgatgagcaatttgagaggtacctgcatgacgagagcggcttgaacaggcggcacatcattgataatagggtgcattgttgcttttactttatttcaccttttggacatggacttaagcccttagatgtggcgtttatgaaggcaatacacaacaaggtgaatattgtgcctgtcattgcaaaagctgacactctcaccctgaaggaacgggagcggctgaagaaaaggattctggatgaaattgaagaacataacatcaaaatctatcacttacctgatgcagaatcagatgaagatgaagattttaaagagcagactagacttctcaaggctagcatcccattctctgtggttggatccaatcagttgattgaagccaaaggaaagaaggtcagaggccgcctctacccctggggtgttgtggaagtggagaacccagagcacaatgactttctgaagctgagaaccatgctcatcacccacatgcaggatctccaggaggtgacccaggaccttcattatgaaaacttccgttctgagagactcaagagaggcggcaggaaagtggagaatgaggacatgaataaagaccagatcttgctggaaaaagaagctgagctccgccgcatgcaagagatgattgcaaggatgcaggcgcagatgcagatgcagatgcagggcggggatggcgatggcggggctctcgggcaccacgtgtaaggtgatgtgcacatatcaagaagtcagagaaaacactttcctggataaaaaagaaaacattccagatgcatgatccagctgtgtgttttcaatccttgggagggtgccatccacattttaacagtacctgtgcctgagaatttaatttttaaaagactttgatgtgtttttgtatgaagtacttttaacgtatgtatttcattgctgtgtcacactctgtgttttgtgaggtgaatgtcttccttttctttctccctaaccactaatgttagaattgatttccaagaatcggcatgtatacttaatactgaatttctttgatttaactgacttaacaactgactaaccattgatgagcactcctgatttttatctagaacattcagatttaccataatgttccttagtggtagaggtgtgtgcctagtgatgtagaaagatacactgacttggtgcaaggccatctgcttaccacatcacaccacttggagatctttgcttccttgcttttatgtttgtacacaacacctaaaaccagttttgctgctataattctatactgttgattcgtctgcgattttatctgttaaccaaataaaacataatagaatttcctaatgagatatatctttatacttaaacagcttttttagaggtgagttttaaagaagtctcttaattctgatgctaggttgtttttaaaaccactatgcaaagaactcaccacaagccaccttttgtagtgttctccactaatactggttatcctgtgctacagagaaaatcaaagcagtcataagctccagttttcgtattgcaaataagactcttacctacaaaatgagattcagtgaactaatttggtttttactcaaccaaattaaaaatttttttaaggaaaattagcagttggtctattcagaatcaaacctttttatattttatactgcactttagtgtattttctgtcactgtaggtatagaagatctgcctcccctgtggaaattggggtctgttggtgggcgtgcccctgaagcctggcttgggttgaaaagtgttcccgccctaaggccttggtgccctgaacctctgatgcctaccgggttctcctgatttgagtttcctttaaatactccctttttgagtaattttctgatgggaggaaagtagcagtcatcatctttttgtgtgcaggctgtctcatttatttttagccattgtcgtttcattcattttgtgtaatataaaccgtgtgtcatgtcaaagtgaaagacatttcaaatctgtagcataggctagtgggcaggtccgcacagtcgaagccacacctggtctgttttctgtgcactgtagccttagtgtcacctttcttcttgtgtctccttatggtacactccagcggttgccttttttatcatttctactgaagttgggaaattcaaccccagaaattgacagatgaaaggagacaatggttgtgtagggagatggagaaaatgcttaatctgaggatgagacagggttttttcatttttgtgggggctagaaaaaacataaaatgaggcagttaaataataatagttaatgaaggtgtgctacagaaaataatctggtgttcttgctaactttgcccttcactgttgcttaattgtgaacagccaaaagctatatgttatggcttattgtgtgaaggtaactaagaagtggtgttccatgacttcagagtacatccatgcggagtccattatttgagtttgacatttaataactttgctggaaaatctgtaaaaaagaaaaacaagtttgctagtgactaagccccgcatatgtgagtgaaagtacttcaggcacgctgcctcctggtaacagctatgcagggagggaggacccacactgctacacttctgatcccctttggttttactacccaaatctaaatagatacttttgataatagataactgctcttttactaagacatagtctctacctatagaaatgtattttgaaaacacttattttacacagcaattttgtatccatttaaactaaccttttatcaataaagcactattgtttagatatt

SEQ ID NO: 27511 - DNA, 3333 bp, Homo sapiens
  source 1..3333: mol_type = unassigned DNA
gctgggcgggtccgcggcgcggtcggtcggcgcctgttctcgggctgtttggcggaggcttggaatagttaaatgactttggtcttgtccaaggttagatggagttcaactctaacgtcaagtcttggtccttttcattgacgaagcttcacaaaagatgtctaagcaacagccaactcagtttataaatccagaaacacctggctatgttggatttgcaaacctccccaatcaagttcaccgaaaatcagtgaaaaaaggttttgagttcacactgatggtggtcggtgaatcaggtctaggaaaatcgactctcataaacagcctattcctaactgatctgtacccagaaagagtcatacctggagcagcagaaaaaattgaaagaactgtccagattgaggcttcaactgttgaaattgaagagcgaggggtcaagctacgcctgacagtggtagatacccctggctatggtgacgctatcaactgcagagattgttttaagacaattatctcctatattgatgagcaatttgagaggtacctgcatgacgagagcggcttgaacaggcggcacatcattgataatagggtgcattgttgcttttactttatttcaccttttggacatggacttaagcccttagatgtggcgtttatgaaggcaatacacaacaaggtgaatattgtgcctgtcattgcaaaagctgacactctcaccctgaaggaacgggagcggctgaagaaaaggattctggatgaaattgaagaacataacatcaaaatctatcacttacctgatgcagaatcagatgaagatgaagattttaaagagcagactagacttctcaaggctagcatcccattctctgtggttggatccaatcagttgattgaagccaaaggaaagaaggtcagaggccgcctctacccctggggtgttgtggaagtggagaacccagagcacaatgactttctgaagctgagaaccatgctcatcacccacatgcaggatctccaggaggtgacccaggaccttcattatgaaaacttccgttctgagagactcaagagaggcggcaggaaagtggagaatgaggacatgaataaagaccagatcttgctggaaaaagaagctgagctccgccgcatgcaagagatgattgcaaggatgcaggcgcagatgcagatgcagatgcagggcggggatggcgatggcggggctctcgggcaccacgtgtaaggtgatgtgcacatatcaagaagtcagagaaaacactttcctggataaaaaagaaaacattccagatgcatgatccagctgtgtgttttcaatccttgggagggtgccatccacattttaacagtacctgtgcctgagaatttaatttttaaaagactttgatgtgtttttgtatgaagtacttttaacgtatgtatttcattgctgtgtcacactctgtgttttgtgaggtgaatgtcttccttttctttctccctaaccactaatgttagaattgatttccaagaatcggcatgtatacttaatactgaatttctttgatttaactgacttaacaactgactaaccattgatgagcactcctgatttttatctagaacattcagatttaccataatgttccttagtggtagaggtgtgtgcctagtgatgtagaaagatacactgacttggtgcaaggccatctgcttaccacatcacaccacttggagatctttgcttccttgcttttatgtttgtacacaacacctaaaaccagttttgctgctataattctatactgttgattcgtctgcgattttatctgttaaccaaataaaacataatagaatttcctaatgagatatatctttatacttaaacagcttttttagaggtgagttttaaagaagtctcttaattctgatgctaggttgtttttaaaaccactatgcaaagaactcaccacaagccaccttttgtagtgttctccactaatactggttatcctgtgctacagagaaaatcaaagcagtcataagctccagttttcgtattgcaaataagactcttacctacaaaatgagattcagtgaactaatttggtttttactcaaccaaattaaaaatttttttaaggaaaattagcagttggtctattcagaatcaaacctttttatattttatactgcactttagtgtattttctgtcactgtaggtatagaagatctgcctcccctgtggaaattggggtctgttggtgggcgtgcccctgaagcctggcttgggttgaaaagtgttcccgccctaaggccttggtgccctgaacctctgatgcctaccgggttctcctgatttgagtttcctttaaatactccctttttgagtaattttctgatgggaggaaagtagcagtcatcatctttttgtgtgcaggctgtctcatttatttttagccattgtcgtttcattcattttgtgtaatataaaccgtgtgtcatgtcaaagtgaaagacatttcaaatctgtagcataggctagtgggcaggtccgcacagtcgaagccacacctggtctgttttctgtgcactgtagccttagtgtcacctttcttcttgtgtctccttatggtacactccagcggttgccttttttatcatttctactgaagttgggaaattcaaccccagaaattgacagatgaaaggagacaatggttgtgtagggagatggagaaaatgcttaatctgaggatgagacagggttttttcatttttgtgggggctagaaaaaacataaaatgaggcagttaaataataatagttaatgaaggtgtgctacagaaaataatctggtgttcttgctaactttgcccttcactgttgcttaattgtgaacagccaaaagctatatgttatggcttattgtgtgaaggtaactaagaagtggtgttccatgacttcagagtacatccatgcggagtccattatttgagtttgacatttaataactttgctggaaaatctgtaaaaaagaaaaacaagtttgctagtgactaagccccgcatatgtgagtgaaagtacttcaggcacgctgcctcctggtaacagctatgcagggagggaggacccacactgctacacttctgatcccctttggttttactacccaaatctaaatagatacttttgataatagataactgctcttttactaagacatagtctctacctatagaaatgtattttgaaaacacttattttacacagcaattttgtatccatttaaactaaccttttatcaataaagcactattgtttagatattaaa

SEQ ID NO: 27512 - DNA, 539 bp, Homo sapiens
  source 1..539: mol_type = unassigned DNA
gggcggtcctagtgccggcgacagtggctccgacacgggcaggcccgggcgcgggagtggggattccggtgaccccttgttgaccctgcgggaattcctctgcactgtcgtcggtgctgggcctcggggcgtcgagtgcggtcgaggcgtggaggactggccagcccccaaacctccaagcccatcggctggatgccgtggataagcgaggggagagcgactaggccctgtctgcgggtaccttcggcgaggagaggcgacgaagcatacagaaactgctgtaaaagaagaagttgtgggtatttttttttttttttttgtctggaggaatggggacaccaaaactcatttggcagcagaggtgagacgaagcttcacaaaagatgtctaagcaacagccaactcagtttataaatccagaaacacctggctatgttggatttgcaaacctccccaatcaagttcaccgaaaatcagtgaaaaaaggttttgagttcacactgatggtggtcggtgaatcaggtctaggaaaatcgact

SEQ ID NO: 27513 - DNA, 644 bp, Homo sapiens
  source 1..644: mol_type = unassigned DNA
agtcgtactcggcgccccagctcggtgctgccgccatcttcttggaggacaggaggagaggcgaaggctccccctccccgtgatcgctccgcactcccgccaccacctgccctcccgcgaccgcctctctcctcctcagtgggcacttgtctccttctaacaaacggccttccccccactccagttacccaccgcaaggcgaagattctcattacctgttccactcttataagcataagaaaaccgagctcataaggcgtggaggactggccagcccccaaacctccaagcccatcggctggatgccgtggataagcgaggggagagcgactaggccctgtctgcgggtaccttcggcgaggagaggcgacgaagcatacagaaactgctgtaaaagaagaagttgtgggtatttttttttttttttttgtctggaggaatggggacaccaaaactcatttggcagcagaggtgagacgaagcttcacaaaagatgtctaagcaacagccaactcagtttataaatccagaaacacctggctatgttggatttgcaaacctccccaatcaagttcaccgaaaatcagtgaaaaaaggttttgagttcacactgatggtggtcggtgaatcaggtctaggaaaat

SEQ ID NO: 27514 - DNA, 724 bp, Homo sapiens
  source 1..724: mol_type = unassigned DNA
ccccgcacaagttgtgggccggccctcccgaggagctgcgggggacgcgccgctcgtcccatactctcgggcggtggtcggctggctctggggtgccggcggggcggtgtgggggaggggcggccgagcccaggctcttcggcacttatcgtgggctcccccgtcccgggcggtcctagtgccggcgacagtggctccgacacgggcaggcccgggcgcgggagtggggattccggtgaccccttgttgaccctgcgggaattcctctgcactgtcgtcggtgctgggcctcggggcgtcgagtgcggtcgaggtcgggaggtttggtgcttggagggaggatacaggtttaggcccgacaaacacttagagcttgtgtggccatcttgtctttctaacggtgccatttcctccctgaggcgtggaggactggccagcccccaaacctccaagcccatcggctggatgccgtggataagcgaggggagagcgactaggccctgtctgcgggtaccttcggcgaggagaggcgacgaagcatacagaaactgctgtaaaagaagaagttgtgggtatttttttttttttttttgtctggaggaatggggacaccaaaactcatttggcagcagaggtgagacgaagcttcacaaaagatgtctaagcaacagccaactcagtttataaatccagaaacacctggctatgttggatttgcaaacct

SEQ ID NO: 27515 - DNA, 775 bp, Homo sapiens
  source 1..775: mol_type = unassigned DNA
cgggctgtgagcggaccgcgagcgctgggcgggtccgcggcgcggtcggtcggcgcctgttctcgggctgtttggcgggcgtggaggactggccagcccccaaacctccaagcccatcggctggatgccgtggataagcgaggggagagcgactaggccctgtctgcgggtaccttcggcgaggagaggcgacgaaggtctgcaccagcgagcatacagaaactgctgtaaaagaagaagttgtgggtatttttttttttttttttgtctggaggaatggggacaccaaaactcatttggcagcagaggtgagacgaagcttcacaaaagatgtctaagcaacagccaactcagtttataaatccagaaacacctggctatgttggatttgcaaacctccccaatcaagttcaccgaaaatcagtgaaaaaaggttttgagttcacactgatggtggtcggtgaatcaggtctaggaaaatcgactctcataaacagcctattcctaactgatctgtacccagaaagagtcatacctggagcagcagaaaaaattgaaagaactgtccagattgaggcttcaactgttgaaattgaagagcgaggggtcaagctacgcctgacagtggtagatacccctggctatggtgacgctatcaactgcagagattgttttaagacaattatctcctatattgatgagcaatttgagaggtacctgcatgacgagagcggcttgaacaggcggcacatcattgataatagggtgcattgtt

SEQ ID NO: 27516 - DNA, 574 bp, Homo sapiens
  source 1..574: mol_type = unassigned DNA
gtcggcgcctgttctcgggctgtttggcgggcgtggaggactggccagcccccaaacctccaagcccatcggctggatgccgtggataagcgaggggagagcgactaggccctgtctgcgggtaccttcggcgaggagaggcgacgaaggtctgcaccagcgagacgaagcttcacaaaagatgtctaagcaacagccaactcagtttataaatccagaaacacctggctatgttggatttgcaaacctccccaatcaagttcaccgaaaatcagtgaaaaaaggttttgagttcacactgatggtggtcggtgaatcaggtctaggaaaatcgactctcataaacagcctattcctaactgatctgtacccagaaagagtcatacctggagcagcagaaaaaattgaaagaactgtccagattgaggcttcaactgttgaaattgaagagcgaggggtcaagctacgcctgacagtggtagatacccctggctatggtgacgctatcaactgcagagattgttttaagacaattatctcctatattgatgagcaatttgagaggtacctgcat

SEQ ID NO: 27517 - DNA, 372 bp, Homo sapiens
  source 1..372: mol_type = unassigned DNA
gcgcggtcggtcggcgcctgttctcgggctgtttggcggcatacagaaactgctgtaaaagaagaagttgtgggtatttttttttttttttttgtctggaggaatggggacaccaaaactcatttggcagcagaggtgagacgaagcttcacaaaagatgtctaagcaacagccaactcagtttataaatccagaaacacctggctatgttggatttgcaaacctccccaatcaagttcaccgaaaatcagtgaaaaaaggttttgagttcacactgatggtggtcggtgaatcaggtctaggaaaatcgactctcataaacagcctattcctaactgatctgtacccagaaagagtcatacctggagcagc

SEQ ID NO: 27518 - DNA, 575 bp, Homo sapiens
  source 1..575: mol_type = unassigned DNA
agtcgtactcggcgccccagctcggtgctgccgccatcttcttggaggacaggaggagaggcgaaggctccccctccccgtgatcgctccgcactcccgccaccacctgccctcccgcgaccgcctctctcctcctcagtgggcacttgtctccttctaacaaacggccttccccccactccagttacccaccgcaaggcgaagattctcattacctgttccactcttataagcataagaaaaccgagctcataagaggcttggaatagttaaatgactttggtcttgtccaaggttagatggagttcaactctaacgtcaagtcttggtccttttcattgacgaagcttcacaaaagatgtctaagcaacagccaactcagtttataaatccagaaacacctggctatgttggatttgcaaacctccccaatcaagttcaccgaaaatcagtgaaaaaaggttttgagttcacactgatggtggtcggtgaatcaggtctaggaaaatcgactctcataaacagcctattcctaactgatctgtacccagaaagagtcatacctggagcagcag

SEQ ID NO: 27519 - DNA, 599 bp, Homo sapiens
  source 1..599: mol_type = unassigned DNA
tgcgtatacatacatactatgtatgtgcgtttatgtgtgtctgtgtgttttttttttaacagacgaagcttcacaaaagatgtctaagcaacagccaactcagtttataaatccagaaacacctggctatgttggatttgcaaacctccccaatcaagttcaccgaaaatcagtgaaaaaaggttttgagttcacactgatggtggtcggtgaatcaggtctaggaaaatcgactctcataaacagcctattcctaactgatctgtacccagaaagagtcatacctggagcagcagaaaaaattgaaagaactgtccagattgaggcttcaactgttgaaattgaagagcgaggggtcaagctacgcctgacagtggtagatacccctggctatggtgacgctatcaactgcagagattgttttaagacaattatctcctatattgatgagcaatttgagaggtacctgcatgacgagagcggcttgaacaggcggcacatcattgataatagggtgcattgttgcttttactttatttcaccttttggacatggacttaagcccttagatgtggcgtttatgaaggcaatacacaaca

SEQ ID NO: 27520 - DNA, 801 bp, Homo sapiens
  source 1..801: mol_type = unassigned DNA
agagatgattgcaaggatgcaggcgcagatgcagatgcagatgcagggcggggatggcgatggcggggctctcgggcaccacgtgtaaggtgatgtgcacatatcaagaagtcagagtgtgttttgttttcttttttctagaaaacactttcctggataaaaaagaaaacattccagatgcatgatccagctgtgtgttttcaatccttgggagggtgccatccacattttaacagtacctgtgcctgagaatttaatttttaaaagactttgatgtgtttttgtatgaagtacttttaacgtatgtatttcattgctgtgtcacactctgtgttttgtgaggtgaatgtcttccttttctttctccctaaccactaatgttagaattgatttccaagaatcggcatgtatacttaatactgaatttctttgatttaactgacttaacaactgactaaccattgatgagcactcctgatttttatctagaacattcagatttaccataatgttccttagtggtagaggtgtgtgcctagtgatgtagaaagatacactgacttggtgcaaggccatctgcttaccacatcacaccacttggagatctttgcttccttgcttttatgtttgtacacaacacctaaaaccagttttgctgctataattctatactgttgattcgtctgcgattttatctgttaaccaaataaaacataatagaatttcctaatgagatatatctttatacttaaacagcttttttagaggtgagttttaaagaagtctcttaattctgatgct

SEQ ID NO: 27521 - DNA, 991 bp, Homo sapiens
  source 1..991: mol_type = unassigned DNA
agcccgcgccccgctcagccttgcagccccgcgcccggagcatctccctggaggaacggagacaaaggaggattcatgtccaaaggccagagtggactgggcaaatcaacgctggtcaacacgctcttcaaatcccaagtgagccgcaaggcctccagctggaaccgggaggagaagatccccaagacagtggagatcaaagctatcgggcatgtgatagaggaaggcggtgtcaaaatgaagctgaccgtcatcgacaccccaggctttggagaccaaatcaacaatgaaaactgctgggagcccattgagaagtacatcaatgagcagtacgagaagttcctgaaggaggaggtcaacatcgccaggaagaaacgcatccctgacactcgtgtccactgctgcctttacttcatctctcccacaggacactccttgcgacctctggatcttgagttcatgaaacacctcagcaaggttgtgaacatcatccctgtcattgctaaggctgacaccatgaccctggaggagaagtctgaattcaagcaaagggttcgcaaggagcttgaagtaaatggcattgaattctacccccagaaggaatttgatgaggatttggaggataagacggagaatgacaaaatcaggcaggagagcatgccttttgctgtggtgggaagtgacaaggagtaccaagtgaatggcaagagggtcctcggccgaaaaactccatgggggatcatcgaagtggaaaacctcaaccactgtgagtttgccctgcttcgagactttgtcatcaggacccacctccaggacctcaaggaagtgacacacaacatccactatgagacttacagggccaagcggctcaatgacaatggaggcctccctccggtgagcgtggacacagaggaaagccacgacagtaacccatgacgaccacttctctgtgtcatcacacatacccacttcacacacacacatcccaaat

SEQ ID NO: 27522 - DNA, 2258 bp, Homo sapiens
  source 1..2258: mol_type = unassigned DNA
gggcgggtgggaggagagcgcgaaggggcgaggcccgtttgcaggggccgctcggcccggggaagcccgcgccccgctcagccttgcagccccgcgcccggagcatctccctggaggaacggagacaaaggaggattcatgtccaaagggctcccagagaccaggacggacgcagccatgtcagagctggtgcctgagcccaggcctaagccagcggtgcccatgaagcccatgagcatcaactccaacctgctgggctacatcggcatcgacaccatcatcgagcagatgcgcaagaagaccatgaagaccggtttcgacttcaacatcatggtcgttgctgggagcccattgagaagtacatcaatgagcagtacgagaagttcctgaaggaggaggtcaacatcgccaggaagaaacgcatccctgacactcgtgtccactgctgcctttacttcatctctcccacaggacactccttgcgacctctggatcttgagttcatgaaacacctcagcaaggttgtgaacatcatccctgtcattgctaaggctgacaccatgaccctggaggagaagtctgaattcaagcaaagggttcgcaaggagcttgaagtaaatggcattgaattctacccccagaaggaatttgatgaggatttggaggataagacggagaatgacaaaatcaggcaggagagcatgccttttgctgtggtgggaagtgacaaggagtaccaagtgaatggcaagagggtcctcggccgaaaaactccatgggggatcatcgaagtggaaaacctcaaccactgtgagtttgccctgcttcgagactttgtcatcaggacccacctccaggacctcaaggaagtgacacacaacatccactatgagacttacagggccaagcggctcaatgacaatggaggcctccctccgggagaaggcctcctgggcactgtccttccacctgtgccagccaccccctgccccactgctgaatgaaggccatttcaagcgctgcttctcactccattcctctcagctgttattgctgcagggccaagccctttttagtgctgtgctcgtccagctcaccaccacagcccctctcagccctcagtaggtgggaggggccagctgcctctttaggccagttgcatcctccatttatccaaaccactcctctcctcccagtggagtggggttctgccagtacagccctactgcatcatctgcgtcagccggtcctagcccatctgcagggtgaaagaactcatcaagagctccttctgcccttgtaagcccatcccagctacttgtaaccatctctaagggcaatggcattgctccctacccattcatctgcatgagctactcttggcttccttaaagggtcaagaaagcaatttttctgcttactagattcattgagatcagctgtgtgagccccaaagtgggacaagggtgtctccttcattacttaaagatattcatgagggtgggtcactacagatgttggggagcaagggctaggatcactttttaaaaaatcaccacttgtggctgtcccagagtgcggttgtacatcctccccacctcataacgcagccactgaggaagagtggttttcctaagaagacattgctggagttgactttcttctgtccaaacaaacaaacaaaaactaaacacacacacaaacccccagaaacccacaatatgtacacgctaaggaaaaactagcacccttctgtccactcagcaataagagggatctcttcccacctaccctacctactcctacccccaacccccttccccattaatgtgagtaatgaattagcctgaccacaggtggtcactgtaggctaatggaaaatacccaagggagggcaaagccccccatcagatgcatgaatgtttgcgaatgttgactgccactgccccacacactgtgtctttatagaattcccctttgcccaccctcttcctgtctccacctggacacaacttgctcaaaggctggtgacttgtgggccattcatctacaaccaagtcctgatggagcaagaggcccacgcctaggggatgcaagaacaacccgtttcttaaatgttaccagtcccagccaatcttacggtgacattacagttaaatttcccaattgaaaacaagcaaacagacactcaaactggtcctgtaattgttgctagactttatgtgttgtacaactaaacattgctgtttgaacagtaa

SEQ ID NO: 27523 - DNA, 4649 bp, Homo sapiens
  source 1..4649: mol_type = unassigned DNA
tgggaggagagcgcgaaggggcgaggcccgtttgcaggggccgctcggcccggggaagcccgcgccccgctcagccttgcagccccgcgcccggagcatctccctggaggaacggagacaaaggaggattcatgtccaaagggctcccagagaccaggacggacgcagccatgtcagagctggtgcctgagcccaggcctaagccagcggtgcccatgaagcccatgagcatcaactccaacctgctgggctacatcggcatcgacaccatcatcgagcagatgcgcaagaagaccatgaagaccggtttcgacttcaacatcatggtcgttggccagagtggactgggcaaatcaacgctggtcaacacgctcttcaaatcccaagtgagccgcaaggcctccagctggaaccgggaggagaagatccccaagacagtggagatcaaagctatcgggcatgtgatagaggaaggcggtgtcaaaatgaagctgaccgtcatcgacaccccaggctttggagaccaaatcaacaatgaaaactgctgggagcccattgagaagtacatcaatgagcagtacgagaagttcctgaaggaggaggtcaacatcgccaggaagaaacgcatccctgacactcgtgtccactgctgcctttacttcatctctcccacaggacactccttgcgacctctggatcttgagttcatgaaacacctcagcaaggttgtgaacatcatccctgtcattgctaaggctgacaccatgaccctggaggagaagtctgaattcaagcaaagggttcgcaaggagcttgaagtaaatggcattgaattctacccccagaaggaatttgatgaggatttggaggataagacggagaatgacaaaatcaggcaggagagcatgccttttgctgtggtgggaagtgacaaggagtaccaagtgaatggcaagagggtcctcggccgaaaaactccatgggggatcatcgaagtggaaaacctcaaccactgtgagtttgccctgcttcgagactttgtcatcaggacccacctccaggacctcaaggaagtgacacacaacatccactatgagacttacagggccaagcggctcaatgacaatggaggcctccctccggtgagcgtggacacagaggaaagccacgacagtaacccatgacgaccacttctctgtgtcatcacacatacccacttcacacacacacatcccaaataccaccaccaaccaccttcttcctctcaactctgtcccacaggcctgtctggtatttgtggagcatcttgtctgtgtgtgtgtgtgtgtgtgtgtgtgtgtgtgtgtgtgtgacagagagagagcgagagagcctgtgtgtgtgcatgcaggggtgaggtattttcactgccctccctggagagtcccttgtaagtttggctcctccatgcctgtccattatctgtctcctttccttgtgtcccaaaacaaagctgtttgcctcactcaggagatctgggggaggtttcatttaaaagtgctgggagcaggtgagccacaggcaactcttctctcggaacctgcacacaaactggggctatagagattctccaaggacagatggcagtggagctagacctgagtagggggcagggagttcaggacaaccctcctgtaagttgggggtggtctgggggtaaggctggggcttcctgggaaaaggaaggccatgagaaggcagagaagtaggccagagctgggttcttgcagaaagcatcagtgcctacaaatggagctccacccttcagtctgtgtcgtgttcagtgtcacaaagctaccacctgtcaccagagcctactgctgctctccactcaactggcctctgctgccaggccactgcctgtctctgcttccgactttgtcttctttctccctttccctccttccctcatacattgctttctctccctctcctgcgtgtctctgacatctctcacttccttttagatgaatctactttaggttcattcctatatttagcatttatgcccagtctacttccagaaatgactttagactgcctttcacataaaatcacaaaactacaggacagtacaaacagattgccagagaaatctgggtcaaagaaaggaataggaaagaaagtttctgtagtcaagcacctgaacaggccctgagctcacaggcagccaatgtaaagagggaaacacagtgagttatgcagttcccagtgtccagttaaaggaagcacacatgctagtcatgtgagacaaccttttattgggacatcaggttctagaactaattctaaagaagtatcagaaacaatatacataatttgtctttcttagtaatttggcttcaaagacaaatttttgaccacacctccgttttctccgtcagacttctctcccttctaagcaggcttctctgttgctccatttgcttcatacatacttgacctctcttttctattccccatcacttttgtgctgaagctaatcatatttatgtctgtctttctctacttttccctaattccctctcctcctgactcctgtagacattcccaatgatacccaccgtcatacatttaggcttttcttgcctttccctgaagccctgtatttattaatgcatatatttcccctgcttgttgtacaagtaagttactcttttcctttaatctgtaagattcatgaaattcggggccagggaaacagtttagccttagggaagggaaaacactaagtgaaactgtttacaataacctcatacaaccttctgtcccatctcctggttcagcctaggtgtttcactggtcctctatgaatcccagcacttataatcccagtcttttatcactcaggtgctaggaaaaaaaacatagactcaagacccaagattcaatggaccaggagaaaggggggcggtgatcaggtcaccagtgaccccaacctatgctctcggtctttcctggaggctgccaacccagccctcatcctcccttgctcacaaagttacagggtaggcacctgtcaggacagaacagcagcagcgctacagcccagaggttatacatttcaacagaacagggatccttggctactgtagaagcagtcctgtatggagaccttggaccagcaggggaagatctatgggcatgggaggtgggcgttggaaaggctgagtaggaatggtgcctggcacccctgaaccatgatctgagcctccctggagaaggtattttatatgtctgctgccagctgctggtctccacaccctcaaccgttctcaacccccctgcagggagaaggcctcctgggcactgtccttccacctgtgccagccaccccctgccccactgctgaatgaaggccatttcaagcgctgcttctcactccattcctctcagctgttattgctgcagggccaagccctttttagtgctgtgctcgtccagctcaccaccacagcccctctcagccctcagtaggtgggaggggccagctgcctctttaggccagttgcatcctccatttatccaaaccactcctctcctcccagtggagtggggttctgccagtacagccctactgcatcatctgcgtcagccggtcctagcccatctgcagggtgaaagaactcatcaagagctccttctgcccttgtaagcccatcccagctacttgtaaccatctctaagggcaatggcattgctccctacccattcatctgcatgagctactcttggcttccttaaagggtcaagaaagcaatttttctgcttactagattcattgagatcagctgtgtgagccccaaagtgggacaagggtgtctccttcattacttaaagatattcatgagggtgggtcactacagatgttggggagcaagggctaggatcactttttaaaaaatcaccacttgtggctgtcccagagtgcggttgtacatcctccccacctcataacgcagccactgaggaagagtggttttcctaagaagacattgctggagttgactttcttctgtccaaacaaacaaacaaaaactaaacacacacacaaacccccagaaacccacaatatgtacacgctaaggaaaaactagcacccttctgtccactcagcaataagagggatctcttcccacctaccctacctactcctacccccaacccccttccccattaatgtgagtaatgaattagcctgaccacaggtggtcactgtaggctaatggaaaatacccaagggagggcaaagccccccatcagatgcatgaatgtttgcgaatgttgactgccactgccccacacactgtgtctttatagaattcccctttgcccaccctcttcctgtctccacctggacacaacttgctcaaaggctggtgacttgtgggccattcatctacaaccaagtcctgatggagcaagaggcccacgcctaggggatgcaagaacaacccgtttcttaaatgttaccagtcccagccaatcttacggtgacattacagttaaatttcccaattgaaaacaagcaaacagacactcaaactggtcctgtaattgttgctagactttatgtgttgtacaactaaacattgctgtttgaacagtaa

SEQ ID NO: 27524 - DNA, 2586 bp, Homo sapiens
  source 1..2586: mol_type = unassigned DNA
ggcggcggcaacggtgcgcgcggacaggggcggcgcggcgccgagcgagccgaggcgaggtcccggggagggcgcggcggcgcggggcgcaggggcggcgcggcggggccgcgggccgggcgggtgggaggagagcgcgaaggggcgaggcccgtttgcaggggccgctcggcccggggaagcccgcgccccgctcagccttgcagccccgcgcccggagcatctccctggaggaacggagacaaaggaggattcatgtccaaagggctcccagagaccaggacggacgcagccatgtcagagctggtgcctgagcccaggcctaagccagcggtgcccatgaagcccatgagcatcaactccaacctgctgggctacatcggcatcgacaccatcatcgagcagatgcgcaagaagaccatgaagaccggtttcgacttcaacatcatggtcgttggccagagtggactgggcaaatcaacgctggtcaacacgctcttcaaatcccaagtgagccgcaaggcctccagctggaaccgggaggagaagatccccaagacagtggagatcaaagctatcgggcatgtgatagaggaaggcggtgtcaaaatgaagctgaccgtcatcgacaccccaggctttggagaccaaatcaacaatgaaaactgctgggagcccattgagaagtacatcaatgagcagtacgagaagttcctgaaggaggaggtcaacatcgccaggaagaaacgcatccctgacactcgtgtccactgctgcctttacttcatctctcccacaggacactccttgcgacctctggatcttgagttcatgaaacacctcagcaaggttgtgaacatcatccctgtcattgctaaggctgacaccatgaccctggaggagaagtctgaattcaagcaaagggttcgcaaggagcttgaagtaaatggcattgaattctacccccagaaggaatttgatgaggatttggaggataagacggagaatgacaaaatcaggcaggagagcatgccttttgctgtggtgggaagtgacaaggagtaccaagtgaatggcaagagggtcctcggccgaaaaactccatgggggatcatcgaagtggaaaacctcaaccactgtgagtttgccctgcttcgagactttgtcatcaggacccacctccaggacctcaaggaagtgacacacaacatccactatgagacttacagggccaagcggctcaatgacaatggaggcctccctccgggagaaggcctcctgggcactgtccttccacctgtgccagccaccccctgccccactgctgaatgaaggccatttcaagcgctgcttctcactccattcctctcagctgttattgctgcagggccaagccctttttagtgctgtgctcgtccagctcaccaccacagcccctctcagccctcagtaggtgggaggggccagctgcctctttaggccagttgcatcctccatttatccaaaccactcctctcctcccagtggagtggggttctgccagtacagccctactgcatcatctgcgtcagccggtcctagcccatctgcagggtgaaagaactcatcaagagctccttctgcccttgtaagcccatcccagctacttgtaaccatctctaagggcaatggcattgctccctacccattcatctgcatgagctactcttggcttccttaaagggtcaagaaagcaatttttctgcttactagattcattgagatcagctgtgtgagccccaaagtgggacaagggtgtctccttcattacttaaagatattcatgagggtgggtcactacagatgttggggagcaagggctaggatcactttttaaaaaatcaccacttgtggctgtcccagagtgcggttgtacatcctccccacctcataacgcagccactgaggaagagtggttttcctaagaagacattgctggagttgactttcttctgtccaaacaaacaaacaaaaactaaacacacacacaaacccccagaaacccacaatatgtacacgctaaggaaaaactagcacccttctgtccactcagcaataagagggatctcttcccacctaccctacctactcctacccccaacccccttccccattaatgtgagtaatgaattagcctgaccacaggtggtcactgtaggctaatggaaaatacccaagggagggcaaagccccccatcagatgcatgaatgtttgcgaatgttgactgccactgccccacacactgtgtctttatagaattcccctttgcccaccctcttcctgtctccacctggacacaacttgctcaaaggctggtgacttgtgggccattcatctacaaccaagtcctgatggagcaagaggcccacgcctaggggatgcaagaacaacccgtttcttaaatgttaccagtcccagccaatcttacggtgacattacagttaaatttcccaattgaaaacaagcaaacagacactcaaactggtcctgtaattgttgctagactttatgtgttgtacaactaaacattgctgtttgaacagtaa

SEQ ID NO: 27525 - DNA, 1866 bp, Homo sapiens
  source 1..1866: mol_type = unassigned DNA
cggcgccgagcgagccgaggcgaggtcccggggagggcgcggcggcgcggggcgcaggggcggcgcggcggggccgcgggccgggcgggtgggaggagagcgcgaaggggcgaggcccgtttgcaggggccgctcggcccggggaagcccgcgccccgctcagccttgcagccccgcgcccggagcatctccctggaggaacggagacaaaggaggattcatgtccaaaggccagagtggactgggcaaatcaacgctggtcaacacgctcttcaaatcccaagtgagccgcaaggcctccagctggaaccgggaggagaagatccccaagacagtggagatcaaagctatcgggcatgtgatagaggaaggcggtgtcaaaatgaagctgaccgtcatcgacaccccaggctttggagaccaaatcaacaatgaaaactgctgggagcccattgagaagtacatcaatgagcagtacgagaagttcctgaaggaggaggtcaacatcgccaggaagaaacgcatccctgacactcgtgtccactgctgcctttacttcatctctcccacaggacactccttgcgacctctggatcttgagttcatgaaacacctcagcaaggttgtgaacatcatccctgtcattgctaaggctgacaccatgaccctggaggagaagtctgaattcaagcaaagggttcgcaaggagcttgaagtaaatggcattgaattctacccccagaaggaatttgatgaggatttggaggataagacggagaatgacaaaatcaggcaggagagcatgccttttgctgtggtgggaagtgacaaggagtaccaagtgaatggcaagagggtcctcggccgaaaaactccatgggggatcatcgaagtggaaaacctcaaccactgtgagtttgccctgcttcgagactttgtcatcaggacccacctccaggacctcaaggaagtgacacacaacatccactatgagacttacagggccaagcggctcaatgacaatggaggcctccctccgggagaaggcctcctgggcactgtccttccacctgtgccagccaccccctgccccactgctgaatgaaggccatttcaagcgctgcttctcactccattcctctcagctgttattgctgcagggccaagccctttttagtgctgtgctcgtccagctcaccaccacagcccctctcagccctcagtaggtgggaggggccagctgcctctttaggccagttgcatcctccatttatccaaaccactcctctcctcccagtggagtggggttctgccagtacagccctactgcatcatctgcgtcagccggtcctagcccatctgcagggtgaaagaactcatcaagagctccttctgcccttgtaagcccatcccagctacttgtaaccatctctaagggcaatggcattgctccctacccattcatctgcatgagctactcttggcttccttaaagggtcaagaaagcaatttttctgcttactagattcattgagatcagctgtgtgagccccaaagtgggacaagggtgtctccttcattacttaaagatattcatgagggtgggtcactacagatgttggggagcaagggctaggatcactttttaaaaaatcaccacttgtggctgtcccagagtgcggttgtacatcctccccacctcataacgcagccactgaggaagagtggttttcctaagaagacattgctggagttgactttcttctgtccaaacaaacaaacaaaaactaaacacacacacaaacccccagaaacccacaatatgtacacgctaaggaaaaactagcacccttctgtccactcagc

SEQ ID NO: 27526 - DNA, 876 bp, Homo sapiens
  source 1..876: mol_type = unassigned DNA
actagacccagaaccttcgaggggagggatggttgtcctcacccctgtgaggcaatatgctgtccattagtatccactgaatgcgtgaaatttttttctaatgggcaaactgaggctcagagaagttcctgtctggctcaaggttattggttcatcattctggagcagggcctggaacccgggcccctgactcggctctacaggcacccgcgcaacaccccagcccccgcgtgactcacgcgcgctcacggccgcccgcagctgccactggtcccctgcgcccctccgcccgtccccgccgcagcccagtggggctcccagagaccaggacggacgcagccatgtcagagctggtgcctgagcccaggcctaagccagcggtgcccatgaagcccatgagcatcaactccaacctgctgggctacatcggcatcgacaccatcatcgagcagatgcgcaagaagaccatgaagaccggtttcgacttcaacatcatggtcgttggccagagtggactgggcaaatcaacgctggtcaacacgctcttcaaatcccaagtgagccgcaaggcctccagctggaaccgggaggagaagatccccaagacagtggagatcaaagctatcgggcatgtgatagaggaaggcggtgtcaaaatgaagctgaccgtcatcgacaccccaggctttggagaccaaatcaacaatgaaaactgctgggagcccattgagaagtacatcaatgagcagtacgagaagttcctgaaggaggaggtcaacatcgccaggaagaaacgcatccctgacactcgtgtccactgctgcctttacttcatctctcccacaggacactccttgcgacctctggatcttgagt

SEQ ID NO: 27527 - DNA, 1588 bp, Homo sapiens
  source 1..1588: mol_type = unassigned DNA
cgcgggcgcctgcgacgccccgcctctggctcgggtgcgggagcggggcctgcccggactgcgacgccgccacagcttggggccagttcgcccagtcagggggatggctcggtcggcctcgggggtcgacgatcccccgggtaggcgacgtgccctgtccaggcctcacttcccgcgtccgcaaaacggggtggacaacgcagcctaaggcagagccgcgccaaggtccctcgctgtcgccgggctctggcggcctgaccgggcctggggtccgagcgtgcccccgggcctgggggggtcgccgcgatggactcgctggcagcgccccaggaccgcctggtggagcagctgctgtcgccgcggacccaggcccagaggcggctcaaggacattgacaagcagtacgtgggcttcgccacactgcccaaccaggtgcaccgcaagtcggtgaagaaaggctttgacttcacactcatggtggctggtgagtcaggcctggggaagtccacactggtccacagcctcttcctgacagacttgtacaaggaccggaagctgctcagtgctgaggagcgcatcagccagacggtagagattctaaaacacacggtggacattgaggagaagggagtcaagctgaagctcaccatcgtggacacgccgggattcggggacgctgtcaacaacaccgagtgctggaagcccatcaccgactatgtggaccagcagtttgagcagtacttccgtgatgagagcggcctcaaccgaaagaacatccaagacaaccgagtgcactgctgcctatacttcatctcccccttcgggcatgggctgcggccagtggatgtgggtttcatgaaggcattgcatgagaaggtcaacatcgtgcctctcatcgccaaagctgactgtcttgtccccagtgagatccggaagctgaaggagcggatccgggaggagattgacaagtttgggatccatgtataccagttccctgagtgtgactcggacgaggatgaggacttcaagcagcaggaccgggaactgaaggagagcgcgcccttcgccgttataggcagcaacacggtggtggaggccaaggggcagcgggtccggggccgactgtacccctgggggatcgtggaggtggagaaccaggcgcattgcgacttcgtgaagctgcgcaacatgctcatccgcacgcatatgcacgacctcaaggacgtgacgtgcgacgtgcactacgagaactaccgcgcgcactgcatccagcagatgaccagcaaactgacccaggacagccgcatggagagccccatcccgatcctgccgctgcccaccccggacgccgagactgagaagcttatcaggatgaaggatgaggaactgaggcgcatgcaggagatgctgcagaggatgaagcagcagatgcaggaccagtgacgctcgccgcggacacaccgtccgtctccgggacgccctcgcacccctggacaccagaccggactgttcccgacccggagacgcggggccacagcccccagctgaccctaatttattctcagcaccaccccctcccaggtcattg

SEQ ID NO: 27528 - DNA, 3173 bp, Homo sapiens
  source 1..3173: mol_type = unassigned DNA
cgggagcggggcctgcccggactgcgacgccgccacagcttggggccagttcgcccagtcagggggatggctcggtcggcctcgggggtcgacgatcccccgggacattgacaagcagtacgtgggcttcgccacactgcccaaccaggtgcaccgcaagtcggtgaagaaaggctttgacttcacactcatggtggctggtgagtcaggcctggggaagtccacactggtccacagcctcttcctgacagacttgtacaaggaccggaagctgctcagtgctgaggagcgcatcagccagacggtagagattctaaaacacacggtggacattgaggagaagggagtcaagctgaagctcaccatcgtggacacgccgggattcggggacgctgtcaacaacaccgagtgctggaagcccatcaccgactatgtggaccagcagtttgagcagtacttccgtgatgagagcggcctcaaccgaaagaacatccaagacaaccgagtgcactgctgcctatacttcatctcccccttcgggcatgggctgcggccagtggatgtgggtttcatgaaggcattgcatgagaaggtcaacatcgtgcctctcatcgccaaagctgactgtcttgtccccagtgagatccggaagctgaaggagcggatccgggaggagattgacaagtttgggatccatgtataccagttccctgagtgtgactcggacgaggatgaggacttcaagcagcaggaccgggaactgaaggagagcgcgcccttcgccgttataggcagcaacacggtggtggaggccaaggggcagcgggtccggggccgactgtacccctgggggatcgtggaggtggagaaccaggcgcattgcgacttcgtgaagctgcgcaacatgctcatccgcacgcatatgcacgacctcaaggacgtgacgtgcgacgtgcactacgagaactaccgcgcgcactgcatccagcagatgaccagcaaactgacccaggacagccgcatggagagccccatcccgatcctgccgctgcccaccccggacgccgagactgagaagcttatcaggatgaaggatgaggaactgaggcgcatgcaggagatgctgcagaggatgaagcagcagatgcaggaccagtgacgctcgccgcggacacaccgtccgtctccgggacgccctcgcacccctggacaccagaccggactgttcccgacccggagacgcggggccacagcccccagctgaccctaatttattctcagcaccaccccctcccaggtcattgtgtctgtttccgaggggcctggaccgtagcccccgcccagctggccctctctgaccttgggggatcaggagcgaagttgggcgggacttcagagatccgcctcccttgcccttcccccgcccccggacggtcacagcacccaaaccgcaggccctgctctggcaggcaggcaaagctaggcagaagaggattcccaggatcctgggtctgttccctgccccagtgctgcagaacggacttgggagccctcctttgcctgctcccgcgggtcacccagcgagtgctgagaccccattttctgtcgaggcgggccgagtcttcccttatccccagacgcctagcgggcagggttgggctgaatcaaatgggagccctccagacataaggaggccagaggctgcaaggagcggggtcgtgaccgcttacaccccttctccacagcccggcccgacctggagggcccccggggcactgggcggtgagccacctcctggcaactctcggtgccgtcccctgccctcgctcgaggcctcttctccccagcaccgctgtggtgtgccgggatcctgagcctaggcctcccgatgttcccacccgcatgatcccttcccgccacacgatgctccgttttcttccgttgtgaatgccgcgtcctgtcctggtgacaggagaacaatgttggtgaacgtcgcagcgggtgtccgagtgctccgtgtgcccctgagagcgggtgggagcggaagcctgagcggcctgcggcctccggcgatagtgtgctatctgccgctgcagcgcgcgtccgcgcggcctctgggctatttctggccaggccgcagcactgtggtcggtgcgggcgtggcaggggcggggcggccttatcgctcggctctcccgcctacgcctcccgctgcagagtaagccgggctgccgtcttctcgccatgggctccgggccgcgcggggcgctgagcttactgctcctgctgctggccccgccgagccgcccggccgcaggttgcccggcgccctgtagctgcgcggggacgctcgtggactgcgggcgccgcgggctgacttgggcctcgctgccgaccgccttccctgtcgacacaaccgagctggtgctgaccggcaacaacctgacggcgctgccgccggggctgctggacgcgctgcccgcgctgcgcaccgcacacctgggcgccaacccctggcgctgcgactgccgccttgtgccgctgcgcgcctggctggccggccgccccgagcgtgcgccctaccgcgacctgcgttgcgtggcgcccccagcgctgcgcggccgcctgctgccctatctggccgaggacgagctgcgcgccgcttgcgctcccggcccgctctgctggggggcgctggcggcgcagcttgcgctgctgggccttgggctgctgcacgcgttgctgctggtgctgctgctgtgccgcctgcggaggctgcgggcccgggcccgcgctcgcgccgcagcccggctgtcgctgaccgacccgctggtggccgagcgagccggaaccgacgagtcctgaggagagaaccggtgcgtcctgaggagagaaccggcgctgggcaacacgggcctgcaaactcgacaggaccctgcccgaggggccctcgcgccaacctggaccggtccccgcctcctccgctgcccaatctctcagacccaccccacctgcaggcccagaccacgtgggacagaactcctgcccaccctaccccgagggaggcgaacccgcacttccaggcttgggaggaccatggggcacaatgcggtccagaccctgctgcgtctcccttccaaactctggtgctgaataaacccttctgatctggt

SEQ ID NO: 27529 - DNA, 2241 bp, Homo sapiens
  source 1..2241: mol_type = unassigned DNA
tggctcgggtgcgggagcggggcctgcccggactgcgacgccgccacagcttggggccagttcgcccagtcagggggatggctcggtcggcctcgggggtcgacgatcccccgggtaggcgacgtgccctgtccaggcctcacttcccgcgtccgcaaaacggggtggacaacgcagcctaaggcagagccgcgccaaggtccctcgctgtcgccgggctctggcggcctgaccgggcctggggtccgagcgtgcccccgggcctgggggggtcgccgcgatggactcgctggcagcgccccaggaccgcctggtggagcagctgctgtcgccgcggacccaggcccagaggcggctcaaggacattgacaagcagtacgtgggcttcgccacactgcccaaccaggtgcaccgcaagtcggtgaagaaaggctttgacttcacactcatggtggctggtgagtcaggcctggggaagtccacactggtccacagcctcttcctgacagacttgtacaaggaccggaagctgctcagtgctgaggagcgcatcagccagacggtagagattctaaaacacacggtggacattgaggagaagggagtcaagctgaagctcaccatcgtggacacgccgggattcggggacgctgtcaacaacaccgagtgctggaagcccatcaccgactatgtggaccagcagtttgagcagtacttccgtgatgagagcggcctcaaccgaaagaacatccaagacaaccgagtgcactgctgcctatacttcatctcccccttcgggcatgggctgcggccagtggatgtgggtttcatgaaggcattgcatgagaaggtcaacatcgtgcctctcatcgccaaagctgactgtcttgtccccagtgagatccggaagctgaaggagcggatccgggaggagattgacaagtttgggatccatgtataccagttccctgagtgtgactcggacgaggatgaggacttcaagcagcaggaccgggaactgaaggagagcgcgcccttcgccgttataggcagcaacacggtggtggaggccaaggggcagcgggtccggggccgactgtacccctgggggatcgtggagggcgcattgcgacttcgtgaagctgcgcaacatgctcatccgcacgcatatgcacgacctcaaggacgtgacgtgcgacgtgcactacgagaactaccgcgcgcactgcatccagcagatgaccagcaaactgacccaggacagccgcatggagagccccatcccgatcctgccgctgcccaccccggacgccgagactgagaagcttatcaggatgaaggatgaggaactgaggcgcatgcaggagatgctgcagaggatgaagcagcagatgcaggaccagtgacgctcgccgcggacacaccgtccgtctccgggacgccctcgcacccctggacaccagaccggactgttcccgacccggagacgcggggccacagcccccagctgaccctaatttattctcagcaccaccccctcccaggtcattgtgtctgtttccgaggggcctggaccgtagcccccgcccagctggccctctctgaccttgggggatcaggagcgaagttgggcgggacttcagagatccgcctcccttgcccttcccccgcccccggacggtcacagcacccaaaccgcaggccctgctctggcaggcaggcaaagctaggcagaagaggattcccaggatcctgggtctgttccctgccccagtgctgcagaacggacttgggagccctcctttgcctgctcccgcgggtcacccagcgagtgctgagaccccattttctgtcgaggcgggccgagtcttcccttatccccagacgcctagcgggcagggttgggctgaatcaaatgggagccctccagacataaggaggccagaggctgcaaggagcggggtcgtgaccgcttacaccccttctccacagcccggcccgacctggagggcccccggggcactgggcggtgagccacctcctggcaactctcggtgccgtcccctgccctcgctcgaggcctcttctccccagcaccgctgtggtgtgccgggatcctgagcctaggcctcccgatgttcccacccgcatgatcccttcccgccacacgatgctccgttttcttccgttgtgaatgccgcgtcctgtcctggtgacaggagaacaatgttggtgaacgtc

SEQ ID NO: 27530 - DNA, 1336 bp, Homo sapiens
  source 1..1336: mol_type = unassigned DNA
acaggcctgcggtacaagagcaagctggcgaccccagaggacaagcaggacattgacaagcagtacgtgggcttcgccacactgcccaaccaggtgcaccgcaagtcggtgaagaaaggctttgacttcacactcatggtggctggtgagtcaggcctggggaagtccacactggtccacagcctcttcctgacagacttgtacaaggaccggaagctgctcagtgctgaggagcgcatcagccagacggtagagattctaaaacacacggtggacattgaggagaagggagtcaagctgaagctcaccatcgtggacacgccgggattcggggacgctgtcaacaacaccgagtgctggaagcccatcaccgactatgtggaccagcagtttgagcagtacttccgtgatgagagcggcctcaaccgaaagaacatccaagacaaccgagtgcactgctgcctatacttcatctcccccttcgggcatgggctgcggccagtggatgggtttcatgaaggcattgcatgagaaggtcaacatcgtgcctctcatcgccaaagctgactgtcttgtccccagtgagatccggaagctgaaggagcggatccgggaggagattgacaagtttgggatccatgtataccagttccctgagtgtgactcggacgaggatgaggacttcaagcagcaggaccgggaactgaaggagagcgcgcccttcgccgttataggcagcaacacggtggtggaggccaaggggcagcgggtccggggccgactgtacccctgggggatcgtggaggtggagaaccaggcgcattgcgacttcgtgaagctgcgcaacatgctcatccgcacgcatatgcacgacctcaaggacgtgacgtgcgacgtgcactacgagaactaccgcgcgcactgcatccagcagatgaccagcaaactgacccaggacagccgcatggagagccccatcccgatcctgccgctgcccaccccggacgccgagactgagaagcttatcaggatgaaggatgaggaactgaggcgcatgcaggagatgctgcagaggatgaagcagcagatgcaggaccagtgacgctcgccgcggacacaccgtccgtctccgggacgccctcgcacccctggacaccagaccggactgttcccgacccggagacgcggggccacagcccccagctgaccctaatttattctcagcaccaccccctcccaggtcattgtgtctgtttccgaggggcctggaccgtagcccccgcccagctggccctctctgaccttgggggatcaggagcgaagttgggcgggactt

SEQ ID NO: 27531 - DNA, 2070 bp, Homo sapiens
  source 1..2070: mol_type = unassigned DNA
ggagcgggcggcggcggcggcggcgcggaggggccgctcaccccgcagcccggcctcggcctccgccgcttgtcgtcgcgccccgcccgcgagcccgccccgcacgtcccccgccggcggccaccatgagcacaggcctgcggtacaagagcaagctggcgaccccagaggacaagcaggacattgacaagcagtacgtgggcttcgccacactgcccaaccaggtgcaccgcaagtcggtgaagaaaggctttgacttcacactcatggtggctggtgagtcaggcctggggaagtccacactggtccacagcctcttcctgacagacttgtacaaggaccggaagctgctcagtgctgaggagcgcatcagccagacggtagagattctaaaacacacggtggacattgaggagaagggagtcaagctgaagctcaccatcgtggacacgccgggattcggggacgctgtcaacaacaccgagtgctggaagcccatcaccgactatgtggaccagcagtttgagcagtacttccgtgatgagagcggcctcaaccgaaagaacatccaagacaaccgagtgcactgctgcctatacttcatctcccccttcgggcatgggctgcggccagtggatgtgggtttcatgaaggcattgcatgagaaggtcaacatcgtgcctctcatcgccaaagctgactgtcttgtccccagtgagatccggaagctgaaggagcggatccgggaggagattgacaagtttgggatccatgtataccagttccctgagtgtgactcggacgaggatgaggacttcaagcagcaggaccgggaactgaaggagagcgcgcccttcgccgttataggcagcaacacggtggtggaggccaaggggcagcgggtccggggccgactgtacccctgggggatcgtggaggtggagaaccaggcgcattgcgacttcgtgaagctgcgcaacatgctcatccgcacgcatatgcacgacctcaaggacgtgacgtgcgacgtgcactacgagaactaccgcgcgcactgcatccagcagatgaccagcaaactgacccaggacagccgcatggagagccccatcccgatcctgccgctgcccaccccggacgccgagactgagaagcttatcaggatgaaggatgaggaactgaggcgcatgcaggagatgctgcagaggatgaagcagcagatgcaggaccagtgacgctcgccgcggacacaccgtccgtctccgggacgccctcgcacccctggacaccagaccggactgttcccgacccggagacgcggggccacagcccccagctgaccctaatttattctcagcaccaccccctcccaggtcattgtgtctgtttccgaggggcctggaccgtagcccccgcccagctggccctctctgaccttgggggatcaggagcgaagttgggcgggacttcagagatccgcctcccttgcccttcccccgcccccggacggtcacagcacccaaaccgcaggccctgctctggcaggcaggcaaagctaggcagaagaggattcccaggatcctgggtctgttccctgccccagtgctgcagaacggacttgggagccctcctttgcctgctcccgcgggtcacccagcgagtgctgagaccccattttctgtcgaggcgggccgagtcttcccttatccccagacgcctagcgggcagggttgggctgaatcaaatgggagccctccagacataaggaggccagaggctgcaaggagcggggtcgtgaccgcttacaccccttctccacagcccggcccgacctggagggcccccggggcactgggcggtgagccacctcctggcaactctcggtgccgtcccctgccctcgctcgaggcctcttctccccagcaccgctgtggtgtgccgggatcctgagcctaggcctcccgatgttcccacccgcatgatcccttcccgccacacgatgctccgttttcttccgttgtgaatgccgcgtcctgtcctggtgacaggagaacaatgttggtgaacgtc

SEQ ID NO: 27532 - DNA, 4113 bp, Homo sapiens
  source 1..4113: mol_type = unassigned DNA
gttctaatgtgcaggggcttggcctgaccagtcctaccctggaacctttccaggccccatgtcctgctccgctgggcttgcctgttgggattctactggggtcatggaggtgggtggcccacagagcggagctcgggagacccccgcagtccctggagtagccacatgggagggaggcccggctggcaggagctcccagtccctccaatcctgtgggtcagagctggtgaggatgctcagagggcaagggaatgtccacagaagcacgtgggagatgggtcccatcccacccccacccctgtctctgagggcagggccacctgagggctgcagggcagcgcatgggtggccggcgtttattcagcaggctggcgggggcttccaagttttgcagggacctccagtactccggcagcctgcacccttcctttcccttcccttcccttctgtccaccctaagcctcctaggggacaggcaggctggacttcagaaaaggtgggctctgccctcctccggtcccccgaatgtcttgggaaagagtccaccaaacacacatgcacacacccgcgcacacgcacatacccaatgcatgcacacacgtacacacacacgcatacacgcatgtatacacgcgcacacacgcaggcattacacacacacacattacacacacacacccgcacggacgcgcacacacaaacgcgcgcacgcacgcacgcacgcacgggggaggtcagccccaagcagggctggggaggggtgcagggcgcggcgtgtctgtgggcacttggggcgtcgagacgccgccgggaggttttcgggcaagtctgcgagaagacggcgggccctgaactgggcgggtacccgcgctgttgcgcgtgggtcccgggagcggcctccggcgccctctggcgggcggaagccgcgcagcacctcttgggggcgggacgcgcggtggctaccgactcccggcccgccccggcccgcgtgcaggacccggtcgtcccctcctgctgtcctggagcccggactgaggccccgggggcgcggcagggctcccggtccacgcgagccatggcccgaccgcgcctcggctcagccctgccctccgcagccgctttcgggtggctccgcccgcggcccaatttccaggcgaccgtttcccggcgacggcgggcggggccgtctctgccgccccccgccgcgcgctccgcgggcgcctgcgacgccccgcctctggctcgggtgcgggagcggggcctgcccggactgcgacgccgccacagcttggggccagttcgcccagtcagggggatggctcggtcggcctcgggggtcgacgatcccccgggtaggcgacgtgccctgtccaggcctcacttcccgcgtccgcaaaacggggtggacaacgcagcctaaggcagagccgcgccaaggtccctcgctgtcgccgggctctggcggcctgaccgggcctggggtccgagcgtgcccccgggcctgggggggtcgccgcgatggactcgctggcagcgccccaggaccgcctggtggagcagctgctgtcgccgcggacccaggcccagaggcggctcaaggacattgacaagcagtacgtgggcttcgccacactgcccaaccaggtgcaccgcaagtcggtgaagaaaggctttgacttcacactcatggtggctggtgagtcaggcctggggaagtccacactggtccacagcctcttcctgacagacttgtacaaggaccggaagctgctcagtgctgaggagcgcatcagccagacggtagagattctaaaacacacggtggacattgaggagaagggagtcaagctgaagctcaccatcgtggacacgccgggattcggggacgctgtcaacaacaccgagtgctggaagcccatcaccgactatgtggaccagcagtttgagcagtacttccgtgatgagagcggcctcaaccgaaagaacatccaagacaaccgagtgcactgctgcctatacttcatctcccccttcgggcatgggctgcggccagtggatgtgggtttcatgaaggcattgcatgagaaggtcaacatcgtgcctctcatcgccaaagctgactgtcttgtccccagtgagatccggaagctgaaggagcggatccgggaggagattgacaagtttgggatccatgtataccagttccctgagtgtgactcggacgaggatgaggacttcaagcagcaggaccgggaactgaaggagagcgcgcccttcgccgttataggcagcaacacggtggtggaggccaaggggcagcgggtccggggccgactgtacccctgggggatcgtggaggtggagaaccaggcgcattgcgacttcgtgaagctgcgcaacatgctcatccgcacgcatatgcacgacctcaaggacgtgacgtgcgacgtgcactacgagaactaccgcgcgcactgcatccagcagatgaccagcaaactgacccaggacagccgcatggagagccccatcccgatcctgccgctgcccaccccggacgccgagactgagaagcttatcaggatgaaggatgaggaactgaggcgcatgcaggagatgctgcagaggatgaagcagcagatgcaggaccagtgacgctcgccgcggacacaccgtccgtctccgggacgccctcgcacccctggacaccagaccggactgttcccgacccggagacgcggggccacagcccccagctgaccctaatttattctcagcaccaccccctcccaggtcattgtgtctgtttccgaggggcctggaccgtagcccccgcccagctggccctctctgaccttgggggatcaggagcgaagttgggcgggacttcagagatccgcctcccttgcccttcccccgcccccggacggtcacagcacccaaaccgcaggccctgctctggcaggcaggcaaagctaggcagaagaggattcccaggatcctgggtctgttccctgccccagtgctgcagaacggacttgggagccctcctttgcctgctcccgcgggtcacccagcgagtgctgagaccccattttctgtcgaggcgggccgagtcttcccttatccccagacgcctagcgggcagggttgggctgaatcaaatgggagccctccagacataaggaggccagaggctgcaaggagcggggtcgtgaccgcttacaccccttctccacagcccggcccgacctggagggcccccggggcactgggcggtgagccacctcctggcaactctcggtgccgtcccctgccctcgctcgaggcctcttctccccagcaccgctgtggtgtgccgggatcctgagcctaggcctcccgatgttcccacccgcatgatcccttcccgccacacgatgctccgttttcttccgttgtgaatgccgcgtcctgtcctggtgacaggagaacaatgttggtgaacgtcgcagcgggtgtccgagtgctccgtgtgcccctgagagcgggtgggagcggaagcctgagcggcctgcggcctccggcgatagtgtgctatctgccgctgcagcgcgcgtccgcgcggcctctgggctatttctggccaggccgcagcactgtggtcggtgcgggcgtggcaggggcggggcggccttatcgctcggctctcccgcctacgcctcccgctgcagagtaagccgggctgccgtcttctcgccatgggctccgggccgcgcggggcgctgagcttactgctcctgctgctggccccgccgagccgcccggccgcaggttgcccggcgccctgtagctgcgcggggacgctcgtggactgcgggcgccgcgggctgacttgggcctcgctgccgaccgccttccctgtcgacacaaccgagctggtgctgaccggcaacaacctgacggcgctgccgccggggctgctggacgcgctgcccgcgctgcgcaccgcacacctgggcgccaacccctggcgctgcgactgccgccttgtgccgctgcgcgcctggctggccggccgccccgagcgtgcgccctaccgcgacctgcgttgcgtggcgcccccagcgctgc

SEQ ID NO: 27533 - DNA, 2693 bp, Homo sapiens
  source 1..2693: mol_type = unassigned DNA
gaagaactggaactggtctggccatagggggaagcggcgcgttaaatccgccccctctccataccctactttcaaggggtgggcggtagaggggaggttggggttggagcagcggcgagggggcccctcccttgcacctccccccaccggacttggtcgcgcccgaagtgtaacactttctctttgtcggaggagctcctctgtttcctgtgcagtagctcccgttgcggcggcacccgtggcagccctggcggacgcaggagcgatggcagcgaccgatatagctcgccaggtgggtgaaggttgccgaactgtccccctggctggacatgtggggtttgacagcttgcctgaccagctggtgaataagtccgtcagccagggcttctgcttcaacatcctgtgcgtgggagagacaggtttgggcaagtccaccctcatggacaccctgttcaacaccaaattcgaaggggagccagccacccacacacagccgggtgtccagctccagtctaatacctatgacctccaagagagcaacgtgaggctaaagctcacgatcgttagcacagttggctttggggaccagatcaacaaagaggacagctacaagcctatcgtggaattcatcgatgcacaattcgaggcctacctgcaggaagagctaaagatccgaagagtgctacacacctaccatgactcccgaatccatgtctgcttgtatttcattgcccccacgggtcattccctgaagtctctggacctagtgactatgaagaagctggacagtaaggtgaacatcatccccatcattgccaaagcagatgccatttcgaagagtgagctaacaaagttcaaaatcaaaatcaccagcgagcttgtcagcaacggagtccagatctatcagtttcctacagatgatgagtcggtggcagagatcaatggaaccatgaacgcccacctgccgtttgctgtcattggcagcacagaagaactgaagataggcaacaagatgatgagggcgcggcagtatccttggggcactgtgcaggttgaaaacgaggcccactgcgactttgtgaagctgcgggagatgctgattcgggtcaacatggaggatctgcgggagcagacccacacccggcactatgagctgtatcgccgctgtaagctggaggagatgggcttcaaggacaccgaccctgacagcaaacccttcagtttacaggagacatatgaggccaaaaggaacgagttcctaggggaactccagaaaaaagaagaggagatgagacagatgttcgtccagcgagtcaaagagaaagaagcggagctcaaagaggcagagaaagagctgcacgagaagtttgaccgtctgaagaaactgcaccaggacgagaagaagaaactggaggataagaagaaatccctggatgatgaagtgaatgctttcaagcaaagaaagacggcggctgagctgctccagtcccagggctcccaggctggaggctcacagactctgaagagagacaaagagaagaaaaataatccatggctgtgtactgaatagtattccccgctacagctggactggactccatttagccttttaagccgaggttcctattttaactgacagctttcctttggggtgccaggcagcgaggccccccacccctatcctgccatgtacttcaagctcacttcttctttttgagttccgcaacttgctcctgcctcccagccccactggcactgaccatgaccacctacttctattttttttttagagtttctttttttgatcacttactttcaaagcacacagtcaaacaaggttatgccaaatttccaggcctttttgaagtattgagaaggggaaggggatttctcacttcaattatagatcataataggaagcaaaaagaaaaaaatgaaaagcaaacatatgcacgcacttttcttgttgacaaagcaagaatataggtttgctgtgtaggtttggtgctctattgattggtgagtgaccagagcaagtatgaaggtgatgctgccaaagcacaagccagtttcttgggaaaattcaagttacagtggagtatttttttgaagaccatatgcttggaggtagaaacaaaccaacgaccaaaaaaaaaaaaaaaaaaatctgctcagatactcagccagtagctcagagagatgctgagttaggcctgtcaggtctccttgggaaaggcttcatatttgcaactttgatgattctatgtccagcttcagagctgctttcccagaaattcacgcttaaacaaccaaccggtaaccaccacttccccacaccgccgcccggtaattatttgcattacaaaccggaggcgccctcatttgcatttgtgtacagattaactagttaaggcttgagaagctctgaataattcaaaagtattagacccacacagccttggagagaccttcagaaactaaggaggagttttatattaagggagacattttagtcagtaagacgatataacctacttactccgtaaggggaaatgaaggcccagagaagggaagggacttgaccgaggtcccacttctgtttcgaggcagaagccagactaattttcatgcctcctgactcccaatcagtttcacaaagggattcaatctgtttatatacgttacattcctgg

SEQ ID NO: 27534 - DNA, 1576 bp, Homo sapiens
  source 1..1576: mol_type = unassigned DNA
gaagaactggaactggtctggccatagggggaagcggcgcgttaaatccgccccctctccataccctactttcaaggggtgggcggtagaggggaggttggggttggagcagcggcgagggggcccctcccttgcacctccccccaccggacttggtcgcgcccgaagtgtaacactttctctttgtcggaggagctcctctgtttcctgtgcagtagctcccgttgcggcggcacccgtggcagccctggcggacgcaggagcgatggcagcgaccgatatagctcgccaggtgggtgaaggttgccgaactgtccccctggctggacatgtggggtttgacagcttgcctgaccagctggtgaataagtccgtcagccagggcttctgcttcaacatcctgtgcgtgggagagacaggtttgggcaagtccaccctcatggacaccctgttcaacaccaaattcgaaggggagccagccacccacacacagccgggtgtccagctccagtctaatacctatgacctccaagagagcaacgtgaggctaaagctcacgatcgttagcacagttggctttggggaccagatcaacaaagaggacagctacaagcctatcgtggaattcatcgatgcacaattcgaggcctacctgcaggaagagctaaagatccgaagagtgctacacacctaccatgactcccgaatccatgtctgcttgtatttcattgcccccacgggtcattccctgaagtctctggacctagtgactatgaagaagctggacagtaaggtgaacatcatccccatcattgccaaagcagatgccatttcgaagagtgagctaacaaagttcaaaatcaaaatcaccagcgagcttgtcagcaacggagtccagatctatcagtttcctacagatgatgagtcggtggcagagatcaatggaaccatgaacgcccacctgccgtttgctgtcattggcagcacagaagaactgaagataggcaacaagatgatgagggcgcggcagtatccttggggcactgtgcaggttgaaaacgaggcccactgcgactttgtgaagctgcgggagatgctgattcgggtcaacatggaggatctgcgggagcagacccacacccggcactatgagctgtatcgccgctgtaagctggaggagatgggcttcaaggacaccgaccctgacagcaaacccttcagtttacaggagacatatgaggccaaaaggaacgagttcctaggggaactccagaaaaaagaagaggagatgagacagatgttcgtccagcgagtcaaagagaaagaagcggagctcaaagaggcagagaaagagctgcacgagaagtttgaccgtctgaagaaactgcaccaggacgagaagaagaaactggaggataagaagaaatccctggatgatgaagtgaatgctttcaagcaaagaaagacggcggctgagctgctccagtcccagggctcccaggctggaggctcacagactctgaagagagacaaagagaagaaaaactttttttaatcttgtcttcagcagctgcac

SEQ ID NO: 27535 - DNA, 4652 bp, Homo sapiens
  source 1..4652: mol_type = unassigned DNA
gaagaactggaactggtctggccatagggggaagcggcgcgttaaatccgccccctctccataccctactttcaaggggtgggcggtagaggggaggttggggttggagcagcggcgagggggcccctcccttgcacctccccccaccggacttggtcgcgcccgaagtgtaacactttctctttgtcggaggagctcctctgtttcctgtgcagtagctcccgttgcggcggcacccgtggcagccctggcggacgcaggagcgatggcagcgaccgatatagctcgccaggtgggtgaaggttgccgaactgtccccctggctggacatgtggggtttgacagcttgcctgaccagctggtgaataagtccgtcagccagggcttctgcttcaacatcctgtgcgtgggagagacaggtttgggcaagtccaccctcatggacaccctgttcaacaccaaattcgaaggggagccagccacccacacacagccgggtgtccagctccagtctaatacctatgacctccaagagagcaacgtgaggctaaagctcacgatcgttagcacagttggctttggggaccagatcaacaaagaggacagctacaagcctatcgtggaattcatcgatgcacaattcgaggcctacctgcaggaagagctaaagatccgaagagtgctacacacctaccatgactcccgaatccatgtctgcttgtatttcattgcccccacgggtcattccctgaagtctctggacctagtgactatgaagaagctggacagtaaggtgaacatcatccccatcattgccaaagcagatgccatttcgaagagtgagctaacaaagttcaaaatcaaaatcaccagcgagcttgtcagcaacggagtccagatctatcagtttcctacagatgatgagtcggtggcagagatcaatggaaccatgaacgcccacctgccgtttgctgtcattggcagcacagaagaactgaagataggcaacaagatgatgagggcgcggcagtatccttggggcactgtgcaggttgaaaacgaggcccactgcgactttgtgaagctgcgggagatgctgattcgggtcaacatggaggatctgcgggagcagacccacacccggcactatgagctgtatcgccgctgtaagctggaggagatgggcttcaaggacaccgaccctgacagcaaacccttcagtttacaggagacatatgaggccaaaaggaacgagttcctaggggaactccagaaaaaagaagaggagatgagacagatgttcgtccagcgagtcaaagagaaagaagcggagctcaaagaggcagagaaagagctgcacgagaagtttgaccgtctgaagaaactgcaccaggacgagaagaagaaactggaggataagaagaaatccctggatgatgaagtgaatgctttcaagcaaagaaagacggcggctgagctgctccagtcccagggctcccaggctggaggctcacagactctgaagagagacaaagagaagaaaaatttgggcttcctgtagacacccttttcctgcgcaacagagctgggcctccctttctctaatttcccccttaacatgcctggggggcatacaatccaacccgcgccctctcctctcttcctgccaaggtttatagaaacctgagaatctgagggtgatgtctggccgctggtcaagaagccaacagtcatgtggctcgcagatgcatcctgcatcccagtccccctcccagcacccccagccatcccccctgtcttcccccacatctttgccagaggtgtgacatggtcagggggcccatctgctactctttcccaccagctcccctgttccagttctggttgctgttagtttccctgaggtatttgcaaccaccatggctgggtaaccaccgatcagcacagctgtccccttggtctcctgtatcccagtcactagtcctccctggtccaccccaccctcatcctcaggagccacagccatttcttagagggtttcaaaaggacagcctttggcgccttttccttctaacctttgagtccagccctttccagttttcattcactcgaagtaactgcactcaagctgtgctcaaaatcggcaacgcatttatttacaccaagcccttcccataaaacacaactgctgaagaaaatagcagacgtttcccctctctctaactctgggtatcccacagatgcaaaagggagaataaacctgaatattattaccagcctagagtcttgaatgatagccttaccgaattcttcttgtgaggtatttcagcatctcggggggtaatttccggaagggctccatactgtcccaataaggtgaggccagtagcaggaataataaatcccactttgtaggctggaaaactgagctgtcaaaagaatcaagtgtttgggggtttgctctgatgagtcttctagttcatttggtgaatgtcatgatgatttttaacatgcattttgcatgcatcccccaataagaagagatgagactcggccggagagaagaaaaggcccttaactttctttccaatttaaggagttgagagtttaaaaatattccagccctaagtttttatcatgggtcccatctgatagtggctttgggaacctctgtgaagtagagagccctcccttgtcagggttatgaggcacagtggcctttggtgtttggccagtgacagtgtgagagatggagttgacctggcaatgatctgtggctaacatgccgtctctctgcccttcctttgcagtaatccatggctgtgtactgaatagtattccccgctacagctggactggactccatttagccttttaagccgaggttcctattttaactgacagctttcctttggggtgccaggcagcgaggccccccacccctatcctgccatgtacttcaagctcacttcttctttttgagttccgcaacttgctcctgcctcccagccccactggcactgaccatgaccacctacttctattttttttttagagtttctttttttgatcacttactttcaaagcacacagtcaaacaaggttatgccaaatttccaggcctttttgaagtattgagaaggggaaggggatttctcacttcaattatagatcataataggaagcaaaaagaaaaaaatgaaaagcaaacatatgcacgcacttttcttgttgacaaagcaagaatataggtttgctgtgtaggtttggtgctctattgattggtgagtgaccagagcaagtatgaaggtgatgctgccaaagcacaagccagtttcttgggaaaattcaagttacagtggagtatttttttgaagaccatatgcttggaggtagaaacaaaccaacgaccaaaaaaaaaaaaaaaaaaatctgctcagatactcagccagtagctcagagagatgctgagttaggcctgtcaggtctccttgggaaaggcttcatatttgcaactttgatgattctatgtccagcttcagagctgctttcccagaaattcacgcttaaacaaccaaccggtaaccaccacttccccacaccgccgcccggtaattatttgcattacaaaccggaggcgccctcatttgcatttgtgtacagattaactagttaaggcttgagaagctctgaataattcaaaagtattagacccacacagccttggagagaccttcagaaactaaggaggagttttatattaagggagacattttagtcagtaagacgatataacctacttactccgtaaggggaaatgaaggcccagagaagggaagggacttgaccgaggtcccacttctgtttcgaggcagaagccagactaattttcatgcctcctgactcccaatcagtttcacaaagggattcaatctgtttatatacgttacattcctggatacgaggtcttttgatgttcagagtaactgactagttagtattagaagaccctcgaggtttttttccacagaaaaacatctgaagatggattgggtgagggctggcaaaacgaaggcatgccgggccagctccttaacccaatgacccagtgatgctgcaaggctggaacggggtccaggagactgtgtgtaacaggtgccctaggtgacccttataatcagggaagtttggtgaacaaaaatcgaacccatgagtgaacataaattaaaaagttgatcaacctattaaaatgtgtatttcattgggtagcttttctcactgtagacagattttttccttcttcaatgaaaaggcttttaaattagtacaactgttactatttaaaaaaaaaataccctaagtactctgtttacttctggtgaaacaaaaccagtcattagaaatggtctgtgcttttattttcccagactggagtggcttttctgaaacacacacacacacacacacacacacacacacacacacacacacacacacgtacacacatccctcacttctcttaagccaagaagtttgctttccctagctgcagtgtagatggctcttgtttttgtttttttgttttaatcatttggcattcacatgtggctgttaatatgtgcttgtttttaattaaaacaagaagctttaaa

SEQ ID NO: 27536 - DNA, 2609 bp, Homo sapiens
  source 1..2609: mol_type = unassigned DNA
gaagaactggaactggtctggccatagggggaagcggcgcgttaaatccgccccctctccataccctactttcaaggggtgggcggtagaggggaggttggggttggagcagcggcgagggggcccctcccttgcacctccccccaccggacttggtcgcgcccgaagtgtaacactttctctttgtcggaggagctcctctgtttcctgtgcagtagctcccgttgcggcggcacccgtggcagccctggcggacgcaggagcgatggcagcgaccgatatagctcgccaggtgggtgaaggttgccgaactgtccccctggctggacatgtggggtttgacagcttgcctgaccagctggtgaataagtccgtcagccagggcttctgcttcaacatcctgtgcgtgggagagacaggtttgggcaagtccaccctcatggacaccctgttcaacaccaaattcgaaggggagccagccacccacacacagccgggtgtccagctccagtctaatacctatgacctccaagagagcaacgtgaggctaaagctcacgatcgttagcacagttggctttggggaccagatcaacaaagaggacagctacaagcctatcgtggaattcatcgatgcacaattcgaggcctacctgcaggaagagctaaagatccgaagagtgctacacacctaccatgactcccgaatccatgtctgcttgtatttcattgcccccacgggtcattccctgaagtctctggacctagtgactatgaagaagctggacagtaaggtgaacatcatccccatcattgccaaagcagatgccatttcgaagagtgagctaacaaagttcaaaatcaaaatcaccagcgagcttgtcagcaacggagtccagatctatcagtttcctacagatgatgagtcggtggcagagatcaatggaaccatgaacgcccacctgccgtttgctgtcattggcagcacagaagaactgaagataggcaacaagatgatgagggcgcggcagtatccttggggcactgtgcaggttgaaaacgaggcccactgcgactttgtgaagctgcgggagatgctgattcgggtcaacatggaggatctgcgggagcagacccacacccggcactatgagctgtatcgccgctgtaagctggaggagatgggcttcaaggacaccgaccctgacagcaaacccttcagtttacaggagacatatgaggccaaaaggaacgagttcctaggggaactccagaaaaaagaagaggagatgagacagatgttcgtccagcgagtcaaagagaaagaagcggagctcaaagaggcagagaaagagctgcacgagaagtttgaccgtctgaagaaactgcaccaggacgagaagaagaaactggaggataagaagaaatccctggatgatgaagtgaatgctttcaagcaaagaaagacggcggctgagctgctccagtcccagggctcccaggctggaggctcacagactctgaagagagacaaagagaagaaaaattaactctgctgtttgctgcatgctgcatgagacccagggtcctgctttttttaatcttgtcttcagcagctgcactaagtctaaaggagaagactgccattatagaagagttagggttccatattgtctcaaatcagaaatcaaccaatttcctctcccctcaaactgcaagcacacacacatacaccacaccactcaacaagtgttcatgtgtccctgtgtccaggcaagaagctctcttcctgactcacatggtattttaaatggaagtgtcttgtcctaactaacaaggcaggaaaagaaccatcagagctggaaaatggacgaaatgtaacctcagagaaacaactacaggaccactcacccaagtgtaagtgactggggcaggacacctcagctgtgggtatgaaagtactgttctgttcacaaggttttgtttgagttttatgtttttcttttaaacatttctctggttcgatgggttgactgtctacagccactgttaaacatttctgaatatgcaagagaaagtcaagtgacatttgtatcttcttcagcattcgcagaccttctatagattccagcaaagggggaaaatgtatccactatctaacacttaggtagagaagggagggggtttaagcttagtgagggcaaaattactccattccaccttccgagaccagttagggttttgagagaggtttctgctcaacctgggatctggagggagagctttgatgttggtaaatctgccttgaattcattggtttaacttgcatcaaaataccatgtgagtgtgctcattctcatatatcccctaccaccatcaccaccattctgctgttcagtgtctcttgagagagcctctttgcatgttttccagaatctgtgtgtgtttttcctttcttctcctttgttctttttgctcaaaggtgtgaccagtcattgcccctctggggctttcattctccaggagaaacatcccagaaccagcactgtttagcctgatacctttctaatgtccatgtcaattttcaataaaattcaaagaaatgctaaa

SEQ ID NO: 27537 - DNA, 4694 bp, Homo sapiens
  source 1..4694: mol_type = unassigned DNA
gaagaactggaactggtctggccatagggggaagcggcgcgttaaatccgccccctctccataccctactttcaaggggtgggcggtagaggggaggttggggttggagcagcggcgagggggcccctcccttgcacctccccccaccggacttggtcgcgcccgaagtgtaacactttctctttgtcggaggagctcctctgtttcctgtgcagtagctcccgttgcggcggcacccgtggcagccctggcggacgcaggagcgatggcagcgaccgatatagctcgccaggtgggtgaaggttgccgaactgtccccctggctggacatgtggggtttgacagcttgcctgaccagctggtgaataagtccgtcagccagggcttctgcttcaacatcctgtgcgtgggagagacaggtttgggcaagtccaccctcatggacaccctgttcaacaccaaattcgaaggggagccagccacccacacacagccgggtgtccagctccagtctaatacctatgacctccaagagagcaacgtgaggctaaagctcacgatcgttagcacagttggctttggggaccagatcaacaaagaggacagctacaagcctatcgtggaattcatcgatgcacaattcgaggcctacctgcaggaagagctaaagatccgaagagtgctacacacctaccatgactcccgaatccatgtctgcttgtatttcattgcccccacgggtcattccctgaagtctctggacctagtgactatgaagaagctggacagtaaggtgaacatcatccccatcattgccaaagcagatgccatttcgaagagtgagctaacaaagttcaaaatcaaaatcaccagcgagcttgtcagcaacggagtccagatctatcagtttcctacagatgatgagtcggtggcagagatcaatggaaccatgaacgcccacctgccgtttgctgtcattggcagcacagaagaactgaagataggcaacaagatgatgagggcgcggcagtatccttggggcactgtgcaggttgaaaacgaggcccactgcgactttgtgaagctgcgggagatgctgattcgggtcaacatggaggatctgcgggagcagacccacacccggcactatgagctgtatcgccgctgtaagctggaggagatgggcttcaaggacaccgaccctgacagcaaacccttcagtttacaggagacatatgaggccaaaaggaacgagttcctaggggaactccagaaaaaagaagaggagatgagacagatgttcgtccagcgagtcaaagagaaagaagcggagctcaaagaggcagagaaagagctgcacgagaagtttgaccgtctgaagaaactgcaccaggacgagaagaagaaactggaggataagaagaaatccctggatgatgaagtgaatgctttcaagcaaagaaagacggcggctgagctgctccagtcccagggctcccaggctggaggctcacagactctgaagagagacaaagagaagaaaaattaactctgctgtttgctgcatgctgcatgagacccagggtcctgtttgggcttcctgtagacacccttttcctgcgcaacagagctgggcctccctttctctaatttcccccttaacatgcctggggggcatacaatccaacccgcgccctctcctctcttcctgccaaggtttatagaaacctgagaatctgagggtgatgtctggccgctggtcaagaagccaacagtcatgtggctcgcagatgcatcctgcatcccagtccccctcccagcacccccagccatcccccctgtcttcccccacatctttgccagaggtgtgacatggtcagggggcccatctgctactctttcccaccagctcccctgttccagttctggttgctgttagtttccctgaggtatttgcaaccaccatggctgggtaaccaccgatcagcacagctgtccccttggtctcctgtatcccagtcactagtcctccctggtccaccccaccctcatcctcaggagccacagccatttcttagagggtttcaaaaggacagcctttggcgccttttccttctaacctttgagtccagccctttccagttttcattcactcgaagtaactgcactcaagctgtgctcaaaatcggcaacgcatttatttacaccaagcccttcccataaaacacaactgctgaagaaaatagcagacgtttcccctctctctaactctgggtatcccacagatgcaaaagggagaataaacctgaatattattaccagcctagagtcttgaatgatagccttaccgaattcttcttgtgaggtatttcagcatctcggggggtaatttccggaagggctccatactgtcccaataaggtgaggccagtagcaggaataataaatcccactttgtaggctggaaaactgagctgtcaaaagaatcaagtgtttgggggtttgctctgatgagtcttctagttcatttggtgaatgtcatgatgatttttaacatgcattttgcatgcatcccccaataagaagagatgagactcggccggagagaagaaaaggcccttaactttctttccaatttaaggagttgagagtttaaaaatattccagccctaagtttttatcatgggtcccatctgatagtggctttgggaacctctgtgaagtagagagccctcccttgtcagggttatgaggcacagtggcctttggtgtttggccagtgacagtgtgagagatggagttgacctggcaatgatctgtggctaacatgccgtctctctgcccttcctttgcagtaatccatggctgtgtactgaatagtattccccgctacagctggactggactccatttagccttttaagccgaggttcctattttaactgacagctttcctttggggtgccaggcagcgaggccccccacccctatcctgccatgtacttcaagctcacttcttctttttgagttccgcaacttgctcctgcctcccagccccactggcactgaccatgaccacctacttctattttttttttagagtttctttttttgatcacttactttcaaagcacacagtcaaacaaggttatgccaaatttccaggcctttttgaagtattgagaaggggaaggggatttctcacttcaattatagatcataataggaagcaaaaagaaaaaaatgaaaagcaaacatatgcacgcacttttcttgttgacaaagcaagaatataggtttgctgtgtaggtttggtgctctattgattggtgagtgaccagagcaagtatgaaggtgatgctgccaaagcacaagccagtttcttgggaaaattcaagttacagtggagtatttttttgaagaccatatgcttggaggtagaaacaaaccaacgaccaaaaaaaaaaaaaaaaaaatctgctcagatactcagccagtagctcagagagatgctgagttaggcctgtcaggtctccttgggaaaggcttcatatttgcaactttgatgattctatgtccagcttcagagctgctttcccagaaattcacgcttaaacaaccaaccggtaaccaccacttccccacaccgccgcccggtaattatttgcattacaaaccggaggcgccctcatttgcatttgtgtacagattaactagttaaggcttgagaagctctgaataattcaaaagtattagacccacacagccttggagagaccttcagaaactaaggaggagttttatattaagggagacattttagtcagtaagacgatataacctacttactccgtaaggggaaatgaaggcccagagaagggaagggacttgaccgaggtcccacttctgtttcgaggcagaagccagactaattttcatgcctcctgactcccaatcagtttcacaaagggattcaatctgtttatatacgttacattcctggatacgaggtcttttgatgttcagagtaactgactagttagtattagaagaccctcgaggtttttttccacagaaaaacatctgaagatggattgggtgagggctggcaaaacgaaggcatgccgggccagctccttaacccaatgacccagtgatgctgcaaggctggaacggggtccaggagactgtgtgtaacaggtgccctaggtgacccttataatcagggaagtttggtgaacaaaaatcgaacccatgagtgaacataaattaaaaagttgatcaacctattaaaatgtgtatttcattgggtagcttttctcactgtagacagattttttccttcttcaatgaaaaggcttttaaattagtacaactgttactatttaaaaaaaaaataccctaagtactctgtttacttctggtgaaacaaaaccagtcattagaaatggtctgtgcttttattttcccagactggagtggcttttctgaaacacacacacacacacacacacacacacacacacacacacacacacacacgtacacacatccctcacttctcttaagccaagaagtttgctttccctagctgcagtgtagatggctcttgtttttgtttttttgttttaatcatttggcattcacatgtggctgttaatatgtgcttgtttttaattaaaacaagaagcttt

SEQ ID NO: 27538 - DNA, 1859 bp, Homo sapiens
  source 1..1859: mol_type = unassigned DNA
gcattgcccaagagccgcagtgagcgccaccgcctccctcgctgcagctgcggccccacggctggggcgttgccgaatgaatggccgtaggagccgccgagccctccgggtccctggcaccctggccttgccgcgcccctgcgcacggctgcccgttgtgacccgggaccgcacaggcaaagaggcgcggggctggggttagcctggggcagaaggcgggtgaaggttgccgaactgtccccctggctggacatgtggggtttgacagcttgcctgaccagctggtgaataagtccgtcagccagggcttctgcttcaacatcctgtgcgtgggagagacaggtttgggcaagtccaccctcatggacaccctgttcaacaccaaattcgaaggggagccagccacccacacacagccgggtgtccagctccagtctaatacctatgacctccaagagagcaacgtgaggctaaagctcacgatcgttagcacagttggctttggggaccagatcaacaaagaggacagctacaagcctatcgtggaattcatcgatgcacaattcgaggcctacctgcaggaagagctaaagatccgaagagtgctacacacctaccatgactcccgaatccatgtctgcttgtatttcattgcccccacgggtcattccctgaagtctctggacctagtgactatgaagaagctggacagtaaggtgaacatcatccccatcattgccaaagcagatgccatttcgaagagtgagctaacaaagttcaaaatcaaaatcaccagcgagcttgtcagcaacggagtccagatctatcagtttcctacagatgatgagtcggtggcagagatcaatggaaccatgaacgcccacctgccgtttgctgtcattggcagcacagaagaactgaagataggcaacaagatgatgagggcgcggcagtatccttggggcactgtgcaggttgaaaacgaggcccactgcgactttgtgaagctgcgggagatgctgattcgggtcaacatggaggatctgcgggagcagacccacacccggcactatgagctgtatcgccgctgtaagctggaggagatgggcttcaaggacaccgaccctgacagcaaacccttcagtttacaggagacatatgaggccaaaaggaacgagttcctaggggaactccagaaaaaagaagaggagatgagacagatgttcgtccagcgagtcaaagagaaagaagcggagctcaaagaggcagagaaagagctgcacgagaagtttgaccgtctgaagaaactgcaccaggacgagaagaagaaactggaggataagaagaaatccctggatgatgaagtgaatgctttcaagcaaagaaagacggcggctgagctgctccagtcccagggctcccaggctggaggctcacagactctgaagagagacaaagagaagaaaaagtaagtagcaggctgctctggggtggtgccttctctttcctcctgctcatcctcccagggcaggacgtggcacctgaaggggctgaggactggtgaccagaggtgagctgtgggctgtcagactggttgaggtacctataactggtcccagcatccctgtggcacctttggattccctgagcttggggagttgagagtagcagaggggtgtggtcccagaggcccagcccatctgtccagcttgctcaggaaagccctgcaaactcaaggtccataggaaaggaagggaaaagaggaaaagcaaaggagagtgagagagcagaagggaagaaaaaaattagaggtgcagcaatataagagaggaacaaggccgggcacggtggctcacacc

SEQ ID NO: 27539 - DNA, 1720 bp, Homo sapiens
  source 1..1720: mol_type = unassigned DNA
agtagctcccgttgcggcggcacccgtggcagccctggcggacgcaggagcgatggcagcgaccgatatagctcgccaggtgtttggcaggaggaggcttctgctgctgggatttgaaaccgtgggtttctctgccgcctgcacagaggaaggaggccacatgctcaggaggggtgaaggttgccgaactgtccccctggctggacatgtggggtttgacagcttgcctgaccagctggtgaataagtccgtcagccagggcttctgcttcaacatcctgtgcgtgggagagacaggtttgggcaagtccaccctcatggacaccctgttcaacaccaaattcgaaggggagccagccacccacacacagccgggtgtccagctccagtctaatacctatgacctccaagagagcaacgtgaggctaaagctcacgatcgttagcacagttggctttggggaccagatcaacaaagaggacagctacaagcctatcgtggaattcatcgatgcacaattcgaggcctacctgcaggaagagctaaagatccgaagagtgctacacacctaccatgactcccgaatccatgtctgcttgtatttcattgcccccacgggtcattccctgaagtctctggacctagtgactatgaagaagctggacagtaaggtgaacatcatccccatcattgccaaagcagatgccatttcgaagagtgagctaacaaagttcaaaatcaaaatcaccagcgagcttgtcagcaacggagtccagatctatcagtttcctacagatgatgagtcggtggcagagatcaatggaaccatgaacgcccacctgccgtttgctgtcattggcagcacagaagaactgaagataggcaacaagatgatgagggcgcggcagtatccttggggcactgtgcaggttgaaaacgaggcccactgcgactttgtgaagctgcgggagatgctgattcgggtcaacatggaggatctgcgggagcagacccacacccggcactatgagctgtatcgccgctgtaagctggaggagatgggcttcaaggacaccgaccctgacagcaaacccttcagtttacaggagacatatgaggccaaaaggaacgagttcctaggggaactccagaaaaaagaagaggagatgagacagatgttcgtccagcgagtcaaagagaaagaagcggagctcaaagaggcagagaaagagctgcacgagaagtttgaccgtctgaagaaactgcaccaggacgagaagaagaaactggaggataagaagaaatccctggatgatgaagtgaatgctttcaagcaaagaaagacggcggctgagctgctccagtcccagggctcccaggctggaggctcacagactctgaagagagacaaagagaagaaaaagtaagtagcaggctgctctggggtggtgccttctctttcctcctgctcatcctcccagggcaggacgtggcacctgaaggggctgaggactggtgaccagaggtgagctgtgggctgtcagactggttgaggtacctataactggtcccagcatccctgtggcacctttggattccctgagcttggggagttgagagtagcagaggggtgtggtcccagaggcccagcccatctgtccagcttgctcaggaaagccctgcaaactcaaggtccataggaaaggaagggaaaagaggaa

SEQ ID NO: 27540 - DNA, 1617 bp, Homo sapiens
  source 1..1617: mol_type = unassigned DNA
gaagaactggaactggtctggccatagggggaagcggcgcgttaaatccgccccctctccataccctactttcaaggggtgggcggtagaggggaggttggggttggagcagcggcgagggggcccctcccttgcacctccccccaccggacttggtcgcgcccgaagtgtaacactttctctttgtcggaggagctcctctgtttcctgtgcagtagctcccgttgcggcggcacccgtggcagccctggcggacgcaggagcgatggcagcgaccgatatagctcgccaggtgggtgaaggttgccgaactgtccccctggctggacatgtggggtttgacagcttgcctgaccagctggtgaataagtccgtcagccagggcttctgcttcaacatcctgtgcgtgggagagacaggtttgggcaagtccaccctcatggacaccctgttcaacaccaaattcgaaggggagccagccacccacacacagccgggtgtccagctccagtctaatacctatgacctccaagagagcaacgtgaggctaaagctcacgatcgttagcacagttggctttggggaccagatcaacaaagaggacagctacaagcctatcgtggaattcatcgatgcacaattcgaggcctacctgcaggaagagctaaagatccgaagagtgctacacacctaccatgactcccgaatccatgtctgcttgtatttcattgcccccacgggtcattccctgaagtctctggacctagtgactatgaagaagctggacagtaaggtgaacatcatccccatcattgccaaagcagatgccatttcgaagagtgagctaacaaagttcaaaatcaaaatcaccagcgagcttgtcagcaacggagtccagatctatcagtttcctacagatgatgagtcggtggcagagatcaatggaaccatgaacgcccacctgccgtttgctgtcattggcagcacagaagaactgaagataggcaacaagatgatgagggcgcggcagtatccttggggcactgtgcaggttgaaaacgaggcccactgcgactttgtgaagctgcgggagatgctgattcgggtcaacatggaggatctgcgggagcagacccacacccggcactatgagctgtatcgccgctgtaagctggaggagatgggcttcaaggacaccgaccctgacagcaaacccttcagtttacaggagacatatgaggccaaaaggaacgagttcctaggggaactccagaaaaaagaagaggagatgagacagatgttcgtccagcgagtcaaagagaaagaagcggagctcaaagaggcagagaaagagctgcacgagaagtttgaccgtctgaagaaactgcaccaggacgagaagaagaaactggaggataagaagaaatccctggatgatgaagtgaatgctttcaagcaaagaaagacggcggctgagctgctccagtcccagggctcccaggctggaggctcacagactctgaagagagacaaagagaagaaaaattaactctgctgtttgctgcatgctgcatgagacccagggtcctgctttttttaatcttgtcttcagcagct

SEQ ID NO: 27541 - DNA, 1066 bp, Homo sapiens
  source 1..1066: mol_type = unassigned DNA
gaagaactggaactggtctggccatagggggaagcggcgcgttaaatccgccccctctccataccctactttcaaggggtgggcggtagaggggaggttggggttggagcagcggcgagggggcccctcccttgcacctccccccaccggacttggtcgcgcccgaagtgtaacactttctctttgtcggaggagctcctctgtttcctgtgcagtagctcccgttgcggcggcacccgtggcagccctggcggacgcaggagcgatggcagcgaccgatatagctcgccaggtgggtgaaggttgccgaactgtccccctggctggacatgtggggtttgacagcttgcctgaccagctggtgaataagtccgtcagccagggcttctgcttcaacatcctgtgcgtgggagagacaggtttgggcaagtccaccctcatggacaccctgttcaacaccaaattcgaaggggagccagccacccacacacagccgggtgtccagctccagtctaatacctatgacctccaagagagcaacgtgaggctaaagctcacgatcgttagcacagttggctttggggaccagatcaacaaagaggacagctacaagcctatcgtggaattcatcgatgcacaattcgaggcctacctgcaggaagagctaaagatccgaagagtgctacacacctaccatgactcccgaatccatgtctgcttgtatttcattgcccccacgggtcattccctgaagtctctggacctagtgactatgaagaagctggacagtaaggtgaacatcatccccatcattgccaaagcagatgccatttcgaagagtgagctaacaaagttcaaaatcaaaatcaccagcgagcttgtcagcaacggagtccagatctatcagtttcctacagatgatgagtcggtggcagagatcaatggaaccatgaacgcccacctgccgtttgctgtcattggcagcacagaagaactgaagataggcaacaagatgatgagggcgcggcagtatccttggggcactgtgcagggctcctcccaagtc

SEQ ID NO: 27542 - DNA, 2889 bp, Homo sapiens
  source 1..2889: mol_type = unassigned DNA
gcggcggggctccggctgcgctcgtggccgggccgggcggggaggccggtcccgcgggcgggggcaggggcggctccgcggcttctcccgccgccgccgccaaggggagtttccaggaagtggccatattggatccattcagccgcagccgcccgggcggagcgcgtcccgcagccggctggtccctgtcgctgcccctgcgctcgtcccagcccacccgcccggtgcggagctcgccatggcggccaccgacctggagcgcttctcgaatgcagagccagagccccggagcctctccctgggcggccatgtgggtttcgacagcctccccgaccagctggtcagcaagtcggtcactcagggcttcagcttcaacatcctctgtgtgggggagaccggcattggcaaatccacactgatgaacacactcttcaacacgaccttcgagactgaggaagccagtcaccatgaggcatgcgtgcgcctgcggccccagacctatgacctccaggagagcaacgtgcagctcaagctgaccattgtggatgccgtgggctttggggatcagatcaataaggatgagagttacaggcccatagttgactacatcgatgcgcagtttgaaaattatctgcaggaggagctgaagatccgccgctcgctcttcgactaccatgacacaaggatccacgtttgcctctacttcatcacgcccacagggcactccctgaagtctctagatctagtgaccatgaagaaactagacagcaaggtgaacattattcccatcatcgccaaggctgacaccatctccaagagcgagctccacaagttcaagatcaagatcatgggcgagttggtcagcaatggggtccagatctaccagttccccacggatgatgaggctgttgcagagattaacgcagtcatgaatgcacatctgccctttgccgtggtgggcagcaccgaggaggtgaaggtggggaacaagctggtccgagcacggcagtacccctggggagtggtgcaggtggagaatgagaatcactgcgacttcgtgaagctgcgggagatgttgatccgggtgaacatggaagacctccgcgagcagacccacagccggcactacgagctctaccggcgctgcaagttggaggagatgggctttcaggacagcgatggtgacagccagcccttcagcctacaagagacatacgaggccaagaggaaggagttcctaagtgagctgcagaggaaggaggaagagatgaggcagatgtttgtcaacaaagtgaaggagacagagctggagctgaaggagaaggaaagggagctccatgagaagtttgagcacctgaagcgggtccaccaggaggagaagcgcaaggtggaggaaaagcgccgggaactggaggaggagaccaacgccttcaatcgccggaaggctgcggtggaggccctgcagtcgcaggccttgcacgccacctcgcagcagcccctgaggaaggacaaggacaagaagaacagatcagatataggagcacaccagccgggcatgagcctctccagctctaaggtgatgatgaccaaggccagtgtggagcccttgaactgcagcagctggtggcccgccatacagtgctgcagctgcctggtcagggatgcgacgtggagggaaggattcctctgaggcagcagctccaacacatggggccagctcaggaccaccagggcatggaactggagaccatggtttttaatgttagaacagaaaacgccatacttttcctatatcaatgatcaaaagtgcaaacaatttaaatttccatcagggaacatcaaatgttgcccaacccttttcattcctatccatggctccgtaaggggcttgaggcttaatgcccatcctgtggccaagctgagcttccactccgggaccaaaaaaaaaaaaaagtctgctttgtgacatcatcgttatgagcggaaagtacctagatgacaatgtttccattctgaaaaatagaaacatactattcaagaccaaggtagcagaaaagttacttgtatctgcttatcataagacgaaactctgcaacttggcaacggtggccagttttcgtaatgaaacagtctttagtaatttaatcttcatgcttcataacaaaccaaaaccccatgagatttccacattgcataattttgccttactaacagaatcatatccttaaggatgaccatcattcccccaactaaaacaaatacaaactaatgtatgatatttttttaagtgccagatcaatatggtctaaagcttcaataaggattgtgtgtaggtgaataaagacagctaagtgaatgtgtgtaaagtgtagcaaaagcagacagatatttatgtacagtattcatagaatggaaagttaaatatttttgcagtgtgtatttaaaagagaaactcaccataatagtgccgtctaaaaatctttgtaaagttaatttaatgtcctttagaagtgggagtctggtggaactgtgttggatttaagataccttttcactcttccgtatgtcatgagccttgtgcgtcacctcactgtggtgcatgtgcaagggcgtgtgcacgcctgtgctttgccatcccatgttgtaaacagctgttccaaaggcacaaacgagtttagggtagactctgtaaacacctccttactcactatagtcaagaagtccagcggcgtcccaatatagaggtcccagtgcagtctgtccagaatagccagctccatcctcagcagctcattcggggaatagtcagagccatagtgctttgtgaagtcttttacttgtggaataaactgtaaaaagaaaataaagaggccaaagccctacatcatg

SEQ ID NO: 27543 - DNA, 4270 bp, Homo sapiens
  source 1..4270: mol_type = unassigned DNA
tgctcgttggttgcacaaggagccgaaggctggtcccttgcccgggaaggccgcctggccggacgcgcgggtcccgccggggttcccgccttagctccggccggagcatcaggtggggcccaagacacccgcagactaggctgccgcggcctctcccggatccgacgggtctcccgcagcttgtccacactctgaatgcagagccagagccccggagcctctccctgggcggccatgtgggtttcgacagcctccccgaccagctggtcagcaagtcggtcactcagggcttcagcttcaacatcctctgtgtgggggagaccggcattggcaaatccacactgatgaacacactcttcaacacgaccttcgagactgaggaagccagtcaccatgaggcatgcgtgcgcctgcggccccagacctatgacctccaggagagcaacgtgcagctcaagctgaccattgtggatgccgtgggctttggggatcagatcaataaggatgagagttacaggcccatagttgactacatcgatgcgcagtttgaaaattatctgcaggaggagctgaagatccgccgctcgctcttcgactaccatgacacaaggatccacgtttgcctctacttcatcacgcccacagggcactccctgaagtctctagatctagtgaccatgaagaaactagacagcaaggtgaacattattcccatcatcgccaaggctgacaccatctccaagagcgagctccacaagttcaagatcaagatcatgggcgagttggtcagcaatggggtccagatctaccagttccccacggatgatgaggctgttgcagagattaacgcagtcatgaatgcacatctgccctttgccgtggtgggcagcaccgaggaggtgaaggtggggaacaagctggtccgagcacggcagtacccctggggagtggtgcaggtggagaatgagaatcactgcgacttcgtgaagctgcgggagatgttgatccgggtgaacatggaagacctccgcgagcagacccacagccggcactacgagctctaccggcgctgcaagttggaggagatgggctttcaggacagcgatggtgacagccagcccttcagcctacaagagacatacgaggccaagaggaaggagttcctaagtgagctgcagaggaaggaggaagagatgaggcagatgtttgtcaacaaagtgaaggagacagagctggagctgaaggagaaggaaagggagctccatgagaagtttgagcacctgaagcgggtccaccaggaggagaagcgcaaggtggaggaaaagcgccgggaactggaggaggagaccaacgccttcaatcgccggaaggctgcggtggaggccctgcagtcgcaggccttgcacgccacctcgcagcagcccctgaggaaggacaaggacaagaagaattaacgcacgcacagacttacatgtcaagagtggactttagactttcatgtgttaagttgcttgagttacaccttgtgacccttctcccataacatggtgtgaggacggactgggagccggtacagactccagtgtttacagccttgctttcctcccaccgaccctggccccaggctgccccgggcctggcgggccacccctctctatgcaaacacgtaaaagccatgaatgctggaatccaaaactgacgaggtttatttttttcagagccagtggctggtcttccatttacagtgtcactattccctgacggagctgttatgtgccgctctagcgaaggccccagccgggatgctaggcctaattgttcagcgtggagatggcaactcacgtggtgccctaggtgcagctgcgtggtctggtatacatgctgcaaaattcacccagttcccctcattttaatttttctaacctacagcttaattttaataactttaaaacacttctaaatatttattttggcaccagcgtcaagacaaataatatcctctcccattattttcataagtaacacagattccctgatttttaaaaactaaaaatacagctaaacctttcttatgtataaagtatgcctatcatatacagggagaggtgggtaataaacttcctgtaatgacagtgtttggcatttctttatggatggaattggaacatgaacaagaccatgtccagcgtttttactgtgaatgtaaatggaacagcagcccaaagctgttgtctgtgccccagaggtgctacctgtagacagggaccaactccatgtgtgtgtgttaagtgtttgactccaattaagactcccaagcaaatcctgcatattccaaatgtaaagagtactcagtgggaaaaaggttgttacctcaaagtcattgcttctttcctggctgggtcacagggtgaagagatgaaggtgtctgatgtatatagacaattagggaaaaatgagcggcaaaggagctttccccttcagctgcactctaaaggggaacattttaaggaagtactagcagctttgactcttctatgctcctgttggtttacaagccaccaagaatgtcagtgttgagaatacggcctggtaaaatgggagatgtaaaatgactaaatgaaaggaagggtagttttaatgttgaagcaccgtgctgggcactggagctacccagaggaatgcacaacgctcccctcaaggagctcacagtctagcctactccctggctggaagcctcaggaagacgtgctaatttattgtggaattggtagtttgcttttcatgcccctgtcttccttctcatgaccatttccccctttctgtctggcttgcattattgatttccaggaccaagtcctggcttcctcctgccttcctgagatgatgttctgctcagggagaagtggaggggtgagctgtgtgtgtccaccgaggcacggccaggaagaggcagcctttacctgtgaggggctccatgctccagcagcagagcaggttctagtgacaattcaactttttatgctatgaccaggggtggatctaaattttatggggctgaaagcttgaattatttagaaagacttctttaagaaaaacaatgttaatataaaattaggtacagggtcttggaaggggccctgaagattaagcttccttagcgtcacaataagtccgtatctggttgcaattgaaaactgatgcttcagtgagggtatctaaaaaggtaaactggcatatccagggcaaatgtgggctgccaatggctcatctctagggtaattttatgtctgaaagtgtatgcagttgggtcagagcatgacctttaagatagcctctctcagctaacatatttatgaagatgaggcctggtgacccagcaggttcattggatacataagaaatgagaattcctggttcatgggccaacctaggactctggagtatgcagacttggccattcgtccattgtggcctgcgggtcgcaccccaggcatactgaaaggccatactcgtggctggctgcctgcgggcctaagccttcccaggatcttcaggacacttgacagacttgtgttttctggtctgagctgcctccacaggtccctccagcaagcctcactgcacctctcccctgctgtttgtgtttggaattttgtcttctttagctgagaccaaattaaaccttggtgcataaagtgagcttaaaacttgccactgtttagtaagttagcccccatagaatgtgaccctgtctgcagagtctcatttacccctctttttctcattgtcatttgttggctttattagggctgtcttacaggatcatgttggcatttactatcatgtctttatcataaaccatgtttgtttgaggtagaagaatcaccatataattcgttgcccaaattgggactattgagagagaaaggggatgctattaattacaccagatcaaaaggcataaaccagacctgtcccaggccgatgtggaaatatgttctttctagttgtgggtaccctgatctaggtggtttgtaattgtgcattactgactgcatatgtttgtgtatgtgtaaatgtgggctccctgttaagtggggctcatggatacgaggcctgaggaagtgtggcttgctagtctgttacgttaacatgcttttctaaaattgcttcacgtgttaattcatttactcctgcattcattgactgtttttgttcttttccattcactttgtacttatttttttcattaaattttgcatttattttg

SEQ ID NO: 27544 - DNA, 4390 bp, Homo sapiens
  source 1..4390: mol_type = unassigned DNA
gcagctggcacctcccgcctcgccgcggagacccccggccgtccaagcggcggggctccggctgcgctcgtggccgggccgggcggggaggccggtcccgcgggcgggggcaggggcggctccgcggcttctcccgccgccgccgccaaggggagtttccaggaagtggccatattggatccattcagccgcagccgcccgggcggagcgcgtcccgcagccggctggtccctgtcgctgcccctgcgctcgtcccagcccacccgcccggtgcggagctcgccatggcggccaccgacctggagcgcttctcgaatgcagagccagagccccggagcctctccctgggcggccatgtgggtttcgacagcctccccgaccagctggtcagcaagtcggtcactcagggcttcagcttcaacatcctctgtgtgggggagaccggcattggcaaatccacactgatgaacacactcttcaacacgaccttcgagactgaggaagccagtcaccatgaggcatgcgtgcgcctgcggccccagacctatgacctccaggagagcaacgtgcagctcaagctgaccattgtggatgccgtgggctttggggatcagatcaataaggatgagagttacaggcccatagttgactacatcgatgcgcagtttgaaaattatctgcaggaggagctgaagatccgccgctcgctcttcgactaccatgacacaaggatccacgtttgcctctacttcatcacgcccacagggcactccctgaagtctctagatctagtgaccatgaagaaactagacagcaaggtgaacattattcccatcatcgccaaggctgacaccatctccaagagcgagctccacaagttcaagatcaagatcatgggcgagttggtcagcaatggggtccagatctaccagttccccacggatgatgaggctgttgcagagattaacgcagtcatgaatgcacatctgccctttgccgtggtgggcagcaccgaggaggtgaaggtggggaacaagctggtccgagcacggcagtacccctggggagtggtgcaggtggagaatgagaatcactgcgacttcgtgaagctgcgggagatgttgatccgggtgaacatggaagacctccgcgagcagacccacagccggcactacgagctctaccggcgctgcaagttggaggagatgggctttcaggacagcgatggtgacagccagcccttcagcctacaagagacatacgaggccaagaggaaggagttcctaagtgagctgcagaggaaggaggaagagatgaggcagatgtttgtcaacaaagtgaaggagacagagctggagctgaaggagaaggaaagggagctccatgagaagtttgagcacctgaagcgggtccaccaggaggagaagcgcaaggtggaggaaaagcgccgggaactggaggaggagaccaacgccttcaatcgccggaaggctgcggtggaggccctgcagtcgcaggccttgcacgccacctcgcagcagcccctgaggaaggacaaggacaagaagaattaacgcacgcacagacttacatgtcaagagtggactttagactttcatgtgttaagttgcttgagttacaccttgtgacccttctcccataacatggtgtgaggacggactgggagccggtacagactccagtgtttacagccttgctttcctcccaccgaccctggccccaggctgccccgggcctggcgggccacccctctctatgcaaacacgtaaaagccatgaatgctggaatccaaaactgacgaggtttatttttttcagagccagtggctggtcttccatttacagtgtcactattccctgacggagctgttatgtgccgctctagcgaaggccccagccgggatgctaggcctaattgttcagcgtggagatggcaactcacgtggtgccctaggtgcagctgcgtggtctggtatacatgctgcaaaattcacccagttcccctcattttaatttttctaacctacagcttaattttaataactttaaaacacttctaaatatttattttggcaccagcgtcaagacaaataatatcctctcccattattttcataagtaacacagattccctgatttttaaaaactaaaaatacagctaaacctttcttatgtataaagtatgcctatcatatacagggagaggtgggtaataaacttcctgtaatgacagtgtttggcatttctttatggatggaattggaacatgaacaagaccatgtccagcgtttttactgtgaatgtaaatggaacagcagcccaaagctgttgtctgtgccccagaggtgctacctgtagacagggaccaactccatgtgtgtgtgttaagtgtttgactccaattaagactcccaagcaaatcctgcatattccaaatgtaaagagtactcagtgggaaaaaggttgttacctcaaagtcattgcttctttcctggctgggtcacagggtgaagagatgaaggtgtctgatgtatatagacaattagggaaaaatgagcggcaaaggagctttccccttcagctgcactctaaaggggaacattttaaggaagtactagcagctttgactcttctatgctcctgttggtttacaagccaccaagaatgtcagtgttgagaatacggcctggtaaaatgggagatgtaaaatgactaaatgaaaggaagggtagttttaatgttgaagcaccgtgctgggcactggagctacccagaggaatgcacaacgctcccctcaaggagctcacagtctagcctactccctggctggaagcctcaggaagacgtgctaatttattgtggaattggtagtttgcttttcatgcccctgtcttccttctcatgaccatttccccctttctgtctggcttgcattattgatttccaggaccaagtcctggcttcctcctgccttcctgagatgatgttctgctcagggagaagtggaggggtgagctgtgtgtgtccaccgaggcacggccaggaagaggcagcctttacctgtgaggggctccatgctccagcagcagagcaggttctagtgacaattcaactttttatgctatgaccaggggtggatctaaattttatggggctgaaagcttgaattatttagaaagacttctttaagaaaaacaatgttaatataaaattaggtacagggtcttggaaggggccctgaagattaagcttccttagcgtcacaataagtccgtatctggttgcaattgaaaactgatgcttcagtgagggtatctaaaaaggtaaactggcatatccagggcaaatgtgggctgccaatggctcatctctagggtaattttatgtctgaaagtgtatgcagttgggtcagagcatgacctttaagatagcctctctcagctaacatatttatgaagatgaggcctggtgacccagcaggttcattggatacataagaaatgagaattcctggttcatgggccaacctaggactctggagtatgcagacttggccattcgtccattgtggcctgcgggtcgcaccccaggcatactgaaaggccatactcgtggctggctgcctgcgggcctaagccttcccaggatcttcaggacacttgacagacttgtgttttctggtctgagctgcctccacaggtccctccagcaagcctcactgcacctctcccctgctgtttgtgtttggaattttgtcttctttagctgagaccaaattaaaccttggtgcataaagtgagcttaaaacttgccactgtttagtaagttagcccccatagaatgtgaccctgtctgcagagtctcatttacccctctttttctcattgtcatttgttggctttattagggctgtcttacaggatcatgttggcatttactatcatgtctttatcataaaccatgtttgtttgaggtagaagaatcaccatataattcgttgcccaaattgggactattgagagagaaaggggatgctattaattacaccagatcaaaaggcataaaccagacctgtcccaggccgatgtggaaatatgttctttctagttgtgggtaccctgatctaggtggtttgtaattgtgcattactgactgcatatgtttgtgtatgtgtaaatgtgggctccctgttaagtggggctcatggatacgaggcctgaggaagtgtggcttgctagtctgttacgttaacatgcttttctaaaattgcttcacgtgttaattcatttactcctgcattcattgactgtttttgttcttttccattcactttgtacttatttttttcattaaattttgcatttattttg

SEQ ID NO: 27545 - DNA, 1726 bp, Homo sapiens
  source 1..1726: mol_type = unassigned DNA
ggcggagcgcgtcccgcagccggctggtccctgtcgctgcccctgcgctcgtcccagcccacccgcccggtgcggagctcgccatggcggccaccgacctggagcgcttctcgaatgcagagccagagccccggagcctctccctgggcggccatgtgggtttcgacagcctccccgaccagctggtcagcaagtcggtcactcagggcttcagcttcaacatcctctgtgtgggggagaccggcattggcaaatccacactgatgaacacactcttcaacacgaccttcgagactgaggaagccagtcaccatgaggcatgcgtgcgcctgcggccccagacctatgacctccaggagagcaacgtgcagctcaagctgaccattgtggatgccgtgggctttggggatcagatcaataaggatgagagttacaggcccatagttgactacatcgatgcgcagtttgaaaattatctgcaggaggagctgaagatccgccgctcgctcttcgactaccatgacacaaggatccacgtttgcctctacttcatcacgcccacagggcactccctgaagtctctagatctagtgaccatgaagaaactagacagcaaggtgaacattattcccatcatcgccaaggctgacaccatctccaagagcgagctccacaagttcaagatcaagatcatgggcgagttggtcagcaatggggtccagatctaccagttccccacggatgatgaggctgttgcagagattaacgcagtcatgaatgcacatctgccctttgccgtggtgggcagcaccgaggaggtgaaggtggggaacaagctggtccgagcacggcagtacccctggggagtggtgcaggtggagaatgagaatcactgcgacttcgtgaagctgcgggagatgttgatccgggtgaacatggaagacctccgcgagcagacccacagccggcactacgagctctaccggcgctgcaagttggaggagatgggctttcaggacagcgatggtgacagccagcccttcagcctacaagagacatacgaggccaagaggaaggagttcctaagtgagctgcagaggaaggaggaagagatgaggcagatgtttgtcaacaaagtgaaggagacagagctggagctgaaggagaaggaaagggagctccatgagaagtttgagcacctgaagcgggtccaccaggaggagaagcgcaaggtggaggaaaagcgccgggaactggaggaggagaccaacgccttcaatcgccggaaggctgcggtggaggccctgcagtcgcaggccttgcacgccacctcgcagcagcccctgaggaaggacaaggacaagaagaaagccagtggctggtcttccatttacagtgtcactattccctgacggagctgttatgtgccgctctagcgaaggccccagccgggatgctaggcctaattgttcagcgtggagatggcaactcacgtggtgccctaggtgcagctgcgtggtctggtatacatgctgcaaaattcacccagttcccctcattttaatttttctaacctacagcttaattttaataactttaaaacacttctaaatatttattttggcaccagcgtcaagacaaataatatcctctcccattattttcataagtaacacagattccctgatttttaaaaactaaaaatacagctaaacctttcttatgt

SEQ ID NO: 27546 - DNA, 4453 bp, Homo sapiens
  source 1..4453: mol_type = unassigned DNA
tgcctctgtcactgcagactaatgggacggaggggggtgacttctcagggttcctcctgggcaggtgctccggaaccttttctcagcacgctggcctggggcacggccgttcctcctgcccagccacgttggggtacagggtgaagaagggctggggccagcccaggacagaggaaggcgaggcaggcacgcaggaactgggctttttaaacccttaagcccaaggaaatcgtagcatcgcgggacagggaaaatgaaagactttggaagtcgtcaggaatttgactctgtgagttggtttccaagagtctaagttaagcatctccaagtggatattaaaaaggagcagcaagcctcggggcggcgggggctggaggaggtggagagaggaggctgccggaagccgcactcgggacctctgcagccaccgaccagaccgggcggccgggactctgggactctcgcaggcagacccggtggtctgccggactcctcggggcccacttcgggccctctctcctgcctcctatttttggatttctctcctttgctccctttttcctcccgttttgaagagacaatgctacttcagtttggagcacaaacatatgatcagcacatggaaatgtggtaattcggatgcattcgtgattgcaacagattgaagaaattagaccagacaaagagtgtttttagaggaggaggaggaggaggaggaggctgagagagggagggcgacgggggtgagaaaggggaggccgcctctgagcgggacgccgggactcccgccgctgctaaatatatccgtaggaatggagagggaccggatctcagccttgaaaagatcttttgaggtcgaggaggtcgagacacccaactccaccccaccccggagggtccagactcccctactccgagccactgtggccagctccacccagaaattccaggacctgggcgtgaagaactcagaaccctcggcccgccatgtggactccctaagccaacgctcccccaaggcgtccctgcggagggtggagctctcgggccccaaggcggccgagccggtgtcccggcgcactgagctgtccattgacatctcgtccaagcaggtggagaacgccggggccatcggcccgtcccggttcgggctcaagagggccgaggtgttgggccacaagacgccagaaccggcccctcggaggacggagatcaccatcgtcaaaccccaggagtcagcccaccggaggatggagccccctgcctccaaggtccccgaggtgcccactgcccctgccaccgacgcagcccccaagagggtggagatccagatgcccaagcctgctgaggcgcccaccgcccccagcccagcccagaccttggagaattcagagcctgcccctgtgtctcagctgcagagcaggctggagcccaagccccagccccctgtggctgaggctacaccccggagccaggaggccactgaggcggctcccagctgcgttggcgacatggccgacacccccagagatgccgggctcaagcaggcgcctgcatcacggaacgagaaggccccggtggacttcggctacgtggggattgactccatcctggagcagatgcgccggaaggccatgaagcagggcttcgagttcaacatcatggtggtcgggcagagcggcttgggtaaatccaccttaatcaacaccctcttcaaatccaaaatcagccggaagtcggtgcagcccacctcagaggagcgcatccccaagaccatcgagatcaagtccatcacgcacgatattgaggagaaaggcgtccggatgaagctgacagtgattgacacaccagggttcggggaccacatcaacaacgagaactgctggcagcccatcatgaagttcatcaatgaccagtacgagaaatacctgcaggaggaggtcaacatcaaccgcaagaagcgcatcccggacacccgcgtccactgctgcctctacttcatccccgccaccggccactccctcaggcccctggacatcgagtttatgaaacgcctgagcaaggtggtcaacatcgtccctgtcatcgccaaggcggacacactcaccctggaggagagggtccacttcaaacagcggatcaccgcagacctgctgtccaacggcatcgacgtgtacccccagaaggaatttgatgaggactcggaggaccggctggtgaacgagaagttccgggagatgatcccatttgctgtggtgggcagtgaccacgagtaccaggtcaacggcaagaggatccttgggaggaagaccaagtggggtaccatcgaagttgaaaacaccacacactgtgagtttgcctacctgcgggaccttctcatcaggacgcacatgcagaacatcaaggacatcaccagcagcatccacttcgaggcgtaccgtgtgaagcgcctcaacgagggcagcagcgccatggccaacggcatggaggagaaggagccagaagccccggagatgtagacgccaccctgcccacccccgggatcctgcccccaagtcatttccgtccccccccaggccctcccaccaccccattttattttatatgattttctccatttgtcatcgttccccaccccttcgacatgctgccaggaaacaagggaaggggcctccctccgagtgagtcagtgatgaggccgcggcctccccgaggttgtggggaggctgcactggagccacaggcaggggtgagagcacccactgaattgacatgaccctctgtccccaggcctggctccccgagggctcagaagagcagcttcggtgtgcagatcatccgtctgtgtggggttctcagtgccggaggccttggggtgggggccaggcctcgcacttgcagaggagcccagtgggctgcacgctcccctccatccccatcggccctgtcccctggagtgtgtcagagcccaggggagaatgcagcccaccaggagcacctggaccccctgcccgccacatggtgtggccatcactcagcccctacccctgccctgctcctaagggtagaaaactccagggtcccctgccaccgactgcccagccactccaagccccctggcagctgcccctcctggagcagaaagtgcctttatctcagccatccgcagactgcttggccagatgcggggacaggctggaatgagggaggcgtcttcatctccctgccatccccctctcacgccacccccgcccccaccgggctgcaggtgctgctgatgcgctgggatctgattgaggataaaaaggaaggagagatgacccctaccccctcatcccccagttttgaaaaggtctaagcaagtgagtctggtggaggagctgagggagggagccatggaaggtgccagaaggaaggttggcgggggcacgtgtgggccgtggcttgggctggtcagagtggcgtgagctgcccggcgcctgccctgcccaagtgaccagggaagtgtgtgtgtgtccatgtgtatgcgtgtccgtctgtctgtctagtgtctgggtttggcccaagactgggctgtagttacattaatgcccagccagccacccctgccactcacccttcctggcccaggccttgctgactctctgagctggggaggtgggaggccaggcgagcctgactctgttgatctacccgtgcctgggcccctcccctcagagcccatggtaacgaacccctagaaaggagagaacgggcgtcaggggtgcacagtccacagctgaagagcaaggtttcgtggcagcacggcccggcccctcaccctctgtccccacgaggggacccatgggggctgtctttgcagggcacagatgaccaaagtcccttcctgcttcctgttacctgtcttgctcctggggagaaagaggggcctgatgagactccactcaggtgcacacatcaccaggtgcatctgcaggcaccgggctggctgcttgcagccaggagaaggtcagcgagaaggagtgtatgagtgtgagtgtgtgtgcatggaagttggggcactgggcgtctgactccctccccacccaagagaggaaggacccctcaccacccccactggtgagacagtttactttgccaacttgccatgtttttgccaaaaccaagattttgaaggaaatgagtggccagcgccagggcccaggccatgtggcctgcccagcctcaatgtcacttggtggcggggtggggtgggggtgggcagcagcatcccagccttgagatgcttcactttccttctctgtaaccagactttgaaaaattgttcgtttcatcaggctctgttcctcaatggccttttgctacgtgcctcccgagaaatttgtctttttgtataaatgacaaagtgttgaaaatgtatttcctgaaataaatgtttcaaatgcagaaaccc

SEQ ID NO: 27547 - DNA, 1470 bp, Homo sapiens
  source 1..1470: mol_type = unassigned DNA
actccagacggcgggccgccccctcttcccgccttcctactaccggcccaggattagcgccctgggagcgcgcgccccgctgcctcgccgccacactttcctgggagcggcggccacggaggcaccatgaagaagtcttactcaggaggcacgcggacctccagtggccggctccggaggcttggtgactccagtggcccagccttgaaaagatcttttgaggtcgaggaggtcgagacacccaactccaccccaccccggagggtccagactcccctactccgagccactgtggccagctccacccagaaattccaggacctgggcgtgaagaactcagaaccctcggcccgccatgtggactccctaagccaacgctcccccaaggcgtccctgcggagggtggagctctcgggccccaaggcggccgagccggtgtcccggcgcactgagctgtccattgacatctcgtccaagcaggtggagaacgccggggccatcggcccgtcccggttcgggctcaagagggccgaggtgttgggccacaagacgccagaaccggcccctcggaggacggagatcaccatcgtcaaaccccaggagtcagcccaccggaggatggagccccctgcctccaaggtccccgaggtgcccactgcccctgccaccgacgcagcccccaagagggtggagatccagatgcccaagcctgctgaggcgcccaccgcccccagcccagcccagaccttggagaattcagagcctgcccctgtgtctcagctgcagagcaggctggagcccaagccccagccccctgtggctgaggctacaccccggagccaggaggccactgaggcggctcccagctgcgttggcgacatggccgacacccccagagatgccgggctcaagcaggcgcctgcatcacggaacgagaaggccccggtggacttcggctacgtggggattgactccatcctggagcagatgcgccggaaggccatgaagcagggcttcgagttcaacatcatggtggtcgggcagagcggcttgggtaaatccaccttaatcaacaccctcttcaaatccaaaatcagccggaagtcggtgcagcccacctcagaggagcgcatccccaagaccatcgagatcaagtccatcacgcacgatattgaggagaaaggcgtccggatgaagctgacagtgattgacacaccagggttcggggaccacatcaacaacgagaactgctggcagcccatcatgaagttcatcaatgaccagtacgagaaatacctgcaggaggaggtcaacatcaaccgcaagaagcgcatcccggacacccgcgtccactgctgcctctacttcatccccgccaccggccactcgctgcccctcctggagcagaaagtgcctttatctcagccatccgcagactgcttggccagatgcggggacaggctggaatga

SEQ ID NO: 27548 - DNA, 3982 bp, Homo sapiens
  source 1..3982: mol_type = unassigned DNA
ccccaggcctggccttgacaggcgggcggagcagccagtgcgagacagggaggccggtgcgggtgcgggaacctgatccgcccgggaggcgggggcggggcgggggcgcagcgcgcggggaggggccggcgcccgccttcctcccccattcattcagctgagccagggggcctaggggctcctccggcggctagctctgcactgcaggagcgcgggcgcggcgccccagccagcgcgcagggcccgggccccgccgggggcgcttcctcgccgctgccctccgcgcgacccgctgcccaccagccatcatgtcggaccccgcggtcaacgcgcagctggatgggatcatttcggacttcgaagccttgaaaagatcttttgaggtcgaggaggtcgagacacccaactccaccccaccccggagggtccagactcccctactccgagccactgtggccagctccacccagaaattccaggacctgggcgtgaagaactcagaaccctcggcccgccatgtggactccctaagccaacgctcccccaaggcgtccctgcggagggtggagctctcgggccccaaggcggccgagccggtgtcccggcgcactgagctgtccattgacatctcgtccaagcaggtggagaacgccggggccatcggcccgtcccggttcgggctcaagagggccgaggtgttgggccacaagacgccagaaccggcccctcggaggacggagatcaccatcgtcaaaccccaggagtcagcccaccggaggatggagccccctgcctccaaggtccccgaggtgcccactgcccctgccaccgacgcagcccccaagagggtggagatccagatgcccaagcctgctgaggcgcccaccgcccccagcccagcccagaccttggagaattcagagcctgcccctgtgtctcagctgcagagcaggctggagcccaagccccagccccctgtggctgaggctacaccccggagccaggaggccactgaggcggctcccagctgcgttggcgacatggccgacacccccagagatgccgggctcaagcaggcgcctgcatcacggaacgagaaggccccggtggacttcggctacgtggggattgactccatcctggagcagatgcgccggaaggccatgaagcagggcttcgagttcaacatcatggtggtcgggcagagcggcttgggtaaatccaccttaatcaacaccctcttcaaatccaaaatcagccggaagtcggtgcagcccacctcagaggagcgcatccccaagaccatcgagatcaagtccatcacgcacgatattgaggagaaaggcgtccggatgaagctgacagtgattgacacaccagggttcggggaccacatcaacaacgagaactgctggcagcccatcatgaagttcatcaatgaccagtacgagaaatacctgcaggaggaggtcaacatcaaccgcaagaagcgcatcccggacacccgcgtccactgctgcctctacttcatccccgccaccggccactccctcaggcccctggacatcgagtttatgaaacgcctgagcaaggtggtcaacatcgtccctgtcatcgccaaggcggacacactcaccctggaggagagggtccacttcaaacagcggatcaccgcagacctgctgtccaacggcatcgacgtgtacccccagaaggaatttgatgaggactcggaggaccggctggtgaacgagaagttccgggagatgatcccatttgctgtggtgggcagtgaccacgagtaccaggtcaacggcaagaggatccttgggaggaagaccaagtggggtaccatcgaagttgaaaacaccacacactgtgagtttgcctacctgcgggaccttctcatcaggacgcacatgcagaacatcaaggacatcaccagcagcatccacttcgaggcgtaccgtgtgaagcgcctcaacgagggcagcagcgccatggccaacggcatggaggagaaggagccagaagccccggagatgtagacgccaccctgcccacccccgggatcctgcccccaagtcatttccgtccccccccaggccctcccaccaccccattttattttatatgattttctccatttgtcatcgttccccaccccttcgacatgctgccaggaaacaagggaaggggcctccctccgagtgagtcagtgatgaggccgcggcctccccgaggttgtggggaggctgcactggagccacaggcaggggtgagagcacccactgaattgacatgaccctctgtccccaggcctggctccccgagggctcagaagagcagcttcggtgtgcagatcatccgtctgtgtggggttctcagtgccggaggccttggggtgggggccaggcctcgcacttgcagaggagcccagtgggctgcacgctcccctccatccccatcggccctgtcccctggagtgtgtcagagcccaggggagaatgcagcccaccaggagcacctggaccccctgcccgccacatggtgtggccatcactcagcccctacccctgccctgctcctaagggtagaaaactccagggtcccctgccaccgactgcccagccactccaagccccctggcagctgcccctcctggagcagaaagtgcctttatctcagccatccgcagactgcttggccagatgcggggacaggctggaatgagggaggcgtcttcatctccctgccatccccctctcacgccacccccgcccccaccgggctgcaggtgctgctgatgcgctgggatctgattgaggataaaaaggaaggagagatgacccctaccccctcatcccccagttttgaaaaggtctaagcaagtgagtctggtggaggagctgagggagggagccatggaaggtgccagaaggaaggttggcgggggcacgtgtgggccgtggcttgggctggtcagagtggcgtgagctgcccggcgcctgccctgcccaagtgaccagggaagtgtgtgtgtgtccatgtgtatgcgtgtccgtctgtctgtctagtgtctgggtttggcccaagactgggctgtagttacattaatgcccagccagccacccctgccactcacccttcctggcccaggccttgctgactctctgagctggggaggtgggaggccaggcgagcctgactctgttgatctacccgtgcctgggcccctcccctcagagcccatggtaacgaacccctagaaaggagagaacgggcgtcaggggtgcacagtccacagctgaagagcaaggtttcgtggcagcacggcccggcccctcaccctctgtccccacgaggggacccatgggggctgtctttgcagggcacagatgaccaaagtcccttcctgcttcctgttacctgtcttgctcctggggagaaagaggggcctgatgagactccactcaggtgcacacatcaccaggtgcatctgcaggcaccgggctggctgcttgcagccaggagaaggtcagcgagaaggagtgtatgagtgtgagtgtgtgtgcatggaagttggggcactgggcgtctgactccctccccacccaagagaggaaggacccctcaccacccccactggtgagacagtttactttgccaacttgccatgtttttgccaaaaccaagattttgaaggaaatgagtggccagcgccagggcccaggccatgtggcctgcccagcctcaatgtcacttggtggcggggtggggtgggggtgggcagcagcatcccagccttgagatgcttcactttccttctctgtaaccagactttgaaaaattgttcgtttcatcaggctctgttcctcaatggccttttgctacgtgcctcccgagaaatttgtctttttgtataaatgacaaagtgttgaaaatgtatttcctgaaataaatgtttcaaatgcagaaaccc

SEQ ID NO: 27549 - DNA, 3821 bp, Homo sapiens
  source 1..3821: mol_type = unassigned DNA
actccagacggcgggccgccccctcttcccgccttcctactaccggcccaggattagcgccctgggagcgcgcgccccgctgcctcgccgccacactttcctgggagcggcggccacggaggcaccatgaagaagtcttactcaggaggcacgcggacctccagtggccggctccggaggcttggtgactccagtggcccagccttgaaaagatcttttgaggtcgaggaggtcgagacacccaactccaccccaccccggagggtccagactcccctactccgagccactgtggccagctccacccagaaattccaggacctgggcgtgaagaactcagaaccctcggcccgccatgtggactccctaagccaacgctcccccaaggcgtccctgcggagggtggagctctcgggccccaaggcggccgagccggtgtcccggcgcactgagctgtccattgacatctcgtccaagcaggtggagaacgccggggccatcggcccgtcccggttcgggctcaagagggccgaggtgttgggccacaagacgccagaaccggcccctcggaggacggagatcaccatcgtcaaaccccaggagtcagcccaccggaggatggagccccctgcctccaaggtccccgaggtgcccactgcccctgccaccgacgcagcccccaagagggtggagatccagatgcccaagcctgctgaggcgcccaccgcccccagcccagcccagaccttggagaattcagagcctgcccctgtgtctcagctgcagagcaggctggagcccaagccccagccccctgtggctgaggctacaccccggagccaggaggccactgaggcggctcccagctgcgttggcgacatggccgacacccccagagatgccgggctcaagcaggcgcctgcatcacggaacgagaaggccccggtggacttcggctacgtggggattgactccatcctggagcagatgcgccggaaggccatgaagcagggcttcgagttcaacatcatggtggtcgggcagagcggcttgggtaaatccaccttaatcaacaccctcttcaaatccaaaatcagccggaagtcggtgcagcccacctcagaggagcgcatccccaagaccatcgagatcaagtccatcacgcacgatattgaggagaaaggcgtccggatgaagctgacagtgattgacacaccagggttcggggaccacatcaacaacgagaactgctggcagcccatcatgaagttcatcaatgaccagtacgagaaatacctgcaggaggaggtcaacatcaaccgcaagaagcgcatcccggacacccgcgtccactgctgcctctacttcatccccgccaccggccactccctcaggcccctggacatcgagtttatgaaacgcctgagcaaggtggtcaacatcgtccctgtcatcgccaaggcggacacactcaccctggaggagagggtccacttcaaacagcggatcaccgcagacctgctgtccaacggcatcgacgtgtacccccagaaggaatttgatgaggactcggaggaccggctggtgaacgagaagttccgggagatgatcccatttgctgtggtgggcagtgaccacgagtaccaggtcaacggcaagaggatccttgggaggaagaccaagtggggtaccatcgaagttgaaaacaccacacactgtgagtttgcctacctgcgggaccttctcatcaggacgcacatgcagaacatcaaggacatcaccagcagcatccacttcgaggcgtaccgtgtgaagcgcctcaacgagggcagcagcgccatggccaacggcatggaggagaaggagccagaagccccggagatgtagacgccaccctgcccacccccgggatcctgcccccaagtcatttccgtccccccccaggccctcccaccaccccattttattttatatgattttctccatttgtcatcgttccccaccccttcgacatgctgccaggaaacaagggaaggggcctccctccgagtgagtcagtgatgaggccgcggcctccccgaggttgtggggaggctgcactggagccacaggcaggggtgagagcacccactgaattgacatgaccctctgtccccaggcctggctccccgagggctcagaagagcagcttcggtgtgcagatcatccgtctgtgtggggttctcagtgccggaggccttggggtgggggccaggcctcgcacttgcagaggagcccagtgggctgcacgctcccctccatccccatcggccctgtcccctggagtgtgtcagagcccaggggagaatgcagcccaccaggagcacctggaccccctgcccgccacatggtgtggccatcactcagcccctacccctgccctgctcctaagggtagaaaactccagggtcccctgccaccgactgcccagccactccaagccccctggcagctgcccctcctggagcagaaagtgcctttatctcagccatccgcagactgcttggccagatgcggggacaggctggaatgagggaggcgtcttcatctccctgccatccccctctcacgccacccccgcccccaccgggctgcaggtgctgctgatgcgctgggatctgattgaggataaaaaggaaggagagatgacccctaccccctcatcccccagttttgaaaaggtctaagcaagtgagtctggtggaggagctgagggagggagccatggaaggtgccagaaggaaggttggcgggggcacgtgtgggccgtggcttgggctggtcagagtggcgtgagctgcccggcgcctgccctgcccaagtgaccagggaagtgtgtgtgtgtccatgtgtatgcgtgtccgtctgtctgtctagtgtctgggtttggcccaagactgggctgtagttacattaatgcccagccagccacccctgccactcacccttcctggcccaggccttgctgactctctgagctggggaggtgggaggccaggcgagcctgactctgttgatctacccgtgcctgggcccctcccctcagagcccatggtaacgaacccctagaaaggagagaacgggcgtcaggggtgcacagtccacagctgaagagcaaggtttcgtggcagcacggcccggcccctcaccctctgtccccacgaggggacccatgggggctgtctttgcagggcacagatgaccaaagtcccttcctgcttcctgttacctgtcttgctcctggggagaaagaggggcctgatgagactccactcaggtgcacacatcaccaggtgcatctgcaggcaccgggctggctgcttgcagccaggagaaggtcagcgagaaggagtgtatgagtgtgagtgtgtgtgcatggaagttggggcactgggcgtctgactccctccccacccaagagaggaaggacccctcaccacccccactggtgagacagtttactttgccaacttgccatgtttttgccaaaaccaagattttgaaggaaatgagtggccagcgccagggcccaggccatgtggcctgcccagcctcaatgtcacttggtggcggggtggggtgggggtgggcagcagcatcccagccttgagatgcttcactttccttctctgtaaccagactttgaaaaattgttcgtttcatcaggctctgttcctcaatggccttttgctacgtgcctcccgagaaatttgtctttttgtataaatgacaaagtgttgaaaatgtatttcctgaaataaatgtttcaaatgcagaaaccc

SEQ ID NO: 27550 - DNA, 3635 bp, Homo sapiens
  source 1..3635: mol_type = unassigned DNA
agttaccatcgtggggagactgtctggacgcagagagcaggctctgtgtgggagcggggagggcaagccctggttgcgaggcagggcttccccaggattcagcagggatctgaaggactttgcaggcacccagggagataggagaggaggagggagcagccctggccggacactgtcctcctagcattgcctgcatcagggactcactcagctttaagaagcccctttgtgggggacagggagcatctgttagtttataggacctgaagtgcccccatgggctcaagtttctgggaaggcctgcaggtggccgtagggctgccgcaggggtgctggccccagggtctggattcaggggagcctgcagagggagggcagctggaggctgctccagtgtgcattgttacgaggcaaagtaaggagactgctgggcccacgctgggccggggtggatggaggcaaggaagtcttcgccggggcaagggcaccagctgtagatgccggcagctttctcctggacacgggcctggaaggctgacagggtgtggtgagtgccaccggctcccctgccgtggcctggtcagtggcttcacaggcctccgtgggcaggaggaggatgaccttgcattctgcttggccaccattggcagtgacagacaagccactgaggcggctcccagctgcgttggcgacatggccgacacccccagagatgccgggctcaagcaggcgcctgcatcacggaacgagaaggccccggtggacttcggctacgtggggattgactccatcctggagcagatgcgccggaaggccatgaagcagggcttcgagttcaacatcatggtggtcgggcagagcggcttgggtaaatccaccttaatcaacaccctcttcaaatccaaaatcagccggaagtcggtgcagcccacctcagaggagcgcatccccaagaccatcgagatcaagtccatcacgcacgatattgaggagaaaggcgtccggatgaagctgacagtgattgacacaccagggttcggggaccacatcaacaacgagaactgctggcagcccatcatgaagttcatcaatgaccagtacgagaaatacctgcaggaggaggtcaacatcaaccgcaagaagcgcatcccggacacccgcgtccactgctgcctctacttcatccccgccaccggccactccctcaggcccctggacatcgagtttatgaaacgcctgagcaaggtggtcaacatcgtccctgtcatcgccaaggcggacacactcaccctggaggagagggtccacttcaaacagcggatcaccgcagacctgctgtccaacggcatcgacgtgtacccccagaaggaatttgatgaggactcggaggaccggctggtgaacgagaagttccgggagatgatcccatttgctgtggtgggcagtgaccacgagtaccaggtcaacggcaagaggatccttgggaggaagaccaagtggggtaccatcgaagttgaaaacaccacacactgtgagtttgcctacctgcgggaccttctcatcaggacgcacatgcagaacatcaaggacatcaccagcagcatccacttcgaggcgtaccgtgtgaagcgcctcaacgagggcagcagcgccatggccaacggcatggaggagaaggagccagaagccccggagatgtagacgccaccctgcccacccccgggatcctgcccccaagtcatttccgtccccccccaggccctcccaccaccccattttattttatatgattttctccatttgtcatcgttccccaccccttcgacatgctgccaggaaacaagggaaggggcctccctccgagtgagtcagtgatgaggccgcggcctccccgaggttgtggggaggctgcactggagccacaggcaggggtgagagcacccactgaattgacatgaccctctgtccccaggcctggctccccgagggctcagaagagcagcttcggtgtgcagatcatccgtctgtgtggggttctcagtgccggaggccttggggtgggggccaggcctcgcacttgcagaggagcccagtgggctgcacgctcccctccatccccatcggccctgtcccctggagtgtgtcagagcccaggggagaatgcagcccaccaggagcacctggaccccctgcccgccacatggtgtggccatcactcagcccctacccctgccctgctcctaagggtagaaaactccagggtcccctgccaccgactgcccagccactccaagccccctggcagctgcccctcctggagcagaaagtgcctttatctcagccatccgcagactgcttggccagatgcggggacaggctggaatgagggaggcgtcttcatctccctgccatccccctctcacgccacccccgcccccaccgggctgcaggtgctgctgatgcgctgggatctgattgaggataaaaaggaaggagagatgacccctaccccctcatcccccagttttgaaaaggtctaagcaagtgagtctggtggaggagctgagggagggagccatggaaggtgccagaaggaaggttggcgggggcacgtgtgggccgtggcttgggctggtcagagtggcgtgagctgcccggcgcctgccctgcccaagtgaccagggaagtgtgtgtgtgtccatgtgtatgcgtgtccgtctgtctgtctagtgtctgggtttggcccaagactgggctgtagttacattaatgcccagccagccacccctgccactcacccttcctggcccaggccttgctgactctctgagctggggaggtgggaggccaggcgagcctgactctgttgatctacccgtgcctgggcccctcccctcagagcccatggtaacgaacccctagaaaggagagaacgggcgtcaggggtgcacagtccacagctgaagagcaaggtttcgtggcagcacggcccggcccctcaccctctgtccccacgaggggacccatgggggctgtctttgcagggcacagatgaccaaagtcccttcctgcttcctgttacctgtcttgctcctggggagaaagaggggcctgatgagactccactcaggtgcacacatcaccaggtgcatctgcaggcaccgggctggctgcttgcagccaggagaaggtcagcgagaaggagtgtatgagtgtgagtgtgtgtgcatggaagttggggcactgggcgtctgactccctccccacccaagagaggaaggacccctcaccacccccactggtgagacagtttactttgccaacttgccatgtttttgccaaaaccaagattttgaaggaaatgagtggccagcgccagggcccaggccatgtggcctgcccagcctcaatgtcacttggtggcggggtggggtgggggtgggcagcagcatcccagccttgagatgcttcactttccttctctgtaaccagactttgaaaaattgttcgtttcatcaggctctgttcctcaatggccttttgctacgtgcctcccgagaaatttgtctttttgtataaatgacaaagtgttgaaaatgtatttcctgaaataaatgtttcaaatgcagaaaccc

SEQ ID NO: 27551 - DNA, 3935 bp, Homo sapiens
  source 1..3935: mol_type = unassigned DNA
gtcagtatggaggaggcggaccttgagggagagtaggaattggattgcaagaggaaggagagccttctggccagcagcagccagcagcagtgggggaggctggaatgagctggctggagagggggctggggcataaggaggggcctgcctgtgaagatcatatgggccaggctgcggagggccaggcatgcccgccgggagtgcagctggtccacgggaagcatctggagtggctgggaatgggcgcaggagcagcgccgtgggagcacaggtctctttcccggggcggctcacctggtgtcttggttcctgcaagccttgaaaagatcttttgaggtcgaggaggtcgagacacccaactccaccccaccccggagggtccagactcccctactccgagccactgtggccagctccacccagaaattccaggacctgggcgtgaagaactcagaaccctcggcccgccatgtggactccctaagccaacgctcccccaaggcgtccctgcggagggtggagctctcgggccccaaggcggccgagccggtgtcccggcgcactgagctgtccattgacatctcgtccaagcaggtggagaacgccggggccatcggcccgtcccggttcgggctcaagagggccgaggtgttgggccacaagacgccagaaccggcccctcggaggacggagatcaccatcgtcaaaccccaggagtcagcccaccggaggatggagccccctgcctccaaggtccccgaggtgcccactgcccctgccaccgacgcagcccccaagagggtggagatccagatgcccaagcctgctgaggcgcccaccgcccccagcccagcccagaccttggagaattcagagcctgcccctgtgtctcagctgcagagcaggctggagcccaagccccagccccctgtggctgaggctacaccccggagccaggaggccactgaggcggctcccagctgcgttggcgacatggccgacacccccagagatgccgggctcaagcaggcgcctgcatcacggaacgagaaggccccggtggacttcggctacgtggggattgactccatcctggagcagatgcgccggaaggccatgaagcagggcttcgagttcaacatcatggtggtcgggcagagcggcttgggtaaatccaccttaatcaacaccctcttcaaatccaaaatcagccggaagtcggtgcagcccacctcagaggagcgcatccccaagaccatcgagatcaagtccatcacgcacgatattgaggagaaaggcgtccggatgaagctgacagtgattgacacaccagggttcggggaccacatcaacaacgagaactgctggcagcccatcatgaagttcatcaatgaccagtacgagaaatacctgcaggaggaggtcaacatcaaccgcaagaagcgcatcccggacacccgcgtccactgctgcctctacttcatccccgccaccggccactccctcaggcccctggacatcgagtttatgaaacgcctgagcaaggtggtcaacatcgtccctgtcatcgccaaggcggacacactcaccctggaggagagggtccacttcaaacagcggatcaccgcagacctgctgtccaacggcatcgacgtgtacccccagaaggaatttgatgaggactcggaggaccggctggtgaacgagaagttccgggagatgatcccatttgctgtggtgggcagtgaccacgagtaccaggtcaacggcaagaggatccttgggaggaagaccaagtggggtaccatcgaagttgaaaacaccacacactgtgagtttgcctacctgcgggaccttctcatcaggacgcacatgcagaacatcaaggacatcaccagcagcatccacttcgaggcgtaccgtgtgaagcgcctcaacgagggcagcagcgccatggccaacggcatggaggagaaggagccagaagccccggagatgtagacgccaccctgcccacccccgggatcctgcccccaagtcatttccgtccccccccaggccctcccaccaccccattttattttatatgattttctccatttgtcatcgttccccaccccttcgacatgctgccaggaaacaagggaaggggcctccctccgagtgagtcagtgatgaggccgcggcctccccgaggttgtggggaggctgcactggagccacaggcaggggtgagagcacccactgaattgacatgaccctctgtccccaggcctggctccccgagggctcagaagagcagcttcggtgtgcagatcatccgtctgtgtggggttctcagtgccggaggccttggggtgggggccaggcctcgcacttgcagaggagcccagtgggctgcacgctcccctccatccccatcggccctgtcccctggagtgtgtcagagcccaggggagaatgcagcccaccaggagcacctggaccccctgcccgccacatggtgtggccatcactcagcccctacccctgccctgctcctaagggtagaaaactccagggtcccctgccaccgactgcccagccactccaagccccctggcagctgcccctcctggagcagaaagtgcctttatctcagccatccgcagactgcttggccagatgcggggacaggctggaatgagggaggcgtcttcatctccctgccatccccctctcacgccacccccgcccccaccgggctgcaggtgctgctgatgcgctgggatctgattgaggataaaaaggaaggagagatgacccctaccccctcatcccccagttttgaaaaggtctaagcaagtgagtctggtggaggagctgagggagggagccatggaaggtgccagaaggaaggttggcgggggcacgtgtgggccgtggcttgggctggtcagagtggcgtgagctgcccggcgcctgccctgcccaagtgaccagggaagtgtgtgtgtgtccatgtgtatgcgtgtccgtctgtctgtctagtgtctgggtttggcccaagactgggctgtagttacattaatgcccagccagccacccctgccactcacccttcctggcccaggccttgctgactctctgagctggggaggtgggaggccaggcgagcctgactctgttgatctacccgtgcctgggcccctcccctcagagcccatggtaacgaacccctagaaaggagagaacgggcgtcaggggtgcacagtccacagctgaagagcaaggtttcgtggcagcacggcccggcccctcaccctctgtccccacgaggggacccatgggggctgtctttgcagggcacagatgaccaaagtcccttcctgcttcctgttacctgtcttgctcctggggagaaagaggggcctgatgagactccactcaggtgcacacatcaccaggtgcatctgcaggcaccgggctggctgcttgcagccaggagaaggtcagcgagaaggagtgtatgagtgtgagtgtgtgtgcatggaagttggggcactgggcgtctgactccctccccacccaagagaggaaggacccctcaccacccccactggtgagacagtttactttgccaacttgccatgtttttgccaaaaccaagattttgaaggaaatgagtggccagcgccagggcccaggccatgtggcctgcccagcctcaatgtcacttggtggcggggtggggtgggggtgggcagcagcatcccagccttgagatgcttcactttccttctctgtaaccagactttgaaaaattgttcgtttcatcaggctctgttcctcaatggccttttgctacgtgcctcccgagaaatttgtctttttgtataaatgacaaagtgttgaaaatgtatttcctgaaataaatgtttcaaatgcagaaaccc

SEQ ID NO: 27552 - DNA, 3230 bp, Homo sapiens
  source 1..3230: mol_type = unassigned DNA
acttgggttcagaggtcgtggcactgagatgggtctggcagatcccagcgtccaggcccagcccctatagtgtcagctccctcctctggggacccccttgcttgtgcccctctgggtcccagcacatcccaggcctgcagggagggggagaggaagagactgactcactggccaggtcccccaggggctggagaggctggagaggcaggagctggatcagatctgaatccagaggctctcggaggaagagctcaggccactgaggcggctcccagctgcgttggcgacatggccgacacccccagagatgccgggctcaagcaggcgcctgcatcacggaacgagaaggccccggtggacttcggctacgtggggattgactccatcctggagcagatgcgccggaaggccatgaagcagggcttcgagttcaacatcatggtggtcgggcagagcggcttgggtaaatccaccttaatcaacaccctcttcaaatccaaaatcagccggaagtcggtgcagcccacctcagaggagcgcatccccaagaccatcgagatcaagtccatcacgcacgatattgaggagaaaggcgtccggatgaagctgacagtgattgacacaccagggttcggggaccacatcaacaacgagaactgctggcagcccatcatgaagttcatcaatgaccagtacgagaaatacctgcaggaggaggtcaacatcaaccgcaagaagcgcatcccggacacccgcgtccactgctgcctctacttcatccccgccaccggccactccctcaggcccctggacatcgagtttatgaaacgcctgagcaaggtggtcaacatcgtccctgtcatcgccaaggcggacacactcaccctggaggagagggtccacttcaaacagcggatcaccgcagacctgctgtccaacggcatcgacgtgtacccccagaaggaatttgatgaggactcggaggaccggctggtgaacgagaagttccgggagatgatcccatttgctgtggtgggcagtgaccacgagtaccaggtcaacggcaagaggatccttgggaggaagaccaagtggggtaccatcgaagttgaaaacaccacacactgtgagtttgcctacctgcgggaccttctcatcaggacgcacatgcagaacatcaaggacatcaccagcagcatccacttcgaggcgtaccgtgtgaagcgcctcaacgagggcagcagcgccatggccaacggcatggaggagaaggagccagaagccccggagatgtagacgccaccctgcccacccccgggatcctgcccccaagtcatttccgtccccccccaggccctcccaccaccccattttattttatatgattttctccatttgtcatcgttccccaccccttcgacatgctgccaggaaacaagggaaggggcctccctccgagtgagtcagtgatgaggccgcggcctccccgaggttgtggggaggctgcactggagccacaggcaggggtgagagcacccactgaattgacatgaccctctgtccccaggcctggctccccgagggctcagaagagcagcttcggtgtgcagatcatccgtctgtgtggggttctcagtgccggaggccttggggtgggggccaggcctcgcacttgcagaggagcccagtgggctgcacgctcccctccatccccatcggccctgtcccctggagtgtgtcagagcccaggggagaatgcagcccaccaggagcacctggaccccctgcccgccacatggtgtggccatcactcagcccctacccctgccctgctcctaagggtagaaaactccagggtcccctgccaccgactgcccagccactccaagccccctggcagctgcccctcctggagcagaaagtgcctttatctcagccatccgcagactgcttggccagatgcggggacaggctggaatgagggaggcgtcttcatctccctgccatccccctctcacgccacccccgcccccaccgggctgcaggtgctgctgatgcgctgggatctgattgaggataaaaaggaaggagagatgacccctaccccctcatcccccagttttgaaaaggtctaagcaagtgagtctggtggaggagctgagggagggagccatggaaggtgccagaaggaaggttggcgggggcacgtgtgggccgtggcttgggctggtcagagtggcgtgagctgcccggcgcctgccctgcccaagtgaccagggaagtgtgtgtgtgtccatgtgtatgcgtgtccgtctgtctgtctagtgtctgggtttggcccaagactgggctgtagttacattaatgcccagccagccacccctgccactcacccttcctggcccaggccttgctgactctctgagctggggaggtgggaggccaggcgagcctgactctgttgatctacccgtgcctgggcccctcccctcagagcccatggtaacgaacccctagaaaggagagaacgggcgtcaggggtgcacagtccacagctgaagagcaaggtttcgtggcagcacggcccggcccctcaccctctgtccccacgaggggacccatgggggctgtctttgcagggcacagatgaccaaagtcccttcctgcttcctgttacctgtcttgctcctggggagaaagaggggcctgatgagactccactcaggtgcacacatcaccaggtgcatctgcaggcaccgggctggctgcttgcagccaggagaaggtcagcgagaaggagtgtatgagtgtgagtgtgtgtgcatggaagttggggcactgggcgtctgactccctccccacccaagagaggaaggacccctcaccacccccactggtgagacagtttactttgccaacttgccatgtttttgccaaaaccaagattttgaaggaaatgagtggccagcgccagggcccaggccatgtggcctgcccagcctcaatgtcacttggtggcggggtggggtgggggtgggcagcagcatcccagccttgagatgcttcactttccttctctgtaaccagactttgaaaaattgttcgtttcatcaggctctgttcctcaatggccttttgctacgtgcctcccgagaaatttgtctttttgtataaatgacaaagtgttgaaaatgtatttcctgaaataaatgtttcaaatgcagaaaccc

SEQ ID NO: 27553 - DNA, 3996 bp, Homo sapiens
  source 1..3996: mol_type = unassigned DNA
actgggcggcccttagacccaggctgcctgctgtctctggcaggaactcaagtcgctggtcatcctcagagcggtgttggcccggggccttcagtggcctttgtgtctgggtgagaggaaccctggatggccactctgccctgagtgtgtgggtccccagaagtgctgggttagggggcacggagggccagaaagtcccctttggagcgctggactctctcgctgactcctaccccaccccggcctggggtttcagagaaggggtccaggcaggagtgtcatcttttctcaatggggatgtggcttcagtctctgtccaggaggcacgcggacctccagtggccggctccggaggcttggtgactccagtggcccagccttgaaaagatcttttgaggtcgaggaggtcgagacacccaactccaccccaccccggagggtccagactcccctactccgagccactgtggccagctccacccagaaattccaggacctgggcgtgaagaactcagaaccctcggcccgccatgtggactccctaagccaacgctcccccaaggcgtccctgcggagggtggagctctcgggccccaaggcggccgagccggtgtcccggcgcactgagctgtccattgacatctcgtccaagcaggtggagaacgccggggccatcggcccgtcccggttcgggctcaagagggccgaggtgttgggccacaagacgccagaaccggcccctcggaggacggagatcaccatcgtcaaaccccaggagtcagcccaccggaggatggagccccctgcctccaaggtccccgaggtgcccactgcccctgccaccgacgcagcccccaagagggtggagatccagatgcccaagcctgctgaggcgcccaccgcccccagcccagcccagaccttggagaattcagagcctgcccctgtgtctcagctgcagagcaggctggagcccaagccccagccccctgtggctgaggctacaccccggagccaggaggccactgaggcggctcccagctgcgttggcgacatggccgacacccccagagatgccgggctcaagcaggcgcctgcatcacggaacgagaaggccccggtggacttcggctacgtggggattgactccatcctggagcagatgcgccggaaggccatgaagcagggcttcgagttcaacatcatggtggtcgggcagagcggcttgggtaaatccaccttaatcaacaccctcttcaaatccaaaatcagccggaagtcggtgcagcccacctcagaggagcgcatccccaagaccatcgagatcaagtccatcacgcacgatattgaggagaaaggcgtccggatgaagctgacagtgattgacacaccagggttcggggaccacatcaacaacgagaactgctggcagcccatcatgaagttcatcaatgaccagtacgagaaatacctgcaggaggaggtcaacatcaaccgcaagaagcgcatcccggacacccgcgtccactgctgcctctacttcatccccgccaccggccactccctcaggcccctggacatcgagtttatgaaacgcctgagcaaggtggtcaacatcgtccctgtcatcgccaaggcggacacactcaccctggaggagagggtccacttcaaacagcggatcaccgcagacctgctgtccaacggcatcgacgtgtacccccagaaggaatttgatgaggactcggaggaccggctggtgaacgagaagttccgggagatgatcccatttgctgtggtgggcagtgaccacgagtaccaggtcaacggcaagaggatccttgggaggaagaccaagtggggtaccatcgaagttgaaaacaccacacactgtgagtttgcctacctgcgggaccttctcatcaggacgcacatgcagaacatcaaggacatcaccagcagcatccacttcgaggcgtaccgtgtgaagcgcctcaacgagggcagcagcgccatggccaacggcatggaggagaaggagccagaagccccggagatgtagacgccaccctgcccacccccgggatcctgcccccaagtcatttccgtccccccccaggccctcccaccaccccattttattttatatgattttctccatttgtcatcgttccccaccccttcgacatgctgccaggaaacaagggaaggggcctccctccgagtgagtcagtgatgaggccgcggcctccccgaggttgtggggaggctgcactggagccacaggcaggggtgagagcacccactgaattgacatgaccctctgtccccaggcctggctccccgagggctcagaagagcagcttcggtgtgcagatcatccgtctgtgtggggttctcagtgccggaggccttggggtgggggccaggcctcgcacttgcagaggagcccagtgggctgcacgctcccctccatccccatcggccctgtcccctggagtgtgtcagagcccaggggagaatgcagcccaccaggagcacctggaccccctgcccgccacatggtgtggccatcactcagcccctacccctgccctgctcctaagggtagaaaactccagggtcccctgccaccgactgcccagccactccaagccccctggcagctgcccctcctggagcagaaagtgcctttatctcagccatccgcagactgcttggccagatgcggggacaggctggaatgagggaggcgtcttcatctccctgccatccccctctcacgccacccccgcccccaccgggctgcaggtgctgctgatgcgctgggatctgattgaggataaaaaggaaggagagatgacccctaccccctcatcccccagttttgaaaaggtctaagcaagtgagtctggtggaggagctgagggagggagccatggaaggtgccagaaggaaggttggcgggggcacgtgtgggccgtggcttgggctggtcagagtggcgtgagctgcccggcgcctgccctgcccaagtgaccagggaagtgtgtgtgtgtccatgtgtatgcgtgtccgtctgtctgtctagtgtctgggtttggcccaagactgggctgtagttacattaatgcccagccagccacccctgccactcacccttcctggcccaggccttgctgactctctgagctggggaggtgggaggccaggcgagcctgactctgttgatctacccgtgcctgggcccctcccctcagagcccatggtaacgaacccctagaaaggagagaacgggcgtcaggggtgcacagtccacagctgaagagcaaggtttcgtggcagcacggcccggcccctcaccctctgtccccacgaggggacccatgggggctgtctttgcagggcacagatgaccaaagtcccttcctgcttcctgttacctgtcttgctcctggggagaaagaggggcctgatgagactccactcaggtgcacacatcaccaggtgcatctgcaggcaccgggctggctgcttgcagccaggagaaggtcagcgagaaggagtgtatgagtgtgagtgtgtgtgcatggaagttggggcactgggcgtctgactccctccccacccaagagaggaaggacccctcaccacccccactggtgagacagtttactttgccaacttgccatgtttttgccaaaaccaagattttgaaggaaatgagtggccagcgccagggcccaggccatgtggcctgcccagcctcaatgtcacttggtggcggggtggggtgggggtgggcagcagcatcccagccttgagatgcttcactttccttctctgtaaccagactttgaaaaattgttcgtttcatcaggctctgttcctcaatggccttttgctacgtgcctcccgagaaatttgtctttttgtataaatgacaaagtgttgaaaatgtatttcctgaaataaatgtttcaaatgcagaaaccc

SEQ ID NO: 27554 - DNA, 3023 bp, Homo sapiens
  source 1..3023: mol_type = unassigned DNA
atggctggtgctggatgcacagggacgtggtcctggctctgggggacagccactgaggcggctcccagctgcgttggcgacatggccgacacccccagagatgccgggctcaagcaggcgcctgcatcacggaacgagaaggccccggtggacttcggctacgtggggattgactccatcctggagcagatgcgccggaaggccatgaagcagggcttcgagttcaacatcatggtggtcgggcagagcggcttgggtaaatccaccttaatcaacaccctcttcaaatccaaaatcagccggaagtcggtgcagcccacctcagaggagcgcatccccaagaccatcgagatcaagtccatcacgcacgatattgaggagaaaggcgtccggatgaagctgacagtgattgacacaccagggttcggggaccacatcaacaacgagaactgctggcagcccatcatgaagttcatcaatgaccagtacgagaaatacctgcaggaggaggtcaacatcaaccgcaagaagcgcatcccggacacccgcgtccactgctgcctctacttcatccccgccaccggccactccctcaggcccctggacatcgagtttatgaaacgcctgagcaaggtggtcaacatcgtccctgtcatcgccaaggcggacacactcaccctggaggagagggtccacttcaaacagcggatcaccgcagacctgctgtccaacggcatcgacgtgtacccccagaaggaatttgatgaggactcggaggaccggctggtgaacgagaagttccgggagatgatcccatttgctgtggtgggcagtgaccacgagtaccaggtcaacggcaagaggatccttgggaggaagaccaagtggggtaccatcgaagttgaaaacaccacacactgtgagtttgcctacctgcgggaccttctcatcaggacgcacatgcagaacatcaaggacatcaccagcagcatccacttcgaggcgtaccgtgtgaagcgcctcaacgagggcagcagcgccatggccaacggcatggaggagaaggagccagaagccccggagatgtagacgccaccctgcccacccccgggatcctgcccccaagtcatttccgtccccccccaggccctcccaccaccccattttattttatatgattttctccatttgtcatcgttccccaccccttcgacatgctgccaggaaacaagggaaggggcctccctccgagtgagtcagtgatgaggccgcggcctccccgaggttgtggggaggctgcactggagccacaggcaggggtgagagcacccactgaattgacatgaccctctgtccccaggcctggctccccgagggctcagaagagcagcttcggtgtgcagatcatccgtctgtgtggggttctcagtgccggaggccttggggtgggggccaggcctcgcacttgcagaggagcccagtgggctgcacgctcccctccatccccatcggccctgtcccctggagtgtgtcagagcccaggggagaatgcagcccaccaggagcacctggaccccctgcccgccacatggtgtggccatcactcagcccctacccctgccctgctcctaagggtagaaaactccagggtcccctgccaccgactgcccagccactccaagccccctggcagctgcccctcctggagcagaaagtgcctttatctcagccatccgcagactgcttggccagatgcggggacaggctggaatgagggaggcgtcttcatctccctgccatccccctctcacgccacccccgcccccaccgggctgcaggtgctgctgatgcgctgggatctgattgaggataaaaaggaaggagagatgacccctaccccctcatcccccagttttgaaaaggtctaagcaagtgagtctggtggaggagctgagggagggagccatggaaggtgccagaaggaaggttggcgggggcacgtgtgggccgtggcttgggctggtcagagtggcgtgagctgcccggcgcctgccctgcccaagtgaccagggaagtgtgtgtgtgtccatgtgtatgcgtgtccgtctgtctgtctagtgtctgggtttggcccaagactgggctgtagttacattaatgcccagccagccacccctgccactcacccttcctggcccaggccttgctgactctctgagctggggaggtgggaggccaggcgagcctgactctgttgatctacccgtgcctgggcccctcccctcagagcccatggtaacgaacccctagaaaggagagaacgggcgtcaggggtgcacagtccacagctgaagagcaaggtttcgtggcagcacggcccggcccctcaccctctgtccccacgaggggacccatgggggctgtctttgcagggcacagatgaccaaagtcccttcctgcttcctgttacctgtcttgctcctggggagaaagaggggcctgatgagactccactcaggtgcacacatcaccaggtgcatctgcaggcaccgggctggctgcttgcagccaggagaaggtcagcgagaaggagtgtatgagtgtgagtgtgtgtgcatggaagttggggcactgggcgtctgactccctccccacccaagagaggaaggacccctcaccacccccactggtgagacagtttactttgccaacttgccatgtttttgccaaaaccaagattttgaaggaaatgagtggccagcgccagggcccaggccatgtggcctgcccagcctcaatgtcacttggtggcggggtggggtgggggtgggcagcagcatcccagccttgagatgcttcactttccttctctgtaaccagactttgaaaaattgttcgtttcatcaggctctgttcctcaatggccttttgctacgtgcctcccgagaaatttgtctttttgtataaatgacaaagtgttgaaaatgtatttcctgaaataaatgtttcaaatgcagaaaccc

SEQ ID NO: 27555 - DNA, 1848 bp, Homo sapiens
  source 1..1848: mol_type = unassigned DNA
tatatgattttctccatttgtcatcgttccccaccccttcgacatgctgccaggaaacaagggaaggggcctccctccgagtgagtcagtgatgaggccgcggcctccccgaggttgtggggaggctgcactggagccacaggcaggggtgagagcacccactgaattgacatgaccctctgtccccaggcctggctccccgagggctcagaagagcagcttcggtgtgcagatcatccgtcttgtggggttctcagtgccggaccttggggtgggggccaggcctcgcacttgcagaggagcccagtgggctgcacgctcccctccatccccatcggccctgtcccctggagtgtgtcagagcccaggggagaatgcagcccaccaggagcacctggaccccctgcccgccacatggtgtggccatcactcagcccctacccctgccctgctcctaagggtagaaaactccagggtcccctgccaccgactgcccagccactccaagccccctggcagctgcccctcctggagcagaaagtgcctttatctcagccatccgcagactgctggccagatgcggggacaggctggaatgagggaggcgtcttcatctccctgccatccccctctcacgccacccccgcccccaccgggctgcaggtgctgctgatgcgctgggatctgattgaggataaaaaggaaggagagatgacccctaccccctcatcccccagttttgaaaaggtctaagcaagtgagtctggtggaggagctgagggagggagccatggaaggtgccagaaggaaggttggcgggggcacgtgtgggccgtggcttgggctggtcagagtggcgtgagctgcccggcgcctgccctgcccaagtgaccagggaagtgtgtgtgtgtccatgtgtatgcgtgtccgtctgtctgtctagtgtctgggtttggcccaagactgggctgtagttacattaatgcccagccagccacccctgccactcacccttcctggcccaggccttgctgactctctgagctggggaggtgggaggccaggcgagcctgactctgttgatctacccgtgcctgggcccctcccctcagagcccatggtaacgaacccctagaaaggagagaacgggcgtcaggggtgcacagtccacagctgaagagcaaggtttcgtggcagcacggcccggcccctcaccctctgtccccacgaggggacccatgggggctgtctttgcagggcacagatgaccaaagtcccttcctgcttcctgttacctgtcttgctcctggggagaaagaggggcctgatgagactccactcaggtgcacacatcaccaggtgcatctgcaggcaccgggctggctgcttgcagccaggagaaggtcagcgagaaggagtgtatgagtgtgagtgtgtgtgcatggaagttggggcactgggcgtctgactccctccccacccaagagaggaaggacccctcaccacccccactggtgagacagtttactttgccaacttgccatgtttttgccaaaaccaagattttgaaggaaatgagtggccagcgccagggcccaggccatgtggcctgcccagcctcaatgtcacttggtggcggggtggggtgggggtgggcagcagcatcccagccttgagatgcttcactttccttctctgtaaccagactttgaaaaattgttcgtttcatcaggctctgttcctcaatggccttttgctacgtgcctcccgagaaatttgtctttttgtataaatgacaaagtgttgaaaatgtatttcctgaaataaatgtttcaaatgcagaaaccc

SEQ ID NO: 27556 - DNA, 2253 bp, Homo sapiens
  source 1..2253: mol_type = unassigned DNA
gttagggaaggaagcaggcagatgcccttgtcttctcctttactcccaagccactagaagtctaaggcctttgtggggctgggcccctcaggagcaggtcacaggcagggatctcccacagttgaagacggacatgggcctggtcggatggggaatgaggtggcacgtttctgaaaaggcagctggcccaaggctaaataagtgcagcagccaaagctgctgcccctgtgcacaggccctccgccccctgcatgtggctgtggtccagggcccaggtcggagcactcaccttccaggaggtgccagagcaagggggtagtcttgcctctcactcctgccctctgtggctcaagtaggtgtgtttgtttatagccctgtgagtgtccctttcatacttgcctcagcccattccagcagcttatgtccagctgagaacccctgggtgctcacgtgctgtcttttaaacaatctagatgaggacggggacttggttgccttttccagtgacgaggaattgacaatggccatgtcctacgtgaaggatgacatcttccgaatctacattaaagagaaaaaagagtgccggcgggaccaccgcccaccgtgtgctcaggaggcgccccgcaacatggtgcaccccaatgtgatctgcgatggctgcaatgggcctgtggtaggaacccgctacaagtgcagcgtctgcccagactacgacttgtgtagcgtctgcgagggaaagggcttgcaccgggggcacaccaagctcgcattccccagccccttcgggcacctgtctgagggcttctcgcacagccgctggctccggaaggtgaaacacggacacttcgggtggccaggatgggaaatgggtccaccaggaaactggagcccacgtcctcctcgtgcaggggaggcccgccctggccccacggcagaatcagcttctggtccatcggaggatccgagtgtgaatttcctgaagaacgttggggagagtgtggcagctgcccttagccctctgggcattgaagttgatatcgatgtggagcacggagggaaaagaagccgcctgacccccgtctctccagagagttccagcacagaggagaagagcagctcacagccaagcagctgctgctctgaccccagcaagccgggtgggaatgttgagggcgccacgcagtctctggcggagcagatgaggaagatcgccttggagtccgaggggcgccctgaggaacagatggagtcggataactgttcaggaggagatgatgactggacccatctgtcttcaaaagaagtggacccgtctacaggtgaactccagtccctacagatgccagaatccgaagggccaagctctctggacccctcccaggagggacccacagggctgaaggaagctgccttgtacccacatctcccgccagaggctgacccgcggctgattgagtccctctcccagatgctgtccatgggcttctctgatgaaggcggctggctcaccaggctcctgcagaccaagaactatgacatcggagcggctctggacaccatccagtattcaaagcatcccccgccgttgtgaccacttttgcccacctcttctgcgtgcccctcttctgtctcatagttgtgttaagcttgcgtagaattgcaggtctctgtacgggccagtttctctgccttcttccaggatcaggggttagggtgcaagaagccatttagggcagcaaaacaagtgacatgaagggagggtccctgtgtgtgtgtgtgctgatgtttcctgggtgccctggctccttgcagcagggctgggcctgcgagacccaaggctcactgcagcgcgctcctgacccctccctgcaggggctacgttagcagcccagcacatagcttgcctaatggctttcactttctcttttgttttaaatgactcataggtccctgacatttagttgattattttctgctacagacctggtacactctgattttagataaagtaagcctaggtgttgtcagcaggcaggctggggaggccagtgttgtgggcttcctgctgggactgagaaggctcacgaagggcatccgcaatgttggtttcactgagagctgcctcctggtctcttcaccactgtagttctctcatttccaaaccatcagctgcttttaaaataagatctctttgtagccatcctgttaaatttgtaaacaatctaattaaatggcatcagcactttaaccaat

SEQ ID NO: 27557 - DNA, 2913 bp, Homo sapiens
  source 1..2913: mol_type = unassigned DNA
gcgtcggcttccggccgccttccgcggccaccgccgggcccgctcccgccgccgacgcccaggtgcgccaggtgcgggccgggcgggggtcgcgctcacctttctggccgctgagtgccgcgtaccaggacagcgagaggaaggcgcacaggcagaagagcagcagcgtcaggaaggtgccattgcggagcctcatctcctcggtgtctgcgagattaatctctcatggccgctgcacaagaacctggcttttagctgaactaaggagaaagtcctacaacagtttggcgtgcaacatggggcttgagaaaggatgaggacggggacttggttgccttttccagtgacgaggaattgacaatggccatgtcctacgtgaaggatgacatcttccgaatctacattaaagagaaaaaagagtgccggcgggaccaccgcccaccgtgtgctcaggaggcgccccgcaacatggtgcaccccaatgtgatctgcgatggctgcaatgggcctgtggtaggaacccgctacaagtgcagcgtctgcccagactacgacttgtgtagcgtctgcgagggaaagggcttgcaccgggggcacaccaagctcgcattccccagccccttcgggcacctgtctgagggcttctcgcacagccgctggctccggaaggtgaaacacggacacttcgggtggccaggatgggaaatgggtccaccaggaaactggagcccacgtcctcctcgtgcaggggaggcccgccctggccccacggcagaatcagcttctggtccatcggaggatccgagtgtgaatttcctgaagaacgttggggagagtgtggcagctgcccttagccctctgggcattgaagttgatatcgatgtggagcacggagggaaaagaagccgcctgacccccgtctctccagagagttccagcacagaggagaagagcagctcacagccaagcagctgctgctctgaccccagcaagccgggtgggaatgttgagggcgccacgcagtctctggcggagcagatgaggaagatcgccttggagtccgaggggcgccctgaggaacagatggagtcggataactgttcaggaggagatgatgactggacccatctgtcttcaaaagaagtggacccgtctacaggtgaactccagtccctacagatgccagaatccgaagggccaagctctctggacccctcccaggagggacccacagggctgaaggaagctgccttgtacccacatctcccgccagaggctgacccgcggctgattgagtccctctcccagatgctgtccatgggcttctctgatgaaggcggctggctcaccaggctcctgcagaccaagaactatgacatcggagcggctctggacaccatccagtattcaaagcatcccccgccgttgtgaccacttttgcccacctcttctgcgtgcccctcttctgtctcatagttgtgttaagcttgcgtagaattgcaggtctctgtacgggccagtttctctgccttcttccaggatcaggggttagggtgcaagaagccatttagggcagcaaaacaagtgacatgaagggagggtccctgtgtgtgtgtgtgctgatgtttcctgggtgccctggctccttgcagcagggctgggcctgcgagacccaaggctcactgcagcgcgctcctgacccctccctgcaggggctacgttagcagcccagcacatagcttgcctaatggctttcactttctcttttgttttaaatgactcataggtccctgacatttagttgattattttctgctacagacctggtacactctgattttagataaagtaagcctaggtgttgtcagcaggcaggctggggaggccagtgttgtgggcttcctgctgggactgagaaggctcacgaagggcatccgcaatgttggtttcactgagagctgcctcctggtctcttcaccactgtagttctctcatttccaaaccatcagctgcttttaaaataagatctctttgtagccatcctgttaaatttgtaaacaatctaattaaatggcatcagcactttaaccaatgacgtttgcatagagagaaatgattgacagtaagtttattgttaatggttcttacagagtatctttaaaagtgccttaggggaaccctgtccctcctaacaagtgtatctcgattaataacctgccagtcccagatcacacatcatcatcgaagtcttccccagttataaagaggtcacatagtcgtgtgggtcgaggattctgtgcctccaggaccaggggcccaccctctgcccagggagtccttgcgtcccatgaggtcttcccgcaaggcctctcagacccagatgtgacggggtgtgtggcccgaggaagctggacagcggcagtgggcctgctgaggccttctcttgaggcctgtgctctgggggtcccttgcttagcctgtgctggaccagctggcctggggtccctctgaagagaccttggctgctcactgtccacatgtgaactttttctaggtggcaggacaaattgcgcccatttagaggatgtggctgtaacctgctggatgggactccatagctccttcccaggacccctcagctccccggcactgcagtctgcagagttctcctggaggcaggggctgctgccttgtttcaccttccatgtcaggccagcctgtccctgaaagagaagatggccatgccctccatgtgtaagaacaatgccagggcccaggaggaccgcctgccctgcctgggccttggctgggcctctggttctgacactttctgctggaagctgtcaggctgggacaggctttgattttgagggttagcaagacaaagcaaataaatgccttccacctcaccgc

SEQ ID NO: 27558 - DNA, 2986 bp, Homo sapiens
  source 1..2986: mol_type = unassigned DNA
agagtagtgaaggggcctctgcagggcggctctcgcgccgcgacgacggtggcgggggcggggagggcgcgagagactccgcccctctcgaggcggggcggggcctccgcgttcgctacaaaagccgcgcggcggctgcgaccgggacggcccgttttccgccagctcgccgctcgctatggcgtcgctcaccgtgaaggcctaccttctgggcaaggaggacgcggcgcgcgagattcgccgcttcagcttctgctgcagccccgagcctgaggcggaagccgaggctgcggcgggtccgggaccctgcgagcggctgctgagccgggtggccgccctgttccccgcgctgcggcctggcggcttccaggcgcactaccgcgatgaggacggggacttggttgccttttccagtgacgaggaattgacaatggccatgtcctacgtgaaggatgacatcttccgaatctacattaaagagaaaaaagagtgccggcgggaccaccgcccaccgtgtgctcaggaggcgccccgcaacatggtgcaccccaatgtgatctgcgatggctgcaatgggcctgtggtaggaacccgctacaagtgcagcgtctgcccagactacgacttgtgtagcgtctgcgagggaaagggcttgcaccgggggcacaccaagctcgcattccccagccccttcgggcacctgtctgagggcttctcgcacagccgctggctccggaaggtgaaacacggacacttcgggtggccaggatgggaaatgggtccaccaggaaactggagcccacgtcctcctcgtgcaggggaggcccgccctggccccacggcagaatcagcttctggtccatcggaggatccgagtgtgaatttcctgaagaacgttggggagagtgtggcagctgcccttagccctctgggcattgaagttgatatcgatgtggagcacggagggaaaagaagccgcctgacccccgtctctccagagagttccagcacagaggagaagagcagctcacagccaagcagctgctgctctgaccccagcaagccgggtgggaatgttgagggcgccacgcagtctctggcggagcagatgaggaagatcgccttggagtccgaggggcgccctgaggaacagatggagtcggataactgttcaggaggagatgatgactggacccatctgtcttcaaaagaagtggacccgtctacaggtgaactccagtccctacagatgccagaatccgaagggccaagctctctggacccctcccaggagggacccacagggctgaaggaagctgccttgtacccacatctcccgccagaggctgacccgcggctgattgagtccctctcccagatgctgtccatgggcttctctgatgaaggcggctggctcaccaggctcctgcagaccaagaactatgacatcggagcggctctggacaccatccagtattcaaagcatcccccgccgttgtgaccacttttgcccacctcttctgcgtgcccctcttctgtctcatagttgtgttaagcttgcgtagaattgcaggtctctgtacgggccagtttctctgccttcttccaggatcaggggttagggtgcaagaagccatttagggcagcaaaacaagtgacatgaagggagggtccctgtgtgtgtgtgtgctgatgtttcctgggtgccctggctccttgcagcagggctgggcctgcgagacccaaggctcactgcagcgcgctcctgacccctccctgcaggggctacgttagcagcccagcacatagcttgcctaatggctttcactttctcttttgttttaaatgactcataggtccctgacatttagttgattattttctgctacagacctggtacactctgattttagataaagtaagcctaggtgttgtcagcaggcaggctggggaggccagtgttgtgggcttcctgctgggactgagaaggctcacgaagggcatccgcaatgttggtttcactgagagctgcctcctggtctcttcaccactgtagttctctcatttccaaaccatcagctgcttttaaaataagatctctttgtagccatcctgttaaatttgtaaacaatctaattaaatggcatcagcactttaaccaatgacgtttgcatagagagaaatgattgacagtaagtttattgttaatggttcttacagagtatctttaaaagtgccttaggggaaccctgtccctcctaacaagtgtatctcgattaataacctgccagtcccagatcacacatcatcatcgaagtcttccccagttataaagaggtcacatagtcgtgtgggtcgaggattctgtgcctccaggaccaggggcccaccctctgcccagggagtccttgcgtcccatgaggtcttcccgcaaggcctctcagacccagatgtgacggggtgtgtggcccgaggaagctggacagcggcagtgggcctgctgaggccttctcttgaggcctgtgctctgggggtcccttgcttagcctgtgctggaccagctggcctggggtccctctgaagagaccttggctgctcactgtccacatgtgaactttttctaggtggcaggacaaattgcgcccatttagaggatgtggctgtaacctgctggatgggactccatagctccttcccaggacccctcagctccccggcactgcagtctgcagagttctcctggaggcaggggctgctgccttgtttcaccttccatgtcaggccagcctgtccctgaaagagaagatggccatgccctccatgtgtaagaacaatgccagggcccaggaggaccgcctgccctgcctgggccttggctgggcctctggttctgacactttctgctggaagctgtcaggctgggacaggctttgattttgagggttagcaagacaaagcaaataaatgccttccacctcaccgcaaa

SEQ ID NO: 27559 - DNA, 2000 bp, Homo sapiens
  source 1..2000: mol_type = unassigned DNA
gccagctcgccgctcgctatggcgtcgctcaccgtgaaggcctaccttctgggcaaggaggacgcggcgcgcgagattcgccgcttcagcttctgctgcagccccgagcctgaggcggaagccgaggctgcggcgggtccgggaccctgcgagcggctgctgagccgggtggccgccctgttccccgcgctgcggcctggcggcttccaggcgcactaccgcgatgaggacggggacttggttgccttttccagtgacgaggaattgacaatggccatgtcctacgtgaaggatgacatcttccgaatctacattaaagagaaaaaagagtgccggcgggaccaccgcccaccgtgtgctcaggaggcgccccgcaacatggtgcaccccaatgtgatctgcgatggctgcaatgggcctgtggtaggaacccgctacaagtgcagcgtctgcccagactacgacttgtgtagcgtctgcgagggaaagggcttgcaccgggggcacaccaagctcgcattccccagccccttcgggcacctgtctgagggcttctcgcacagccgctggctccggaaggtgaaacacggacacttcgggtggccaggatgggaaatgggtccaccaggaaactggagcccacgtcctcctcgtgcaggggaggcccgccctggccccacggcagaatcagcttctggtccatcggaggatccgagtgtgaatttcctgaagaacgttggggagagtgtggcagctgcccttagccctctgggcattgaagttgatatcgatgtggagcacggagggaaaagaagccgcctgacccccgtctctccagagagttccagcacagaggagaagagcagctcacagccaagcagctgctgctctgaccccagcaagccgggtgggaatgttgagggcgccacgcagtctctggcggagcagatgaggaagatcgccttggagtccgaggggcgccctgaggaacagatggagtcggataactgttcaggaggagatgatgactggacccatctgtcttcaaaagaagtggacccgtctacaggtgaactccagtccctacagatgccagaatccgaagggccaagctctctggacccctcccaggagggacccacagggctgaaggaagctgccttgtacccacatctcccgccagaggctgacccgcggctgattgagtccctctcccagatgctgtccatgggcttctctgatgaaggcggctggctcaccaggctcctgcagaccaagaactatgacatcggagcggctctggacaccatccagtattcaaagcatcccccgccgttgtgaccacttttgcccacctcttctgcgtgcccctcttctgtctcatagttgtgttaagcttgcgtagaattgcaggtctctgtacgggccagtttctctgccttcttccaggatcaggggttagggtgcaagaagccatttagggcagcaaaacaagtgacatgaagggagggtccctgtgtgtgtgtgtgctgatgtttcctgggtgccctggctccttgcagcagggctgggcctgcgagacccaaggctcactgcagcgcgctcctgacccctccctgcaggggctacgttagcagcccagcacatagcttgcctaatggctttcactttctcttttgttttaaatgactcataggtccctgacatttagttgattattttctgctacagacctggtacactctgattttagataaagtaagcctaggtgttgtcagcaggcaggctggggaggccagtgttgtgggcttcctgctgggactgagaaggctcacgaagggcatccgcaatgttggtttcactgagagctgcctcctggtctcttcaccactgtagttctctcatttccaaaccatcagctgcttttaaaataagatctctttgtagccatcctgttaaatttgtaaacaatctaattaaatggcatcagcactttaacc

SEQ ID NO: 27560 - DNA, 628 bp, Homo sapiens
  source 1..628: mol_type = unassigned DNA
agtggacgcggggagcctgcggggtgggactgcatcgggaaaggggaaggagtcagaggcgagaagggggagagtgtctgtctggctccagccgctgcacgctcttcctgctcaggggactcacggtgaccccggagccactccccagcccagcctccagatgaggacggggacttggttgccttttccagtgacgaggaattgacaatggccatgtcctacgtgaaggatgacatcttccgaatctacattaaagagaaaaaagagtgccggcgggaccaccgcccaccgtgtgctcaggaggcgccccgcaacatggtgcaccccaatgtgatctgcgatggctgcaatgggcctgtggtaggaacccgctacaagtgcagcgtctgcccagactacgacttgtgtagcgtctgcgagggaaagggcttgcaccgggggcacaccaagctcgcattccccagccccttcgggcacctgtctgagggcttctcgcacagccgctggctccggaaggtgaaacacggacacttcgggtggccaggatgggaaatgggtccaccaggaaactggagcccacgtcctcctcgtgcaggggaggcccgccctggccccacggcagaatcag

SEQ ID NO: 27561 - DNA, 1506 bp, Homo sapiens
  source 1..1506: mol_type = unassigned DNA
acggcccgttttccgccagctcgccgctcgctatggcgtcgctcaccgtgaaggcctaccttctgggcaaggaggacgcggcgcgcgagattcgccgcttcagcttctgctgcagccccgagcctgaggcggaagccgaggctgcggcgggtccgggaccctgcgagcggctgctgagccgggtggccgccctgttccccgcgctgcggcctggcggcttccaggcgcactaccgcgatgaggacggggacttggttgccttttccagtgacgaggaattgacaatggccatgtcctacgtgaaggatgacatcttccgaatctacattaaagagaaaaaagagtgccggcgggaccaccgcccaccgtgtgctcaggaggcgccccttcgggcacctgtctgagggcttctcgcacagccgctggctccggaaggtgaaacacggacacttcgggtggccaggatgggaaatgggtccaccaggaaactggagcccacgtcctcctcgtgcaggggaggcccgccctggccccacggcagaatcagcttctggtccatcggaggatccgagtgtgaatttcctgaagaacgttggggagagtgtggcagctgcccttagccctctgggcattgaagttgatatcgatgtggagcacggagggaaaagaagccgcctgacccccgtctctccagagagttccagcacagaggagaagagcagctcacagccaagcagctgctgctctgaccccagcaagccgggtgggaatgttgagggcgccacgcagtctctggcggagcagatgaggaagatcgccttggagtccgaggggcgccctgaggaacagatggagtcggataactgttcaggaggagatgatgactggacccatctgtcttcaaaagaagtggacccgtctacaggtgaactccagtccctacagatgccagaatccgaagggccaagctctctggacccctcccaggagggacccacagggctgaaggaagctgccttgtacccacatctcccgccagaggctgacccgcggctgattgagtccctctcccagatgctgtccatgggcttctctgatgaaggcggctggctcaccaggctcctgcagaccaagaactatgacatcggagcggctctggacaccatccagtattcaaagcatcccccgccgttgtgaccacttttgcccacctcttctgcgtgcccctcttctgtctcatagttgtgttaagcttgcgtagaattgcaggtctctgtacgggccagtttctctgccttcttccaggatcaggggttagggtgcaagaagccatttagggcagcaaaacaagtgacatgaagggagggtccctgtgtgtgtgtgtgctgatgtttcctgggtgccctggctccttgcagcagggctgggcctgcgagacccaaggctcactgcagcgcgctcctgacccctccctgcaggggctacgttagcagcccagcacatagc

SEQ ID NO: 27562 - DNA, 842 bp, Homo sapiens
  source 1..842: mol_type = unassigned DNA
tccgcggccaccgccgggcccgctcccgccgccgacgcccaggtgcgccaggtgcgggccgggcgggggtcgcgctcacctttctggccgctgagtgccgcgtaccaggacagcgagaggaaggcgcacaggcagaagagcagcagcgtcaggaaggtgccattgcggagcctcatctcctcggtgtctgcgagattaatctctcatggccgctgcacaagaacctggcttttagctgaactaaggagaaagtcctacaacagtttggcgtgcaacatggggcttgagaaaggatgaggacggggacttggttgccttttccagtgacgaggaattgacaatggccatgtcctacgtgaaggatgacatcttccgaatctacattaaagagaaaaaagagtgccggcgggaccaccgcccaccgtgtgctcaggaggcgccccgcaacatggtgcaccccaatgtgatctgcgatggctgcaatgggcctgtggtaggaacccgctacaagtgcagcgtctgcccagactacgacttgtgtagcgtctgcgagggaaagggcttgcaccgggggcacaccaagctcgcattccccagccccttcgggcacctgtctgagggcttctcgcacagccgctggctccggaaggtgaaacacggacacttcgggtggccaggatgggaaatgggtccaccaggaaactggagcccacgtcctcctcgtgcaggggaggcccgccctggccccacggcagaatcagcttctggtccatcggaggatccgagtgtgaatttcctgaagaacgttggggagagtgtggcagctgcccttagccctctgg

SEQ ID NO: 27563 - DNA, 1208 bp, Homo sapiens
  source 1..1208: mol_type = unassigned DNA
gaagttggcgtgcagctgggagagctagactaagttggtcatgatgcagaagctactcaaatgcagtcggcttgtcctggctcttgccctcatcctggttctggaatcctcagttcaaggttatcctacgcggagagccaggtaccaatgggtgcgctgcaatccagacagtaattctgcaaactgccttgaagaaaaaggaccaatgttcgaactacttccaggtgaatccaacaagatcccccgtctgaggactgacctttttccaaagacgagaatccaggacttgaatcgtatcttcccactttctgaggactactctggatcaggcttcggctccggctccggctctggatcaggatctgggagtggcttcctaacggaaatggaacaggattaccaactagtagacgaaagtgatgctttccatgacaaccttaggtctcttgacaggaatctgccctcagacagccaggacttgggtcaacatggattagaagaggattttatgttataaaagaggattttcccaccttgacaccaggcaatgtagttagcatattttatgtaccatggttatatgattaatcttgggacaaagaattttatagaaatttttaaacatctgaaaaagaagcttaagttttatcatccttttttttctcatgaattcttaaaggattatgctttaatgctgttatctattttattgttcttgaaaatacctgcattttttggtatcatgttcaaccaacatcattatgaaattaattagattcccatggccataaaatggctttaaagaatatatatatatttttaaagtagcttgagaagcaaattggcaggtaatatttcatacctaaattaagactctgacttggattgtgaattataatgatatgccccttttcttataaaaacaaaaaaaaaaataatgaaacacagtgaatttgtagagtgggggtatttgacatattttacagggtggagtgtactatatactattacctttgaatgtgtttgcagagctagtggatgtgtttgtctacaagtatgattgctgttacataacaccccaaattaactcccaaattaaaacacagttgtgctgtcaatacctcatactgctttacctttttttcctggatatctgtgtattttcaaatgttactatatattaaagcagaaatataaccaaaggttaa

SEQ ID NO: 27564 - DNA, 1606 bp, Homo sapiens
  source 1..1606: mol_type = unassigned DNA
ggaccattcagaagactgtccacccgtcctcagccccctctcttcgtgggctatctactcagttgatccctccctcgctggcttggctctgactcctgctcagacccatcacctttgccgggaatgatgtctggagaacccctgcacgtgaagacccccatccgtgacagcatggccctgtccaaaatggccggcaccagcgtctacctcaagatggacagtgcccagccctccggctccttcaagatccggggcattgggcacttctgcaagaggtgggccaagcaaggctgtgcacattttgtctgctcctcggcgggcaacgcaggcatggcggctgcatatgcggccaggcaactcggcgtccccgccaccatcgtggtgcccagcaccacacctgctctcaccattgagcgcctcaagaatgaaggtgccacagtcaaggtggtgggtgagttattggatgaagccttcgagctggccaaggccctagcgaagaacaacccgggttgggtctacattcccccctttgatgaccccctcatctgggaaggccacgcttccatcgtgaaagagctgaaggagacactgtgggaaaagccgggggccatcgcgctgtcagtgggcggcgggggcctgctgtgtggagtggtccaggggctgcaggaggtgggctggggggacgtgcctgtcatcgccatggagacttttggtgcccacagcttccacgctgccaccaccgcaggcaaacttgtctccctgcccaagatcaccagtgttgccaaggccctgggcgtgaagactgtgggggctcaggccctgaagctgtttcaggaacaccccattttctctgaagttatctcggaccaggaggctgtggccgccattgagaagttcgtggatgatgagaagatcctggtggagcccgcctgcggggcagccctggccgctgtctatagccacgtgatccagaagctccaactggaggggaatctccgaaccccgctgccatccctcgtggtcatcgtctgcgggggcagcaacatcagcctggcccagctgcgggcgctcaaggaacagctgggcatgacaaataggttgcccaagtgaggacggaccccttaccgatctgtgctctcctagcccaagagacccctggaggggctggagttttatccagcgcctcgtcgtatgtttggctgagcacctgtggcctgggtgcaggttaacttcttgttatcaggagcccactatgcagaggccaaaggtcggcagccagcgaggctatgaattggacctttttggtatctgtgtgactgctctgtgcccatccttagccaacttgctggcgtgacaagtgcccacaagtaacacaccaggtacccagagcagggtggacaggagagacctgaatcacagcagtgaggaattcctcaaagctgtgacctcgcccctgaacttgttcccagtgaaggtcaacagggccaccaaccagggttgaggaaccatctcagccatcctcccaggaagcccacccctgacccttactaatttttctaatgtgcaaactttttcattgaaaaataaaatatatttatgaaacaaa

SEQ ID NO: 27565 - DNA, 1281 bp, Homo sapiens
  source 1..1281: mol_type = unassigned DNA
accattcagaagactgtccacccgtcctcagccccctctcttcgtgggctatctactcagttgatccctccctcgctggcttggctctgactcctgctcagacccatcacctttgccgggaatgatgtctggagaacccctgcacgtgaagacccccatccgtgacagcatggccctgtccaaaatggccggcaccagcgtctacctcaagatggacagtgcccagccctccggctccttcaagatccggggcattgggcacttctgcaagaggtgggccaagcaaggctgtgcacattttgtctgctcctcggcgggcaacgcaggcatggcggctgcatatgcggccaggcaactcggcgtccccgccaccatcgtggtgcccagcaccacacctgctctcaccattgagcgcctcaagaatgaaggtgccacagtcaaggtggtgggtgagttattggatgaagccttcgagctggccaaggccctagcgaagaacaacccgggttgggtctacattcccccctttgatgaccccctcatctgggaaggccacgcttccatcgtgaaagagctgaaggagacactgtgggaaaagccgggggccatcgcgctgtcagtgggcggcgggggcctgctgtgtggagtggtccaggggctgcaggaggtgggctggggggacgtgcctgtcatcgccatggagacttttggtgcccacagcttccacgctgccaccaccgcaggcaaacttgtctccctgcccaagatcaccaggtgagcagctggggtgcctccctcgggtgtccagcaagcactggggagtcccccttagggctggctttgagatagatcctgatgtcagcctgtttcacagatgagacaatggaggctttgatcgcttgcccagggccacgtccagtgagtggtacagcttggactcaaacccaagtctgtgtgactccaacatgtcacacttcctcacgtgaaaagcctcatatgaggctgggcacagtgacttgtgcctgtaatcccagcactttggaaggccgaggggggtggatcacctaaggtcaggaattcgaggccagcctggtcaacatagtgaaaccccatctctactaaaaatacaaaaattagccgggtgtggtggtgggcacctgtagtcccagctactcggtaggctgaggctggagaattgcttgaacccgggaggcagagattgcagtgagctgagatcgcaccactgcactccagcctgggcaacagagcaagactccgtct

SEQ ID NO: 27566 - DNA, 2464 bp, Homo sapiens
  source 1..2464: mol_type = unassigned DNA
ggtttggggttggagcggctggtcacgtggctggcccgcggcggtgcgcggggcgttgggtcagcgggtctgggactggtggcaccggcggcggcgtaggacggaggcgtcgctaggcagcttcgaaccagtgcaatgacgatgccagtcaacggggcccacaaggatgctgacctgtggtcctcacatgacaagatgctggcacaacccctcaaagacagtgatgttgaggtttacaacatcattaagaaggagagtaaccggcagagggttggattggagctgattgcctcggagaatttcgccagccgagcagttttggaggccctaggctcttgcttaaataacaaatactctgaggggtacccgggccagagatactatggcgggactgagtttattgatgaactggagaccctctgtcagaagcgagccctgcaggcctataagctggacccacagtgctggggggtcaacgtccagccctactcaggctcccctgcaaactttgctgtgtacactgccctggtggaaccccatgggcgcatcatgggcctggaccttccggatgggggccacctgacccatgggttcatgacagacaagaagaaaatctctgccacgtccatcttctttgaatctatgccctacaaggtgaacccagatactggctacatcaactatgaccagctggaggagaacgcacgcctcttccacccgaagctgatcatcgcaggaaccagctgctactcccgaaacctggaatatgcccggctacggaagattgcagatgagaacggggcgtatctcatggcggacatggctcacatcagcgggctggtggcggctggcgtggtgccctccccatttgaacactgccatgtggtgaccaccaccactcacaagaccctgcgaggctgccgagctggcatgatcttctacaggaaaggagtgaaaagtgtggatcccaagactggcaaagagattctgtacaacctggagtctcttatcaattctgctgtgttccctggcctgcagggaggtccccacaaccacgccattgctggggttgctgtggcactgaagcaagctatgactctggaatttaaagtttatcaacaccaggtggtggccaactgcagggctctgtctgaggccctgacggagctgggctacaaaatagtcacaggtggttctgacaaccatttgatccttgtggatctccgttccaaaggcacagatggtggaagggctgagaaggtgctagaagcctgttctattgcctgcaacaagaacacctgtccaggtgacagaagcgctctgcggcccagtggactgcggctggggaccccagcactgacgtcccgtggacttttggaaaaagacttccaaaaagtagcccactttattcacagagggatagagctgaccctgcagatccagagcgacactggtgtcagagccaccctgaaagagttcaaggagagactggcaggggataagtaccaggcggccgtgcaggctctccgggaggaggttgagagcttcgcctctctcttccctctgcctggcctgcctgacttctaaaggagcgggcccactctggacccacctggcgccacagaggaagctgcctgccggaggacccccacctgagagatggatgagctgctccaaaggggaactgttgacactcgggccctttgagggggtttcttttggacttttttcatgttttcttcacaaatcaaaatttgtttaagtctcattgttagtaattctgggacaggttattaaaggatttaaatttgaacctggctttctcacagctggacataattctaggaaaataaaatactatgtcgccacttggtcataatcatttagatggtggtgtagggcaaagctgttagaaagattgtagcgttttactctccctgggctttcctccgccttgctgcaacagagaggaaatgcccatgtccacagcttgtacacactgccccctcactatcttgttatccagtggcatgccaaaggagaactgaattagcttctgaggcttctgctgtaaatcagaagtgtatgttagtcaagagtaaacaagatgcacccagtatggtgggagggttttgctgtcagtagctcaaagtatggtgtagaaatggcctcctccctccatcctgggaagtcccagtcccatcctggtgtgagaatcaaccaggctttcctgctccacctgagataaccaactccctcccgtaatcaggaagccaaatgtcaccttcccaaagaaattttattttcacgtagctgaagtgcaaaacatagatgaccatttttaataagcacaatcaaatttttaaccacagaatgtctacaagaattatagctttaaaaaatacaaccaatttttatatttcaaaaatatttgaactcaaataaattaatttcttaaaaagta

SEQ ID NO: 27567 - DNA, 378 bp, Homo sapiens
  source 1..378: mol_type = unassigned DNA
atgagatatttgctccaagttgcacagctggtttggttgactgtagattccagaggcattggtggaacacttgatcatgctggcttcagcatctgcattttcactgtcccacccctaagcttctttggcctctgtgaagcacagactttcggtctgagtggatctaagtctcctgctcttcacagatactatggcgggactgagtttattgatgaactggagaccctctgtcagaagcgagccctgcaggcctataagctggacccacagtgctggggggtcaacgtccctactcaggtgcttgtctcatccatatggcctggtgcagcctcttcatgtgcatcccccagggccgacatgcaccaagaagagtcctaa

SEQ ID NO: 27568 - DNA, 2136 bp, Homo sapiens
  source 1..2136: mol_type = unassigned DNA
ggcaccggcggcggcgtaggacggaggcgtcgctaggcagcttcgaaccagtgcaatgacgatgccagtcaacggggcccacaaggatgctgacctgtggtcctcacatgacaagatgctggcacaacccctcaaagacagtgatgttgaggtttacaacatcattaagaaggagagtaaccggcagagggttggattggagctgattgcctcggagaatttcgccagccgagcagttttggaggccctaggctcttgcttaaataacaaatactctgaggggtacccgggccagagatactatggcgggactgagtttattgatgaactggagaccctctgtcagaagcgagccctgcaggcctataagctggacccacagtgctggggggtcaacgtccagccctactcaggctcccctgcaaactttgctgtgtacactgccctggtggaaccccatgggcgcatcatgggcctggaccttccggatgggggccacctgacccatgggttcatgacagacaagaagaaaatctctgccacgtccatcttctttgaatctatgccctacaaggtgaacccagatactggctacatcaactatgaccagctggaggagaacgcacgcctcttccacccgaagctgatcatcgcaggaaccagctgctactcccgaaacctggaatatgcccggctacggaagattgcagatgagaacggggcgtatctcatggcggacatggctcacatcagcgggctggtggcggctggcgtggtgccctccccatttgaacactgccatgtggtgaccaccaccactcacaagaccctgcgaggctgccgagctggcatgatcttctacaggaaaggtggttctgacaaccatttgatccttgtggatctccgttccaaaggcacagatggtggaagggctgagaaggtgctagaagcctgttctattgcctgcaacaagaacacctgtccaggtgacagaagcgctctgcggcccagtggactgcggctggggaccccagcactgacgtcccgtggacttttggaaaaagacttccaaaaagtagcccactttattcacagagggatagagctgaccctgcagatccagagcgacactggtgtcagagccaccctgaaagagttcaaggagagactggcaggggataagtaccaggcggccgtgcaggctctccgggaggaggttgagagcttcgcctctctcttccctctgcctggcctgcctgacttctaaaggagcgggcccactctggacccacctggcgccacagaggaagctgcctgccggaggacccccacctgagagatggatgagctgctccaaaggggaactgttgacactcgggccctttgagggggtttcttttggacttttttcatgttttcttcacaaatcaaaatttgtttaagtctcattgttagtaattctgggacaggttattaaaggatttaaatttgaacctggctttctcacagctggacataattctaggaaaataaaatactatgtcgccacttggtcataatcatttagatggtggtgtagggcaaagctgttagaaagattgtagcgttttactctccctgggctttcctccgccttgctgcaacagagaggaaatgcccatgtccacagcttgtacacactgccccctcactatcttgttatccagtggcatgccaaaggagaactgaattagcttctgaggcttctgctgtaaatcagaagtgtatgttagtcaagagtaaacaagatgcacccagtatggtgggagggttttgctgtcagtagctcaaagtatggtgtagaaatggcctcctccctccatcctgggaagtcccagtcccatcctggtgtgagaatcaaccaggctttcctgctccacctgagataaccaactccctcccgtaatcaggaagccaaatgtcaccttcccaaagaaattttattttcacgtagctgaagtgcaaaacatagatgaccatttttaataagcacaatcaaatttttaaccacagaatgtctacaagaattatagctttaaaaaatacaaccaatttttatatttcaaaaatatttgaactcaaataaattaatttctt

SEQ ID NO: 27569 - DNA, 1656 bp, Homo sapiens
  source 1..1656: mol_type = unassigned DNA
cgcggcggtgcgcggggcgttgggtcagcgggtctgggactggtggcaccggcggcggcgtaggacggaggcgtcgctaggcagcttcgaaccagtgcaatgacgatgccagtcaacggggcccacaaggatgctgacctgtggtcctcacatgacaagatgctggcacaacccctcaaagacagtgatgttgaggtttacaacatcattaagaaggagagtaaccggcagagggttggattggagctgattgcctcggagaatttcgccagccgagcagttttggaggccctaggctcttgcttaaataacaaatactctgaggggtacccgggccagagatactatggcgggactgagtttattgatgaactggagaccctctgtcagaagcgagccctgcaggcctataagctggacccacagtgctggggggtcaacgtccagccctactcaggctcccctgcaaactttgctgtgtacactgccctggtggaaccccatgggcgcatcatgggcctggaccttccggatgggggccacctgacccatgggttcatgacagacaagaagaaaatctctgccacgtccatcttctttgaatctatgccctacaaggtgaacccagatactggctacatcaactatgaccagctggaggagaacgcacgcctcttccacccgaagctgatcatcgcaggaaccagctgctactcccgaaacctggaatatgcccggctacggaagattgcagatgagaacggggcgtatctcatggcggacatggctcacatcagcgggctggtggcggctggcgtggtgccctccccatttgaacactgccatgtggtgaccaccaccactcacaagaccctgcgaggctgccgagctggcatgatcttctacaggaaaggggttgctgtggcactgaagcaagctatgactctggaatttaaagtttatcaacaccaggtggtggccaactgcagggctctgtctgaggccctgacggagctgggctacaaaatagtcacaggtggttctgacaaccatttgatccttgtggatctccgttccaaaggcacagatggtggaagggctgagaaggtgctagaagcctgttctattgcctgcaacaagaacacctgtccaggtgacagaagcgctctgcggcccagtggactgcggctggggaccccagcactgacgtcccgtggacttttggaaaaagacttccaaaaagtagcccactttattcacagagggatagagctgaccctgcagatccagagcgacactggtgtcagagccaccctgaaagagttcaaggagagactggcaggggataagtaccaggcggccgtgcaggctctccgggaggaggttgagagcttcgcctctctcttccctctgcctggcctgcctgacttctaaaggagcgggcccactctggacccacctggcgccacagaggaagctgcctgccggaggacccccacctgagagatggatgagctgctccaaaggggaactgttgacactcgggccctttgagggggtttcttttggacttttttcatgttttcttcacaaatcaaaatttgtttaagtctcattgttagtaattctgggacaggttattaaaggatttaaatt

SEQ ID NO: 27570 - DNA, 570 bp, Homo sapiens
  source 1..570: mol_type = unassigned DNA
ctgagctcgagcggtccagcgccaagttcggggtttggggttggagcggctggtcacgtggctggcccgcggcggtgcgcggggcgttgggtcagcgggtctgggactggtggcaccggcggcggcgtaggacggaggcgtcgctaggcagcttcgaaccagtgcaatgacgatgccagtcaacggggcccacaaggatgctgacctgtggtcctcacatgacaagatgctggcacaacccctcaaagacagtgatgttgaggtttacaacatcattaagaaggagagtaaccggcagagggttggattggagctgattgcctcggagaatttcgccagccgagcagttttggaggccctaggctcttgcttaaataacaaatactctgaggggtacccgggccagaggtatgtgaatatcttcaaaggcctggttctgacacagtcatagggagtactcagtcagcctaggacctaaacaatttggaaatttcagaaaacaataagcttcccagctgtaggatttctgttccacgcctgctctctgacagaactcttttattcccagca

SEQ ID NO: 27571 - DNA, 2652 bp, Homo sapiens
  source 1..2652: mol_type = unassigned DNA
ttttttttcagatggagtctcgctctgttgcccaggctggagtgctggagtgcagtggcacaatctcggctcactgcaagctccacctcccgggttcacgccattctcctgcctcagcctcccaagtagctgggattacaggcgcccgccaccatatctggctaattttttgcatttttagtagagacggggtttcaccgtgttagccaggatggtctcgatctcctgacctcatgatctgcccgtctcagcctcccaaagtgctgggattacaggtgtgagccaccgcgcccagcccctacttcttgtttttcaatgttgtatccagtgaccttgctaaatttgcttattctaacagttggcccctagcatcttgattttctaggtatattgtgttgtctgtgtgtaatgtcagtttttaaatttcttctttcctaatcgttatgccttttgtttctttttcttgcctcattatacttggaatagaagtagtattagcaggcattttggtcttgttcctgaaggtaaccattttggtttccattgtgtggtcccgtcacatttgtttcattctgcaggtgctttttggttccttctcagcaggtagtgccccagcagcagggctcactacaaccctgggactcctcagggactcctgggtctgtgagccatacttggttgagcaggctgaacacaccagtatccatcctgtctcaccctcaagtcctcatctaggacatcattcctcttgtcatggtgggtggagccagttcaagtgggaggacaggaggcaggtgtggttggaggaagcagcctgaacctgcctccctgacattccacaggtgaacccagatactggctacatcaactatgaccagctggaggagaacgcacgcctcttccacccgaagctgatcatcgcaggaaccagctgctactcccgaaacctggaatatgcccggctacggaagattgcagatgagaacggggcgtatctcatggcggacatggctcacatcagcgggctggtggcggctggcgtggtgccctccccatttgaacactgccatgtggtgaccaccaccactcacaagaccctgcgaggctgccgagctggcatgatcttctacaggaaaggagtgaaaagtgtggatcccaagactggcaaagagattctgtacaacctggagtctcttatcaattctgctgtgttccctggcctgcagggaggtccccacaaccacgccattgctggggttgctgtggcactgaagcaagctatgactctggaatttaaagtttatcaacaccaggtggtggccaactgcagggctctgtctgaggccctgacggagctgggctacaaaatagtcacaggtggttctgacaaccatttgatccttgtggatctccgttccaaaggcacagatggtggaagggctgagaaggtgctagaagcctgttctattgcctgcaacaagaacacctgtccaggtgacagaagcgctctgcggcccagtggactgcggctggggaccccagcactgacgtcccgtggacttttggaaaaagacttccaaaaagtagcccactttattcacagagggatagagctgaccctgcagatccagagcgacactggtgtcagagccaccctgaaagagttcaaggagagactggcaggggataagtaccaggcggccgtgcaggctctccgggaggaggttgagagcttcgcctctctcttccctctgcctggcctgcctgacttctaaaggagcgggcccactctggacccacctggcgccacagaggaagctgcctgccggaggacccccacctgagagatggatgagctgctccaaaggggaactgttgacactcgggccctttgagggggtttcttttggacttttttcatgttttcttcacaaatcaaaatttgtttaagtctcattgttagtaattctgggacaggttattaaaggatttaaatttgaacctggctttctcacagctggacataattctaggaaaataaaatactatgtcgccacttggtcataatcatttagatggtggtgtagggcaaagctgttagaaagattgtagcgttttactctccctgggctttcctccgccttgctgcaacagagaggaaatgcccatgtccacagcttgtacacactgccccctcactatcttgttatccagtggcatgccaaaggagaactgaattagcttctgaggcttctgctgtaaatcagaagtgtatgttagtcaagagtaaacaagatgcacccagtatggtgggagggttttgctgtcagtagctcaaagtatggtgtagaaatggcctcctccctccatcctgggaagtcccagtcccatcctggtgtgagaatcaaccaggctttcctgctccacctgagataaccaactccctcccgtaatcaggaagccaaatgtcaccttcccaaagaaattttattttcacgtagctgaagtgcaaaacatagatgaccatttttaataagcacaatcaaatttttaaccacagaatgtctacaagaattatagctttaaaaaatacaaccaatttttatatttcaaaaatatttgaactcaaataaattaatttcttaaaaagta

SEQ ID NO: 27572 - DNA, 1700 bp, Homo sapiens
  source 1..1700: mol_type = unassigned DNA
ctgagctcgagcggtccagcgccaagttcggggtttggggttggagcggctggtcacgtggctggcccgcggcggtgcgcggggcgttgggtcagcgggtctgggactggtggcaccggcggcggcgtaggacggaggcgtcgctaggcagcttcgaaccagtgcaatgacgatgccagtcaacggggcccacaaggatgctgacctgtggtcctcacatgacaagatgctggcacaacccctcaaagacagtgatgttgaggtttacaacatcattaagaaggagagtaaccggcagagggttggattggagctgattgcctcggagaatttcgccagccgagcagttttggaggccctaggctcttgcttaaataacaaatactctgaggggtacccgggccagagatactatggcgggactgagtttattgatgaactggagaccctctgtcagaagcgagccctgcaggcctataagctggacccacagtgctggggggtcaacgtccagccctactcaggctcccctgcaaactttgctgtgtacactgccctggtggaaccccatgggcgcatcatgggcctggaccttccggatgggggccacctgacccatgggttcatgacagacaagaagaaaatctctgccacgtccatcttctttgaatctatgccctacaaggtgaacccagatactggctacatcaactatgaccagctggaggagaacgcacgcctcttccacccgaagctgatcatcgcaggaaccagctgctactcccgaaacctggaatatgcccggctacggaagattgcagatgagaacggggcgtatctcatggcggacatggctcacatcagcgggctggtggcggctggcgtggtgccctccccatttgaacactgccatgtggtgaccaccaccactcacaagaccctgcgaggctgccgagctggcatgatcttctacaggaaaggagtgaaaagtgtggatcccaagactggcaaagagattctgtacaacctggagtctcttatcaattctgctgtgttccctggcctgcagggaggtccccacaaccacgccattgctggggttgctgtggcactgaagcaagctatgactctggaatttaaagtttatcaacaccaggtggtggccaactgcagggctctgtctgaggccctgacggagctgggctacaaaatagtcacaggtggttctgacaaccatttgatccttgtggatctccgttccaaaggcacagatggtggaagggctgagaaggtgctagaagcctgttctattgcctgcaacaagaacacctgtccagggatagagctgaccctgcagatccagagcgacactggtgtcagagccaccctgaaagagttcaaggagagactggcaggggataagtaccaggcggccgtgcaggctctccgggaggaggttgagagcttcgcctctctcttccctctgcctggcctgcctgacttctaaaggagcgggcccactctggacccacctggcgccacagaggaagctgcctgccggaggacccccacctgagagatggatgagctgctccaaaggggaactgttgacactcgggccctttgagggggtttcttttggacttttttcatgttttcttcacaaatcaaaatttgtttaagtctcattgttagtaatt

SEQ ID NO: 27573 - DNA, 1759 bp, Homo sapiens
  source 1..1759: mol_type = unassigned DNA
aagttcggggtttggggttggagcggctggtcacgtggctggcccgcggcggtgcgcggggcgttgggtcagcgggtctgggactggtggcaccggcggcggcgtaggacggaggcgtcgctaggcagcttcgaaccagtgcaatgacgatgccagtcaacggggcccacaaggatgctgacctgtggtcctcacatgacaagatgctggcacaacccctcaaagacagtgatgttgaggtttacaacatcattaagaaggagagtaaccggcagagggttggattggagctgattgcctcggagaatttcgccagccgagcagttttggaggccctaggctcttgcttaaataacaaatactctgaggggtacccgggccagaggctcccctgcaaactttgctgtgtacactgccctggtggaaccccatgggcgcatcatgggcctggaccttccggatgggggccacctgacccatgggttcatgacagacaagaagaaaatctctgccacgtccatcttctttgaatctatgccctacaaggtgaacccagatactggctacatcaactatgaccagctggaggagaacgcacgcctcttccacccgaagctgatcatcgcaggaaccagctgctactcccgaaacctggaatatgcccggctacggaagattgcagatgagaacggggcgtatctcatggcggacatggctcacatcagcgggctggtggcggctggcgtggtgccctccccatttgaacactgccatgtggtgaccaccaccactcacaagaccctgcgaggctgccgagctggcatgatcttctacaggaaaggagtgaaaagtgtggatcccaagactggcaaagagattctgtacaacctggagtctcttatcaattctgctgtgttccctggcctgcagggaggtccccacaaccacgccattgctggggttgctgtggcactgaagcaagctatgactctggaatttaaagtttatcaacaccaggtggtggccaactgcagggctctgtctgaggccctgacggagctgggctacaaaatagtcacaggtggttctgacaaccatttgatccttgtggatctccgttccaaaggcacagatggtggaagggctgagaaggtgctagaagcctgttctattgcctgcaacaagaacacctgtccaggtgacagaagcgctctgcggcccagtggactgcggctggggaccccagcactgacgtcccgtggacttttggaaaaagacttccaaaaagtagcccactttattcacagagggatagagctgaccctgcagatccagagcgacactggtgtcagagccaccctgaaagagttcaaggagagactggcaggggataagtaccaggcggccgtgcaggctctccgggaggaggttgagagcttcgcctctctcttccctctgcctggcctgcctgacttctaaaggagcgggcccactctggacccacctggcgccacagaggaagctgcctgccggaggacccccacctgagagatggatgagctgctccaaaggggaactgttgacactcgggccctttgagggggtttcttttggacttttttcatgttttcttcacaaatcaaaatttgtttaagtctcattgttagtaattctgggacaggttattaaaggatttaaatttgaacctggctttctcacagctggacataattctaggaaaataaaatactatgtcgcc

SEQ ID NO: 27574 - DNA, 2537 bp, Homo sapiens
  source 1..2537: mol_type = unassigned DNA
acggtgctttccagtgttccatagctctttatcttgtgtgggggtctagatctcctggagtctaataatgctagctagatattcagtaggcaccctataaacgtttgtcttgacaacaagcagagagaaaaccctgaaaagcttcaagatagtaaggagagggggcggcactggacctctgtttttgttttttgtttttttccccccaggcaagggcctctaaccctggggctacagacgggaatcataaagaaaaaagcggtgagtgggcgaactacaattcccaaaaggccacaaaggggccaccactacgcatgcgtagatccctcccgttagctttggcgcctcagcgagctcttctcgcgcatgcgttctccgaacggtcttcttccgacagcttgctgccctagaccagagttggtggctggacctcctgcgacttccgagttgcgatgctgtacttctctttgttttgggcggctcggcctctgcagagatgtgggcagctggtcaggatggccattcgggctcagcacagcaacgcagcccagactcagactggggaagcaaacaggggctggacaggccaggagagcctgtcggacagtgatcctgagatgtgggagttgctgcagagggagaaggacaggcagtgtcgtggcctggagctcattgcctcagagaacttctgcagccgagctgcgctggaggccctggggtcctgtctgaacaacaagtactcggagggttatcctggcaagagatactatgggggagcagaggtggtggatgaaattgagctgctgtgccagcgccgggccttggaagcctttgacctggatcctgcacagtggggagtcaatgtccagccctactccgggtccccagccaacctggccgtctacacagcccttctgcaacctcacgaccggatcatggggctggacctgcccgatgggggccatctcacccacggctacatgtctgacgtcaagcggatatcagccacgtccatcttcttcgagtctatgccctataagctcaaccccaaaactggcctcattgactacaaccagctggcactgactgctcgacttttccggccacggctcatcatagctggcaccagcgcctatgctcgcctcattgactacgcccgcatgagagaggtgtgtgatgaagtcaaagcacacctgctggcagacatggcccacatcagtggcctggtggctgccaaggtgattccctcgcctttcaagcacgcggacatcgtcaccaccactactcacaagactcttcgaggggccaggtcagggctcatcttctaccggaaaggggtgaaggctgtggaccccaagactggccgggagatcccttacacatttgaggaccgaatcaactttgccgtgttcccatccctgcaggggggcccccacaatcatgccattgctgcagtagctgtggccctaaagcaggcctgcacccccatgttccgggagtactccctgcaggttctgaagaatgctcgggccatggcagatgccctgctagagcgaggctactcactggtatcaggtggtactgacaaccacctggtgctggtggacctgcggcccaagggcctggatggagctcgggctgagcgggtgctagagcttgtatccatcactgccaacaagaacacctgtcctggagaccgaagtgccatcacaccgggcggcctgcggcttggggccccagccttaacttctcgacagttccgtgaggatgacttccggagagttgtggactttatagatgaaggggtcaacattggcttagaggtgaagagcaagactgccaagctccaggatttcaaatccttcctgcttaaggactcagaaacaagtcagcgtctggccaacctcaggcaacgggtggagcagtttgccagggccttccccatgcctggttttgatgagcattgaaggcacctgggaaatgaggcccacagactcaaagttactctccttccccctacctgggccagtgaaatagaaagcctttctattttttggtgcgggagggaagacctctcacttagggcaagagccaggtatagtctcccttcccagaatttgtaactgagaagatcttttctttttcctttttttggtaacaagacttagaaggagggcccaggcactttctgtttgaacccctgtcatgatcacagtgtcagagacgcgtcctctttcttggggaagttgaggagtgcccttcagagccagtagcaggcaggggtgggtaggcaccctccttcctgtttttatctaataaaatgctaacctgccctgagtttccattactgtgggtggggttcccctgggccaaacagtgatttgtctccctcaatgtgtacaccgctccgctcccaccaccgctaccacaaggacccccggggctgcagcctcctctttctgtctctgatcagagccgacaccagacgtgattagcaggcgcagcaaattcaatttgttaaatgaaattgtattttg

SEQ ID NO: 27575 - DNA, 1885 bp, Homo sapiens
  source 1..1885: mol_type = unassigned DNA
acaatctgtggcctcagcccttgccaactctgcctcttcccccgctgactgggcctctgcagagatgtgggcagctggtcaggatggccattcgggctcagcacagcaacgcagcccagactcagactggggaagcaaacaggggctggacaggccaggagagcctgtcggacagtgatcctgagatgtgggagttgctgcagagggagaaggacaggcagtgtcgtggcctggagctcattgcctcagagatactatgggggagcagaggtggtggatgaaattgagctgctgtgccagcgccgggccttggaagcctttgacctggatcctgcacagtggggagtcaatgtccagccctactccgggtccccagccaacctggccgtctacacagcccttctgcaacctcacgaccggatcatggggctggacctgcccgatgggggccatctcacccacggctacatgtctgacgtcaagcggatatcagccacgtccatcttcttcgagtctatgccctataagctcaacggctttagctgtttgtgtgtctgtccagcccaaaactggcctcattgactacaaccagctggcactgactgctcgacttttccggccacggctcatcatagctggcaccagcgcctatgctcgcctcattgactacgcccgcatgagagaggtgtgtgatgaagtcaaagcacacctgctggcagacatggcccacatcagtggcctggtggctgccaaggtgattccctcgcctttcaagcacgcggacatcgtcaccaccactactcacaagactcttcgaggggccaggtcagggctcatcttctaccggaaaggggtgaaggctgtggaccccaagactggccgggagatcccttacacatttgaggaccgaatcaactttgccgtgttcccatccctgcaggggggcccccacaatcatgccattgctgcagtagctgtggccctaaagcaggcctgcacccccatgttccgggagtactccctgcaggttctgaagaatgctcgggccatggcagatgccctgctagagcgaggctactcactggtatcaggtggtactgacaaccacctggtgctggtggacctgcggcccaagggcctggatggagctcgggctgagcgggtgctagagcttgtatccatcactgccaacaagaacacctgtcctggagaccgaagtgccatcacaccgggcggcctgcggcttggggccccagccttaacttctcgacagttccgtgaggatgacttccggagagttgtggactttatagatgaaggggtcaacattggcttagaggtgaagagcaagactgccaagctccaggatttcaaatccttcctgcttaaggactcagaaacaagtcagcgtctggccaacctcaggcaacgggtggagcagtttgccagggccttccccatgcctggttttgatgagcattgaaggcacctgggaaatgaggcccacagactcaaagttactctccttccccctacctgggccagtgaaatagaaagcctttctattttttggtgcgggagggaagacctctcacttagggcaagagccaggtatagtctcccttcccagaatttgtaactgagaagatcttttctttttcctttttttggtaacaagacttagaaggagggcccaggcactttctgtttgaacccctgtcatgatcacagtgtcagagacgcgtcctctttcttggggaagttgaggagtgcccttcagagccagtagcaggcaggggtgggtaggcaccctccttcctgtttttatctaataaaatgctaacctgccctgagtttccattactgtgggtggggttcccctggg

SEQ ID NO: 27576 - DNA, 2006 bp, Homo sapiens
  source 1..2006: mol_type = unassigned DNA
gcggacccggtgctggcaaatgagcggagttttcggcctggtctcacaagctgagcctttccggccagctctgagccctgcagatgatgcaaccgagcttcactgcttgcatcaggcaggggtcccggcggcagtgagggctggaaggaggtggaacggcctctgcagagatgtgggcagctggtcaggatggccattcgggctcagcacagcaacgcagcccagactcagactggggaagcaaacaggggctggacaggccaggagagcctgtcggacagtgatcctgagatgtgggagttgctgcagagggagaaggacaggcagtgtcgtggcctggagctcattgcctcagagaacttctgcagccgagctgcgctggaggccctggggtcctgtctgaacaacaagtactcggagggttatcctggcaagagatactatgggggagcagaggtggtggatgaaattgagctgctgtgccagcgccgggccttggaagcctttgacctggatcctgcacagtggggagtcaatgtccagccctactccgggtccccagccaacctggccgtctacacagcccttctgcaacctcacgaccggatcatggggctggacctgcccgatgggggccatctcacccacggctacatgtctgacgtcaagcggatatcagccacgtccatcttcttcgagtctatgccctataagctcaaccccaaaactggcctcattgactacaaccagctggcactgactgctcgacttttccggccacggctcatcatagctggcaccagcgcctatgctcgcctcattgactacgcccgcatgagagaggtgtgtgatgaagtcaaagcacacctgctggcagacatggcccacatcagtggcctggtggctgccaaggtgattccctcgcctttcaagcacgcggacatcgtcaccaccactactcacaagactcttcgaggggccaggtcagggctcatcttctaccggaaaggggtgaaggctgtggaccccaagactggccgggagatcccttacacatttgaggaccgaatcaactttgccgtgttcccatccctgcaggggggcccccacaatcatgccattgctgcagtagctgtggccctaaagcaggcctgcacccccatgttccgggagtactccctgcaggttctgaagaatgctcgggccatggcagatgccctgctagagcgaggctactcactggtatcaggtggtactgacaaccacctggtgctggtggacctgcggcccaagggcctggatggagctcgggctgagcgggtgctagagcttgtatccatcactgccaacaagaacacctgtcctggagaccgaagtgccatcacaccgggcggcctgcggcttggggccccagccttaacttctcgacagttccgtgaggatgacttccggagagttgtggactttatagatgaaggggtcaacattggcttagaggtgaagagcaagactgccaagctccaggatttcaaatccttcctgcttaaggactcagaaacaagtcagcgtctggccaacctcaggcaacgggtggagcagtttgccagggccttccccatgcctggttttgatgagcattgaaggcacctgggaaatgaggcccacagactcaaagttactctccttccccctacctgggccagtgaaatagaaagcctttctattttttggtgcgggagggaagacctctcacttagggcaagagccaggtatagtctcccttcccagaatttgtaactgagaagatcttttctttttcctttttttggtaacaagacttagaaggagggcccaggcactttctgtttgaacccctgtcatgatcacagtgtcagagacgcgtcctctttcttggggaagttgaggagtgcccttcagagccagtagcaggcaggggtgggtaggcaccctccttcctgtttttatctaataaaatgctaacctgc

SEQ ID NO: 27577 - DNA, 2121 bp, Homo sapiens
  source 1..2121: mol_type = unassigned DNA
attgctctacaatctgtggcctcagcccttgccaactctgcctcttcccccgctgactggggtatcagtttatggtgccctgcaggaagaccctcttgttcctgtgggtgggaaggttctggaatctcagttgccctctctggagttggggagacataggcttttggaggacaagctttgcagagtggttcatggagtgaggtggtgggagatttctgaggtgcggtgcggtgaatggagcaaatcagaaccaccccttggacgttgatctcaagcttggctccagaactggcttttgaagcctctgcagagatgtgggcagctggtcaggatggccattcgggctcagcacagcaacgcagcccagactcagactggggaagcaaacaggggctggacaggccaggagagcctgtcggacagtgatcctgagatgtgggagttgctgcagagggagaaggacaggcagtgtcgtggcctggagctcattgcctcagagaacttctgcagccgagctgcgctggaggccctggggtcctgtctgaacaacaagtactcggagggttatcctggcaagagatactatgggggagcagaggtggtggatgaaattgagctgctgtgccagcgccgggccttggaagcctttgacctggatcctgcacagtggggagtcaatgtccagccctactccgggtccccagccaacctggccgtctacacagcccttctgcaacctcacgaccggatcatggggctggacctgcccgatgggggccatctcacccacggctacatgtctgacgtcaagcggatatcagccacgtccatcttcttcgagtctatgccctataagctcaaccccaaaactggcctcattgactacaaccagctggcactgactgctcgacttttccggccacggctcatcatagctggcaccagcgcctatgctcgcctcattgactacgcccgcatgagagaggtgtgtgatgaagtcaaagcacacctgctggcagacatggcccacatcagtggcctggtggctgccaaggtgattccctcgcctttcaagcacgcggacatcgtcaccaccactactcacaagactcttcgaggggccaggtcagggctcatcttctaccggaaaggggtgaaggctgtggaccccaagactggccgggagatcccttacacatttgaggaccgaatcaactttgccgtgttcccatccctgcaggggggcccccacaatcatgccattgctgcagtagctgtggccctaaagcaggcctgcacccccatgttccgggagtactccctgcaggttctgaagaatgctcgggccatggcagatgccctgctagagcgaggctactcactggtatcaggtggtactgacaaccacctggtgctggtggacctgcggcccaagggcctggatggagctcgggctgagcgggtgctagagcttgtatccatcactgccaacaagaacacctgtcctggagaccgaagtgccatcacaccgggcggcctgcggcttggggccccagccttaacttctcgacagttccgtgaggatgacttccggagagttgtggactttatagatgaaggggtcaacattggcttagaggtgaagagcaagactgccaagctccaggatttcaaatccttcctgcttaaggactcagaaacaagtcagcgtctggccaacctcaggcaacgggtggagcagtttgccagggccttccccatgcctggttttgatgagcattgaaggcacctgggaaatgaggcccacagactcaaagttactctccttccccctacctgggccagtgaaatagaaagcctttctattttttggtgcgggagggaagacctctcacttagggcaagagccaggtatagtctcccttcccagaatttgtaactgagaagatcttttctttttcctttttttggtaacaagacttagaaggagggcccaggcactttctgtttgaacccctgtcatgatcacagtgtcagagacgcgtcctctttcttggggaagttgaggagtgcccttcagagccagtagcaggcaggggtgggtaggcaccctccttcctg

SEQ ID NO: 27578 - DNA, 1765 bp, Homo sapiens
  source 1..1765: mol_type = unassigned DNA
acggactgctaaaggtctcccctcccacctgcattgctctacaatctgtggcctcagcccttgccaactctgcctcttcccccgctgactgggcctctgcagagatgtgggcagctggtcaggatggccattcgggctcagcacagcaacgcagcccagactcagactggggaagcaaacaggggctggacaggccaggagagcctgtcggacagtgatcctgagatgtgggagttgctgcagagggagaaggacaggcagtgtcgtggcctggagctcattgcctcagagaacttctgcagccgagctgcgctggaggccctggggtcctgtctgaacaacaagtactcggagggttatcctggcaagagatactatgggggagcagaggtggtggatgaaattgagctgctgtgccagcgccgggccttggaagcctttgacctggatcctgcacagtggggagtcaatgtccagccctactccgggtccccagccaacctggccgtctacacagcccttctgcaacctcacgaccggatcatggggctggacctgcccgatgggggccatctcacccacggctacatgtctgacgtcaagcggatatcagccacgtccatcttcttcgagtctatgccctataagctcaaccccaaaactggcctcattgactacaaccagctggcactgactgctcgacttttccggccacggctcatcatagctggcaccagcgcctatgctcgcctcattgactacgcccgcatgagagaggtgtgtgatgaagtcaaagcacacctgctggcagacatggcccacatcagtggcctggtggctgccaaggtgattccctcgcctttcaagcacgcggacatcgtcaccaccactactcacaagactcttcgaggggccaggtcagggctcatcttctaccggaaaggggtgaaggctgtggaccccaagactggccgggagatcccttacacatttgaggaccgaatcaactttgccgtgttcccatccctgcaggggggcccccacaatcatgccattgctgcagtagctgtggccctaaagcaggcctgcacccccatgttccgggagtactccctgcaggttctgaagaatgctcgggccatggcagatgccctgctagagcgaggctactcactggtatcaggtggtactgacaaccacctggtgctggtggacctgcggcccaagggcctggatggagctcgggctgagcgggtgctagagcttgtatccatcactgccaacaagaacacctgtcctggagaccgaagtgccatcacaccgggcggcctgcggcttggggccccagccttaacttctcgacagttccgtgaggatgacttccggagagttgtggactttatagatgaaggggtcaacattggcttagaggtgaagagcaagactgccaagctccaggatttcaaatccttcctgcttaaggactcagaaacaagtcagcgtctggccaacctcaggcaacgggtggagcagtttgccagggccttccccatgcctggttttgatgagcattgaaggcacctgggaaatgaggcccacagactcaaagttactctccttccccctacctgggccagtgaaatagaaagcctttctattttttggtgcgggagggaagacctctcacttagggcaagagccaggtatagtctcccttcccagaatttgtaactgagaagatcttttctttttcctttttttggta

SEQ ID NO: 27579 - DNA, 1918 bp, Homo sapiens
  source 1..1918: mol_type = unassigned DNA
cttcttccgacagcttgctgccctagaccagagttggtggctggacctcctgcgacttccgagttgcgatgctgtacttctctttgttttgggcggctcggcctctgcagagatgtgggcagctggtcaggatggccattcgggctcagcacagcaacgcagcccagactcagactggggaagcaaacaggggctggacaggccaggagagcctgtcggacagtgatcctgagatgtgggagttgctgcagagggagaaggacaggcagtgtcgtggcctggagctcattgcctcagagaacttctgcagccgagctgcgctggaggccctggggtcctgtctgaacaacaagtactcggagggttatcctggcaagagatactatgggggagcagaggtggtggatgaaattgagctgctgtgccagcgccgggccttggaagcctttgacctggatcctgcacagtggggagtcaatgtccagccctactccgggtccccagccaacctggccgtctacacagcccttctgcaacctcacgaccggatcatggggctggacctgcccgatgggggccatctcacccacggctacatgtctgacgtcaagcggatatcagccacgtccatcttcttcgagtctatgccctataagctcaacctggcactgactgctcgacttttccggccacggctcatcatagctggcaccagcgcctatgctcgcctcattgactacgcccgcatgagagaggtgtgtgatgaagtcaaagcacacctgctggcagacatggcccacatcagtggcctggtggctgccaaggtgattccctcgcctttcaagcacgcggacatcgtcaccaccactactcacaagactcttcgaggggccaggtcagggctcatcttctaccggaaaggggtgaaggctgtggaccccaagactggccgggagatcccttacacatttgaggaccgaatcaactttgccgtgttcccatccctgcaggggggcccccacaatcatgccattgctgcagtagctgtggccctaaagcaggcctgcacccccatgttccgggagtactccctgcaggttctgaagaatgctcgggccatggcagatgccctgctagagcgaggctactcactggtatcaggtggtactgacaaccacctggtgctggtggacctgcggcccaagggcctggatggagctcgggctgagcgggtgctagagcttgtatccatcactgccaacaagaacacctgtcctggagaccgaagtgccatcacaccgggcggcctgcggcttggggccccagccttaacttctcgacagttccgtgaggatgacttccggagagttgtggactttatagatgaaggggtcaacattggcttagaggtgaagagcaagactgccaagctccaggatttcaaatccttcctgcttaaggactcagaaacaagtcagcgtctggccaacctcaggcaacgggtggagcagtttgccagggccttccccatgcctggttttgatgagcattgaaggcacctgggaaatgaggcccacagactcaaagttactctccttccccctacctgggccagtgaaatagaaagcctttctattttttggtgcgggagggaagacctctcacttagggcaagagccaggtatagtctcccttcccagaatttgtaactgagaagatcttttctttttcctttttttggtaacaagacttagaaggagggcccaggcactttctgtttgaacccctgtcatgatcacagtgtcagagacgcgtcctctttcttggggaagttgaggagtgcccttcagagccagtagcaggcaggggtgggtaggcaccctccttcctgtttttatctaataaaatgctaacctgc

SEQ ID NO: 27580 - DNA, 1726 bp, Homo sapiens
  source 1..1726: mol_type = unassigned DNA
catccgtgcgtctgtggaaggctgcgtttccggcctgagaaaccgtcatgtttctggggagtcacctcagctggcagttaccaccgtgttagaaagcagcctcaggaccggccacctccatcactggcgtcaccatgggggctgtgctgggtgtcttctccctcgccagctgggttccatgcctctgcagcggtgcctcatgtttgctgtgtagttgctgtcctaacagtaagaattccacggtgactcgcctcatttatgctttcattctcctcctgagcactgtcgtatcctatatcatgcagagaaaagagatggaaacttacttgaagaagattcctggattttgtgaagggggatttaaaatccatgaggctgatataaatgcagataaagattgtgatgtgctggttggttataaagctgtgtatcggatcagctttgccatggccatctttttctttgtcttttctctgctcatgttcaaagtaaaaacaagtaaagatctccgagcggcagtacacaatgggttttggttcttcaaaattgctgcccttattggaatcatggttggctctttctacatccctgggggctatttcagctcagtctggtttgttgttggcatgataggggccgccctcttcatcctcattcagctggtgctgctggtagattttgctcattcttggaatgaatcatgggtaaatcgaatggaagaaggaaacccaaggttgtggtatgctgctttactgtctttcacaagcgccttttatatcctgtcaatcatctgtgtcgggctgctctatacatattacaccaaaccagatggctgcacagaaaacaagttcttcatcagtattaacctgatcctttgcgttgtggcttctattatatcgatccacccaaaaattcaggaacaccagcctcgctccggcctcttgcagtcctccctcatcaccctctacactatgtacctcacctggtcagccatgtccaatgaacctgatcgttcctgcaatcccaacctgatgagctttattacacgcataactgcaccaaccctggctcctggaaattcaactgctgtggtccctacccctactccaccatcaaagagtgggtctttactggattcagataattttattggactgtttgtctttgttctctgcctcttgtattctagcatccgcacttccactaatagccaagtagacaagctgaccctgtcagggagtgacagcgtcatccttggtgatacaactaccagtggtgccagtgatgaagaagatggacagcctcggcgggctgtggacaacgagaaagagggagtgcagtatagctactccttattccacctcatgctctgcttggcttccttgtacatcatgatgaccctgaccagctggtacagccctgatgcaaagtttcagagcatgaccagcaagtggccagctgtgtgggtcaagatcagctccagctgggtctgcctcctgctttacgtctggacccttgtggctccacttgtcctcaccagtcgggacttcagctgaacctctgagtgccaaggacaccactggaactcacaaaggcacccaactcagtgatgtcctaattactgctggatgactcaagccacaccatgcctatgttctcaggtgaagaagaataatagaaaccacatagatgggtaggtgtaccaagcattaaacagacagtatcc

SEQ ID NO: 27581 - DNA, 4445 bp, Homo sapiens
  source 1..4445: mol_type = unassigned DNA
ggtgggcggggccacgccgtgacgcatccgtgcgtctgtggaaggctgcgtttccggcctgagaaaccgtcatgtttctggggagtcacctcagctggcagttaccaccgtgttagaaagcagcctcaggaccggccacctccatcactggcgtcaccatgggggctgtgctgggtgtcttctccctcgccagctgggttccatgcctctgcagcggtgcctcatgtttgctgtgtagttgctgtcctaacagtaagaattccacggtgactcgcctcatttatgctttcattctcctcctgagcactgtcgtatcctatatcatgcagagaaaagagatggaaacttacttgaagaagattcctggattttgtgaagggggatttaaaatccatgaggctgatataaatgcagataaagattgtgatgtgctggttggttataaagctgtgtatcggatcagctttgccatggccatctttttctttgtcttttctctgctcatgttcaaagtaaaaacaagtaaagatctccgagcggcagtacacaatgggttttggttcttcaaaattgctgcccttattggaatcatggttggctctttctacatccctgggggctatttcagctcagtctggtttgttgttggcatgataggggccgccctcttcatcctcattcagctggtgctgctggtagattttgctcattcttggaatgaatcatgggtaaatcgaatggaagaaggaaacccaaggttgtggtatgctgctttactgtctttcacaagcgccttttatatcctgtcaatcatctgtgtcgggctgctctatacatattacaccaaaccagatggctgcacagaaaacaagttcttcatcagtattaacctgatcctttgcgttgtggcttctattatatcgatccacccaaaaattcaggaacaccagcctcgctccggcctcttgcagtcctccctcatcaccctctacactatgtacctcacctggtcagccatgtccaatgaacctgatcgttcctgcaatcccaacctgatgagctttattacacgcataactgcaccaaccctggctcctggaaattcaactgctgtggtccctacccctactccaccatcaaagagtgggtctttactggattcagataattttattggactgtttgtctttgttctctgcctcttgtattctagcatccgcacttccactaatagccaagtagacaagctgaccctgtcagggagtgacagcgtcatccttggtgatacaactaccagtggtgccagtgatgaagaagatggacagcctcggcgggctgtggacaacgagaaagagggagtgcagtatagctactccttattccacctcatgctctgcttggcttccttgtacatcatgatgaccctgaccagctggtacagccctgatgcaaagtttcagagcatgaccagcaagtggccagctgtgtgggtcaagatcagctccagctgggtctgcctcctgctttacgtctggacccttgtggctccacttgtcctcaccagtcgggacttcagctgaacctctgagtgccaaggacaccactggaactcacaaaggtctccttcaccgaaaacccatataccttttaagtttgtttcaactaaaatattaagtgaatgctttgcaagtttgactgtatgcaggtttatatcagaaggtgagattgaataatgcttgatgcagaatcgaaacttctcatttatctgtatattatgtttacttctaaggatatagcacaaagggaacattttttgtttaaagtgaactacagctgtgctgtgaagagagttctttataaagcctgtaggttcttttaactttggtttaaaatgtaagataggaaaatgttggatatttgaggccatgcttaatatatttatattgcagtatcctttaaaagcaaaaaaaaaaaaatgcatttatattacagttttcctctatgaaagtccttacttatatgatacaagcactgtgttttgtgcttaaactcttcagcggggtagcatcaaagttcttggggaaggatcgtatatgtgggtcccttccctagaagaatggttgctgatatggctactgcttctacatcttgagttttttaatttactttttttacactgtagcattgagactgcttgattcaagtctggtgctttgccagatgtattaatttccataaatgctttgtgagtttggttaaaatgaagattcacttgggaaaacactgcagctttagtctgtgttactatcttgttatgagtatgtaaaagtaaaatgcatgtgaatttatcatatttgcactatgaaggtatttggttaaaatacaaagacttttaagattttaaggccctttcttccaacagcttttatagttagcagccattctttattttctggatagccaggttttatcacgcttctagtcaggatgctcctattccttctaaaaattacggtctgactagtgagcaaagtcttgaatttattcaaaagtcctaaataccttctctaggtaagacacttggtagatgagagacggaaggcattgtcaagaaccattttcatgagaggtggtgtgcaaaaaggtagaataaaagagttctttcaacaaagatttactgtctattctgtactagaccctgtaggttttggggtacagtgttaaacatgatagaggctctgccgtcttggactttaatagcttagagaagagagcaaatgagctgacaggtggttataatgtgaattagtgctgtggtttaggaattggagagaactcaaaggagaggtatttggtgtaatggtaggctttctggagaaaatgatatttaagccaagaactcttagaagttagctaagagagagatgggaaaatgagacgacattgctggagtagataaaactgcatgttaaaggcaggaagatggggaaaaaaagttcagtaaagctggaatggggaaatgtagtcagggactgaattttaaagggctttatcaacctcagtaaagagtttggaccttatgttgagggtggctgaaaacatattcatagtgtcatgaacaaattttatcttcagtcacttgggctgatatatagagaatggatttagagagatgagaccaggtgcagtccatatgagatgtgaaatagagaagtggaatcgtagggacggggagaaattgacaggtgagggctacttagcaattagaatttttttttttcaattttaatttttttttttgagacggagtcttgctctgtcgcccaggctggagtgcaatggtgcgatctccgctcactgcaggctccgcctcccgggttcacgccattctcccgcctcagcctccctagtagctgggactacaggcacccaccaccacgcctggctaattttttttgtatttttagtagagacagggtttcaccatgttagccaggatggtctcgatctcctgacctcgtgatccacctgccgcggcctcccaaagttctaggattactggcatgagccaccgtgcctggccagcaattagaattttaacactggcagttatgaataatatgaaggagaggtagatttctgagtgattctggtttaaccagctgggtggatggtggttccacgtattcaggtggcaaacaggaaaaacatgtgttcgaagaagaatggaggtaggtggtctcttaagaatggttaagaggcttgggagtcagactgcttgggtttgcatcccagctttgccgttttctggctatcaaacttgtcagctattatttgttgagtacgtactatttgatttatgaccacaggcagctgagcctcagtgttggtgcctagtgtacaagattgttaaagaataaagttattttgcaaagtgtaacccatttttagcactgacatagcactgacagtagctgctgatctcattatgggctaaaataagacaatattcaaaggtcagagatatctagccagaatctgatggaggctggatttcagattttgttacagaattagacagaggaacacagaggggacaggctcagttagggtggaggtgtggggtagggaagcaggacttgatataaattattggaatcattgtcttttaaaccagtggtttatgtcagggtatagcgtttcaagggatttgagggtcagatggggaaatgtagccccttattttgccagtgtgaagcagataccctgcttttctttacagtagcggagtcagcttaagagctttaaaggtcctaaacttcaaaaacattacagtgccccatcctccgccttaatgtaattcaaaatacaaacaatactaaactgtaaaataaatgtaacaaagtccaataaagtttttatttttttctcatgatgataactga

SEQ ID NO: 27582 - DNA, 812 bp, Homo sapiens
  source 1..812: mol_type = unassigned DNA
gaacaccagcctcgctccggcctcttgcagtcctccctcatcaccctctacactatgtacctcacctggtcagccatgtccaatgaacctgatcgttcctgcaatcccaacctgatgagctttattacacgcataactgcaccaaccctggctcctggaaattcaactgctgtggtccctacccctactccaccatcaaagagtgggtctttactggattcagataattttattggactgtttgtctttgttctctgcctcttgtattctagcatccgcacttccactaatagccaagtagacaagctgaccctgtcagggagtgacagcgtcatccttggtgatacaactaccagtggtgccagtgatgaagaagatggacagcctcggcgggctgtggacaacgagaaagagggagtgcagtatagctactccttattccacctcatgctctgcttggcttccttgtacatcatgatgaccctgaccagctggtacagccctgatgcaaagtttcagagcatgaccagcaagtggccagctgtgtgggtcaagatcagctccagctgggtctgcctcctgctttacgtctggacccttgtggctccacttgtcctcaccagtcgggacttcagctgaacctctgagtgccaaggacaccactggaactcacaaaggcacccaactcagtgatgtcctaattactgctggatgactcaagccacaccatgcctatgttctcaggtgaagaagaataatagaaaccacatagatgggtaggtgtaccaagcattaaacagacagtatccaca

SEQ ID NO: 27583 - DNA, 1791 bp, Homo sapiens
  source 1..1791: mol_type = unassigned DNA
aaaccgtcatgtttctggggagtcacctcagctggcagttaccaccgtgttagaaagcagcctcaggaccggccacctccatcactggcgtcaccatgggggctgtgctgggtgtcttctccctcgccagctgggttccatgcctctgcagcggtgcctcatttatgctttcattctcctcctgagcactgtcgtatcctatatcatgcagagaaaagagatggaaacttacttgaagaagattcctggattttgtgaagggggatttaaaatccatgaggctgatataaatgcagataaagattgtgatgtgctggttggttataaagctgtgtatcggatcagctttgccatggccatctttttctttgtcttttctctgctcatgttcaaagtaaaaacaagtaaagatctccgagcggcagtacacaatgggttttggttcttcaaaattgctgcccttattggaatcatggttggctctttctacatccctgggggctatttcagctcagtctggtttgttgttggcatgataggggccgccctcttcatcctcattcagctggtgctgctggtagattttgctcattcttggaatgaatcatgggtaaatcgaatggaagaaggaaacccaaggttgtggtatgctgctttactgtctttcacaagcgccttttatatcctgtcaatcatctgtgtcgggctgctctatacatattacaccaaaccagatggctgcacagaaaacaagttcttcatcagtattaacctgatcctttgcgttgtggcttctattatatcgatccacccaaaaattcaggaacaccagcctcgctccggcctcttgcagtcctccctcatcaccctctacactatgtacctcacctggtcagccatgtccaatgaacctgatcgttcctgcaatcccaacctgatgagctttattacacgcataactgcaccaaccctggctcctggaaattcaactgctgtggtccctacccctactccaccatcaaagagtgggtctttactggattcagataattttattggactgtttgtctttgttctctgcctcttgtattctagcatccgcacttccactaatagccaagtagacaagctgaccctgtcagggagtgacagcgtcatccttggtgatacaactaccagtggtgccagtgatgaagaagatggacagcctcggcgggctgtggacaacgagaaagagggagtgcagtatagctactccttattccacctcatgctctgcttggcttccttgtacatcatgatgaccctgaccagctggtacagccctgatgcaaagtttcagagcatgaccagcaagtggccagctgtgtgggtcaagatcagctccagctgggtctgcctcctgctttacgtctggacccttgtggctccacttgtcctcaccagtcgggacttcagctgaacctctgagtgccaaggacaccactggaactcacaaaggtctccttcaccgaaaacccatataccttttaagtttgtttcaactaaaatattaagtgaatgctttgcaagtttgactgtatgcaggtttatatcagaaggtgagattgaataatgcttgatgcagaatcgaaacttctcatttatctgtatattatgtttacttctaaggatatagcacaaagggaacattttttgtttaaagtgaactacagctgtgctgtgaagagagttctttataaagcctgtaggttcttttaactttggtttaaaatgtaagataggaaaatg

SEQ ID NO: 27584 - DNA, 1708 bp, Homo sapiens
  source 1..1708: mol_type = unassigned DNA
agttaccaccgtgttagaaagcagcctcaggaccggccacctccatcactggcgtcaccatgggggctgtgctgggtgtcttctccctcgccagctggaaaatcctggtgagttgaaggccaggcatggtggctcacgccaggatggtctcaatctcctgacctcgtgatccgccggcctcccagagtgcttggattacaggttccatgcctctgcagcggtgcctcatgtttgctgtgtagttgctgtcctaacagtaagaattccacggtgactcgcctcatttatgctttcattctcctcctgagcactgtcgtatcctatatcatgcagagaaaagagatggaaacttacttgaagaagattcctggattttgtgaagggggatttaaaatccatgaggctgatataaatgcagataaagattgtgatgtgctggttggttataaagctgtgtatcggatcagctttgccatggccatctttttctttgtcttttctctgctcatgttcaaagtaaaaacaagtaaagatctccgagcggcagtacacaatgggttttggttcttcaaaattgctgcccttattggaatcatggttggctctttctacatccctgggggctatttcagctcagtctggtttgttgttggcatgataggggccgccctcttcatcctcattcagctggtgctgctggtagattttgctcattcttggaatgaatcatgggtaaatcgaatggaagaaggaaacccaaggttgtggtatgctgctttactgtctttcacaagcgccttttatatcctgtcaatcatctgtgtcgggctgctctatacatattacaccaaaccagatggctgcacagaaaacaagttcttcatcagtattaacctgatcctttgcgttgtggcttctattatatcgatccacccaaaaattcaggaacaccagcctcgctccggcctcttgcagtcctccctcatcaccctctacactatgtacctcacctggtcagccatgtccaatgaacctgatcgttcctgcaatcccaacctgatgagctttattacacgcataactgcaccaaccctggctcctggaaattcaactgctgtggtccctacccctactccaccatcaaagagtgggtctttactggattcagataattttattggactgtttgtctttgttctctgcctcttgtattctagcatccgcacttccactaatagccaagtagacaagctgaccctgtcagggagtgacagcgtcatccttggtgatacaactaccagtggtgccagtgatgaagaagatggacagcctcggcgggctgtggacaacgagaaagagggagtgcagtatagctactccttattccacctcatgctctgcttggcttccttgtacatcatgatgaccctgaccagctggtacagccctgatgcaaagtttcagagcatgaccagcaagtggccagctgtgtgggtcaagatcagctccagctgggtctgcctcctgctttacgtctggacccttgtggctccacttgtcctcaccagtcgggacttcagctgaacctctgagtgccaaggacaccactggaactcacaaaggtctccttcaccgaaaacccatataccttttaagtttgtttcaactaaaatattaagtgaatgctttgcaagtttgactgtatgca

SEQ ID NO: 27585 - DNA, 1894 bp, Homo sapiens
  source 1..1894: mol_type = unassigned DNA
ctaactatggcgaccgccacggagcagtgggttctggtggagatggtacaggcgctttacgaggctcctgcttaccatcttattttggaagggattctgatcctctggataatcagacttcttttctctaagacttacaaattacaagaacgatctgatcttacagtcaaggaaaaagaagaactgattgaagagtggcaaccagaacctcttgttcctcctgtcccaaaagaccatcctgctctcaactacaacatcgtttcaggccctccaagccacaaaactgtggtgaatggaaaagaatgtataaacttcgcctcatttaattttcttggattgttggataaccctagggttaaggcagcagctttagcatctctaaagaagtatggcgtggggacttgtggacccagaggattttatggcacatttgatgttcatttggatttggaagaccgcctggcaaaatttatgaagacagaagaagccattatatactcatatggatttgccaccatagccagtgctattcctgcttactctaaaagaggggacattgtttttgtagatagagctgcctgctttgctattcagaaaggattacaggcatcccgtagtgacattaagttatttaagcataatgacatggctgacctcgagcgactactaaaagaacaagagatcgaagatcaaaagaatcctcgcaaggctcgtgtaactcggcgtttcattgtagtagaaggattgtatatgaatactggaactatttgtcctcttccagaattggttaagttaaaatacaaatacaaagcaagaatcttcctggaggaaagcctttcatttggagtcctaggagagcatggccgaggagtcactgaacactatggaatcaatattgatgatattgatcttatcagtgccaacatggagaatgcacttgcttctattggaggtttctgctgtggcaggtcttttgtaattgaccatcagcgactttccggccagggatactgcttttcagcttcgttacctcccctgttagctgctgcagcaattgaggccctcaacatcatggaagagaatccaggtatttttgcagtgttgaaggaaaagtgcggacaaattcataaagctttacaaggcatttctggattaaaagtggtgggggagtccctttctccagcctttcacctacaactggaagagagcactgggtctcgcgagcaagatgtcagactgcttcaggaaattgtagatcaatgcatgaacagaagtattgcattaactcaggcgcgctacttggagaaagaagagaagtgtctccctcctcccagcattcgggttgtggtcacggtggaacaaacagaggaagaactggagagagctgcgtccaccatcaaggaggtagcccaggccgtcctgctctaggcagagtcccgggaccatggcctcctgccacacaacacgcagagaggactcaagactcccgctggccatggagtggcctgaaagagagcaagaacatgtggatctttgataggattgttaccaaatggtgtcagtatggaccaattgtgtgaccatgagaaggatgcttattttttttaaaaagaaaacacatctaaaagcccaggaactgatttttttaagaggaaaactaatgacagtgtataactgatgtttaaattgtgcatttagtactatttaaatgttttcttatactagtattttatattcttttgttgtcgtttaaaactggagcttcagtgtctcttccctccctctaatagtaatggttcagtaagcactccttaactccttagtatttcatagaaaaatgactgcaacattaaagctaagaggaacacttcaacatatgtggtacaaatttata

SEQ ID NO: 27586 - DNA, 946 bp, Homo sapiens
  source 1..946: mol_type = unassigned DNA
gaagcggctaactatggcgaccgccacggagcagtgggttctggtggagatggtacaggcgctttacgaggctcctgcttaccatcttattttggaagggattctgatcctctggataatcagacttcttttctctaagacttacaaattacaagaacgatctgatcttacagtcaaggaaaaagaagaactgattgaagagtggcaaccagaacctcttgttcctcctgtcccaaaagaccatcctgctctcaactacaacatcgtttcaggccctccaagccacaaaactgtggtgaatggaaaagaatgtataaacttcgcctcatttaattttcttggattgttggataaccctagggttaaggcagcagctttagcatctctaaagaagtatggcgtggggacttgtggacccagaggattttatggcacatttgaatgaagatgaaggatcattgatttccttgtgtatggataatccgggaacaggccaactaaatatttgatgaatgtatgatttcaaatacagtgaattccctgggagtcatcaaagaagaccggcattttatggttgtttttattaagtgtatattctttgctcctgaaaatgttattaaataattgtttaggccgggcatggtggctcatgcctgtaatcccagcactttcaaaggctgaggcaggcagatcacctgaggtcaggagttcaaaaccagcctggccaacatgctgaaacctcgtctctactaaaaatacaaaaattagctgggcgtggtggtggatacctgtaatcccagctacgtgggaggctgaggtgggagaattgcttcaacctgggaggcagaggttgcagtgagccgagatcatgccactgcactccagcctgggcaacagagcaagactgtctcaaaaataaataaataaataaaattgtttaaatgaa

SEQ ID NO: 27587 - DNA, 8170 bp, Homo sapiens
  source 1..8170: mol_type = unassigned DNA
gcgtggccttggccgagaccggtcctctgcggagagggccccgccctctgtgaaggcccgcccgggaattggcggcggcgctgcagccatttccggtttcggggaggtgggtggggtgcggagcgggacttggagcagccgccgccgctgccaccgcctacagagcctgccttgcgcctggtgctgccaggaagatgcggccggagcccggaggctgctgctgccgccgcacggtgcgggcgaatggctgcgtggcgaacggggaagtacggaacgggtacgtgaggagcagcgctgcagccgcagccgcagccgccgccggccagatccatcatgttacacaaaatggaggactatataaaagaccgtttaatgaagcttttgaagaaacaccaatgctggttgctgtgctcacgtatgtggggtatggcgtactcaccctctttggatatcttcgagatttcttgaggtattggagaattgaaaagtgtcaccatgcaacagaaagagaagaacaaaaggactttgtgtcattgtatcaagattttgaaaacttttatacaaggaatctgtacatgaggataagagacaactggaatcggccaatctgtagtgtgcctggagccagggtggacatcatggagagacagtctcatgattataactggtccttcaagtatacagggaatataataaagggtgttataaacatgggttcctacaactatcttggatttgcacggaatactggatcatgtcaagaagcagccgccaaagtccttgaggagtatggagctggagtgtgcagtactcggcaggaaattggaaacctggacaagcatgaagaactagaggagcttgtagcaaggttcttaggagtagaagctgctatggcgtatggcatgggatttgcaacgaattcaatgaacattcctgctcttgttggcaaaggttgcctgattctgagtgatgaactgaatcatgcatcactggttctgggagccagactgtcaggagcaaccattagaatcttcaaacacaacaatatgcaaagcctagagaagctattgaaagatgccattgtttatggtcagcctcggacacgaaggccctggaagaaaattctcatccttgtggaaggaatatatagcatggagggatctattgttcgtcttcctgaagtgattgccctcaagaagaaatacaaggcatacttgtatctggatgaggctcacagcattggcgccctgggccccacaggccggggtgtggtggagtactttggcctggatcccgaggatgtggatgttatgatgggaacgttcacaaagagttttggtgcttctggaggatatattggaggcaagaaggagctgatagactacctgcgaacacattctcatagtgcagtgtatgccacgtcattgtcacctcctgtagtggagcagatcatcacctccatgaagtgcatcatggggcaggatggcaccagccttggtaaagagtgtgtacaacagttagctgaaaacaccaggtatttcaggagacgcctgaaagagatgggcttcatcatctatggaaatgaagactctccagtagtgcctttgatgctctacatgcctgccaaaattggcgcctttggacgggagatgctgaagcggaacatcggtgtcgttgtggttggatttcctgccaccccaattattgagtccagagccaggttttgcctgtcagcagctcataccaaagaaatacttgatactgctttaaaggagatagatgaagttggggacctattgcagctgaagtattcccgtcatcggttggtacctctactggacaggccctttgacgagacgacgtatgaagaaacagaagactgagcctttttggtgctccctcagaggaactctccctcacccaggacagcctgtggcctttgtgagccagttccaggaaccacacttctgtggccatctcacgtgaaagacattgcctcagctactgaaggtggccacctccactctaaatgacattttgtaaatagtaaaaaactgcttctaatccttcctttgctaaatctcacctttaaaaacgaaggtgactcactttgctttttcagtccattaaaaaaacattttattttgcaaccattctacttgtgaaatcacgctgaccctagcctgtctctggctaaccacacaggccattcccctctcccagcaccttgcagacttgggcccatcaagagctactgctggccctggctccgcagcctggatacttacctggccctcctccctagggagcaagtgccttccacttacttcccatccaggtctcagaggtctcaaggccaaccttggaatccttatttaaccattcaagtaatcaacggaagttttcaccctttaatcttaagtttagccttttaagaaaaacagtaagcgatgactgctgaaaggctcattgtgtaatctcccaagggtttggtcttattccattttcttctggtcaccagatgatttcttcctttaccatcaaatacttcttcataatggtcacagtctgaggatgtgcgcaaattctggttcttcccaagctctaaccgtaacacgtcccaccccctttttaaagcacttactgttttcagagcacccatatcccaccctggtgagaaggccactctcacatctgagtgttgggtacaaagctgctccgtagagtgatgtgcactcctggtgggtgaggggcaggggcagtggcagtgtgcaaagaattgattactccttgcagagcctgtggcttgcatttcctactgctttctacgtttgaaaattatgacagtctctggctaggtctgggtccagattaggatttaaactgataaaggaaactgttggtaaatcctctgctcagaaagcatttatcatgttcctatttaaggattaggtttattaatttaggcctcttagaagctaacccacttaaatattactcttctgaatgctagttctcttttattcttgatgtcctaagtcaattgaatctggcatctggggctagggtctgcctgtctacatattttttatttttttctgagaaattctgaacacatagatctctttcctaaactgacattttctattttgactgttttcatactataaccaggtaaagggacttctttcagagagctttatactgcctgaccaaagaacaaatctgaaaatcaccattttaaagttattttttcagttgaaccaaagtttaagtgaagaggacttttggcatattatacccaggatcagtttgtctttttgtatccatcaagtattacaggagaaggattgggaacagaatggaaaaacagtgtatgaaagtcatgttacaggccgagtgcggtggctcacacctgtaatcctagcactttgggaggctgaggcaggtggctcacttgaggtcaggaattcaagaccagcctggccaacatggtgaaaccccgtctctactaaaaagacaaaaaattagctgggcgtggtggcgggcacctataatcccacctacttggtaggctgaggcaggagaatcgcttgaacccaggaggcggaggttgcagtgagacgagattgtgccactgcactctagcctgggtgacagagcaaaactgtgtctcaaaaaaaaaagtcatgttacacatttaagtttttgaaattgctccttttatcggtaaagattctcaatccaaattctcctgggtgtgttgtcatcagctgtgatatgtttgtgcacattacgtatagcagaggatgtaagcaatattattgtttgtgaagttttgtttttaatgtcttgagtatgagttatgtttagtcactgtcagcatctgagaactttaataagcccttgagatattccaaagttttattttacttttttaaagaacagaaaaagatgaatgaaagaaccaaggagagatgcagagactatatttagcatgtataggttaaagtaagaaggaggttgtggtaactaaataggagtcctataaaatcaaatacattgtcaaccttttctgcacatctagtttcctaccatagaatcccactggaataccacatagcttttgcactgcagttactatttactaatgtaaacgtagggtttgtaaaagtcacaaacttataagcaatgaacttacctgctagtctttttattttggcttgcatgaagtcactgcaaattcaaatgtcagtaccggcatttaaaatatatctatatcactttgttggtacaaagttatttcaagataagtgtaattttgttacaagtttattttgaagagacaaatctcctgtgatctatgcaggacctctgtactttctaaagaacaaaatgttatgtagacattatacatggttggttgtctcttcttgaaactgtaatgtaaatctagggtccagtcatatcctaggtatcatcatttatccaagtacttggaggaatacaagtatatataaatacagtcattgagaataagtcgatttgaggcatacaagagtagtttcttacacagtttaacacggcctgattcaagactctgataggattcaaacagataccggttaaccatgactaccaaaactgatcatctgagtcgattgatagaggtgtgactagtccttagcactttttctcattcctctttttattcagcattgctgttacctatttcaggtttataagacctctttcagcagatcacatcagaagccaggaaatgcatagctaggagatgtcaaaagcccatatgaggagtggaccaagcagcagtggcggtttctcctcgcatctttttttttttaagctttaacttagcaggggcatggactttatagcactttttcaactttttgctttgctttggataagaaatccttacctttaaaaaaagcttctagtctccataacccccaaagtactgcttatttgtttgaagaatccagccatcgtagtgctttagtcactatcgtaaacattcatgatagggcaaggattttaaaacaggattcttgcttctgtagtcatcaaggtgaacagaagcatcctacacaaccactaagggctctatgtttgtgtcatgcctcttcaaacaccaaggagttgaacatgcttccagtgatttgtctccgtaatgccttcttcctttatttggcctttctttctttctgtaccttcaagttcttgatttttaaaattccaactctagagaaaaccaatatatggtggtgctgggctttgaagatagcatatcagacgccttggttctgtttgtacacttagccttacatttcaggaggaggcttttcattaggggcttaagctagctcctttggcttttaaaaaaaattttttttcaaatttcttcattacctaagggagcctgcatctaaatttctcaactagttcagcctagctgaattttctagtgtgttatacactttgcttccttcttattggtgaaaaccagggggatgagtggcttccatggagagatttcctgatttctcagggaggaaaaaagtgatgacatttaccactacttttatgtttttcccctttttccaaattgataaggatttctggttcctagtgatccgggattgggcaacagtgcagaactgccagtcatgccgtaggccgtgaagaaagaatgtgagtaactgttgttttgcaaggatttgtagggttatgggcagttgttgtttgaagcattgctatgacctaattcccaaggtatctttcctctcttggtgttctaggtaagccaatgagctttaatctctacttgctataaccgtgtgcttagaaaaagaggtgagagtagtggttttccttcaaactgtccacattcatgaagattatgaattgttaggacagccagggcaagatagaccctgtctctacaaaaatttttttctaaattaaccgggcatggtggtgcctgcctgtagtcccacctgtgtgggagaatcacttgagcctgggaggtcaaggctgcagtgagccatgattgcacccctgcactccagcctgggtgacagagtgagaccctggctcaataagagggggaaaaaaaattgttaggagctgggtgcggatgcagcctgcaatcccagctacttgagaggctgaggccggaggattgcttaaacccaagaatttgagcgtagcctgggcaacacagcaagaccccatctaagaaaaaaatgttttttaaatcagcttagcccaaaggggttgtgaatggggaggtataaaaagcaaagattattttttggctactaagccaagaacttacagggattttttttttcagtcccagaacctacagataccctgctacttgcttcacgtggatgctcagtgcccagcagccatcttaatacattaaaccagtttaaaaaataccttccatgtggagaaaaacatgtctttttctcgcctcaactttatccacatgaaatatgtgcccatggctgggcgcagtggctcacctgtaatcccaacactttgggaggctgaagcaggcagattgcttgaggccaggagttcgagaacagtctggccaacatggcgaaacctcatctctactaaaattacaaaaattagccgggcatggtggcacatgcctgtaatcccagctacgtcaggaggctgaggcacaggaattgcttgaacccaagaggcagaggatgcaatgagccaagatcacaccactgcactccagccttggcgacagagggagactctgtctcaaaaaaaaaaaaaaaaggtgtgcccaggcccctagccattgccatgtgcccagccagagagccaaattagagggctggcttccctatcacacagaataaatgctagtgctagccaatgatccctttgcttttaatgtatagaaaatactgttgttccttttgtcatttccagtgacatctgttttctaagcagctcttttctagggaggaaaccaaaggggctaggttaagaccctaatagaaatgttttttctaatctctggtgagtctggaagtgtcacattcacagtccacccttgggagtggcttggtggagctggggacaaggttttgtttactacatagtgcacatgataaatggccttaaactgtgattctttctggtaggataagttataataaactgaccctaaagaatgcaatggcttttaaactgcagttactgtgttcttaatgaagcaatacccaaagctctgttcttttggagcacttgaggggagcttgaatgaaaggtgcagataagagcagtaccttgatcttatgctttctgagtgtcctgccttgttgccatctgcatggatgagtgaatgcttctatgcacgaggagactcaagccaactcagagtctgctttttccaacgctcttcccaggtttcttttgcaaagcttggtcatttggcccaggtcttcctggaaagtggagtacatgtcactgactagggtggcgtggtgtctttacccttaacattaagtcttgttacctcagtgatgtgaagccaatggttggaattataaaaagcatccttgctggttcttcacaggacactggaacccaccctgtcaattcagctagcatgtccacacagtcttgatgatccctctctgtaacaggcagctaacattaagagaagggggaaagagaagaagagagcaatagcttatgggagagctgagatcttacttcgttgacccatatttttcccctgaccaagttacctgtaaactggaatttgcaaggggatgctgtgatgataacccctttctattgctgtaatgttcatataacctgggaaactgagagaaggggatgtgtaaataaaagcttaaacattttagtaatgtgttaaaatgtcactctctcttaccctgtttcccttttttgccagatgatgatttttttatttttattttgtactttactggatgactgtgaagcgatgagtattgggttggggtaggtgtgttgattttgagagtgcatgttaagaactgaaggggaactacttgagatgacttaagaagcatcccatgcaaatatcttgttttgccctaataaaatattcagaaagata

SEQ ID NO: 27588 - DNA, 1615 bp, Homo sapiens
  source 1..1615: mol_type = unassigned DNA
aaagagctttatcccatcccctcgcagactgaaaactaaagcctgcagagacctctgaaggaaaacctgtcccgggctctgtcacttcacacccatggctaaccctggaggtggtgctgtttgcaacgggaaacttcacaatcacaagaaacagagcaatggctcacaaagcagaaactgcacaaagaatggaatagtgaaggaagcccagcaaaatgggaagccacatttttatgataagctcattgttgaatcgtttgaggaagcaccccttcatgttatggttttcacttacatgggatatggaattggaaccctgtttggctatctcagagactttttaagaaactggggaatagaaaaatgcaacgcagctgtggaaagaaaagaacaaaaagattttgtgccactgtatcaagactttgaaaatttttatacaagaaacctttacatgcgaatcagagacaactggaaccggcccatctgcagtgccccagggcctctgtttgatttgatggagagggtatcagacgactataactggacgtttaggtttactggaagagtcatcaaagatgtcatcaacatgggctcctataacttccttggtcttgcagccaagtatgatgagtctatgaggacaataaaggatgttttagaggtgtatggcacaggcgtggccagcaccaggcatgaaatgggcaccttggataagcacaaggagttggaggaccttgtggctaagttcctgaatgtggaagcagctatggtctttgggatgggattcgcaactaactcaatgaatatcccagcattagttggaaagggatgcctcattttaagtgatgagttaaaccacacatcgcttgtgcttggggcccgactctcaggtgcaaccataagaatcttcaaacacaacaacacacaaagcctagagaagctcctgagagatgctgtcatctatggccagcctcgaacccgcagagcttggaaaaagattctcatcctggtggagggtgtctacaggacctcgtggattatttacgggttcactcgcatagtgctgtttatgcttcatccatgagcccaccgatagcagagcaaatcatcagatcactaaaacttatcatgggactggatgggaccactcaagggctgcagagagtacagcaacttgcgaaaaacacaagatacttcagacaaagactgcaggaaatgggattcattatctatggcaatgagaatgcttctgttgttcctctgcttctttatatgcctggtaaagtagcggcttttgcaaggcatatgctagagaaaaaaattggagtggtggtcgtgggatttccagccactcccctcgcagaagctcgggctcggttttgtgtttcagcggcacatacccgggagatgttagacacggtgagtacaccacaggccaacgggatctcagtaccagtaccttggattcaaagcaagtccttttgttgagacagcttggggttctctgggtttctcttgggttatttaggaaaacaacactgacaaaagtcactgccaaaaaacaagagctcgtcaacaacagccaacactgtgaccactcagtagatagaaatga

SEQ ID NO: 27589 - DNA, 3830 bp, Homo sapiens
  source 1..3830: mol_type = unassigned DNA
ggacaatctcctttacagtttcggaagcaggtttgttgccatggagttcacattttgacgggagttgagaagtataaaggtaaccatttgttttagtttcaacgatctgacaaaaagataggctgttgctcttcttctggaaaagcctgattggtaagattcctttaagggctcagccccaaagagctttatcccatcccctcgcagactgaaaactaaagcctgcagagacctctgaaggaaaacctgtcccgggctctgtcacttcacacccatggctaaccctggaggtggtgctgtttgcaacgggaaacttcacaatcacaagaaacagagcaatggctcacaaagcagaaactgcacaaagaatggaatagtgaaggaagcccagcaaaatgggaagccacatttttatgataagctcattgttgaatcgtttgaggaagcaccccttcatgttatggttttcacttacatgggatatggaattggaaccctgtttggctatctcagagactttttaagaaactggggaatagaaaaatgcaacgcagctgtggaaagaaaagaacaaaaagattttgtgccactgtatcaagactttgaaaatttttatacaagaaacctttacatgcgaatcagagacaactggaaccggcccatctgcagtgccccagggcctctgtttgatttgatggagagggtatcagacgactataactggacgtttaggtttactggaagagtcatcaaagatgtcatcaacatgggctcctataacttccttggtcttgcagccaagtatgatgagtctatgaggacaataaaggatgttttagaggtgtatggcacaggcgtggccagcaccaggcatgaaatgggcaccttggataagcacaaggagttggaggaccttgtggctaagttcctgaatgtggaagcagctatggtctttgggatgggattcgcaactaactcaatgaatatcccagcattagttggaaagggatgcctcattttaagtgatgagttaaaccacacatcgcttgtgcttggggcccgactctcaggtgcaaccataagaatcttcaaacacaacaacacacaaagcctagagaagctcctgagagatgctgtcatctatggccagcctcgaacccgcagagcttggaaaaagattctcatcctggtggagggtgtctacagcatggaaggttccatcgtgcatctgccccagatcatagctctaaagaagaaatacaaggcttacctctacatagatgaagctcacagtattggggccgtgggcccaaccggccggggtgtcacggagttctttggactagaccctcatgaagttgatgtgctcatgggcacattcaccaaaagttttggagcttcaggaggttacatagctggaaggaaggacctcgtggattatttacgggttcactcgcatagtgctgtttatgcttcatccatgagcccaccgatagcagagcaaatcatcagatcactaaaacttatcatgggactggatgggaccactcaagggctgcagagagtacagcaacttgcgaaaaacacaagatacttcagacaaagactgcaggaaatgggattcattatctatggcaatgagaatgcttctgttgttcctctgcttctttatatgcctggtaaagtagcggcttttgcaaggcatatgctagagaaaaaaattggagtggtggtcgtgggatttccagccactcccctcgcagaagctcgggctcggttttgtgtttcagcggcacatacccgggagatgttagacacggttttagaagctcttgatgaaatgggtgatctcttgcaactgaaatattcccggcacaagaagtcagcacgtcctgagctctatgatgagacgagctttgaactcgaagattaagtttcctggtcctgaatgacacataaagactttgcgagaaagacctccctccttgcctcacaaggaatataaatggatttctcccccttcctcaggacaattttggttcccagaccagcttgattgaactgagggagacgttgttgtttttaatgtctccagcttggactgcagagacaaaaacatgattccagatttaagtctctcttcttccaagtattctactagaaatacacacacacacacacacacacttctgagaatatttttaatggcaataagcctgtgttttagctgctactgtgcagaccctttcagggattccaaccaaatgcaaatgagagaatttaaaatttttattcagtaagttcactatgtgtttacttattccatctgcagatgtaagtgagtgtggtggacagtagccaccttccttgttccactcataaaagcatcagctagatctcatctgtatcatgggaagttccaggcaggagggtaaagaaatgttgtttctaccatttgtcacatttggacgtttttcacagacaagtgtcaaaagacatagttaatgtttcgagggggaaagcagaactgatcaactgcgactagagacgtctttgaaggaaattttccttttcctcttgctggtctcctacagttttacagctgagcttttgaggtttggaaaattcaagatgtttgtttcataagaaaaggggcagaaagcaagcacaagacacttttaggtctagactaaaatggtagttacaacaatttgaaccttgttggtgcagtgcacggtgaatgcttaccctgcacagcctctattaccttaaggaattagttgtcattttcctattgaattttgagtaaatggtgaaattcagtgtcctttagaatcgactcccaagactatatttgaagaatgcattgattcaagaaggacatttaaaagcaaattctgactttttcaagaccaacacacttgtttaggcctattaaattgtactatcacttgttacatgccctctgaattgggagaaagtgggcttgcacactttgaggtaactaactgtaatttacttgtgttctctctttcttgctctccttctcaacatgaacacaaacctctatggaaaagtagcctcttgttaatctgatctagtttgtatggaaaaagcccatggagaaccttatctttaacaagctcccagagggtgcccagatttggaaattctagagagcagtggtgaccttttagcaaagcttctgtaacagttcgaatgagttgcagaacattccactccatcaaatgacactgtaaacaaatcacttcaagagaggcttggttttgtgtggcacagatggacccaagctttcatgctgtgcactgagatagaaactccacccgcagcgcctgcgatggatggagcagtgtgccctgatgctcaaagcgtattaaaggaaaaaaagtgatcagcatggaaagtttttatggggaaattataactccaagtgggtgcattggtttaaaaatggatcacaatgatagagttcttcatgaatgtttacaagttgtaaggaataccgttagtgaaagaggaaaagaagtgggttctgaaaatgcagtttcccatccaatgattttgataacaaaattccaacttttctcaatgaaactgatgcagtattatttgtgcaaataaaatgtgtcataaatatgcaaagaaagggagacatactgttcttatcttgaatatgtgcatttaaatgaattgtccaaaatgcataaatgccttgcgttctataaaggaaacaggaggtcaaaaagacagcgagatatctagtccttccacaaggtatggaaagcaataaacatcttcctttctttctg

SEQ ID NO: 27590 - DNA, 453 bp, Homo sapiens
  source 1..453: mol_type = unassigned DNA
tgagcccaccgatagcagagcaaatcatcagatcactaaaacttatcatgggactggatgggaccactcaagggctgcagagagtacagcaacttgcgaaaaacacaagatacttcagacaaagactgcaggaaatgggattcattatctatggcaatgagaatgcttctgttgttcctctgcttctttatatgcctggtaaagtagcggcttttgcaaggcatatgctagagaaaaaaattggagtggtggtcgtgggatttccagccactcccctcgcagaagctcgggctcggttttgtgtttcagcggcacatacccgggagatgttagacacggtgatttgctgtgtcatgaagatataacttcaaatgcattctgcaaccttatctttttcttccacaagactacatataagtcactacattttaaaataaaaccttttaagggtaa

SEQ ID NO: 27591 - DNA, 572 bp, Homo sapiens
  source 1..572: mol_type = unassigned DNA
ccagcatggacaatctcctttacagtttcggaagcaggtttgttgccatggagttcacattttgacgggagttgagaagtataaagactgaaaactaaagcctgcagagacctctgaaggaaaacctgtcccgggctctgtcacttcacacccatggctaaccctggaggtggtgctgtttgcaacgggaaacttcacaatcacaagaaacagagcaatggctcacaaagcagaaactgcacaaagaatggaatagtgaaggaagcccagcaaaatgggaagccacatttttatgataagctcattgttgaatcgtttgaggaagcaccccttcatgttatggttttcacttacatgggatatggaattggaaccctgtttggctatctcagagactttttaagaaactggggaatagaaaaatgcaacgcagctgtggaaagaaaagaacaaaaagattttgtgccactgtatcaagactttgaaaatttttatacaagaaacctttacatgcgaatcagagacaactggaaccggcccatctgcagtgccccagggcctctgtttgattt

SEQ ID NO: 27592 - DNA, 645 bp, Homo sapiens
  source 1..645: mol_type = unassigned DNA
aactgcacaaagaatggaatagtgaaggaagcccagcaaaatgggaagccacatttttatgataagctcattgttgaatcgtttgaggaagcaccccttcatgttatggttttcacttacatgggatatggaattggaaccctgtttggctatctcagagactttttaagaaactggggaatagaaaaatgcaacgcagctgtggaaagaaaagaacaaaaagattttgtgccactgtatcaagactttgaaaatttttatacaagaaacctttacatgcgaatcagagacaactggaaccggcccatctgcagtgccccagggcctctgtttgatttgatggagagggtatcagacgactataactggacgtttaggtttactggaagagtcatcaaagatgtcatcaacatgggctcctataacttccttggtcttgcagccaagtatgatgagtctatgaggacaataaaggatgttttagaggtgtatggcacaggcgtggccagcaccaggcatgaaatgggtgaattcacctcatcctggcagaatgccctctgtgtgggaggggtcttgcaagctgactcagtgccacaggggccaccctggtcatggaaaatgggcaggcactcttccctgttggag

SEQ ID NO: 27593 - DNA, 659 bp, Homo sapiens
  source 1..659: mol_type = unassigned DNA
cgcaggggcaagacagccggcgcgggaggaggatggcgctgtcggtgctgcgcttggcgctgctgctcctggcagttaccttcgcaggtagcgctcggagcggtcctggcgagcggggacctccggagaaaagcgggtttgggagtcagaccggcggcggaccctgccctgctccgggcggcctcggcgacgcctctctgatccctcaatttggtctgttttcaaaatatagaacgccaaactgctctcagtatagattaccaggatgtcccagacactttaaccctgtgtgtggcagtgacatgtccacttatgccaatgaatgtactctgtgcatgaaaatcagggaaggtggtcataatattaaaatcattcgaaatggaccctgctgatggagcagtttacagaaaagaagatggagagaccaccttcactggcagactagataaattgcatttcccctttttctcttttcctgtgtttctttacatgagatttgttaacacacattttctgagagcaggtatggaagacagccatgtgtagtgatggataatttaaagaaaaaaagaatccttgtttcttggcttttgctcctggagttaagcttactgcccaggtgacttgtgcattgctttatttagttgaaataaaatcag

SEQ ID NO: 27594 - DNA, 763 bp, Homo sapiens
  source 1..763: mol_type = unassigned DNA
cgcgccccgtcgcacgagcgctccctgcgagtggcgcaggtaacagaccgcaggggcaagacagccggcgcgggaggaggatggcgctgtcggtgctgcgcttggcgctgctgctcctggcagttaccttcgcaggtagcgctcggagcggtcctggcgagcggggacctccggagaaaagcgggtttgggagtcagaccggcggcggaccctgccctgctccgggcggcctcggcgacggtacccgcgcgcccgttactggcggttccccagaggacctgccagcctctctgatccctcaatttggtctgttttcaaaatatagaacgccaaactgctctcagtatagattaccaggatgtcccagacactttaaccctgtgtgtggcagtgacatgtccacttatgccaatgaatgtactctgtgcatgaaaatcagggaaggtggtcataatattaaaatcattcgaaatggaccctgctgatggagcagtttacagaaaagaagatggagagaccaccttcactggcagactagataaattgcatttcccctttttctcttttcctgtgtttctttacatgagatttgttaacacacattttctgagagcaggtatggaagacagccatgtgtagtgatggataatttaaagaaaaaaagaatccttgtttcttggcttttgctcctggagttaagcttactgcccaggtgacttgtgcattgctttatttagttgaaataaaatcagcattgaattca

SEQ ID NO: 27595 - DNA, 542 bp, Homo sapiens
  source 1..542: mol_type = unassigned DNA
ttcacctttcttacacaggtgacattcccagaacctggaggccaggctatgacacagagtcaatcaataaccagggagatctgtgatatagcccagtaggtggggccttgctgccatctgccatatgacccttccagtcccaggcttctgaagagacgtggtaagtgcggtgcagttttcaactgacctctggacgcagaacttcagccatgaaggtaacaggcatctttcttctcagtgccttggccctgttgagtctatctggtaacactggagctgactccctgggaagagaggccaaatgttacaatgaacttaatggatgcaccaagatatatgaccctgtctgtgggactgatggaaatacttatcccaatgaatgcgtgttatgttttgaaaatcggaaacgccagacttctatcctcattcaaaaatctgggccttgctgagaaccaaggttttgaaatcccatcaggtcaccgcgaggcctgactggccttattgttgaataaatgtatctgaatatcccctgttgtttccat

SEQ ID NO: 27596 - DNA, 613 bp, Homo sapiens
  source 1..613: mol_type = unassigned DNA
cgcgccccgtcgcacgagcgctccctgcgagtggcgcaggtaacagaccgcaggggcaagacagccggcgcgggaggaggatggcgctgtcggtgctgcgcttggcgctgctgctcctggcagttaccttcgcagcctctctgatccctcaatttggtctgttttcaaaatatagaacgccaaactgctctcagtatagattaccaggatgtcccagacactttaaccctgtgtgtggcagtgacatgtccacttatgccaatgaatgtactctgtgcatgaaaatcagggaaggtggtcataatattaaaatcattcgaaatggaccctgctgatggagcagtttacagaaaagaagatggagagaccaccttcactggcagactagataaattgcatttcccctttttctcttttcctgtgtttctttacatgagatttgttaacacacattttctgagagcaggtatggaagacagccatgtgtagtgatggataatttaaagaaaaaaagaatccttgtttcttggcttttgctcctggagttaagcttactgcccaggtgacttgtgcattgctttatttagttgaaataaaatcagcattgaattca

SEQ ID NO: 27597 - DNA, 402 bp, Homo sapiens
  source 1..402: mol_type = unassigned DNA
ggcgcaggccccagccagctcaggctacactatcccaggatcagcatggccgtccgccagtgggtaatcgccctggccttggctgccctccttgttgtggacagggaagtgccagtggcagcaggaaagctccctttctcaagaatgcccatctgtgaacacatggtagagtctccaacctgttcccagatgtccaacctggtctgcggcactgatgggctcacatatacgaatgaatgccagctctgcttggcccggataaaaaccaaacaggacatccagatcatgaaagatggcaaatgctgatcccacaggagcacctcaagccatgaagtgtcagctggagaacagtggtgggcatggagaggatatgacatgaaataaaagatccagcccaactga

SEQ ID NO: 27598 - DNA, 425 bp, Homo sapiens
  source 1..425: mol_type = unassigned DNA
atgatcctgggcattgggagctcacctcaccttctctggactctggagggcacacacatatggtccctgctgggggatgcttcgcacacagaccgtcttccagaggcaggggcagggaaactgctgtcagaagtgccagtggcagcaggaaagctccctttctcaagaatgcccatctgtgaacacatggtagagtctccaacctgttcccagatgtccaacctggtctgcggcactgatgggctcacatatacgaatgaatgccagctctgcttggcccggataaaaaccaaacaggacatccagatcatgaaagatggcaaatgctgatcccacaggagcacctcaagccatgaagtgtcagctggagaacagtggtgggcatggagaggatatgacatgaaataaaagatccagcccaactg

SEQ ID NO: 27599 - DNA, 533 bp, Homo sapiens
  source 1..533: mol_type = unassigned DNA
ttctgcaaatgggaggtactggaaagaacgtgagggcaggaggagagatatgccagggtatttattgccctagctccccctctgccagaccacaggtagaatagcaagaagtctacatcctgatgatcctgggcattgggagctcacctcaccttctctggactctggagggcacacacatatggtccctgctgggggatgcttcgcacacagaccgtcttccagaggcaggggcagggaaactgctgtcagaagtgccagtggcagcaggaaagctccctttctcaagaatgcccatctgtgaacacatggtagagtctccaacctgttcccagatgtccaacctggtctgcggcactgatgggctcacatatacgaatgaatgccagctctgcttggcccggataaaaaccaaacaggacatccagatcatgaaagatggcaaatgctgatcccacaggagcacctcaagccatgaagtgtcagctggagaacagtggtgggcatggagaggatatgacatgaaataaaag

SEQ ID NO: 27600 - DNA, 3535 bp, Homo sapiens
  source 1..3535: mol_type = unassigned DNA
atgcatggagtggacctgtaggcgacttgcatcgtcttcaacatgaagatagccacagtgtcagtgcttctgcccttggctctttgcctcatacaagatgctgccagtaagaatgaagatcaggaaatgtgccatgaatttcaggcatttatgaaaaatggaaaactgttctgtccccaggataagaaattttttcaaagtcttgatggaataatgttcatcaataaatgtgccacgtgcaaaatgatactggaaaaagaagcaaaatcacagaagagggccaggcatttagcaagagctcccaaggctactgccccaacagagctgaattgtgatgattttaaaaaaggagaaagagatggggattttatctgtcctgattattatgaagctgtttgtggcacagatgggaaaacatatgacaacagatgtgcactgtgtgctgagaatgcgaaaaccgggtcccaaattggtgtaaaaagtgaaggggaatgtaagagcagtaatccagagcaggatgtatgcagtgcttttcggccctttgttagagatggaagacttggatgcacaagggaaaatgatcctgttcttggtcctgatgggaagacgcatggcaataagtgtgcaatgtgtgctgagctgtttttaaaagaagctgaaaatgccaagcgagagggtgaaactagaattcgacgaaatgctgaaaaggatttttgcaaggaatatgaaaaacaagtgagaaatggaaggcttttttgtacacgggagagtgatccagtccgtggccctgacggcaggatgcatggcaacaaatgtgccctgtgtgctgaaattttcaagcagcgtttttcagaggaaaacagtaaaacagatcaaaatttgggaaaagctgaagaaaaaactaaagttaaaagagaaattgtgaaactctgcagtcaatatcaaaatcaggcaaagaatggaatacttttctgtaccagagaaaatgaccctattcgtggtccagatgggaaaatgcatggcaacttgtgttccatgtgtcaagcctacttccaagcagaaaatgaagaaaagaaaaaggctgaagcacgagctagaaacaaaagagaatctggaaaagcaacctcatatgcagagctttgcagtgaatatcgaaagcttgtgaggaacggaaaacttgcttgcaccagagagaacgatcctatccagggcccagatgggaaagtgcatggcaacacctgctccatgtgtgaggtcttcttccaagcagaagaagaagaaaagaaaaagaaggaaggtaaatcaagaaacaaaagacaatctaagagtacagcttcctttgaggagttgtgtagtgaataccgcaaatccaggaaaaacggacggcttttttgcaccagagagaatgaccccatccagggcccagatggaaaaatgcatggcaacacctgctccatgtgtgaggccttctttcaacaagaagaaagagcaagagcaaaggctaaaagagaagctgcaaaggaaatctgcagtgaatttcgggaccaagtgaggaatggaacacttatatgcaccagggagcataatcctgtccgtggcccagatggcaaaatgcatggaaacaagtgtgccatgtgtgccagtgtgttcaaacttgaagaagaagagaagaaaaatgataaagaagaaaaagggaaagtcgaggctgaaaaagttaagagagaagcagttcaggagctgtgcagtgaatatcgtcattatgtgaggaatggacgactcccctgtaccagagagaatgatcctattgagggtctagatgggaaaatccacggcaacacctgctccatgtgtgaagccttcttccagcaagaagcaaaagaaaaagaaagagctgaacccagagcaaaagtcaaaagagaagctgaaaaggagacatgcgatgaatttcggagacttttgcaaaatggaaaacttttctgcacaagagaaaatgatcctgtgcgtggcccagatggcaagacccatggcaacaagtgtgccatgtgtaaggcagtcttccagaaagaaaatgaggaaagaaagaggaaagaagaggaagatcagagaaatgctgcaggacatggttccagtggtggtggaggaggaaacactcaggacgaatgtgctgagtatcgggaacaaatgaaaaatggaagactcagctgtactcgggagagtgatcctgtacgtgatgctgatggcaaatcgtacaacaatcagtgtaccatgtgtaaagcaaaattggaaagagaagcagagagaaaaaatgagtattctcgctccagatcaaatgggactggatcagaatcagggaaggatacatgtgatgagtttagaagccaaatgaaaaatggaaaactcatctgcactcgagaaagtgaccctgtccggggtccagatggcaagacacatggcaataagtgtactatgtgtaaggaaaaactggaaagggaagcagctgaaaaaaaaaagaaagaggatgaagacaggagcaatacaggagaaaggagcaatacaggagaaaggagcaatgacaaagaggatctgtgtcgtgaatttcgaagcatgcagagaaatggaaagcttatctgcaccagagaaaataaccctgttcgaggcccatatggcaagatgcacatcaataaatgtgctatgtgtcagagcatctttgatcgagaagctaatgaaagaaaaaagaaagatgaagagaaatcaagtagcaagccctcaaataatgcaaaggatgagtgcagtgaatttcgaaactatataaggaacaatgaactcatctgccctagagagaatgacccagtgcacggtgctgatggaaagttctatacaaacaagtgctacatgtgcagagctgtctttctaacagaagctttggaaagggcaaagcttcaagaaaagccatcccatgttagagcttctcaagaggaagacagcccagactctttcagttctctggattctgagatgtgcaaagactaccgagtattgcccaggataggttatctttgtccaaaggatttaaagcctgtctgtggtgacgatggccaaacctacaacaatccttgcatgctctgtcatgaaaacctgatacgccaaacaaatacacacatccgcagtacagggaagtgtgaggagagcagcaccccaggaaccaccgcagccagcatgcccccgtctgacgaatgacaggaagattgttgaaagccatgagggaaaaaataaaccccagttctgaatcacctaccttcaccatctgtatatacaaagaattcttcggagcttgtcttatttgctatagaaaacaatacagagcttttgggaatggactcactgattttcagtcttttccatctctttcctcctagactctgtgatctgagggtataaagacatctccaccaagtctgagccctcaaaatgtcctgattacaatgctgtctgtccaactgcctgttcaataaaagtaaactcagcagaacaccct

SEQ ID NO: 27601 - DNA, 3656 bp, Homo sapiens
  source 1..3656: mol_type = unassigned DNA
ccgagttcagtcatactgcaccagctgagcaatgcatggagtggacctgtaggcgacttgcatcgtcttcaacatgaagatagccacagtgtcagtgcttctgcccttggctctttgcctcatacaagatgctgccagtaagaatgaagatcaggaaatgtgccatgaatttcaggcatttatgaaaaatggaaaactgttctgtccccaggataagaaattttttcaaagtcttgatggaataatgttcatcaataaatgtgccacgtgcaaaatgatactggaaaaagaagcaaaatcacagaagagggccaggcatttagcaagagctcccaaggctactgccccaacagagctgaattgtgatgattttaaaaaaggagaaagagatggggattttatctgtcctgattattatgaagctgtttgtggcacagatgggaaaacatatgacaacagatgtgcactgtgtgctgagaatgcgaaaaccgggtcccaaattggtgtaaaaagtgaaggggaatgtaagagcagtaatccagagcaggatgtatgcagtgcttttcggccctttgttagagatggaagacttggatgcacaagggaaaatgatcctgttcttggtcctgatgggaagacgcatggcaataagtgtgcaatgtgtgctgagctgtttttaaaagaagctgaaaatgccaagcgagagggtgaaactagaattcgacgaaatgctgaaaaggatttttgcaaggaatatgaaaaacaagtgagaaatggaaggcttttttgtacacgggagagtgatccagtccgtggccctgacggcaggatgcatggcaacaaatgtgccctgtgtgctgaaattttcaagcagcgtttttcagaggaaaacagtaaaacagatcaaaatttgggaaaagctgaagaaaaaactaaagttaaaagagaaattgtgaaactctgcagtcaatatcaaaatcaggcaaagaatggaatacttttctgtaccagagaaaatgaccctattcgtggtccagatgggaaaatgcatggcaacttgtgttccatgtgtcaagcctacttccaagcagaaaatgaagaaaagaaaaaggctgaagcacgagctagaaacaaaagagaatctggaaaagcaacctcatatgcagagctttgcagtgaatatcgaaagcttgtgaggaacggaaaacttgcttgcaccagagagaacgatcctatccagggcccagatgggaaagtgcatggcaacacctgctccatgtgtgaggtcttcttccaagcagaagaagaagaaaagaaaaagaaggaaggtaaatcaagaaacaaaagacaatctaagagtacagcttcctttgaggagttgtgtagtgaataccgcaaatccaggaaaaacggacggcttttttgcaccagagagaatgaccccatccagggcccagatggaaaaatgcatggcaacacctgctccatgtgtgaggccttctttcaacaagaagaaagagcaagagcaaaggctaaaagagaagctgcaaaggaaatctgcagtgaatttcgggaccaagtgaggaatggaacacttatatgcaccagggagcataatcctgtccgtggcccagatggcaaaatgcatggaaacaagtgtgccatgtgtgccagtgtgttcaaacttgaagaagaagagaagaaaaatgataaagaagaaaaagggaaagtcgaggctgaaaaagttaagagagaagcagttcaggagctgtgcagtgaatatcgtcattatgtgaggaatggacgactcccctgtaccagagagaatgatcctattgagggtctagatgggaaaatccacggcaacacctgctccatgtgtgaagccttcttccagcaagaagcaaaagaaaaagaaagagctgaacccagagcaaaagtcaaaagagaagctgaaaaggagacatgcgatgaatttcggagacttttgcaaaatggaaaacttttctgcacaagagaaaatgatcctgtgcgtggcccagatggcaagacccatggcaacaagtgtgccatgtgtaaggcagtcttccagaaagaaaatgaggaaagaaagaggaaagaagaggaagatcagagaaatgctgcaggacatggttccagtggtggtggaggaggaaacactcaggacgaatgtgctgagtatcgggaacaaatgaaaaatggaagactcagctgtactcgggagagtgatcctgtacgtgatgctgatggcaaatcgtacaacaatcagtgtaccatgtgtaaagcaaaattggaaagagaagcagagagaaaaaatgagtattctcgctccagatcaaatgggactggatcagaatcagggaaggatacatgtgatgagtttagaagccaaatgaaaaatggaaaactcatctgcactcgagaaagtgaccctgtccggggtccagatggcaagacacatggcaataagtgtactatgtgtaaggaaaaactggaaagggaagcagctgaaaaaaaaaagaaagaggatgaagacaggagcaatacaggagaaaggagcaatacaggagaaaggagcaatgacaaagaggatctgtgtcgtgaatttcgaagcatgcagagaaatggaaagcttatctgcaccagagaaaataaccctgttcgaggcccatatggcaagatgcacatcaataaatgtgctatgtgtcagagcatctttgatcgagaagctaatgaaagaaaaaagaaagatgaagagaaatcaagtagcaagccctcaaataatgcaaaggaccagtgcagacaggttcagaatgaagcggaggatgcaaaatttagacaacctgggcgttccttggcctctgttgccaggatgagtacagatgagtgcagtgaatttcgaaactatataaggaacaatgaactcatctgccctagagagaatgacccagtgcacggtgctgatggaaagttctatacaaacaagtgctacatgtgcagagctgtctttctaacagaagctttggaaagggcaaagcttcaagaaaagccatcccatgttagagcttctcaagaggaagacagcccagactctttcagttctctggattctgagatgtgcaaagactaccgagtattgcccaggataggttatctttgtccaaaggatttaaagcctgtctgtggtgacgatggccaaacctacaacaatccttgcatgctctgtcatgaaaacctgatacgccaaacaaatacacacatccgcagtacagggaagtgtgaggagagcagcaccccaggaaccaccgcagccagcatgcccccgtctgacgaatgacaggaagattgttgaaagccatgagggaaaaaataaaccccagttctgaatcacctaccttcaccatctgtatatacaaagaattcttcggagcttgtcttatttgctatagaaaacaatacagagcttttgggaatggactcactgattttcagtcttttccatctctttcctcctagactctgtgatctgagggtataaagacatctccaccaagtctgagccctcaaaatgtcctgattacaatgctgtctgtccaactgcctgttcaataaaagtaaactcagcagaacaccct

SEQ ID NO: 27602 - DNA, 2915 bp, Homo sapiens
  source 1..2915: mol_type = unassigned DNA
ccgagttcagtcatactgcaccagctgagcaatgcatggagtggacctgtaggcgacttgcatcgtcttcaacatgaagatagccacagtgtcagtgcttctgcccttggctctttgcctcatacaagatgctgccagtaagaatgaagatcaggaaatgtgccatgaatttcaggcatttatgaaaaatggaaaactgttctgtccccaggataagaaattttttcaaagtcttgatggaataatgttcatcaataaatgtgccacgtgcaaaatgatactggaaaaagaagcaaaatcacagaagagggccaggcatttagcaagagctcccaaggctactgccccaacagagctgaattgtgatgattttaaaaaaggagaaagagatggggattttatctgtcctgattattatgaagctgtttgtggcacagatgggaaaacatatgacaacagatgtgcactgtgtgctgagaatgcgaaaaccgggtcccaaattggtgtaaaaagtgaaggggaatgtaagagcagtaatccagagcaggatgtatgcagtgcttttcggccctttgttagagatggaagacttggatgcacaagggaaaatgatcctgttcttggtcctgatgggaagacgcatggcaataagtgtgcaatgtgtgctgagctgtttttaaaagaagctgaaaatgccaagcgagagggtgaaactagaattcgacgaaatgctgaaaaggatttttgcaaggaatatgaaaaacaagtgagaaatggaaggcttttttgtacacgggagagtgatccagtccgtggccctgacggcaggatgcatggcaacaaatgtgccctgtgtgctgaaattttcaagcagcgtttttcagaggaaaacagtaaaacagatcaaaatttgggaaaagctgaagaaaaaactaaagttaaaagagaaattgtgaaactctgcagtcaatatcaaaatcaggcaaagaatggaatacttttctgtaccagagaaaatgaccctattcgtggtccagatgggaaaatgcatggcaacttgtgttccatgtgtcaagcctacttccaagcagaaaatgaagaaaagaaaaaggctgaagcacgagctagaaacaaaagagaatctggaaaagcaacctcatatgcagagctttgcagtgaatatcgaaagcttgtgaggaacggaaaacttgcttgcaccagagagaacgatcctatccagggcccagatgggaaagtgcatggcaacacctgctccatgtgtgaggtcttcttccaagcagaagaagaagaaaagaaaaagaaggaaggtaaatcaagaaacaaaagacaatctaagagtacagcttcctttgaggagttgtgtagtgaataccgcaaatccaggaaaaacggacggcttttttgcaccagagagaatgaccccatccagggcccagatggaaaaatgcatggcaacacctgctccatgtgtgaggccttctttcaacaagaagaaagagcaagagcaaaggctaaaagagaagctgcaaaggaaatctgcagtgaatttcgggaccaagtgaggaatggaacacttatatgcaccagggagcataatcctgtccgtggcccagatggcaaaatgcatggaaacaagtgtgccatgtgtgccagtgtgttcaaacttgaagaagaagagaagaaaaatgataaagaagaaaaagggaaagtcgaggctgaaaaagttaagagagaagcagttcaggagctgtgcagtgaatatcgtcattatgtgaggaatggacgactcccctgtaccagagagaatgatcctattgagggtctagatgggaaaatccacggcaacacctgctccatgtgtgaagccttcttccagcaagaagcaaaagaaaaagaaagagctgaacccagagcaaaagtcaaaagagaagctgaaaaggagacatgcgatgaatttcggagacttttgcaaaatggaaaacttttctgcacaagagaaaatgatcctgtgcgtggcccagatggcaagacccatggcaacaagtgtgccatgtgtaaggcagtcttccagaaagaaaatgaggaaagaaagaggaaagaagaggaagatcagagaaatgctgcaggacatggttccagtggtggtggaggaggaaacactcaggacgaatgtgctgagtatcgggaacaaatgaaaaatggaagactcagctgtactcgggagagtgatcctgtacgtgatgctgatggcaaatcgtacaacaatcagtgtaccatgtgtaaagcaaaattggaaagagaagcagagagaaaaaatgagtattctcgctccagatcaaatgggactggatcagaatcagggaaggatacatgtgatgagtttagaagccaaatgaaaaatggaaaactcatctgcactcgagaaagtgaccctgtccggggtccagatggcaagacacatggcaataagtgtactatgtgtaaggaaaaactggaaagggaagcagctgaaaaaaaaaagaaagaggatgaagacaggagcaatacaggagaaaggagcaatacaggagaaaggagcaatgacaaagaggatctgtgtcgtgaatttcgaagcatgcagagaaatggaaagcttatctgcaccagagaaaataaccctgttcgaggcccatatggcaagatgcacatcaataaatgtgctatgtgtcagagcatctttgatcgagaagctaatgaaagaaaaaagaaagatgaagagaaatcaagtagcaagccctcaaataatgcaaaggttatttattaaaggataccaaaataaccattttacttttcaccttcagaattttgcattcttctccagctttgggaataataaatatattaatatcttaact

SEQ ID NO: 27603 - DNA, 453 bp, Homo sapiens
  source 1..453: mol_type = unassigned DNA
ggacaccaggtcacttcttttccctacatctgactgccttggccacttcagtactatgagagcaacagccatagtcctactcttggctctgacacttgcaaccatgttcagtatagaatgtgccaaacagacgaaacagatggttgactgcagtcattataaaaagttaccaccaggacaacagagattttgtcatcatatgtatgatccaatttgtggatctgatggcaaaacttataaaaatgattgcttcttctgttctaaagttaagaaaactgacggcacacttaaatttgtacattttggaaaatgttaaatctatcttgtgagtccaaaatatcttttaatgcatctattcacaagagtcacatttctgttcccatattatctatgccacattgcctactcatcaccatatgtagatttctttgtagaataaagcagatataaggg

SEQ ID NO: 27604 - DNA, 1801 bp, Homo sapiens
  source 1..1801: mol_type = unassigned DNA
gcggccgcgcaggtgcctgccctttgcgcctgcgcccagctcgccctgcctagccaggtgcgccccgccccctgcctgcccggccaccttcgggagccgcttccaataggcgttcgccattggctctggcgacctccgcgcgttgggaggtgtagcgcggctctgaacgcgctgagggccgttgagtgtcgcaggcggcgagggcgcgagtgaggagcagacccaggcatcgcgcgccgagaaggccgggcgtccccacactgaaggtccggaaaggcgacttccgggggctttggcacctggcggaccctcccggagcgtcggcacctgaacgcgaggcgctccattgcgcgtgcgcgttgaggggcttcccgcacctgatcgcgagaccccaacggctggtggcgtcgcctgcgcgtctcggctgagctggccatggcgcagctgtgcgggctgaggcggagccgggcgtttctcgccctgctgggatcgctgctcctctctggggtcctggcggccgaccgagaacgcagcatccacgacttctgcctggtgtcgaaggtggtgggcagatgccgggcctccatgcctaggtggtggtacaatgtcactgacggatcctgccagctgtttgtgtatgggggctgtgacggaaacagcaataattacctgaccaaggaggagtgcctcaagaaatgtgccactgtcacagagaatgccacgggtgacctggccaccagcaggaatgcagcggattcctctgtcccaagtgctcccagaaggcaggattctgaagaccactccagcgatatgttcaactatgaagaatactgcaccgccaacgcagtcactgggccttgccgtgcatccttcccacgctggtactttgacgtggagaggaactcctgcaataacttcatctatggaggctgccggggcaataagaacagctaccgctctgaggaggcctgcatgctccgctgcttccgccagcaggagaatcctcccctgccccttggctcaaaggtggtggttctggcggggctgttcgtgatggtgttgatcctcttcctgggagcctccatggtctacctgatccgggtggcacggaggaaccaggagcgtgccctgcgcaccgtctggagctccggagatgacaaggagcagctggtgaagaacacatatgtcctgtgaccgccctgtcgccaagaggactggggaagggaggggagactatgtgtgagctttttttaaatagagggattgactcggatttgagtgatcattagggctgaggtctgtttctctgggaggtaggacggctgcttcctggtctggcagggatgggtttgctttggaaatcctctaggaggctcctcctcgcatggcctgcagtctggcagcagccccgagttgtttcctcgctgatcgatttctttcctccaggtagagttttctttgcttatgttgaattccattgcctcttttctcatcacagaagtgatgttggaatcgtttcttttgtttgtctgatttatggtttttttaagtataaacaaaagttttttattagcattctgaaagaaggaaagtaaaatgtacaagtttaataaaaaggggccttcccctttagaataaatttcagcatgtgctttctttatgggagtcctaatttcaaccctaccaaaatgatcacaagacactatctgaggtgtcccattctagaaatagacccctcaaaatagcgtctttcagatctttttgaatgaatccacaagatgaaataaatgtcctattactg

SEQ ID NO: 27605 - DNA, 1630 bp, Homo sapiens
  source 1..1630: mol_type = unassigned DNA
gcggccgcgcaggtgcctgccctttgcgcctgcgcccagctcgccctgcctagccaggtgcgccccgccccctgcctgcccggccaccttcgggagccgcttccaataggcgttcgccattggctctggcgacctccgcgcgttgggaggtgtagcgcggctctgaacgcgctgagggccgttgagtgtcgcaggcggcgagggcgcgagtgaggagcagacccaggcatcgcgcgccgagaaggccgggcgtccccacactgaaggtccggaaaggcgacttccgggggctttggcacctggcggaccctcccggagcgtcggcacctgaacgcgaggcgctccattgcgcgtgcgcgttgaggggcttcccgcacctgatcgcgagaccccaacggctggtggcgtcgcctgcgcgtctcggctgagctggccatggcgcagctgtgcgggctgaggcggagccgggcgtttctcgccctgctgggatcgctgctcctctctggggtcctggcggccgaccgagaacgcagcatccacgagaatgccacgggtgacctggccaccagcaggaatgcagcggattcctctgtcccaagtgctcccagaaggcaggattctgaagaccactccagcgatatgttcaactatgaagaatactgcaccgccaacgcagtcactgggccttgccgtgcatccttcccacgctggtactttgacgtggagaggaactcctgcaataacttcatctatggaggctgccggggcaataagaacagctaccgctctgaggaggcctgcatgctccgctgcttccgccagcaggagaatcctcccctgccccttggctcaaaggtggtggttctggcggggctgttcgtgatggtgttgatcctcttcctgggagcctccatggtctacctgatccgggtggcacggaggaaccaggagcgtgccctgcgcaccgtctggagctccggagatgacaaggagcagctggtgaagaacacatatgtcctgtgaccgccctgtcgccaagaggactggggaagggaggggagactatgtgtgagctttttttaaatagagggattgactcggatttgagtgatcattagggctgaggtctgtttctctgggaggtaggacggctgcttcctggtctggcagggatgggtttgctttggaaatcctctaggaggctcctcctcgcatggcctgcagtctggcagcagccccgagttgtttcctcgctgatcgatttctttcctccaggtagagttttctttgcttatgttgaattccattgcctcttttctcatcacagaagtgatgttggaatcgtttcttttgtttgtctgatttatggtttttttaagtataaacaaaagttttttattagcattctgaaagaaggaaagtaaaatgtacaagtttaataaaaaggggccttcccctttagaataaatttcagcatgtgctttctttatgggagtcctaatttcaaccctaccaaaatgatcacaagacactatctgaggtgtcccattctagaaatagacccctcaaaatagcgtctttcagatctttttgaatgaatccacaagatgaaataaatgtcctattactg

SEQ ID NO: 27606 - DNA, 476 bp, Homo sapiens
  source 1..476: mol_type = unassigned DNA
ctggctgagtggcaccatgcagcttcaggcctctctctcgtttctcctgattctcactctctgcctagagcttcgatcagaactagcacgagacactatcaaggatctcctcccaaatgtatgcgcttttcctatggaaaagggcccttgtcaaacctacatgacgcgatggtttttcaactttgaaactggtgaatgtgagttatttgcttacggaggctgcggaggcaacagcaacaactttttgaggaaagaaaaatgtgagaaattctgcaagttcacctgattttctaacaagaacacagccctccatggattcgggattgctctgagggccatagaaggcatttgcgtgtgtgtgtgtgtgtgtgtgtgaacaagaggttcattcctctacccccacatttattctccctgatgtgctcctacaagtgcttcatctctgtgcctgaaattctataaatgttgcaatcatg

SEQ ID NO: 27607 - DNA, 2478 bp, Homo sapiens
  source 1..2478: mol_type = unassigned DNA
gcagaggtgcggccggggaggcgcgcggaggctggagctggaggcgcggcgccggtgagctgagaaccatgtgtgctcagtattgcatctcctttgctgatgttgaaaaagctcatatcaacattcgagattctatccacctcacaccagtgctaacaagctccattttgaatcaactaacagggcgcaatcttttcttcaaatgtgaactcttccagaaaacaggatcttttaagattcgtggtgctctcaatgccgtcagaagcttggttcctgatgctttagaaaggaagccgaaagctgttgttactcacagcagtggaaaccatggccaggctctcacctatgctgccaaattggaaggaattcctgcttatattgtggtgccccagacagctccagactgtaaaaaacttgcaatacaagcctacggagcgtcaattgtatactgtgaacctagtgatgagtccagagaaaatgttgcaaaaagagttacagaagaaacagaaggcatcatggtacatcccaaccaggagcctgcagtgatagctggacaagggacaattgccctggaagtgctgaaccaggttcctttggtggatgcactggtggtacctgtaggtggaggaggaatgcttgctggaatagcaattacagttaaggctctgaaacctagtgtgaaggtatatgctgctgaaccctcaaatgcagatgactgctaccagtccaagctgaaggggaaactgatgcccaatctttatcctccagaaaccatagcagatggtgtcaaatccagcattggcttgaacacctggcctattatcagggaccttgtggatgatatcttcactgtcacagaggatgaaattaagtgtgcaacccagctggtgtgggagaggatgaaactactcattgaacctacagctggtgttggagtggctgctgtgctgtctcaacattttcaaactgtttccccagaagtaaagaacatttgtattgtgctcagtggtggaaatgtagacttaacctcctccataacttgggtgaagcaggctgaaaggccagcttcttatcagtctgtttctgtttaatttacagaaaaggaaatggtgggaattcagtgtctttagatactgaagacattttgtttcctagtattgtcaactcttagttatcagattcttaatggagagtggctatttcattaagatttaatagttttttttggactaagtagtggaaaaacttttatacttaactgagacattttgtcaaggctaaaaaaaagtcttgcaaaatggggcagtggactgacaggctgacatagaaaataaactttgcccaatcacaacttgtgcctcccatccctggagtactgactggcaccggtaagacagaatctctttgaatccattactccatgcccccttgaggcactgttgaagaaatctcacttttcagccagggtactggttctggtacatatggatcataagtccatttggggaagactcgtttatacaggttcatcagtactgtgtcttgagattttagcttcccatcaaagctgcatttcatgtggccatgggtacctagaaagacatcagaacaagtcggtcaaattaaaagtagaaaattttaaagcaatgacttccaacccaacagtcatttagcaacactgcagaaatgcagacatggtctcaaatcccgtgtttccttacctaaaggttccttgatatgtcctctccggccccacttcgttctcagttccactggtttaaaccacagcacatcctcttagaatcaaacacattaaagaccaagatgaaacatttacccacaaaatgtaaacccaacctttataccacaaaggcaatcagatcccatcctcctccttcatacccacctctgttgaagaacatgtaacgtactactgccatcttagtaaaaattttgaaaggatgaccactcagaacaactctcttgatgaccattctgtctggatctactgacataagatggcctgtagcaatgaggctgtgcattcctaaaggacaaaagcaaagaagctatttaggaatttacaggccaaagtcttcatttattgcccagtccatttaaagacccatgcaagagcctggtttgtcatccctgccctagcccaatctgaggctaagattggtaaactgtaagcccacacttaaccttgtcaataggttcttgaaaacttgtacttcaagagaaatgatgtataacaaaaccatactttttctcatcagttgttacaaggaaaggatgttgaacaaaaggcagttatttgaggactggctatacactgtttcacgtaaaagttggagttttcattgttctattaacaatgttaaatgaagacttactgtattttgaaaaccatcattaccttctccataccatttggctcccaaatttaaataaacaagagaaaacggtgttcatcta

SEQ ID NO: 27608 - DNA, 3820 bp, Homo sapiens
  source 1..3820: mol_type = unassigned DNA
aaactagaaggactgcgattagattaggcaaggtgggaaagggataccggcaagtaaagcgccggaaacttacaacttgggttattttctaactggcgtcttgcaaagggacaccatgtaggtatcccgctcgtcaacttgtaaatgaacttcaggttctctttggtggcaggagaattctgaatgtgagaacctggcggccgttcaacgaccccgccctcggggtccccagggggcgtcctccggcaagcctgatcgtctggggccaaggcgcagggcgagcagggagggaggaggagaaccagggccggtggccccgaaagcacacacaaagcggcctgactcctttggtgggaacttccccggccgccagcggagcgggagcgggagggggcggcggagagggggggcggcggttcccctcgccgaggcggagaacagcgcgcgctaggctctgggcgcgcggcgagcgcagcggccgccgcctcctcccttccccgcctccgccggcgctgcctcctccctccgcccagctcggcctcccttgctccctcccctcctagctggcttcggcggggacggcggcggcggcggcgggcggggagggcgtgcgccggccgagaggtgtcggcggcgaggcaaaggaagtttcaagtggaaggtcgtccgtcggccggcgcgtcctcctgctctcctccgcagcatcatggcggagccgagcggctcgcccgtgcacgtccagcttccccagcaggcggccccggtgacagcggcggcggcggcggccccggcggccgcgacagcagcgccggccccggcagctcccgcggccccggccccggccccggccccggcggcacaggctgtcggctggcccatctgcagggacgcgtacgagctgcaggaggttatcggcagtggagctactgctgtggttcaggcagccctatgcaaacccaggcaagaacgtgtagcaataaaacggatcaacttggaaaaatgccagaccagtatggatgaactattaaaagaaattcaagccatgagtcagtgcagccatcccaacgtagtgacctattacacctcttttgtggtcaaagatgaactttggctggtcatgaaattactaagtggaggttcaatgttggatatcataaaatacattgtcaaccgaggagaacacaagaatggagttctggaagaggcaataatagcaacaattcttaaagaggttttggaaggcttagactatctacacagaaacggtcagattcacagggatttgaaagctggtaatattcttctgggtgaggatggttcagtacaaatagcagattttggggtaagtgcgttcctagcaacagggggtgatgttacccgaaataaagtaagaaaaacattcgttggcaccccatgttggatggctcctgaagtcatggaacaggtgagaggctatgacttcaaggctgacatgtggagttttggaataactgccattgaattagcaacaggagcagcgccttatcacaaatatcctcccatgaaagtgttaatgttgactttgcaaaatgatccacccactttggaaacaggggtagaggataaagaaatgatgaaaaagtacggcaagtcctttagaaaattactttcactgtgtcttcagaaagatccttccaaaaggcccacagcagcagaacttttaaaatgcaaattcttccagaaagccaagaacagagagtacctgattgagaagctgcttacaagaacaccagacatagcccaaagagccaaaaaggtaagaagagttcctgggtcaagtggtcaccttcataaaaccgaagacggggactgggagtggagtgacgacgagatggatgagaagagcgaagaagggaaagcagctttttctcaggaaaagtcacgaagagtaaaagaagaaaatccagagattgcagtgagtgccagcaccatccccgaacaaatacagtccctctctgtgcacgactctcagggcccacccaatgctaatgaagactacagagaagcttcttcttgtgccgtgaacctcgttttgagattaagaaactccagaaaggaacttaatgacatacgatttgagtttactccaggaagagatacagcagatggtgtatctcaggagctcttctctgctggcttggtggatggtcacgatgtagttatagtggctgctaatttacagaagattgtagatgatcccaaagctttaaaaacattgacatttaagttggcttctggctgtgatgggtcggagattcctgatgaagtgaagctgattgggtttgctcagttgagtgtcagctgatgtatgtcccttgatgtcaccctgatctgtcatgccccaccgccacccctactcccttcaaccctccctctttctgcccatttcctcccaccccctcactcccatttcctagcaaaatcagaagattgtgaagaggccggcttcaacaaaatgggataaaaaaataattttttaaaacttacaacactccgagttctgctttattctctagcaatccacagtacaagaacaagcaaatgccacagctgcacgactgttgctcatttttccaaaagctatttaatattcttagcaatcaatttggatatcccttaagtgaaaagaatctgaaatacactcaggtggtcttatttattggcaacaaaaggaattttctatccagaagcctatttctcctttcattgttgttatttctgttataatactttaattgtacatctgacaatactgcctcttttatgttgtatttagaaattaatatacttataaaattaagatttattagccaaacttgaattctagttttaaaactgactgtgaattttatttttcatatatttatgcattacacaccttagctataagaaaaaaagggttttgattatatgcttcttgcagttaatctcgttatttaaacaaaaagttttgggtctgtctttggagtatttgtaacttctaaattttgaaatgactgaattaggaatttggatgcttattcttttagtctgtttgcctaaaaaccaatttacaatctgactgtctcttgggagagggaggtgccttgcaaactttcacattaagaatgtgcctgaggctgctttactctggaatagtctcagatctaaaatttcctctatataaggtggcatatgttaagttttgcttcattggaccgtttagaatgctatgtaaaatgttgccattctgttagattgctaactatatacccatctctgatttggctctccttaagtgataggatttgttattctaaaggtgataaacttgaaaatatcagaatctgagttttacttgaaattttgcagaatacccaggtggagtgaaaattggaagggttttgtgcaatgactaaaaggtaaaacgctgttaaggttcaagaatcaatactttcaacccaagtagccctctgcttgactgtatattatggaactagtaaaccttaggattttgaaaattggagtctaatctttcaaggaggtgggctcccaggatggtaccattgctctttcctagctaaccctagatatggcagctctttaatgtacttcaaaaagcaaatatatattactaaggaaaaaaagttatttataattgccttgtcataattgttaaggtgttctagagccatttgcatacaatttaatgtaatttcattccattctattgtttacacaacgattactcgaagatgactgcaaaggtaaaaggaaaataaaagtgtattgcacaatgaga

SEQ ID NO: 27609 - DNA, 3920 bp, Homo sapiens
  source 1..3920: mol_type = unassigned DNA
ggagtttagggcctgacagaagcccgcccccgctggcgctcgtgcgcacgcgtggcgggctctcggcgcactgagcaggcgcggcctcgtgtcggccggagggggcgggcgcaacgacgcgcgctgcgtcccggcgctcggctttccctccgccggtcccgccctccgtcgcggcggcgcggtgtaccctgggatagggagcgatctccgagcgaggcggcaagatggacgcgggatttttccgcggaacaagtgcagaacaggataatcggttcagcaacaaacagaagaaactactgaagcagctgaaatttgcagaatgcctagaaaaaaaggtggacatgagcaaagtaaatttggaggttataaagccttggataacaaaaagagtaacggaaatccttgggtttgaagatgatgttgtgattgagtttatattcaaccagctggaagtgaagaatccagactccaaaatgatgcaaatcaacctgactggatttttgaatggaaaaaatgctcgagaatttatgggagaactgtggcccctgctgctaagtgcacaagaaaacatcgcgggaatcccttctgctttcctagaactgaagaaagaagaaataaaacaaagacagattgaacaagaaaaactggcatctatgaaaaagcaagatgaagacaaagataaaagagataaggaagaaaaagaaagcagcagagaaaaaagggagcggtctcgtagcccaagaagacgcaaatccagatctccttcccctagaagacgatcttcccctgtcaggagagagagaaagcgcagtcattctcgatctccccgtcacagaaccaagagccggagtccttcccctgctccagaaaagaaggaaaaaactccagagctcccagaaccttcagtgaaagtaaaagaaccttcagtacaagaggctacttctactagtgacattctgaaagttcccaaacctgaacctataccagagcctaaagaaccttctccggaaaaaaattccaaaaaagaaaaggagaaggagaagacccgaccacgatctcggtcacgctccaaatcaagatcccggacgcggtcccgctctccttctcacactcgacctagacggcgccatagatcccgatcaagatcgtattcacctagaaggcggccaagcccaagaaggcggccatctcctcgaagaagaactccgccaagaagaatgcctcctccaccaaggcatagaaggagtagatctccagtaagacgaagaagacgttcgtcagcatccttgtctgggagtagctcatcatcctcttcatctcgttcacggtcaccaccaaagaagcctcccaagaggacatccagcccccctcggaaaactcgtaggttatctccttcagcaagtcctccaaggcgaaggcacaggccatcacctcctgcaactccaccacccaaaactcggcattcccctacaccccagcagtcaaaccgtacaagaaaaagtcgtgtttctgtgtctccagggagaacttcaggtaaagtgacaaaacataaaggtactgagaaaagagaatccccttcaccagcaccgaagcctagaaaagtagagttatctgaatcggaagaagataaaggtggcaaaatggctgcagcagattctgtgcagcagagacgccaatacagacgacaaaaccagcagtcttcatctgactctggctcctcctcctcctcagaagatgaacgacccaagagatcccatgtgaagaatggtgaggttggcaggcggcggagacattccccttcccggagtgcttctccatcaccacgaaagcgccaaaaagagacttcccctcgtggtagacggaggagaagtccatccccaccacccaccagaaggcgacggtctccttctcccgcccctcctcctcgacggcgcaggactcccacaccaccaccacgacgaaggactccttctcctcccccacgtcggcgctcaccttctcctagaagatactctcctccaatacagaggagatactctccttctccacctccaaagagaagaacggcttcacctcctccccctcctaaacgaagagcatcaccatctccaccaccaaagcggcgggtctcccattctccacctcccaaacaaagaagctccccagtcaccaagagacgttcaccttcattatcatccaagcataggaaagggtcttccccaagccgctctacccgggaggcccgatcaccacaaccaaacaaacggcattcgccctcaccacggcctcgagctcctcagacctcctcaagtcctccacccgttcgaagaggagcgtcgtcatcaccccaaagaaggcagtccccgtctccaagtactaggcccattaggagagtctccaggactccggaacctaaaaagataaaaaaggctgcttccccaagcccacagtctgtaagaagggtctcatcctcccgatctgtctccgggtctcctgagccagcagctaaaaagcccccagcacctccatcccccgtccagtctcagtcaccgtctacaaactggtcaccagctgtaccggtcaaaaaggccaaaagcccaacaccgagcccatcaccgccaagaaattcagatcaggaaggaggtggaaagaaaaagaagaaaaagaaggacaagaaacacaaaaaggataagaagcacaagaagcacaaaaaacacaagaaggaaaaggctgtggctgcagctgctgcagctgctgtgacccctgcagccattgcagctgccacaaccacattagcacaggaagagccagtggcagcgccagagccgaagaaggagactgaaagtgaagctgaagataaccttgatgatttagaaaagcacctgcgtgaaaaggccctgagatcaatgaggaaggcccaagtgtccccacagtcttagggggaaatgtttgttatgatgtaaattttatttggtttgtacgcagttcaatttcaaaattgctaaaatgtgtttgagctttagactataacatttgttgtaataattgctaggttgaagttcaacatgtaaaaaaagggggcatggatttacattgcaaaaggtgtccacagtgtattagtgacattctttcattgacagctgacataattcattgagtgaaatattttaagccaaaaaaaaattccctttttaaaaaagggggtttaaatactgttggcatttttatggttcctttaaatgccctagctattcccagaggggtttttttgtttgtttttttggttttgattttctttttgtttttctttcttcttcttatttttttcatttgagtcttagctcccatttaagttatgcttctgaccttgtatggtctgtaagcttgcccagaaataagaccactgttttgaactaccacaaaagtataaatgaatattttaatgccacaatctttcctgttgcctgtggagtctctgctgaaatgaatcaggattcgagctctaggatgagacagaaaatgaaagcatgttgtttgccaggacactgtgggtttatattgatgtgtaacaagttgatttggaacactggactctcattctgttattctggttttgttttttttgttttgttttttttcttttgtaaaggcaatgagctagtcccagaaaggatccttcagttacatacaatttgtttaatgaaatgtcatggctctgttcatatttttgtcttgttcttccaattggtatatacaactttcagagcctcttgtatttggaaggctggaagggcccagactttggaatagtgtcttggtttcactgtttttgttttgattttttttttgttttgattttttttaaactaaagctatataaagcttgtggattaaacagaataaatttctaaatttaaaaa

SEQ ID NO: 27610 - DNA, 3746 bp, Homo sapiens
  source 1..3746: mol_type = unassigned DNA
gggagcgatctccgagcgaggcggcaagatggacgcgggatttttccgcggaacaagtgcagaacaggataatcggttcagcaacaaacagaagaaactactgaagcagctgaaatttgcagaatgcctagaaaaaaaggtggacatgagcaaagtaaatttggaggttataaagccttggataacaaaaagagtaacggaaatccttgggtttgaagatgatgttgtgattgagtttatattcaaccagctggaagtgaagaatccagactccaaaatgatgcaaatcaacctgactggatttttgaatggaaaaaatgctcgagaatttatgggagaactgtggcccctgctgctaagtgcacaagaaaacatcgcgggaatcccttctgctttcctagaactgaagaaagaagaaataaaacaaagacagattgaacaagaaaaactggcatctatgaaaaagcaagatgaagacaaagataaaagagataaggaagaaaaagaaagcagcagagaaaaaagggagcggtctcgtagcccaagaagacgcaaatccagatctccttcccctagaagacgatcttcccctgtcaggagagagagaaagcgcagtcattctcgatctccccgtcacagaaccaagagccggagtccttcccctgctccagaaaagaaggaaaaaactccagagctcccagaaccttcagtgaaagtaaaagaaccttcagtacaagaggctacttctactagtgacattctgaaagttcccaaacctgaacctataccagagcctaaagaaccttctccggaaaaaaattccaaaaaagaaaaggagaaggagaagacccgaccacgatctcggtcacgctccaaatcaagatcccggacgcggtcccgctctccttctcacactcgacctagacggcgccatagatcccgatcaagaaggcggccaagcccaagaaggcggccatctcctcgaagaagaactccgccaagaagaatgcctcctccaccaaggcatagaaggagtagatctccagtaagacgaagaagacgttcgtcagcatccttgtctgggagtagctcatcatcctcttcatctcgttcacggtcaccaccaaagaagcctcccaagaggacatccagcccccctcggaaaactcgtaggttatctccttcagcaagtcctccaaggcgaaggcacaggccatcacctcctgcaactccaccacccaaaactcggcattcccctacaccccagcagtcaaaccgtacaagaaaaagtcgtgtttctgtgtctccagggagaacttcaggtaaagtgacaaaacataaaggtactgagaaaagagaatccccttcaccagcaccgaagcctagaaaagtagagttatctgaatcggaagaagataaaggtggcaaaatggctgcagcagattctgtgcagcagagacgccaatacagacgacaaaaccagcagtcttcatctgactctggctcctcctcctcctcagaagatgaacgacccaagagatcccatgtgaagaatggtgaggttggcaggcggcggagacattccccttcccggagtgcttctccatcaccacgaaagcgccaaaaagagacttcccctcggatgcagatgggaaagcgatggcaatcgccagtgactaaaagtggtagacggaggagaagtccatccccaccacccaccagaaggcgacggtctccttctcccgcccctcctcctcgacggcgcaggactcccacaccaccaccacgacgaaggactccttctcctcccccacgtcggcgctcaccttctcctagaagatactctcctccaatacagaggagatactctccttctccacctccaaagagaagaacggcttcacctcctccccctcctaaacgaagagcatcaccatctccaccaccaaagcggcgggtctcccattctccacctcccaaacaaagaagctccccagtcaccaagagacgttcaccttcattatcatccaagcataggaaagggtcttccccaagccgctctacccgggaggcccgatcaccacaaccaaacaaacggcattcgccctcaccacggcctcgagctcctcagacctcctcaagtcctccacccgttcgaagaggagcgtcgtcatcaccccaaagaaggcagtccccgtctccaagtactaggcccattaggagagtctccaggactccggaacctaaaaagataaaaaaggctgcttccccaagcccacagtctgtaagaagggtctcatcctcccgatctgtctccgggtctcctgagccagcagctaaaaagcccccagcacctccatcccccgtccagtctcagtcaccgtctacaaactggtcaccagctgtaccggtcaaaaaggccaaaagcccaacaccgagcccatcaccgccaagaaattcagatcaggaaggaggtggaaagaaaaagaagaaaaagaaggacaagaaacacaaaaaggataagaagcacaagaagcacaaaaaacacaagaaggaaaaggctgtggctgcagctgctgcagctgctgtgacccctgcagccattgcagctgccacaaccacattagcacaggaagagccagtggcagcgccagagccgaagaaggagactgaaagtgaagctgaagataaccttgatgatttagaaaagcacctgcgtgaaaaggccctgagatcaatgaggaaggcccaagtgtccccacagtcttagggggaaatgtttgttatgatgtaaattttatttggtttgtacgcagttcaatttcaaaattgctaaaatgtgtttgagctttagactataacatttgttgtaataattgctaggttgaagttcaacatgtaaaaaaagggggcatggatttacattgcaaaaggtgtccacagtgtattagtgacattctttcattgacagctgacataattcattgagtgaaatattttaagccaaaaaaaaattccctttttaaaaaagggggtttaaatactgttggcatttttatggttcctttaaatgccctagctattcccagaggggtttttttgtttgtttttttggttttgattttctttttgtttttctttcttcttcttatttttttcatttgagtcttagctcccatttaagttatgcttctgaccttgtatggtctgtaagcttgcccagaaataagaccactgttttgaactaccacaaaagtataaatgaatattttaatgccacaatctttcctgttgcctgtggagtctctgctgaaatgaatcaggattcgagctctaggatgagacagaaaatgaaagcatgttgtttgccaggacactgtgggtttatattgatgtgtaacaagttgatttggaacactggactctcattctgttattctggttttgttttttttgttttgttttttttcttttgtaaaggcaatgagctagtcccagaaaggatccttcagttacatacaatttgtttaatgaaatgtcatggctctgttcatatttttgtcttgttcttccaattggtatatacaactttcagagcctcttgtatttggaaggctggaagggcccagactttggaatagtgtcttggtttcactgtttttgttttgattttttttttgttttgattttttttaaactaaagctatataaagcttgtggattaaacagaataaatttctaaattt

SEQ ID NO: 27611 - DNA, 3175 bp, Homo sapiens
  source 1..3175: mol_type = unassigned DNA
gtgtaccctgggatagggagcgatctccgagcgaggcggcaagatggacgcgggatttttccgcggaacaagtgcagaacaggataatcggttcagcaacaaacagaagaaactactgaagcagctgaaatttgcagaatgcctagaaaaaaaggtggacatgagcaaagtaaatttggaggttataaagccttggataacaaaaagagtaacggaaatccttgggtttgaagatgatgttgtgattgagtttatattcaaccagctggaagtgaagaatccagactccaaaatgatgcaaatcaacctgactggatttttgaatggaaaaaatgctcgagaatttatgggagaactgtggcccctgctgctaagtgcacaagaaaacatcgcgggaatcccttctgctttcctagaactgaagaaagaagaaataaaacaaagacagattgaacaagaaaaactggcatctatgaaaaagcaagatgaagacaaagataaaagagataaggaagaaaaagaaagcagcagagaaaaaagggagcggtctcgtagcccaagaagacgcaaatccagatctccttcccctagaagacgatcttcccctgtcaggagagagagaaagcgcagtcattctcgatctccccgtcacagaaccaagagccggagtccttcccctgctccagaaaagaaggaaaaaactccagagctcccagaaccttcagtgaaagtaaaagaaccttcagtacaagaggctacttctactagtgacattctgaaagttcccaaacctgaacctataccagagcctaaagaaccttctccggaaaaaaattccaaaaaagaaaaggagaaggagaagacccgaccacgatctcggtcacgctccaaatcaagatcccggacgcggtcccgctctccttctcacactcgacctagacggcgccatagatcccgatcaagatcgtattcacctagaaggcggccaagcccaagaaggcggccatctcctcgaagaagaactccgccaagaagaatgcctcctccaccaaggcatagaaggagtagatctccagtaagacgaagaagacgttcgtcagcatccttgtctgggagtagctcatcatcctcttcatctcgttcacggtcaccaccaaagaagcctcccaagaggacatccagcccccctcggaaaactcgtaggttatctccttcagcaagtcctccaaggcgaaggcacaggccatcacctcctgcaactccaccacccaaaactcggcattcccctacaccccagcagtcaaaccgtacaagaaaaagtcgtgtttctgtgtctccagggagaacttcagtgacaaaacataaaggtactgagaaaagagaatccccttcaccagcaccgaagcctagaaaagtagagttatctgaatcggaagaagataaaggtggcaaaatggctgcagcagattctgtgcagcagagacgccaatacagacgacaaaaccagcagtcttcatctgactctggctcctcctcctcctcagaagatgaacgacccaagagatcccatgtgaagaatggtgaggttggcaggcggcggagacattccccttcccggagtgcttctccatcaccacgaaagcgccaaaaagagacttcccctcggatgcagatgggaaagcgatggcaatcgccagtgactaaaagtggtagacggaggagaagtccatccccaccacccaccagaaggcgacggtctccttctcccgcccctcctcctcgacggcgcaggactcccacaccaccaccacgacgaaggactccttctcctcccccacgtcggcgctcaccttctcctagaagatactctcctccaatacagaggagatactctccttctccacctccaaagagaagaacggcttcacctcctccccctcctaaacgaagagcatcaccatctccaccaccaaagcggcgggtctcccattctccacctcccaaacaaagaagctccccagtcaccaagagacgttcaccttcattatcatccaagcataggaaagggtcttccccaagccgctctacccgggaggcccgatcaccacaaccaaacaaacggcattcgccctcaccacggcctcgagctcctcagacctcctcaagtcctccacccgttcgaagaggagcgtcgtcatcaccccaaagaaggcagtccccgtctccaagtactaggcccattaggagagtctccaggactccggaacctaaaaagataaaaaaggctgcttccccaagcccacagtctgtaagaagggtctcatcctcccgatctgtctccgggtctcctgagccagcagctaaaaagcccccagcacctccatcccccgtccagtctcagtcaccgtctacaaactggtcaccagctgtaccggtcaaaaaggccaaaagcccaacaccgagcccatcaccgccaagaaattcagatcaggaaggaggtggaaagaaaaagaagaaaaagaaggacaagaaacacaaaaaggataagaagcacaagaagcacaaaaaacacaagaaggaaaaggctgtggctgcagctgctgcagctgctgtgacccctgcagccattgcagctgccacaaccacattagcacaggaagagccagtggcagcgccagagccgaagaaggagactgaaagtgaagctgaagataaccttgatgatttagaaaagcacctgcgtgaaaaggccctgagatcaatgaggaaggcccaagtgtccccacagtcttagggggaaatgtttgttatgatgtaaattttatttggtttgtacgcagttcaatttcaaaattgctaaaatgtgtttgagctttagactataacatttgttgtaataattgctaggttgaagttcaacatgtaaaaaaagggggcatggatttacattgcaaaaggtgtccacagtgtattagtgacattctttcattgacagctgacataattcattgagtgaaatattttaagccaaaaaaaaattccctttttaaaaaagggggtttaaatactgttggcatttttatggttcctttaaatgccctagctattcccagaggggtttttttgtttgtttttttggttttgattttctttttgtttttctttcttcttctta

SEQ ID NO: 27612 - DNA, 1394 bp, Homo sapiens
  source 1..1394: mol_type = unassigned DNA
ttatgggagaactgtggcccctgctgctaagtgcacaagaaaacatcgcgggaatcccttctgctttcctagaactgaagaaagaagaaataaaacaaagacagattgaacaagaaaaactggcatctatgaaaaagcaagatgaagacaaagataaaagagataaggaagaaaaagaaagcagcagagaaaaaagggagcggtctcgtagcccaagaagaaccaagagccggagtccttcccctgctccagaaaagaaggaaaaaactccagagctcccagaaccttcagtgaaagtaaaagaaccttcagtacaagaggctacttctactagtgacattctgaaagttcccaaacctgaacctataccagagcctaaagaaccttctccggaaaaaaattccaaaaaagaaaaggagaaggagaagacccgaccacgatctcggtcacgctccaaatcaagatcccggacgcggtcccgctctccttctcacactcgacctagacggcgccatagatcccgatcaagatcgtattcacctagaaggcggccaagcccaagaaggcggccatctcctcgaagaagaactccgccaagaagaatgcctcctccaccaaggcatagaaggagtagatctccagtaagacggttctcaggaattcttccgccaaaggtgaattctgcagaagaagacgttcgtcagcatccttgtctgggagtagctcatcatcctcttcatctcgttcacggtcaccaccaaagaagcctcccaagaggacatccagcccccctcggaaaactcgtaggttatctccttcagcaagtcctccaaggcgaaggcacaggccatcacctcctgcaactccaccacccaaaactcggcattcccctacaccccagcagtcaaaccgtacaagaaaaagtcgtgtttctgtgtctccagggagaacttcagtgacaaaacataaaggtactgagaaaagagaatccccttcaccagcaccgaagcctagaaaagtagagttatctgaatcggaagaagataaaggtggcaaaatggctgcagcagattctgtgcagcagagacgccaatacagacgacaaaaccagcagtcttcatctgactctggctcctcctcctcctcagaagatgaacgacccaagagatcccatgtgaagaatggtgaggttggcaggcggcggagacattccccttcccggagtgcttctccatcaccacgaaagcgccaaaaagagacttcccctcggatgcagatgggaaagcgatggcaatcgccagtgactaaaagtggtagacggaggagaagtccatccccaccacccaccagaaggcgacggtctccttctcccgcccctcctcctcgacggcgca

SEQ ID NO: 27613 - DNA, 9351 bp, Homo sapiens
  source 1..9351: mol_type = unassigned DNA
agaatgctctgcatcgacagcgggagacgagacgcgctcgggcgtcgctttgctgccgctaggccctgtgctcctccccgcagcggaaggcctacgaatacgcggtgtcttacgtcgcttcctccgttcttcgttgcactggccaacgggacgcttagtctttcggcaacggggtgaaaccttccttgtgcctgaaaaaacggtacttcgcggtgtggcttcggcgcctgcgcaaaaggccgcggggcgcactccagttcccggcaggccccgcgacgcgcgtttgcgtgctgacgcacgcagttagtcgtgctgacgtgcagcgcggcccaggcggggtgcgagtggcgcagttggagcccgttgcggcccctgaggaagcgaggaggcgtcggcgtcggctgaggcgggcggaccggcgaggcgaggcggcggccccaggcccgagggactcgggagctcgagcagcggcggcggcaagacctctccccctcggaggcggcgggcggaggcggcgggagcggtggtgccccccccgggcacggggccatgtacaacgggatcgggctgccgacgccccggggcagcggcaccaacggctacgtccagcgcaacctgtccctggtgcggggccgccggggtgagcggcctgactacaagggagaggaggaactgcggcgcctggaggctgccctggtgaagcggcctaatcctgacatcctggaccacgagcgcaagcggcgcgtcgagctgcgatgcctcgagctggaggagatgatggaagagcaggggtacgaggaacagcaaattcaggaaaaagtggcgacctttcgactcatgttgctggagaaggatgtgaaccctgggggcaaggaggagaccccagggcagaggccagcggtcacggagactcaccagttggcagaattaaatgagaagaagaatgaaagactccgtgctgcctttggcatcagtgattcttacgtagatggcagctcttttgatcctcagcgtcgtgcccgagaagctaaacaaccagctcctgagcctcccaaaccttacagccttgttcgggagtctagcagttctcgctcaccaaccccaaagcagaagaagaagaaaaagaagaaagatagaggacgcaggtcagagagcagctctcctcgacgggagagaaagaaaagctcaaagaagaagaagcacaggtcagaatctgagtccaagaaacgtaagcataggtctcccactccaaagagcaaacgtaaatctaaggacaaaaagcgaaagcggtctcgaagtacaacaccagcccccaagagccgccgggcccaccgttcaacttctgctgactctgcttcctcctccgatacttcccgcagtcggtctcgaagtgctgcagctaaaactcatacaactgccttggctgggcgaagtccttcccctgcttcagggcgacgcggggagggagatgcgcctttcagtgaaccaggtactaccagcacacaacggcctagtagcccggagactgctacgaaacagcctagcagcccttatgaagacaaagataaagacaagaaggagaaatctgcaactcgacctagcccctctccggaaaggagcagcacaggcccagaaccacctgctcccactccgctccttgctgagcgacatggcggctccccacaaccccttgcaaccacccccttaagccaggagccagtgaaccccccatctgaggcctctccaactcgggaccgttcaccacctaagtctcccgagaaacttccccagtcttcttcctcagagagcagcccaccatcccctcaacctaccaaagtttctcggcatgccagctcttccccagaaagtcctaaacctgctccagctccagggtcccaccgagagatttcttcttctcccacatctaagaatcgctcacatggccgagcaaaacgggataaatcacattctcataccccctcccgtaggatggggaggtcccgtagccctgccaccgctaagagagggcgatctcggtctcgaacccctaccaagagaggtcattctcgatcccgatctccccagtggcgtaggtccaggtctgcacagaggtggggaagatctagaagcccccagcgacgtggccgctctaggtctcctcagcgaccaggctggtctaggagcagaaatacccagagaagaggcaggtctaggtcagcaaggcgagggaggtcccactctagatccccagccactaggggtagatctcgttctagaacaccagcccgccggggcaggtcccgctctagaacacctgccaggcggagatcacgatccagaactcccaccaggcgtaggtctcggtctagaacaccagcccggaggggcaggtctcggtctagaacacctgctaggcgcagatctaggacccgatcaccagtacgacgcaggtctcgtagtagatcaccagccaggagaagtggcaggtcacgctctagaaccccagctagacgtggccgctcacgctccagaaccccagccagacgtggccgctcacgctctagaaccccagctagacgcagtggtcgctcacgctccagaacaccagccaggagagggaggtctcggtctaggacaccaagacgaggaagatcccgcagtagaagcttagttagacgtggaagatctcactctagaacacctcaaagaagaggcagatctggctcatcttcagagcggaaaaacaaatccagaacatctcaaagaagaagcaggtccaattcaagcccagaaatgaagaaatctcgcatttcttcaaggcggagcaggtctctctcttcaccacggtccaaagcaaaatctcgcttgtctttgaggcgcagcctttcagggtcttccccatgccctaaacaaaagtcacagacaccacccaggcgcagtcgctctggatcctcccaacctaaagctaaatctagaacgccacccagacgcagtcgctccagttcttctccgccacctaaacagaaatctaagacaccatcaagacaaagtcattccagttcatctcctcatcctaaagtgaaatctggaacaccaccgaggcaagggtccataacaagtccccaggccaatgagcaatctgtaacgccacagagacggagctgttttgaatcatcacctgaccctgagttgaaatctaggaccccttctagacatagctgctcagggtcctctcctcctagagtgaaatctagcacacctcccagacagagcccatctaggtcatcatctccacaacccaaagtgaaggcaataatatcaccaagacaaagaagccattctggctcctcttctccaagtcctagtagggtgacgtcgagaacaactccacggcgaagcagatcagtatctccctgctccaatgtggaatccagattgttgccaagatacagtcattctgggtcctcctcaccagataccaaagtgaaacctgaaacaccgccaagacaaagtcactcagggtctatttcaccataccccaaagtaaaggcccaaactccaccggggccaagtctttctggatcaaagtcaccatgtccccaagagaagtctaaagactcactagttcaaagttgccctggatccctctctctctgtgcaggagtaaaatctagcacaccaccaggcgagagctattttggtgtctcatctctgcaactgaaaggacaatctcaaacttcaccagaccacagatctgatacttcaagtccagaagtgagacagagtcattcagaatcaccatctctgcagagcaaatctcaaacatcacctaagggaggtcggtccaggtcttcatctccagtcactgagctggcatccagatctccaataagacaagatagaggtgagttctcagcgagtcctatgttgaaatctggaatgtctcctgagcagagcaggttccagtctgactcttcttcatatcctacagtggactcgaattctctcttggggcagagtagattggagactgctgaatcaaaagagaaaatggccttaccccctcaggaggatgctactgcatcacctcctagacagaaagacaaatttagtccctttccagtacaggataggcctgagtcttcactggtattcaaagacacacttagaaccccgccaagggaaagaagtggtgctgggtcatctccagaaacaaaagagcaaaatagtgcattgcctacgtcaagccaagatgaagagttaatggaggtggtagagaagtctgaagaacccgcaggccaaatcctgtctcatttgtcttcagaacttaaagaaatgtccacaagtaactttgaatcatctcctgaagtagaagaaaggcctgctgtgtctttgactcttgatcagagccagtcacaggcttctttggaagcagtagaagtcccttcaatggcctcatcttggggtgggccacatttttctccagaacataaagaactgtctaactccccactcagggagaacagctttggatcacctttagaatttagaaactcaggcccacttggtacagaaatgaatactggattttcttctgaggttaaagaagatttgaatggaccgtttcttaatcagctggaaacagatccatctctagacatgaaagaacaatcgacaagatcctctggacacagcagttctgagttatccccagatgcagtggaaaaggcagggatgtcttcaaatcagagcatctcttcacctgtgcttgatgctgtacccagaacaccctcgagagaaagaagtagttctgcatcttctcctgaaatgaaagatggtttacccagaactccatcaaggagaagcaggtctgggtcttctccaggacttagagatgggtctgggactccctcgaggcacagcctgtctgggtcctctcctggaatgaaagatatacctagaacgccatctagagggagaagcgaatgtgattcttccccagaaccgaaagctttgcctcagactcctaggccgaggagtcgttctccatcatccccagagctcaacaacaagtgtcttaccccccagagagaaagaagcgggtcagaatcatcagttgatcagaaaactgtggctcggactcccctggggcagagaagtcgttcgggatcctctcaagaacttgatgtgaaacccagtgcatcccctcaggaaagaagtgagtcagactcttctccagattctaaagccaagacaagaaccccacttcggcagaggagtcggtctggatcatctccagaggttgacagcaaatctcgactatcccctcggcgcagtaggtctggttcctcccctgaagtgaaagataagccaagagcagcacccagggcacagagtggttctgattcctctcctgaacctaaagctccagcccctcgggcccttcccagacgaagcagatcaggttcatcaagcaaaggcagaggcccttctcctgaaggaagcagcagtaccgagtcctctcctgaacatccgcccaaatccagaactgctcgcagaggttccaggtcatcaccagagcccaagaccaagtctcgtacaccacctcgacgtcgcagctctcgatcatctccggagctaacaaggaaggccagactgtcccgtagaagccgctctgcctcatcctcaccagaaactcgctctagaactcccccaaggcaccggagaagtccctcagtgtcttccccggagccagccgaaaaatcgaggtcttcacgccgacggcgctcagcttcatctccacgcactaagacaacctcaaggagaggccgctctccttcgccaaagcctcgtggactccagaggtcccgttcccgctcaaggagagagaaaacaagaacaacccgacgtcgagataggtctggatcttctcagtcaacctctcggcgaagacagcggagccggtcaaggtcgcgggttactcggcggcggaggggaggctctggttatcactcaaggtcacctgcccggcaggaaagttcccggacctcctctcgacgccgaagaggccgctctcggacacccccaaccagtcggaagcgttctcgctcacgcacatcaccagccccgtggaaacgctctagatctcgagcctctccagccactcaccggcgatccaggtccagaacccccctgataagccgacgtaggtccagatctcgaacttcaccagtcagccggagacggtcaaggtccaggacttcagtgactcgacgaagatcccggtcaagagcatccccagtgagcagaaggcgatccagatccagaacgccaccagtaacccgccgtcgttcaaggtctagaacgccaacaacacgccgccgctcccgttctagaactccaccagtgactcgcagaaggtccagatccaggactccaccagtaaccaggaggcgatctcgaagcagaacttcgcctatcactcgcagaagatcaagatccagaacatctccggtcacccgaaggagatctcgatctcgcacatctccagtaactcgaagaaggtcccgctctcgaacctcaccagtgacacgccgccgctctaggtcccggacacctccagctattcggcgccgctctagatctcgaacgccactgttaccacgcaaacgttctcgaagtcgctcaccacttgctatccgccgccgctccagatcccgtactccacgaacagctcggggtaaacggtccttaacaagatctcctccagccatccgcaggcgttctgcatctggaagtagttctgatcgttcacgatctgctactcctccagcaacaagaaatcattctggttcacggacacctccagtagcactcaacagttccagaatgagctgcttcagtcgtcctagcatgtccccaacacctcttgatcgctgcagatcacctggaatgcttgaaccccttggcagctctagaacacccatgtctgtcctgcagcaagccggcggctccatgatggatggtccaggtccccgaatacctgaccaccagagaacatctgtgccagaaaatcatgctcagtccaggattgcacttgccctgacagctatcagtcttggcaccgctcggcctcctccgtccatgtctgctgctggccttgctgcaagaatgtcccaggttccagccccggtgcctctcatgagtctcagaaccgcaccagcagccaaccttgccagcaggattcctgcagcctctgcggcagccatgaacctagccagcgccaggacacctgccattccaacagcagtgaacctggctgactctcgaacgccagctgcagcagcggccatgaacttggccagccccagaacagcggtggcaccttcggctgtgaacctggctgaccctcgcactcccacagccccagctgtgaacctagcaggggccagaaccccagctgccttggcagctctgagtctcacaggctctggcacaccaccaactgctgcaaactatccctccagctccagaacaccacaggctccagcctctgcaaacctggtgggtcctcggtctgcacatgccacagctcctgtgaatattgccggctccagaaccgccgcagccttggcccccgcgagcctcaccagtgctaggatggctccagcattgtctggtgcaaacctcaccagccccagggtgcccctttctgcctacgagcgtgtcagtggcagaacctcaccaccgctccttgaccgagctaggtccagaacaccaccgtctgccccaagccaatctaggatgacctctgaacgggctccctccccttcctctagaatgggccaggctccttcacagtctcttctccctccagcacaggatcagccgaggtctcctgtgccttctgctttttcagaccaatcccgttgtttgattgcccagaccacccctgtagcagggtctcagtccctttcctctggggcagtggcaacgaccacgtcctctgctggtgatcacaatggcatgctctctgtccctgcccctggggtgccccactctgatgtgggggagccacctgcctctactggggcccagcagccttctgcattagccgccctgcagccagcaaaggagcggcggagttcctcctcgtcgtcgtcgtcctctagctcctcctcttcttcatcatcgtcgtcgtcgtcctcctcctcctctggctccagttctagtgactcagagggctctagccttcctgtgcaacctgaggtggcactgaagagggtccccagccccaccccagccccaaaggaggctgttcgagagggacgtcctccggagccaaccccagccaaacggaagaggcgctctagcagttccagttccagctcctcctcttcatcttcctcctcctcctcctcctcctcttcttcctcctcctcttcctcttcttcttcttcctcctcatcttcctcctcctcgtcgtcttcctccccttcccctgctaagcctggccctcaggccttgcccaaacctgcaagccccaagaagccaccccctggcgagcggaggtcccgcagcccccggaagccaatagactccctcagggactctcggtccctcagctactcgcctgtggagcgtcgccgtccctcgccccagccctcaccacgggaccagcagagcagcagcagtgagcggggttcccggagaggccagcgtggggacagccgctcccccagccacaagcgcaggagggagacacctagccctcggcccatgagacaccgctcctccaggtctccataaattgtctttgggggattccaccacacccaatgctctggagccacaaggagtgtcccttcttccccagcagagccgtgggagggtccttgtctgctctcctttgaaccttggcagcccttggatggagggctccctttccctccccttttttttttctttgttcctgtgaaatgttaatctccgtgagttcttcctggttcatgtgttctggggggtttggggtgggagggaatgcagatgggagttgggggaggggaggatacagttcaggataccccagcctggagtcagggccagggaggcatggccccacttgtatccagaagttcccaggggtgattgtgatggtggttgggactggaggttgtataaggtgttcttggaaggaaggggcaggagttggaattagttggtccctactgtcccccatgaggttgtgaacccctccccccaacttttcatgtttcttaaaggcattttggttttttaaaatctgtacagcaagagcaactttttctgtcaaataaaaatgagaaatgcagg

SEQ ID NO: 27614 - DNA, 1245 bp, Homo sapiens
  source 1..1245: mol_type = unassigned DNA
atgataagttttccgtctctacagaggacagaactagaggaaatggacttaattttacagcaggagggatggcagttagacctcaagaggaactccctgggctggaaggatcttcagaggtcatcccatccctctccctgcctccaggcaggacggccccttccccagccaacctgcactcacaggggcctccccaagctgcggctctccgaggaaggagactacccagcttcagcttccacacctgagcccagaggccttattcctccatcagggacattcttgaggtttaaccttgatcccttatgctgcgggccccagcctgttgcttctgttagcagaggttgggtcagctcgcaccactgctctccagagaattgctggctcacgtggctcggagagctcccagcgcctttctcaggcacccctccccccactgccgttcctccaggccaaggaagcaggtcccgcagcccccggaagccaatagactccctcagggactctcggtccctcagctactcgcctgtggagcgtcgccgtccctcgccccagccctcaccacgggaccagcagagcagcagcagtgagcggggttcccggagaggccagcgtggggacagccgctcccccagccacaagcgcaggagggagacacctagccctcggcccatgagacaccgctcctccaggtctccataaattgtctttgggggattccaccacacccaatgctctggagccacaaggagtgtcccttcttccccagcagagccgtgggagggtccttgtctgctctcctttgaaccttggcagcccttggatggagggctccctttccctccccttttttttttctttgttcctgtgaaatgttaatctccgtgagttcttcctggttcatgtgttctggggggtttggggtgggagggaatgcagatgggagttgggggaggggaggatacagttcaggataccccagcctggagtcagggccagggaggcatggccccacttgtatccagaagttcccaggggtgattgtgatggtggttgggactggaggttgtataaggtgttcttggaaggaaggggcaggagttggaattagttggtccctactgtcccccatgaggttgtgaacccctccccccaacttttcatgtttcttaaaggcattttggttttttaaaatctgtacagcaagagcaactttttctgtcaaataaaaatgagaaatgcagg

SEQ ID NO: 27615 - DNA, 8097 bp, Homo sapiens
  source 1..8097: mol_type = unassigned DNA
agaatgctctgcatcgacagcgggagacgagacgcgctcgggcgtcgctttgctgccgctaggccctgtgctcctccccgcagcggaaggcctacgaatacgcggtgtcttacgtcgcttcctccgttcttcgttgcactggccaacgggacgcttagtctttcggcaacggggtgaaaccttccttgtgcctgaaaaaacggtacttcgcggtgtggcttcggcgcctgcgcaaaaggccgcggggcgcactccagttcccggcaggccccgcgacgcgcgtttgcgtgctgacgcacgcagttagtcgtgctgacgtgcagcgcggcccaggcggggtgcgagtggcgcagttggagcccgttgcggcccctgaggaagcgaggaggcgtcggcgtcggctgaggcgggcggaccggcgaggcgaggcggcggccccaggcccgagggactcgggagctcgagcagcggcggcggcaagacctctccccctcggaggcggcgggcggaggcggcgggagcggtggtgccccccccgggcacggggccatgtacaacgggatcgggctgccgacgccccggggcagcggcaccaacggctacgtccagcgcaacctgtccctggtgcggggccgccggggtgagcggcctgactacaagggagaggaggaactgcggcgcctggaggctgccctggtgaagcggcctaatcctgacatcctggaccacgagcgcaagcggcgcgtcgagctgcgatgcctcgagctggaggagatgatggaagagcaggggtacgaggaacagcaaattcaggaaaaagtggcgacctttcgactcatgttgctggagaaggatgtgaaccctgggggcaaggaggagaccccagggcagaggccagcggtcacggagactcaccagttggcagaattaaatgagaagaagaatgaaagactccgtgctgcctttggcatcagtgattcttacgtagatggcagctcttttgatcctcagcgtcgtgcccgagaagctaaacaaccagctcctgagcctcccaaaccttacagccttgttcgggagtctagcagttctcgctcaccaaccccaaagcagaagaagaagaaaaagaagaaagatagaggacgcaggtcagagagcagctctcctcgacgggagagaaagaaaagctcaaagaagaagaagcacaggtcagaatctgagtccaagaaacgtaagcataggtctcccactccaaagagcaaacgtaaatctaaggacaaaaagcgaaagcggtctcgaagtacaacaccagcccccaagagccgccgggcccaccgttcaacttctgctgactctgcttcctcctccgatacttcccgcagtcggtctcgaagtgctgcagctaaaactcatacaactgccttggctgggcgaagtccttcccctgcttcagggcgacgcggggagggagatgcgcctttcagtgaaccaggtactaccagcacacaacggcctagtagcccggagactgctacgaaacagcctagcagcccttatgaagacaaagataaagacaagaaggagaaatctgcaactcgacctagcccctctccggaaaggagcagcacaggcccagaaccacctgctcccactccgctccttgctgagcgacatggcggctccccacaaccccttgcaaccacccccttaagccaggagccagtgaaccccccatctgaggcctctccaactcgggaccgttcaccacctaagtctcccgagaaacttccccagtcttcttcctcagagagcagcccaccatcccctcaacctaccaaagtttctcggcatgccagctcttccccagaaagtcctaaacctgctccagctccagggtcccaccgagagatttcttcttctcccacatctaagaatcgctcacatggccgagcaaaacgggataaatcacattctcataccccctcccgtaggatggggaggtcccgtagccctgccaccgctaagagagggcgatctcggtctcgaacccctaccaagagaggtcattctcgatcccgatctccccagtggcgtaggtccaggtctgcacagaggtggggaagatctagaagcccccagcgacgtggccgctctaggtctcctcagcgaccaggctggtctaggagcagaaatacccagagaagaggcaggtctaggtcagcaaggcgagggaggtcccactctagatccccagccactaggggtagatctcgttctagaacaccagcccgccggggcaggtcccgctctagaacacctgccaggcggagatcacgatccagaactcccaccaggcgtaggtctcggtctagaacaccagcccggaggggcaggtctcggtctagaacacctgctaggcgcagatctaggacccgatcaccagtacgacgcaggtctcgtagtagatcaccagccaggagaagtggcaggtcacgctctagaaccccagctagacgtggccgctcacgctccagaaccccagccagacgtggccgctcacgctctagaaccccagctagacgcagtggtcgctcacgctccagaacaccagccaggagagggaggtctcggtctaggacaccaagacgaggaagatcccgcagtagaagcttagttagacgtggaagatctcactctagaacacctcaaagaagaggcagatctggctcatcttcagagcggaaaaacaaatccagaacatctcaaagaagaagcaggtccaattcaagcccagaaatgaagaaatctcgcatttcttcaaggcggagcaggtctctctcttcaccacggtccaaagcaaaatctcgcttgtctttgaggcgcagcctttcagggtcttccccatgccctaaacaaaagtcacagacaccacccaggcgcagtcgctctggatcctcccaacctaaagctaaatctagaacgccacccagacgcagtcgctccagttcttctccgccacctaaacagaaatctaagacaccatcaagacaaagtcattccagttcatctcctcatcctaaagtgaaatctggaacaccaccgaggcaagggtccataacaagtccccaggccaatgagcaatctgtaacgccacagagacggagctgttttgaatcatcacctgaccctgagttgaaatctaggaccccttctagacatagctgctcagggtcctctcctcctagagtgaaatctagcacacctcccagacagagcccatctaggtcatcatctccacaacccaaagtgaaggcaataatatcaccaagacaaagaagccattctggctcctcttctccaagtcctagtagggtgacgtcgagaacaactccacggcgaagcagatcagtatctccctgctccaatgtggaatccagattgttgccaagatacagtcattctgggtcctcctcaccagataccaaagtgaaacctgaaacaccgccaagacaaagtcactcagggtctatttcaccataccccaaagtaaaggcccaaactccaccggggccaagtctttctggatcaaagtcaccatgtccccaagagaagtctaaagactcactagttcaaagttgccctggatccctctctctctgtgcaggagtaaaatctagcacaccaccaggcgagagctattttggtgtctcatctctgcaactgaaaggacaatctcaaacttcaccagaccacagatctgatacttcaagtccagaagtgagacagagtcattcagaatcaccatctctgcagagcaaatctcaaacatcacctaagggaggtcggtccaggtcttcatctccagtcactgagctggcatccagatctccaataagacaagatagaggtgagttctcagcgagtcctatgttgaaatctggaatgtctcctgagcagagcaggttccagtctgactcttcttcatatcctacagtggactcgaattctctcttggggcagagtagattggagactgctgaatcaaaagagaaaatggccttaccccctcaggaggatgctactgcatcacctcctagacagaaagacaaatttagtccctttccagtacaggataggcctgagtcttcactggtattcaaagacacacttagaaccccgccaagggaaagaagtggtgctgggtcatctccagaaacaaaagagcaaaatagtgcattgcctacgtcaagccaagatgaagagttaatggaggtggtagagaagtctgaagaacccgcaggccaaatcctgtctcatttgtcttcagaacttaaagaaatgtccacaagtaactttgaatcatctcctgaagtagaagaaaggcctgctgtgtctttgactcttgatcagagccagtcacaggcttctttggaagcagtagaagtcccttcaatggcctcatcttggggtgggccacatttttctccagaacataaagaactgtctaactccccactcagggagaacagctttggatcacctttagaatttagaaactcaggcccacttggtacagaaatgaatactggattttcttctgaggttaaagaagatttgaatggaccgtttcttaatcagctggaaacagatccatctctagacatgaaagaacaatcgacaagatcctctggacacagcagttctgagttatccccagatgcagtggaaaaggcagggatgtcttcaaatcagagcatctcttcacctgtgcttgatgctgtacccagaacaccctcgagagaaagaagtagttctgcatcttctcctgaaatgaaagatggtttacccagaactccatcaaggagaagcaggtctgggtcttctccaggacttagagatgggtctgggactccctcgaggcacagcctgtctgggtcctctcctggaatgaaagatatacctagaacgccatctagagggagaagcgaatgtgattcttccccagaaccgaaagctttgcctcagactcctaggccgaggagtcgttctccatcatccccagagctcaacaacaagtgtcttaccccccagagagaaagaagcgggtcagaatcatcagttgatcagaaaactgtggctcggactcccctggggcagagaagtcgttcgggatcctctcaagaacttgatgtgaaacccagtgcatcccctcaggaaagaagtgagtcagactcttctccagattctaaagccaagacaagaaccccacttcggcagaggagtcggtctggatcatctccagaggttgacagcaaatctcgactatcccctcggcgcagtaggtctggttcctcccctgaagtgaaagataagccaagagcagcacccagggcacagagtggttctgattcctctcctgaacctaaagctccagcccctcgggcccttcccagacgaagcagatcaggttcatcaagcaaaggcagaggcccttctcctgaaggaagcagcagtaccgagtcctctcctgaacatccgcccaaatccagaactgctcgcagaggttccaggtcatcaccagagcccaagaccaagtctcgtacaccacctcgacgtcgcagctctcgatcatctccggagctaacaaggaaggccagactgtcccgtagaagccgctctgcctcatcctcaccagaaactcgctctagaactcccccaaggcaccggagaagtccctcagtgtcttccccggagccagccgaaaaatcgaggtcttcacgccgacggcgctcagcttcatctccacgcactaagacaacctcaaggagaggccgctctccttcgccaaagcctcgtggactccagaggtcccgttcccgctcaaggagagagaaaacaagaacaacccgacgtcgagataggtctggatcttctcagtcaacctctcggcgaagacagcggagccggtcaaggtcgcgggttactcggcggcggaggggaggctctggttatcactcaaggtcacctgcccggcaggaaagttcccggacctcctctcgacgccgaagaggccgctctcggacacccccaaccagtcggaagcgttctcgctcacgcacatcaccagccccgtggaaacgctctagatctcgagcctctccagccactcaccggcgatccaggtccagaacccccctgataagccgacgtaggtccagatctcgaacttcaccagtcagccggagacggtcaaggtccaggacttcagtgactcgacgaagatcccggtcaagagcatccccagtgagcagaaggcgatccagatccagaacgccaccagtaacccgccgtcgttcaaggtctagaacgccaacaacacgccgccgctcccgttctagaactccaccagtgactcgcagaaggtccagatccaggactccaccagtaaccaggaggcgatctcgaagcagaacttcgcctatcactcgcagaagatcaagatccagaacatctccggtcacccgaaggagatctcgatctcgcacatctccagtaactcgaagaaggtcccgctctcgaacctcaccagtgacacgccgccgctctaggtcccggacacctccagcacaggatcagccgaggtctcctgtgccttctgctttttcagaccaatcccgttgtttgattgcccagaccacccctgtagcagggtctcagtccctttcctctggggcagtggcaacgaccacgtcctctgctggtgatcacaatggcatgctctctgtccctgcccctggggtgccccactctgatgtgggggagccacctgcctctactggggcccagcagccttctgcattagccgccctgcagccagcaaaggagcggcggagttcctcctcgtcgtcgtcgtcctctagctcctcctcttcttcatcatcgtcgtcgtcgtcctcctcctcctctggctccagttctagtgactcagagggctctagccttcctgtgcaacctgaggtggcactgaagagggtccccagccccaccccagccccaaaggaggctgttcgagagggacgtcctccggagccaaccccagccaaacggaagaggcgctctagcagttccagttccagctcctcctcttcatcttcctcctcctcctcctcctcctcttcttcctcctcctcttcctcttcttcttcttcctcctcatcttcctcctcctcgtcgtcttcctccccttcccctgctaagcctggccctcaggccttgcccaaacctgcaagccccaagaagccaccccctggcgagcggaggtcccgcagcccccggaagccaatagactccctcagggactctcggtccctcagctactcgcctgtggagcgtcgccgtccctcgccccagccctcaccacgggaccagcagagcagcagcagtgagcggggttcccggagaggccagcgtggggacagccgctcccccagccacaagcgcaggagggagacacctagccctcggcccatgagacaccgctcctccaggtctccataaattgtctttgggggattccaccacacccaatgctctggagccacaaggagtgtcccttcttccccagcagagccgtgggagggtccttgtctgctctcctttgaaccttggcagcccttggatggagggctccctttccctccccttttttttttctttgttcctgtgaaatgttaatctccgtgagttcttcctggttcatgtgttctggggggtttggggtgggagggaatgcagatgggagttgggggaggggaggatacagttcaggataccccagcctggagtcagggccagggaggcatggccccacttgtatccagaagttcccaggggtgattgtgatggtggttgggactggaggttgtataaggtgttcttggaaggaaggggcaggagttggaattagttggtccctactgtcccccatgaggttgtgaacccctccccccaacttttcatgtttcttaaaggcattttggttttttaaaatctgtacagcaagagcaactttttctgtcaaataaaaatgagaaatgcagg

SEQ ID NO: 27616 - DNA, 1773 bp, Homo sapiens
  source 1..1773: mol_type = unassigned DNA
agaatgctctgcatcgacagcgggagacgagacgcgctcgggcgtcgctttgctgccgctaggccctgtgctcctccccgcagcggaaggcctacgaatacgcggtgtcttacgtcgcttcctccgttcttcgttgcactggccaacgggacgcttagtctttcggcaacggggtgaaaccttccttgtgcctgaaaaaacggtacttcgcggtgtggcttcggcgcctgcgcaaaaggccgcggggcgcactccagttcccggcaggccccgcgacgcgcgtttgcgtgctgacgcacgcagttagtcgtgctgacgtgcagcgcggcccaggcggggtgcgagtggcgcagttggagcccgttgcggcccctgaggaagcgaggaggcgtcggcgtcggctgaggcgggcggaccggcgaggcgaggcggcggccccaggcccgagggactcgggagctcgagcagcggcggcggcaagacctctccccctcggaggcggcgggcggaggcggcgggagcggtggtgccccccccgggcacggggccatgtacaacgggatcgggctgccgacgccccggggcagcggcaccaacggctacgtccagcgcaacctgtccctggtgcggggccgccggggtgagcggcctgactacaagggagaggaggaactgcggcgcctggaggctgccctggtgaagcggcctaatcctgacatcctggaccacgagcgcaagcggcgcgtcgagctgcgatgcctcgagctggaggagatgatggaagagcaggggtacgaggaacagcaaattcaggaaaaagtggcgacctttcgactcatgttgctggagaaggatgtgaaccctgggggcaaggaggagaccccagggcagaggccagcggtcacggagactcaccagttggcagaattaaatgagaagaagaatgaaagactccgtgctgcctttggcatcagtgattcttacgtagatggcagctcttttgatcctcagcgtcgtgcccgagaagctaaacaaccagctcctgagcctcccaaaccttacagccttgttcgggagtctagcagttctcgctcaccaaccccaaagcagaagaagaagaaaaagaagaaagatagaggacgcaggtcagagagcagctctcctcgacgggagagaaagaaaagctcaaagaagaagaagcacaggtcagaatctgagtccaagaaacgtaagcataggtctcccactccaaagagcaaacgtaaatctaaggacaaaaagcgaaagcggtctcgaagtacaacaccagcccccaagagccgccgggcccaccgttcaacttctgctgactctgcttcctcctccgatacttcccgcagtcggtctcgaagtgctgcagctaaaactcatacaactgccttggctgggcgaagtccttcccctgcttcagggcgacgcggggagggagatgcgcctttcagtgaaccaggtactaccagcacacaacggcctagtagcccggagactgctacgaaacagcctagcagcccttatgaagacaaagataaagacaagaaggagaaatctgcaactcgacctagcccctctccggaaaggagcagcacaggcccagaaccacctgctcccactccgctccttgctgagcgacatggcggctccccacaaccccttgcaaccacccccttaagccaggagccagtgaacccctccccccaacttttcatgtttcttaaaggcattttggttttttaa

SEQ ID NO: 27617 - DNA, 8697 bp, Homo sapiens
  source 1..8697: mol_type = unassigned DNA
cgtcggcgtcggctgaggcgggcggaccggcgaggcgaggcggcggccccaggcccgagggactcgggagctcgagcagcggcggcggcaagacctctccccctcggaggcggcgggcggaggcggcgggtgagagggtacgaggaacagcaaattcaggaaaaagtggcgacctttcgactcatgttgctggagaaggatgtgaaccctgggggcaaggaggagaccccagggcagaggccagcggtcacggagactcaccagttggcagaattaaatgagaagaagaatgaaagactccgtgctgcctttggcatcagtgattcttacgtagatggcagctcttttgatcctcagcgtcgtgcccgagaagctaaacaaccagctcctgagcctcccaaaccttacagccttgttcgggagtctagcagttctcgctcaccaaccccaaagcagaagaagaagaaaaagaagaaagatagaggacgcaggtcagagagcagctctcctcgacgggagagaaagaaaagctcaaagaagaagaagcacaggtcagaatctgagtccaagaaacgtaagcataggtctcccactccaaagagcaaacgtaaatctaaggacaaaaagcgaaagcggtctcgaagtacaacaccagcccccaagagccgccgggcccaccgttcaacttctgctgactctgcttcctcctccgatacttcccgcagtcggtctcgaagtgctgcagctaaaactcatacaactgccttggctgggcgaagtccttcccctgcttcagggcgacgcggggagggagatgcgcctttcagtgaaccaggtactaccagcacacaacggcctagtagcccggagactgctacgaaacagcctagcagcccttatgaagacaaagataaagacaagaaggagaaatctgcaactcgacctagcccctctccggaaaggagcagcacaggcccagaaccacctgctcccactccgctccttgctgagcgacatggcggctccccacaaccccttgcaaccacccccttaagccaggagccagtgaaccccccatctgaggcctctccaactcgggaccgttcaccacctaagtctcccgagaaacttccccagtcttcttcctcagagagcagcccaccatcccctcaacctaccaaagtttctcggcatgccagctcttccccagaaagtcctaaacctgctccagctccagggtcccaccgagagatttcttcttctcccacatctaagaatcgctcacatggccgagcaaaacgggataaatcacattctcataccccctcccgtaggatggggaggtcccgtagccctgccaccgctaagagagggcgatctcggtctcgaacccctaccaagagaggtcattctcgatcccgatctccccagtggcgtaggtccaggtctgcacagaggtggggaagatctagaagcccccagcgacgtggccgctctaggtctcctcagcgaccaggctggtctaggagcagaaatacccagagaagaggcaggtctaggtcagcaaggcgagggaggtcccactctagatccccagccactaggggtagatctcgttctagaacaccagcccgccggggcaggtcccgctctagaacacctgccaggcggagatcacgatccagaactcccaccaggcgtaggtctcggtctagaacaccagcccggaggggcaggtctcggtctagaacacctgctaggcgcagatctaggacccgatcaccagtacgacgcaggtctcgtagtagatcaccagccaggagaagtggcaggtcacgctctagaaccccagctagacgtggccgctcacgctccagaaccccagccagacgtggccgctcacgctctagaaccccagctagacgcagtggtcgctcacgctccagaacaccagccaggagagggaggtctcggtctaggacaccaagacgaggaagatcccgcagtagaagcttagttagacgtggaagatctcactctagaacacctcaaagaagaggcagatctggctcatcttcagagcggaaaaacaaatccagaacatctcaaagaagaagcaggtccaattcaagcccagaaatgaagaaatctcgcatttcttcaaggcggagcaggtctctctcttcaccacggtccaaagcaaaatctcgcttgtctttgaggcgcagcctttcagggtcttccccatgccctaaacaaaagtcacagacaccacccaggcgcagtcgctctggatcctcccaacctaaagctaaatctagaacgccacccagacgcagtcgctccagttcttctccgccacctaaacagaaatctaagacaccatcaagacaaagtcattccagttcatctcctcatcctaaagtgaaatctggaacaccaccgaggcaagggtccataacaagtccccaggccaatgagcaatctgtaacgccacagagacggagctgttttgaatcatcacctgaccctgagttgaaatctaggaccccttctagacatagctgctcagggtcctctcctcctagagtgaaatctagcacacctcccagacagagcccatctaggtcatcatctccacaacccaaagtgaaggcaataatatcaccaagacaaagaagccattctggctcctcttctccaagtcctagtagggtgacgtcgagaacaactccacggcgaagcagatcagtatctccctgctccaatgtggaatccagattgttgccaagatacagtcattctgggtcctcctcaccagataccaaagtgaaacctgaaacaccgccaagacaaagtcactcagggtctatttcaccataccccaaagtaaaggcccaaactccaccggggccaagtctttctggatcaaagtcaccatgtccccaagagaagtctaaagactcactagttcaaagttgccctggatccctctctctctgtgcaggagtaaaatctagcacaccaccaggcgagagctattttggtgtctcatctctgcaactgaaaggacaatctcaaacttcaccagaccacagatctgatacttcaagtccagaagtgagacagagtcattcagaatcaccatctctgcagagcaaatctcaaacatcacctaagggaggtcggtccaggtcttcatctccagtcactgagctggcatccagatctccaataagacaagatagaggtgagttctcagcgagtcctatgttgaaatctggaatgtctcctgagcagagcaggttccagtctgactcttcttcatatcctacagtggactcgaattctctcttggggcagagtagattggagactgctgaatcaaaagagaaaatggccttaccccctcaggaggatgctactgcatcacctcctagacagaaagacaaatttagtccctttccagtacaggataggcctgagtcttcactggtattcaaagacacacttagaaccccgccaagggaaagaagtggtgctgggtcatctccagaaacaaaagagcaaaatagtgcattgcctacgtcaagccaagatgaagagttaatggaggtggtagagaagtctgaagaacccgcaggccaaatcctgtctcatttgtcttcagaacttaaagaaatgtccacaagtaactttgaatcatctcctgaagtagaagaaaggcctgctgtgtctttgactcttgatcagagccagtcacaggcttctttggaagcagtagaagtcccttcaatggcctcatcttggggtgggccacatttttctccagaacataaagaactgtctaactccccactcagggagaacagctttggatcacctttagaatttagaaactcaggcccacttggtacagaaatgaatactggattttcttctgaggttaaagaagatttgaatggaccgtttcttaatcagctggaaacagatccatctctagacatgaaagaacaatcgacaagatcctctggacacagcagttctgagttatccccagatgcagtggaaaaggcagggatgtcttcaaatcagagcatctcttcacctgtgcttgatgctgtacccagaacaccctcgagagaaagaagtagttctgcatcttctcctgaaatgaaagatggtttacccagaactccatcaaggagaagcaggtctgggtcttctccaggacttagagatgggtctgggactccctcgaggcacagcctgtctgggtcctctcctggaatgaaagatatacctagaacgccatctagagggagaagcgaatgtgattcttccccagaaccgaaagctttgcctcagactcctaggccgaggagtcgttctccatcatccccagagctcaacaacaagtgtcttaccccccagagagaaagaagcgggtcagaatcatcagttgatcagaaaactgtggctcggactcccctggggcagagaagtcgttcgggatcctctcaagaacttgatgtgaaacccagtgcatcccctcaggaaagaagtgagtcagactcttctccagattctaaagccaagacaagaaccccacttcggcagaggagtcggtctggatcatctccagaggttgacagcaaatctcgactatcccctcggcgcagtaggtctggttcctcccctgaagtgaaagataagccaagagcagcacccagggcacagagtggttctgattcctctcctgaacctaaagctccagcccctcgggcccttcccagacgaagcagatcaggttcatcaagcaaaggcagaggcccttctcctgaaggaagcagcagtaccgagtcctctcctgaacatccgcccaaatccagaactgctcgcagaggttccaggtcatcaccagagcccaagaccaagtctcgtacaccacctcgacgtcgcagctctcgatcatctccggagctaacaaggaaggccagactgtcccgtagaagccgctctgcctcatcctcaccagaaactcgctctagaactcccccaaggcaccggagaagtccctcagtgtcttccccggagccagccgaaaaatcgaggtcttcacgccgacggcgctcagcttcatctccacgcactaagacaacctcaaggagaggccgctctccttcgccaaagcctcgtggactccagaggtcccgttcccgctcaaggagagagaaaacaagaacaacccgacgtcgagataggtctggatcttctcagtcaacctctcggcgaagacagcggagccggtcaaggtcgcgggttactcggcggcggaggggaggctctggttatcactcaaggtcacctgcccggcaggaaagttcccggacctcctctcgacgccgaagaggccgctctcggacacccccaaccagtcggaagcgttctcgctcacgcacatcaccagccccgtggaaacgctctagatctcgagcctctccagccactcaccggcgatccaggtccagaacccccctgataagccgacgtaggtccagatctcgaacttcaccagtcagccggagacggtcaaggtccaggacttcagtgactcgacgaagatcccggtcaagagcatccccagtgagcagaaggcgatccagatccagaacgccaccagtaacccgccgtcgttcaaggtctagaacgccaacaacacgccgccgctcccgttctagaactccaccagtgactcgcagaaggtccagatccaggactccaccagtaaccaggaggcgatctcgaagcagaacttcgcctatcactcgcagaagatcaagatccagaacatctccggtcacccgaaggagatctcgatctcgcacatctccagtaactcgaagaaggtcccgctctcgaacctcaccagtgacacgccgccgctctaggtcccggacacctccagctattcggcgccgctctagatctcgaacgccactgttaccacgcaaacgttctcgaagtcgctcaccacttgctatccgccgccgctccagatcccgtactccacgaacagctcggggtaaacggtccttaacaagatctcctccagccatccgcaggcgttctgcatctggaagtagttctgatcgttcacgatctgctactcctccagcaacaagaaatcattctggttcacggacacctccagtagcactcaacagttccagaatgagctgcttcagtcgtcctagcatgtccccaacacctcttgatcgctgcagatcacctggaatgcttgaaccccttggcagctctagaacacccatgtctgtcctgcagcaagccggcggctccatgatggatggtccaggtccccgaatacctgaccaccagagaacatctgtgccagaaaatcatgctcagtccaggattgcacttgccctgacagctatcagtcttggcaccgctcggcctcctccgtccatgtctgctgctggccttgctgcaagaatgtcccaggttccagccccggtgcctctcatgagtctcagaaccgcaccagcagccaaccttgccagcaggattcctgcagcctctgcggcagccatgaacctagccagcgccaggacacctgccattccaacagcagtgaacctggctgactctcgaacgccagctgcagcagcggccatgaacttggccagccccagaacagcggtggcaccttcggctgtgaacctggctgaccctcgcactcccacagccccagctgtgaacctagcaggggccagaaccccagctgccttggcagctctgagtctcacaggctctggcacaccaccaactgctgcaaactatccctccagctccagaacaccacaggctccagcctctgcaaacctggtgggtcctcggtctgcacatgccacagctcctgtgaatattgccggctccagaaccgccgcagccttggcccccgcgagcctcaccagtgctaggatggctccagcattgtctggtgcaaacctcaccagccccagggtgcccctttctgcctacgagcgtgtcagtggcagaacctcaccaccgctccttgaccgagctaggtccagaacaccaccgtctgccccaagccaatctaggatgacctctgaacgggctccctccccttcctctagaatgggccaggctccttcacagtctcttctccctccagcacaggatcagccgaggtctcctgtgccttctgctttttcagaccaatcccgttgtttgattgcccagaccacccctgtagcagggtctcagtccctttcctctggggcagtggcaacgaccacgtcctctgctggtgatcacaatggcatgctctctgtccctgcccctggggtgccccactctgatgtgggggagccacctgcctctactggggcccagcagccttctgcattagccgccctgcagccagcaaaggagcggcggagttcctcctcgtcgtcgtcgtcctctagctcctcctcttcttcatcatcgtcgtcgtcgtcctcctcctcctctggctccagttctagtgactcagagggctctagccttcctgtgcaacctgaggtggcactgaagagggtccccagccccaccccagccccaaaggaggctgttcgagagggacgtcctccggagccaaccccagccaaacggaagaggcgctctagcagttccagttccagctcctcctcttcatcttcctcctcctcctcctcctcctcttcttcctcctcctcttcctcttcttcttcttcctcctcatcttcctcctcctcgtcgtcttcctccccttcccctgctaagcctggccctcaggccttgcccaaacctgcaagccccaagaagccaccccctggcgagcggaggtcccgcagcccccggaagccaatagactccctcagggactctcggtccctcagctactcgcctgtggagcgtcgccgtccctcgccccagccctcaccacgggaccagcagagcagcagcagtgagcggggttcccggagaggccagcgtggggacagccgctcccccagccacaagcgcaggagggagacacctagccctcggcccatgagacaccgctcctccaggtctccataaattgtctttgggggattccaccacacccaatgctctggagccacaaggagtgtcccttcttccccagcagagccgtgggagggtccttgtctgctctcctttgaaccttggcagcccttggatggagggctccctttccctccccttttttttttctttgttcctgtgaaatgttaatctccgtgagttcttcctggttcatgtgttctggggggtttggggtgggagggaatgcagatgggagttgggggaggggaggatacagttcaggataccccagcctggagtcagggccagggaggcatggccccacttgtatccagaagttcccaggggtgattgtgatggtggttgggactggaggttgtataaggtgttcttggaaggaaggggcaggagttggaattagttggtccctactgtcccccatgaggttgtgaacccctccccccaacttttcatgtttcttaaaggcattttggttttttaaaatctgtacagcaagagcaactttttctgtcaaataaaaatgagaaatgcagg

SEQ ID NO: 27618 - DNA, 8829 bp, Homo sapiens
  source 1..8829: mol_type = unassigned DNA
agaatgctctgcatcgacagcgggagacgagacgcgctcgggcgtcgctttgctgccgctaggccctgtgctcctccccgcagcggaaggcctacgaatacgcggtgtcttacgtcgcttcctccgttcttcgttgcactggccaacgggacgcttagtctttcggcaacggggtgaaaccttccttgtgcctgaaaaaacggtacttcgcggtgtggcttcggcgcctgcgcaaaaggccgcggggcgcactccagttcccggcaggccccgcgacgcgcgtttgcgtgctgacgcacgcagttagtcgtgctgacgtgcagcgcggcccaggcggggtgcgagtggcgcagttggagcccgttgcggcccctgaggaagcgaggaggcgtcggcgtcggctgaggcgggcggaccggcgaggcgaggcggcggccccaggcccgagggactcgggagctcgagcagcggcggcggcaagacctctccccctcggaggcggcgggcggaggcggcgggagcggtggtgccccccccgggcacggggccatgtacaacgggatcgggctgccgacgccccggggcagcggcaccaacggctacgtccagcgcaacctgtccctggtgcggggccgccggggtgagcggcctgactacaagggagaggaggaactgcggcgcctggaggctgccctggtgaagcggcctaatcctgacatcctggaccacgagcgcaagcggcgcgtcgagctgcgatgcctcgagctggaggagatgatggaagagcaggggtacgaggaacagcaaattcaggaaaaagtggcgacctttcgactcatgttgctggagaaggatgtgaaccctgggggcaaggaggagaccccagggcagaggccagcggtcacggagactcaccagttggcagaattaaatgagaagaagaatgaaagactccgtgctgcctttggcatcagtgattcttacgtagatggcagctcttttgatcctcagcgtcgtgcccgagaagctaaacaaccagctcctgagcctcccaaaccttacagccttgttcgggagtctagcagttctcgctcaccaaccccaaagcagaagaagaagaaaaagaagaaagatagaggacgcaggtcagagagcagctctcctcgacgggagagaaagaaaagctcaaagaagaagaagcacaggtcagaatctgagtccaagaaacgtaagcataggtctcccactccaaagagcaaacgtaaatctaaggacaaaaagcgaaagcggtctcgaagtacaacaccagcccccaagagccgccgggcccaccgttcaacttctgctgactctgcttcctcctccgatacttcccgcagtcggtctcgaagtgctgcagctaaaactcatacaactgccttggctgggcgaagtccttcccctgcttcagggcgacgcggggagggagatgcgcctttcagtgaaccaggtactaccagcacacaacggcctagtagcccggagactgctacgaaacagcctagcagcccttatgaagacaaagataaagacaagaaggagaaatctgcaactcgacctagcccctctccggaaaggagcagcacaggcccagaaccacctgctcccactccgctccttgctgagcgacatggcggctccccacaaccccttgcaaccacccccttaagccaggagccagtgaaccccccatctgaggcctctccaactcgggaccgttcaccacctaagtctcccgagaaacttccccagtcttcttcctcagagagcagcccaccatcccctcaacctaccaaagtttctcggcatgccagctcttccccagaaagtcctaaacctgctccagctccagggtcccaccgagagatttcttcttctcccacatctaagaatcgctcacatggccgagcaaaacgggataaatcacattctcataccccctcccgtaggatggggaggtcccgtagccctgccaccgctaagagagggcgatctcggtctcgaacccctaccaagagaggtcattctcgatcccgatctccccagtggcgtaggtccaggtctgcacagaggtggggaagatctagaagcccccagcgacgtggccgctctaggtctcctcagcgaccaggctggtctaggagcagaaatacccagagaagaggcaggtctaggtcagcaaggcgagggaggtcccactctagatccccagccactaggggtagatctcgttctagaacaccagcccgccggggcaggtcccgctctagaacacctgccaggcggagatcacgatccagaactcccaccaggcgtaggtctcggtctagaacaccagcccggaggggcaggtctcggtctagaacacctgctaggcgcagatctaggacccgatcaccagtacgacgcaggtctcgtagtagatcaccagccaggagaagtggcaggtcacgctctagaaccccagctagacgtggccgctcacgctccagaaccccagccagacgtggccgctcacgctctagaaccccagctagacgcagtggtcgctcacgctccagaacaccagccaggagagggaggtctcggtctaggacaccaagacgaggaagatcccgcagtagaagcttagttagacgtggaagatctcactctagaacacctcaaagaagaggcagatctggctcatcttcagagcggaaaaacaaatccagaacatctcaaagaagaagcaggtccaattcaagcccagaaatgaagaaatctcgcatttcttcaaggcggagcaggtctctctcttcaccacggtccaaagcaaaatctcgcttgtctttgaggcgcagcctttcagggtcttccccatgccctaaacaaaagtcacagacaccacccaggcgcagtcgctctggatcctcccaacctaaagctaaatctagaacgccacccagacgcagtcgctccagttcttctccgccacctaaacagaaatctaagacaccatcaagacaaagtcattccagttcatctcctcatcctaaagtgaaatctggaacaccaccgaggcaagggtccataacaagtccccaggccaatgagcaatctgtaacgccacagagacggagctgttttgaatcatcacctgaccctgagttgaaatctaggaccccttctagacatagctgctcagggtcctctcctcctagagtgaaatctagcacacctcccagacagagcccatctaggtcatcatctccacaacccaaagtgaaggcaataatatcaccaagacaaagaagccattctggctcctcttctccaagtcctagtagggtgacgtcgagaacaactccacggcgaagcagatcagtatctccctgctccaatgtggaatccagattgttgccaagatacagtcattctgggtcctcctcaccagataccaaagtgaaacctgaaacaccgccaagacaaagtcactcagggtctatttcaccataccccaaagtaaaggcccaaactccaccggggccaagtctttctggatcaaagtcaccatgtccccaagagaagtctaaagactcactagttcaaagttgccctggatccctctctctctgtgcaggagtaaaatctagcacaccaccaggcgagagctattttggtgtctcatctctgcaactgaaaggacaatctcaaacttcaccagaccacagatctgatacttcaagtccagaagtgagacagagtcattcagaatcaccatctctgcagagcaaatctcaaacatcacctaagggaggtcggtccaggtcttcatctccagtcactgagctggcatccagatctccaataagacaagatagaggtgagttctcagcgagtcctatgttgaaatctggaatgtctcctgagcagagcaggttccagtctgactcttcttcatatcctacagtggactcgaattctctcttggggcagagtagattggagactgctgaatcaaaagagaaaatggccttaccccctcaggaggatgctactgcatcacctcctagacagaaagacaaatttagtccctttccagtacaggataggcctgagtcttcactggtattcaaagacacacttagaaccccgccaagggaaagaagtggtgctgggtcatctccagaaacaaaagagcaaaatagtgcattgcctacgtcaagccaagatgaagagttaatggaggtggtagagaagtctgaagaacccgcaggccaaatcctgtctcatttgtcttcagaacttaaagaaatgtccacaagtaactttgaatcatctcctgaagtagaagaaaggcctgctgtgtctttgactcttgatcagagccagtcacaggcttctttggaagcagtagaagtcccttcaatggcctcatcttggggtgggccacatttttctccagaacataaagaactgtctaactccccactcagggagaacagctttggatcacctttagaatttagaaactcaggcccacttggtacagaaatgaatactggattttcttctgaggttaaagaagatttgaatggaccgtttcttaatcagctggaaacagatccatctctagacatgaaagaacaatcgacaagatcctctggacacagcagttctgagttatccccagatgcagtggaaaaggcagggatgtcttcaaatcagagcatctcttcacctgtgcttgatgctgtacccagaacaccctcgagagaaagaagtagttctgcatcttctcctgaaatgaaagatggtttacccagaactccatcaaggagaagcaggtctgggtcttctccaggacttagagatgggtctgggactccctcgaggcacagcctgtctgggtcctctcctggaatgaaagatatacctagaacgccatctagagggagaagcgaatgtgattcttccccagaaccgaaagctttgcctcagactcctaggccgaggagtcgttctccatcatccccagagctcaacaacaagtgtcttaccccccagagagaaagaagcgggtcagaatcatcagttgatcagaaaactgtggctcggactcccctggggcagagaagtcgttcgggatcctctcaagaacttgatgtgaaacccagtgcatcccctcaggaaagaagtgagtcagactcttctccagattctaaagccaagacaagaaccccacttcggcagaggagtcggtctggatcatctccagaggttgacagcaaatctcgactatcccctcggcgcagtaggtctggttcctcccctgaagtgaaagataagccaagagcagcacccagggcacagagtggttctgattcctctcctgaacctaaagctccagcccctcgggcccttcccagacgaagcagatcaggttcatcaagcaaaggcagaggcccttctcctgaaggaagcagcagtaccgagtcctctcctgaacatccgcccaaatccagaactgctcgcagaggttccaggtcatcaccagagcccaagaccaagtctcgtacaccacctcgacgtcgcagctctcgatcatctccggagctaacaaggaaggccagactgtcccgtagaagccgctctgcctcatcctcaccagaaactcgctctagaactcccccaaggcaccggagaagtccctcagtgtcttccccggagccagccgaaaaatcgaggtcttcacgccgacggcgctcagcttcatctccacgcactaagacaacctcaaggagaggccgctctccttcgccaaagcctcgtggactccagaggtcccgttcccgctcaaggagagagaaaacaagaacaacccgacgtcgagataggtctggatcttctcagtcaacctctcggcgaagacagcggagccggtcaaggtcgcgggttactcggcggcggaggggaggctctggttatcactcaaggtcacctgcccggcaggaaagttcccggacctcctctcgacgccgaagaggccgctctcggacacccccaaccagtcggaagcgttctcgctcacgcacatcaccagccccgtggaaacgctctagatctcgagcctctccagccactcaccggcgatccaggtccagaacccccctgataagccgacgtaggtccagatctcgaacttcaccagtcagccggagacggtcaaggtccaggacttcagtgactcgacgaagatcccggtcaagagcatccccagtgagcagaaggcgatccagatccagaacgccaccagtaacccgccgtcgttcaaggtctagaacgccaacaacacgccgccgctcccgttctagaactccaccagtgactcgcagaaggtccagatccaggactccaccagtaaccaggaggcgatctcgaagcagaacttcgcctatcactcgcagaagatcaagatccagaacatctccggtcacccgaaggagatctcgatctcgcacatctccagtaactcgaagaaggtcccgctctcgaacctcaccagtgacacgccgccgctctaggtcccggacacctccagctattcggcgccgctctagatctcgaacgccactgttaccacgcaaacgttctcgaagtcgctcaccacttgctatccgccgccgctccagatcccgtactccacgaacagctcggggtaaacggtccttaacaagatctcctccagccatccgcaggcgttctgcatctggaagtagttctgatcgttcacgatctgctactcctccagcaacaagaaatcattctggttcacggacacctccagtagcactcaacagttccagaatgagctgcttcagtcgtcctagcatgtccccaacacctcttgatcgctgcagatcacctggaatgcttgaaccccttggcagctctagaacacccatgtctgtcctgcagcaagccggcggctccatgatggatggtccaggtccccgaatacctgaccaccagagaacatctgtgccagaaaatcatgctcagtccaggattgcacttgccctgacagctatcagtcttggcaccgctcggcctcctccgtccatgtctgctgctggccttgctgcaagaatgtcccaggttccagccccggtgcctctcatgagtctcagaaccgcaccagcagccaaccttgccagcaggattcctgcagcctctgcggcagccatgaacctagccagcgccaggacacctgccattccaacagcagtgaacctggctgactctcgaacgccagctgcagcagcggccatgaacttggccagccccagaacagcggtggcaccttcggctgtgaacctggctgaccctcgcactcccacagccccagctgtgaacctagcaggggccagaaccccagctgccttggcagctctgagtctcacaggctctggcacaccaccaactgctgcaaactatccctccagctccagaacaccacaggctccagcctctgcaaacctggtgggtcctcggtctgcacatgccacagctcctgtgaatattgccggctccagaaccgccgcagccttggcccccgcgagcctcaccagtgctaggatggctccagcattgtctggtgcaaacctcaccagccccagggtgcccctttctgcctacgagcgtgtcagtggcagaacctcaccaccgctccttgaccgagctaggtccagaacaccaccgtctgccccaagccaatctaggatgacctctgaacgggctccctccccttcctctagaatgggccaggctccttcacagtctcttctccctccagcacaggatcagccgaggtctcctgtgccttctgctttttcagaccaatcccgttgtttgattgcccagaccacccctgtagcagggtctcagtccctttcctctggggcagtggcaacgaccacgtcctctgctggtgatcacaatggcatgctctctgtccctgcccctggggtgccccactctgatgtgggggagccacctgcctctactggggcccagcagccttctgcattagccgccctgcagccagcaaaggagcggcggagttcctcctcgtcgtcgtcgtcctctagctcctcctcttcttcatcatcgtcgtcgtcgtcctcctcctcctctggctccagttctagtgactcagagggctctagccttcctgtgcaacctgaggtggcactgaagagggtccccagccccaccccagccccaaaggaggctgttcgagagggacgtcctccggagccaaccccagccaaacggaagaggcgctctagcagttccagttccagctcctcctcttcatcttcctcctcctcctcctcctcctcttcttcctcctcctcttcctcttcttcttcttcctcctcatcttcctcctcctcgtcgtcttcctccccttcccctgctaagcctggccctcaggccttgcccaaacctgcaagccccaagaagccaccccctggcgagcggagcctcctccctgtctccccgtctccacgccattctcttccacatgtagccagagggacctttctaaaacgcacatctggctacttccctccactccacaaatccttcgggacgccctgtggcctgcaggacaaagccccacctctgcgggagtggcgtgtgaggctcttcaccaacgggccttgcccgccctgtgttctcctcctgcccgcccccacacatgccctgtgctccagccacacccagcgccttgcagtctaa

SEQ ID NO: 27619 - DNA, 8477 bp, Homo sapiens
  source 1..8477: mol_type = unassigned DNA
gtcacattgtgcgagagacaaaacccgggcgcgccggagctcacacgcgcacgcacacacatccgaccccgtcgcctcttctctcctggtgctgcccagaaagccagccctcccttcccttcttggggcgcagaggctcagccagctcagagcgcagcctggagccgacccagaagggcgaagaaagcccagcggacgagcctcctttctctgctgcctgcccgggctggggcgtcccatcccccgccctgaactccgatctctcccaccccacccctctctgggtttcacccggacagagccgggagctgggtgtcgcccccgtttggaatccacgtttcagcactttggacagcgccccggacgccccggcccctttgggttggcgatggcgagcgttcagcaaggcgagaagcagctttttgagaagttctggcgaggaaccttcaaagcggtggccaccccccgtcccgagagcatcattgtcgccagtatcacggcccgcaagccgctgccaaggacagagccccagaataaccccgttgtcccagctcaggatggaccctcagaaaagctgggtcagcatctggccaccgagcccttgggcaccaacagttgggagagagacaagacctgtcgggaactgggtgccaccagaggacacagtgcctctcatgacaaagacttgacaccaccaccttcctccaggggaaagaagaaaaagaagaaatccactcggaagaagagaaggaggtcctcatcctatagcccatcgcctgtcaagaaaaagaagaagaaaagttccaagaaacacaagcgacgcaggtcattctccaagaagagaaggcacagctcctctagcccaaaaagcaaaagaagagatgagaagaggcacaagaaacaatctcgaagccggccccgaaagtctcaccgccaccgccatcaccgctgcccctcgcggtcccagagctcggagtcccgcccctcaagctgtgagagcaggcaccgcggccggtcccctgaggaagggcagaagtcccgccgaaggcactcccgccgctgctccaagaccctctgcaaggacagccctgaggcccagtccagtcgcccgcccagtcaacccctccagatgcttggctacctgtcagccaggggtgtaatcactgggtcggggtctgctgctgacctctttaccaaaacagccagcccgctcaccacctcgcgaggacgttcccaggagtacgactcaggaaatgacacgtcctcgccaccctccacgcaaaccagctcagccaggtctcggggccaggagaaggggagccccagtgggggcttgagcaagagccgggagctcaacagtggcaacacctctgattcagggaactccttcaccacctcctcaccccagaacaagggggccatgttggagaatctctcccccaccagcaggggcagagagtcaaggggatttcagtcaccgtgtctggaatgtgccgaagtgaagaagtccagtttggtcccatccacagcccggagctcacccatgaaagggtgttcccgcagctcctcctatgccagcacccgatcctccagtcactcgtcccgatccccaaatcccagggcttcccccaggtacacccaaagccgatccacctcttctgaaaaaaggtcctactcccgctctcccagctattcctccaagtctggcaagaggagcccgcccagcagaagctctaggtcccgccgcagccctagctactcccgctacagccccagcagggagcgggatcccaaatacagtgagaaggactcgcagcagcgggagcgcgagcgagcgcgtcggagacgtcggtcctactcgcctatgagaaagcgccggagagactccccgagccacctggaggcccggaggataaccagtgcccggaaacgccccatcccctactatcggcccagcccctcctcatccggcagcctcagcagcacctcctcctggtacagcagcagcagtagccgctcggccagccgcagctactcccggagccggagtcggagccggagccggagacggagccggacccgcacgagcagcagctctagctcccgcagccctagtccgggctcccgcagccggagccggagcaggagccggagccggagccggagcaggagccagagccggagctacagctcagcagacagctactccagcacgaggcgctaagtgcccctgagccagctgcccgtgggggccccttcgcgctgccagcctcccccaaccacctgccctccccgccttcttggtgacaaatagtgagggctcctataccttgtccttcctgcttgcctaggggaagaggagaagagggtaagggggcttcactctctagatcagcctgctaggagcctctaccagcatcatcctggggcccagctcaggcctgggcatatggaaagaaccatcatcttgtggcacaaaaaaagaagaaagaaaagaaaacttcaaggttttgtgagaagcaatgggtctgtgactcaaaaattgagccctggccaggaaaatgtggagacagttcttctcctccactgctcacaggaggcccgtggtaattctccccacctccccggatgccccactagtccaacttcatggctgcacgtggatggacccccatgtctgagaggggtgaaagaggagaccaatggcagttcaggttcaagataacggggtcaggcctttaacttcctcaaacaggcccaagcaaaggctggaagacatttgggtcctagaagaagggatatccttgaataccagatggggacgtttgacttggtgggaggtgtcaggagataggagttggttaagatgatagatagaaaaacggaagggttcagctgctgctcccaatacctcagcatggtaaggggacagagcccagcagatcccagctgtgaagaggccactgcatggctgacacaaaacacctcttggccattcacaggggccctgcaacctcacgagaaaggagatagtggaagagtcaggacaggttggtctccagccccacttcccaaatatgcctcagccccactagctggcaccaacttaattccacgggaccatctgctgaacattccccagtgccatggccagttgccaggccccagcgccagccagtctggccttaccctccggttggcgcctgccagccccctcccctctgcccaggctgccacgccctggatgccacccagtgcagcctggcacctacccacccacccttcagcttaagccactccccttgcctctcaggaattttgccaggatggggcacagcagctcaggtttgggggaaaagacccgaatccagagtgcaggggagaggggcttggatatgccatgtcttgggctcctgctggcttctgaggtttcttgtcagcttgggaaagacccacctttatttttgccctcaccccaagtcccccctggctggggctgggcagagagggtaagctgatctccgatccacaaataccaccagctgcttcatccacagaaggcgctaagaacggggaggtgaggaataagatccttaaaataaactcttgggcatccccctcaccagctgactggctttccggaggcttgtgggtgagtttcaagtttgtggtggcaacagcagcaggacagggcacggagggagcgagggagagaggaccggtcccagcttttggatattttgggttatggggaagcaagggccaaacattctttatccctcccaccccagggaaaacatttggaaaatagtcctttttcttggaagcagtgacgtctccctacccaatctttcccatcctatcaacccatggggctagagactgccatgcaaccaccaccacgacagcccttcctccatcagaagacaggagtgagggccccgggcagcagtggacgacccagcctccccataccgggcctctggcccagacctaagccctgcccacaaagactaatggatgccagtgctgtcactgcagaaggccagatggcaggtgcctgggacaggggcaggtgccccggggagggcaagtacagccactgtaaataaccctcgtccctgcccaggaacccagactggacttcagtctccctccatggagacaaaggcttcccagagccaccaaaaaccttcttagcaggacagctgtgagaggcatcagaacctcacgttcggactgccttcatcaagacaactctaggggaccattttgcctggggctcctagcaaacctttttatttattttatttatttatctatttatttatttgatgactgtctctctttctcgccattagcagtattgaattatttatttatacagaggttttgtgtgtgtgtgtgtgtgtgtgtgtgtgtgtgtgtgtgtgtgtgtgtgtgttggggggatctcctaaattatttctgtgcatctcctttttttttctgctgttttttatggatgggatttgagaggccaaaggtgagtgggctattggccttctccctgaaggctctaagcctggaacaccctggggttggcccagaaggaggcacatcagtcccaaaattcatcacttaacccagcgtccaggagggtcaggcctgtaccccagcctcctgtcccccaggaacctcacaggggtatcaaaaagatgtaaacagcccagaggcttatgagctacagtgatgaattgacacagtggagttgcaacttaggtgggggttggagtcgaaagttggcaaatggggccaaggctgcacaaagtcgaaatcccttgtgaatgtcccttagggaggcaccagattggagacagatgtgctatctcctaacagagtgatgaggcttcagttgagtacttgctgaagtagttgccttgtattttgagggccatggtggatgaaaatgatgtctggtttagtactggaattgcacttggggttgacaaggtgctcacaccatgagaatggaggcaggaattgagctgactgagggaagatgcaccttgatctcaccctcactccaaggcacatagcaggatcactccctagcttctctgagcacacctagttggtttcatgtatgttacacatgcttccactccacagtacctaatttctctctgtcccctgagatctgaaggctaccttgggaagaggcatcagccatcttgcttgagaaccaccaagccaaaagcaaaagcttttatctatgatctcttgctgtttcatcaggggaaagcacaaagctatttctgaaattaggaaaaaaaaaaaaaaggtggaaggagcagccagatgttccacaggaccccaccaagaaggtcatttccaaacccatcctggaagggcccaggatccaaaggtcatcagtcctgcttatctgaccaactggcagtgtcttctggctgctggccggagacagctcttgccctttccaaagtcactgtccactgccttgcaattgccagcttgtctggtccagctttgggtttggtgagacttttgcaacatccctggttgtttccctggcaatgtgactatccagccctaacccaaagcaagggagtgcccctttcctgggtgaagtttacaagaaggctgcttaaatgcctgcttcggggaaatctctgcctctctctctctctgtctctctctctgtctctctctctgtctctctctctctctctctctctctctctctctcagtgtatttctctactttcttttacatttcctttttttctatccaaaaacaatgtgcttgttgaggcactggtaaccctgattaaccagaacctcccattcccagtatcgctgttcctacgcccatttcaccctcattaccttctgcttccaaggaatatgacagatcaccaggatgctgctcgtcgtgaggatttatctcaaaaaccaacatccaaaatgggagggagatgtggcttgaggtcaagcgccatgcatcccaagcctttgaccttcccgctatggaagtgcactggatgacagaaactgaatacattgctccctttccctagggcaaagttcgacctctgttaagtggagggatttgtgagataaaaattcaaaatgttggcctgaggcctgagagtgtcaccaaagacagagggagcttcactgagactcagagggaaaaggaaaagagcctcaaacatttttaggaggttgtccatcatgaaagtaaaaacgaaaagcaagatttgatctcccttcagttaattaggcaaggctaagtaactcaaagccccctattagtaacattctggttcactgaggtttgatcatattcctatctgcattccttcccttctttgaaggacagctgatctttcagaagcagaataaaattaagatgttagaacaaaggtctcagtctcagagaaccgcatcacttcatttgctcagacccatcctcttttgcaaaagggtctgcttggagaggccaaaattcagggtgctctcaaaggcaaagaaagcacattgttttccttctccagtccaactttcatcttttcttctgctgttttcttttcccctcttctttttcacaaatgttcaaaatggtctcatgcgcatgtgtcttgccccactttcccctttagctgaacagaaaattttgtctcagtaaaacgaagtcaaaaaacaggattcctccaaacatgcctcctcccgcactggccagccgagtccagctgagaaacttatgctagattcaatgtcattgagcaatgctttattgaagtctcgttcttctcacttctgcaccagtgagccaatgatactgacagaaatgtcatctctcttctatctgtggttgctgtttttggagtaaaagtttctgtgtgtgtttttttagttcttttgatggctgttgttttgcattgtaaataccatgatgggggacccccatcagaacatggcttatttaataatttatttcgtatttattgagtaatattgggaaaagagaaggaccacctctttccctgaattgctattgagaattggtccatctcccagctccaggtgctgctgtctgcagcaagggcattactgcccaggtaaggagtgctagaatcaccaagcaaattgaaattggcagaaatggaggcttcagtcacacaaattagactcaaatggaactaaaacactggttatctccaggaaaacctcatttagatggaaattaatggaagaataaaatgcctacacatgaaccaacttctattaaaaagtcacaactccttgaaaaaaaaaataaagaaaaattgtaaactcttttttttttctggccaaggaaagctatgcctcatcttctaacgagccaagccaaaaagactgcaatggtattcctatgtgtttctttggcctgtgtatcagtctgaatgaaatggaatgggtctctagcctcagtcttgtcatctgtaaaatggggcttgtcctatatattatctgcaagacgtgggaaatgggggctcaagccctgatgctatggactccatactgttggatatattgtctcttgtgtcttctgctgactgcagattaaagggtgtcaaccaaggaaggaaacaaaaaagtagggcctggacttcatttgcagaatgaggtcatagtcgttgagtcccacagtcatatatgggagacctcaagttgctgtcaccttgataactcttgtatcctgggttaaagccctctgtatttagtttgaacttctctctaagccccgtggtccaaagtcatcacgggagagaccaagatgggcttaccttgccctgctctggatttaaccattgttcattgtcaggctatatttttgtacaatcattcaaataacccagtgacataggtcatattgccacttttcagaggagaaaactgaggctcaggagggggagttgacatgcccaagctcccttgagctcagatcagcttgactcaatgtccaacattcccttggtagctttttctccggggtcctgtgctataagaacttctctctgcactgtatttttttttctcccaattcttagctatttcctcaagcaatgattggccaaggacctagcataatccaccacattggccaaggggacgtggtgcaccccaaggccatttctctgcattggaggctgcgaatctcctctggaaaattcccaacccgaggacccaccatgagcccagctcagcctgaccagacagcctctgcctggagcattcacatcagatggaaagaagctgctgtgtcctccagcatcctgggaccctgtcctctgcccagtgacacagcagccatggctagcttgatttctggtctccaaagctaagcataaccttcccggggtttctggtttttcagcctgtacgaaacatgtctctgttctaattaaagttcccatggtatggtgttctca

SEQ ID NO: 27620 - DNA, 5439 bp, Homo sapiens
  source 1..5439: mol_type = unassigned DNA
gttgcgctcccgcgcgtgcgtgttgggatcgaatcgctgtttccttccgcttctcttcctctgtctcccccccatatccgtgcgccgagctgataaaggcgccattttggaggggccgcgggagacgtggtgccgctgcgggctcgctctgccgtgcgctaggcttggtgggaaggcctgttctcgagtccgcgcttttcgtcaccgccatgtcgggaggtggtgtgattcgtggccccgcagggaacaacgattgccgcatctacgtgggtaacttacctccagacatccgaaccaaggacattgaggacgtgttctacaaatacggcgctatccgcgacatcgacctcaagaatcgccgcgggggaccgcccttcgccttcgttgagttcgaggacccgcgagacgcggaagacgcggtgtatggtcgcgacggctatgattacgatgggtaccgtctgcgggtggagtttcctcgaagcggccgtggaacaggccgaggcggcggcgggggtggaggtggcggagctccccgaggtcgctatggccccccatccaggcggtctgaaaacagagtggttgtctctggactgcctccaagtggaagttggcaggatttaaaggatcacatgcgtgaagcaggtgatgtatgttatgctgatgtttaccgagatggcactggtgtcgtggagtttgtacggaaagaagatatgacctatgcagttcgaaaactggataacactaagtttagatctcatgagggagaaactgcctacatccgggttaaagttgatgggcccagaagtccaagttatggaagatctcgatctcgaagccgtagtcgtagcagaagccgtagcagaagcaacagcaggagtcgcagttactccccaaggagaagcagaggatcaccacgctattctccccgtcatagcagatctcgctctcgtacataagatgattggtgacactttttgtagaacccatgttgtatacagttttcctttattcagtacaatcttttcattttttaattcaaactgttttgttcagaatgggctaaagtgttgaattgcattcttgtaatatccccttgctcctaacatctacattcccttcgtgtctttgataaattgtattttaagtgatgtcatagacaggattgtttaaatttagttaactccatactcttcagactgtgatattgtgtaaatgtctatctgccctggtttgtgtgaactgggatgttgggggtgtttgtggttatcttacctggggaagttcttatgtttatcttgcttttcatgtgtctttctgtagacatatctgaagagatggattaagaatgctttggattaaggattgtggagcacatttcaatcattttaggattgtcaaaaggaggattgaggaggatcagatcaataatggaggcaatggtatgactccaagtgctattgtcacagatgaaattggcagtattgaccttatactaaaaggcaggggttaaaaatgattatatacattttccttaaaacacttgcaaacattttattcagttgtctttagctacaattgctttgctttttaaaccttggcaattgtggcaaaattatattgcccattttgtagcaacttattttgctcccttccccccatttttgttttaatagggactaatgtgggaagaactggctaatttgtcacagtgcttagttacaactgttaatgtgtgacctgctgttggtgtacatgtgggtacagggtgtttttaaatccaacaagatagagtataatatcaatactgctaaatctgcatgtcctctgtgtgactgatagagcgttgctatttcatttttttaagacaaaatgaaagcaaaatatagagttccaatgtattggtgtagataatctagttgggaatacttttaagtctcaccttcccctttaaactaatattcataattggttcatatgtttaaaagactttaatttacaaattaaattgcaaatgggagcattagatttagttttagacttaggtgggtagcaatgccagtaaacttaaattacgtaacttcttgcaaccacgaaacctgtaatacgctgtacagtaacaagtgttggcattatcagttgaactgtaaatacaaaatgcttcttccaattagtctctatgatgattaagtttctaaaatttatctgaacaccattcagaaacttgttttggggaatttgatagttattgatgtgcatctgttaaactgatgacagacataactcatcattccccagaaaccttttttgattacagtatctaacattttgcctcctcttttttggttttgctggttataaaggtttggattggagagggctcactggatcccaatccttggagctggatcattggattcaaatcataatgtggataggatagggaggatgaattaccaggattcatggagcgggatcagattaccaggaacataggagtggattcctgccccaaccaaaccgcattcgtgtggatttttttattcaacttaattggctattccaaagattttttttttcctatttttgacgattggagcccttaagatgcacgatggaattgtgttttgcgttttttggtaaaaggagcaaagcgaggacctggagataaacgctggagcaatctccttggaaggattcagcacgagtagatggtaaacatttaaaggggaaagggggggtttgtttaaaatagtaaatcagtaagtcacttctaaatttaaagaaaacaaaattggagttgaagaataagtaggtttccaattggctattgccgttttctttgaaaaaataaacattttttaaaaaactatgcatggttgtcctttttcctcttcatgtaagattctaactgggtctatcagttaatctttaaattgttaagtaagataagattttgactcttgtgttaatgtgttagcaaattaaaagttcttaaaaggcaatctaatggtattagccatcttttattgttaattgtaaaagtcttcaggggaaagcaaaaggggagaataaggcatttgtgtatgtaacttggtaaatgacggtgggggatggatctagcatctgaaagataagcttctctactttgttataaagtggttaaaaaactatagatgctgcttattttctggtggtcatagacaacataggcttttgtgcaaaattggttgatggctactaatgttcacttggagatagcttttgatattctcaatgaaactcatctcaaaaaaaggtaagtattaaatgttaacatcagcacagatgtattagaactgttttttgtttttgagacagagtctcgctctgttctccagactggagggcagtggtgtgatctaggctcactgcaacctccacccctggatttgagtgattctcgtgcctcagtctcccaagtagctgagactacaagtgtgtgccacccttgcccggctaattttgtatttttagtagagatgtggtttctctgtgttacccaggctggtcccaaaactcctggcctcaagtgatctgcctgccttggcctcccaaagtgttaggattacaggtgtgagccaccatgctcagcctgtagaacttttaacccaagtctcatttcttttttgaaagggaagagtgcacaagattaactgcttctttggatgaatcattgttaataaaaagctgggcatttagaattttgccttataagcccttctccaaccataagattattttgtaccaaaaactttggtgttctctaccaaagcagttaaaaacttttagcctgctacttcttgtatttgtctactgacagccccttggtactatttaggttgggggaggggacctaaaataaatagactttaacatttcccttgggtgctaatcatagttggaagttgaatttaaggtgattatttgggtgacaattaaaaacctaaggaaaaccagaaatcttggtagtggaagaaatgtgtaaggtcaccccaatcggtagattttaatgaacgttgtggaatgttgggaagaggggatgttaagttgaatgcagaatttcactaagtacttagtgtaagtttaaggatgtagctctttttatctaagaattcaatgtaatggccaaaaggcagatttactgtttaaaaatttgaataattttacatgacattcttgaaattctaagaagttttatgtgtagaacattttaaaaattcatcagattattaaagggaaaataaatgattaatgataattttggaaggttaatgtgagctagacttaagtaaactttggttcatttgtgttcattgaatgttttggaaatgaccaaaaaatgtaaatggccttcactcaagtttgagtgtttaaagttgaaagatgtgctctactaaaagttatagtaattctaacctcacattgaaatgagacagtattccttgttatacaggctgaatttgaagattagagaggatctaatgtttacttaggtaaaggggcataggttttgtagttaagatgaccagacagctaaaagctgtgatgggaagtatggactgctcctatttatagtctcagaaaatggacctttaggtctctatccgtattggcaattattagaagaaagttacacccttttgaaactacaaaagctgtcttggaatttccccctcttctccctatttatgtccccttagaatattttagggagcctataattattttctaaccaaggaaaaacttaagtctctttaagaagcaattacttttcataacatcagattgaataacccaccttgctgttcagcccacatcctactggaaacaaaaggtaagaaacccattttctggttcttgattgtttgggtctgaattttgtttttaaaactaagctaagtttaatgttttttaaaatgctgtttggaatatgaatagattccccgtaaaatgatttttcctaagttttatgctttagtaaatattcagtgctcacgtctgtgcatcatagtgcttgcgtttaatatgatttattgtagaatctcaacttttcttggtgtttgttgtctttgaaacattgtcttggtcattagggctggtgttttcacatttctgtggtcaaggtggatttcttatgtgtgcctttttgcttactttgtatatgaattttgtaatttaaattgcaagtaagttatatatatgtatttaccataaatagtattaaaagatgagaaactgttagactgaagttctgttgtaacataaccattatttccatcacagtatgaagactgcaaacgcagaaaacagattacagtctcttatccattttttgaaatccaaaaactacgaaaacaaaagattttctgttgttgagctaattaaatgtgaaccctgacc

SEQ ID NO: 27621 - DNA, 2983 bp, Homo sapiens
  source 1..2983: mol_type = unassigned DNA
cgagctgataaaggcgccattttggaggggccgcgggagacgtggtgccgctgcgggctcgctctgccgtgcgctaggcttggtgggaaggcctgttctcgagtccgcgcttttcgtcaccgccatgtcgggaggtggtgtgattcgtggccccgcagggaacaacgattgccgcatctacgtgggtaacttacctccagacatccgaaccaaggacattgaggacgtgttctacaaatacggcgctatccgcgacatcgacctcaagaatcgccgcgggggaccgcccttcgccttcgttgagttcgaggacccgcgagacgcggaagacgcggtgtatggtcgcgacggctatgattacgatgggtaccgtctgcgggtggagtttcctcgaagcggccgtggaacaggccgaggcggcggcgggggtggaggtggcggagctccccgaggtcgctatggccccccatccaggcggtctgaaaacagagtggttgtctctggactgcctccaagtggaagttggcaggatttaaaggatcacatgcgtgaagcaggtgatgtatgttatgctgatgtttaccgagatggcactggtgtcgtggagtttgtacggaaagaagatatgacctatgcagttcgaaaactggataacactaagtttagatctcatgaggtaggttatacacgtattcttttctttgaccagaattggatacagtggtcttaacagtggaatttcaaggtaaggattcaggcaaggttgtccaagtaaattgccagatttctggttttagttacattgtattcattcagcatgtctgaagatagatgaaagcttagatctttcaatggaaagttctgtctatccaatagggagaaactgcctacatccgggttaaagttgatgggcccagaagtccaagttatggaagatctcgatctcgaagccgtagtcgtagcagaagccgtagcagaagcaacagcaggagtcgcagttactccccaaggagaagcagaggatcaccacgctattctccccgtcatagcagatctcgctctcgtacataagatgattggtgacactttttgtagaacccatgttgtatacagttttcctttattcagtacaatcttttcattttttaattcaaactgttttgttcagaatgggctaaagtgttgaattgcattcttgtaatatccccttgctcctaacatctacattcccttcgtgtctttgataaattgtattttaagtgatgtcatagacaggattgtttaaatttagttaactccatactcttcagactgtgatattgtgtaaatgtctatctgccctggtttgtgtgaactgggatgttgggggtgtttgtggttatcttacctggggaagttcttatgtttatcttgcttttcatgtgtctttctgtagacatatctgaagagatggattaagaatgctttggattaaggattgtggagcacatttcaatcattttaggattgtcaaaaggaggattgaggaggatcagatcaataatggaggcaatggtatgactccaagtgctattgtcacagatgaaattggcagtattgaccttatactaaaaggcaggggttaaaaatgattatatacattttccttaaaacacttgcaaacattttattcagttgtctttagctacaattgctttgctttttaaaccttggcaattgtggcaaaattatattgcccattttgtagcaacttattttgctcccttccccccatttttgttttaatagggactaatgtgggaagaactggctaatttgtcacagtgcttagttacaactgttaatgtgtgacctgctgttggtgtacatgtgggtacagggtgtttttaaatccaacaagatagagtataatatcaatactgctaaatctgcatgtcctctgtgtgactgatagagcgttgctatttcatttttttaagacaaaatgaaagcaaaatatagagttccaatgtattggtgtagataatctagttgggaatacttttaagtctcaccttcccctttaaactaatattcataattggttcatatgtttaaaagactttaatttacaaattaaattgcaaatgggagcattagatttagttttagacttaggtgggtagcaatgccagtaaacttaaattacgtaacttcttgcaaccacgaaacctgtaatacgctgtacagtaacaagtgttggcattatcagttgaactgtaaatacaaaatgcttcttccaattagtctctatgatgattaagtttctaaaatttatctgaacaccattcagaaacttgttttggggaatttgatagttattgatgtgcatctgttaaactgatgacagacataactcatcattccccagaaaccttttttgattacagtatctaacattttgcctcctcttttttggttttgctggttataaaggtttggattggagagggctcactggatcccaatccttggagctggatcattggattcaaatcataatgtggataggatagggaggatgaattaccaggattcatggagcgggatcagattaccaggaacataggagtggattcctgccccaaccaaaccgcattcgtgtggatttttttattcaacttaattggctattccaaagattttttttttcctatttttgacgattggagcccttaagatgcacgatggaattgtgttttgcgttttttggtaaaaggagcaaagcgaggacctggagataaacgctggagcaatctccttggaaggattcagcacgagtagatggtaaacatttaaaggggaaagggggggtttgtttaaaatagtaaatcagtaagtcacttctaaatttaaagaaaacaaaattggagttgaagaataagtaggtttccaattggctattgccgttttctttgaaaaaataaacattttttaaaaaact

SEQ ID NO: 27622 - DNA, 2923 bp, Homo sapiens
  source 1..2923: mol_type = unassigned DNA
gaggctcggccgcctgagccgcggacggtttgctgagcccgttagtgcgcccggccgagacacgccgccgccatgtcccgctacctgcgtccccccaacacgtctctgttcgtcaggaacgtggccgacgacaccaggtctgaagacttgcggcgtgaatttggtcgttatggtcctatagttgatgtgtatgttccacttgatttctacactcgccgtccaagaggatttgcttatgttcaatttgaggatgttcgtgatgctgaagacgctttacataatttggacagaaagtggatttgtggacggcagattgaaatacagtttgcccagggggatcgaaagacaccaaatcagatgaaagccaaggaagggaggaatgtgtacagttcttcacgctatgatgattatgacagatacagacgttctagaagccgaagttatgaaaggaggagatcaagaagtcggtcttttgattacaactatagaagatcgtatagtcctagaaatagaccgactggaagaccacggcgtagcagaagccattccgacaatgatagattcaaacaccgaaatcgatctttttcaagatctaaatccaattcaagatcacggtccaagtcccagcccaagaaagaaatgaaggctaaatcacgttctaggtctgcatctcacaccaaaactagaggcacctctaaaacagattccaaaacacattataagtctggctcaagatatgaaaaggaatcaaggaaaaaagaaccacctagatccaaatctcagtcaagatcacagtctaggtctaggtcaaaatctagatcaaggtcttggactagtcctaagtccagtggccactgatagtataaaccatggtcatttttaggcatgtatcattcatttactcatagtttggtttacttaaattatcaggaatacaatgttgcaatgatgcttaaaaaacacttgttagttttccctgtaccaggcaatggttataattaaaatgatatgctgttgagaagccactcttaagagtccagtttgtttaatgttatgggcagctaccaatttgtggtgtctctgtatatttttgtaaagattctcattttttatgcttgaagtatttggtgaaaagatgttggttgaccataatttgcaacattgtctcattaaaaataaactttcatattcatatttggtagaactgttaacctagaaatgtagcttgctaataagatagaatgatacaaaagtgaagtagtagccacagtacaacactgactgctcagacacatttaggttcagggtggacctttatgtcttgtcaagatgtctaggcccggctgggcgtggtggctcacacctgtaatcccagcactttgggaggccgaggcgggcggatcacgaggtcaggagttcgagaccagcctgaccaacacggtgaaaccccgtctctactaaaaatacaaaaattatccgggcatggtggcacatgcctgtaatctcagctactcaggaggctgaggcaagagaatcgcttgaacctgggaggtagaagttgcagtgagccaaaatcacgccactgcactccagcctgggcaacagagtgagactccgtctcaaaaaaaaaaaaaaaccggatgtctaggccaatgataattatttttgatgcagtgtggattagttcttttgttaaccccactgtcttggggaatgatgccagctgggaaattgagtttttgactgaaacatggagccttcactgctttttttctggttcctatgaagatttggaacatagaaaacacaaaaactcaccttaaaatttgagcaggtcgttgatggcaaaaataattttaaggaaaaaggaatattcttatgtagttattctaaagtttaaggagcgttgttgaccataatattgcttagttttcttactgctgttaagtaagtaaattgtttcaaagtaggttttgtgtgtgtgtgcctagtgtaaaagaactgaaattttgatgcttacagcacttggctcgtgcatttgtatcaaaatttgcctgcctctttatgagggaggcctgcttttcacacctcagtttatttaatacgaggcaagttgtaagacaacactcattctaggtgattctgtggtgccatgaaatttaaggtaatttggggaaaaggattagtcagttttaagcaagagtcacatcttttgagctttcgattatcagtgtagtacctgactaaaaatgaagtaatacccttaaaccatttataatttctagtatttctctgaaagatcgttttggggacaaaagtgacttgacatgtccaatttcatttcagaataaaaagctagcatctttaaaaatctcagattgcttgcttacagatacaagtacgaattatggacaaacgattccttttagaggattacttttttcaatttcggttttagtaatctaggctttgcctgtaaagaatacaacgatggattttaaatactgtttgtggaatgtgtttaaaggattgattctagaacctttgtatatttgatagtatttctaactttcatttctttactgtttgcagttaatgttcatgttctgctatgcaatcgtttatatgcacgtttctttaatttttttagattttcctggatgtatagtttaaacaacaaaaagtctatttaaaactgtagcagtagtttacagttctagcaaagaggaaagttgtggggttaaactttgtattttctttcttatagaggcttctaaaaaggtatttttatatgttctttttaacaaatattgtgtacaacctttaaaacatcaatgtttggatcaaaacaagacccagcttattttctgcttgctgtaaattaagcaaacatgctataataaaaacaaaatgaaggaaataa

SEQ ID NO: 27623 - DNA, 3512 bp, Homo sapiens
  source 1..3512: mol_type = unassigned DNA
gtagcagagccctctagctgtgtgtgtctgaggctcggccgcctgagccgcggacggtttgctgagcccgttagtgcgcccggccgagacacgccgccgccatgtcccgctacctgcgtccccccaacacgtctctgttcgtcaggaacgtggccgacgacaccaggtctgaagacttgcggcgtgaatttggtcgttatggtcctatagttgatgtgtatgttccacttgatttctacactcgccgtccaagaggatttgcttatgttcaatttgaggatgttcgtgatgctgaagacgctttacataatttggacagaaagtggatttgtggacggcagattgaaatacagtttgcccagggggatcgaaagacaccaaatcagatgaaagccaaggaagggaggaatgtgtacagttcttcacgctatgatgattatgacagatacagacgttctagaagccgaagttatgaaaggaggagatcaagaagtcggtcttttgattacaactatagaagatcgtatagtcctagaaacagtagaccgactggaagaccacggcgtagcagaagccattccgacaatgatagaccaaactgcagctggaatacccagtacagttctgcttactacacttcaagaaagatctgaaagcggaaaaagaaccaaagaagggcagttcaagcgaccaaagggtgggtggaaggtgctgcagtatgaatactgtacgaatattttgactctggtctgaaaagataaaagaatgttatcgaaaactacatggaataattgaagtcccttcaagtttgaaagtaagcattttaggacaaataaaaggaaattcaactttgtacttgtggaaactaatccctaaatatgaataggtttatattgattcatgggtaacaggtccataataaattattggaaactaggatgtctgaatatcaaggaagacagccatagtctcttacagtgcctctgttggtctgtctcaaactgaattgggtgggaaaaggtatggtccaatataaaagttccatttttgccattattggcaaatcttgcctttgtttattttggtgccagtgttttctgcttaatcatttgctttgttggcatctgtgtttatttacttgtacaccacatgcagtttacatctgtcttaactactccttcccaggtaaattccaattatatttgacatccagctaagagggcccatctcttctcacctctttcctagtcagtatattcagcaaatatttattgagcccttactgtgggcaaatcattgtactggataattgagaaaaatagataattcccttattcagtaaatgtctactgagcacaatctagtgaatcattacagtatggcctcattgttttgtttgaggtgtgttattcataacaatattttacaccattcgtatcaatgtaattatagaacacaatatacgatcaaggataagtaattgtgtggttatctgccatttaaaagtatccagtatttgatcacattattataaataatgaaaaaatgatttaatctgtaataaactggtttattgtgcagtgactgtaatatactagagttataataaattgtttactctgcctcaccaaacacatgctaggatataacccccaaaataagtatttaactttgcattaggtataaaggagactgggtgctataattagattattttgaggcagacagagagctgttatcctaactgatttagtatgttctgtaattgagaaaatgttcaccaaattatactttttagtgatttacatgtacattttataggggacatgttctgtgtatagcgaataaataacttttatagtatcacaaaatgttttggattccttagtttcttattaggatatgatgtttctttacctatacattgatttcatcacatttgatttttgtcatcttttttgccacatacttaaaattttccatataaaattaactaaaaatctggaagtggaatttaagcttttaatttgtagcaattttgaaaatatagcagaggtatattttcaagggaggtgtgaaatggaggtattattgtttgtattttattttagaaattttgtttgaacttgcccaagatcacacagcaagtgtcagatcctaggttacagcccataatttttcacttgtttcatcttttgttaccatgtttgttgtttaatccaatggggaagtgtttttatagctttattttcatggagatagtaacattgatataatgggatctagaatttacttagagtcaaagtgactagatttaattacaaaaagtattttgttgtataccgttatacactcattaacataggggttcttatggacagaggttctatgtatttttaaaagaatatgtagaggctatagacttttttgccctctacctcccttctccatttccttttgaagttaagacatttaagggggagaattaaggtgcatattgagttggggttttgtttaaaaaaaattaggtaaatacatatataactacaataacaacagttggtagttctctaaaatatttaattatggtaaatcagaaaaggccctttaatttttgcatctgttgaatgaattgctttaggatctcttctgtggttgtttctctctatactgaatgctgtcaatattattgagcacttactgtgccgaaccatgtgcttttcaaatatttctatttaatcctaaaaacactcctgggaaatgggtattattcccattttacagatgagaaaattgtcctttgtagaatacccatcatgtgatagcttcttgcatattatgctattcatttctcacaaccttacaaggtaaatggataatgttcctggatgagagattaaacgtactcgaagatcttatggttgtgtggctcagagactctaagcatggctttccaaatctcattctcttgtagagattttccattgtattgcattttgaccatgttcctgtttacaaaacctaagattatattctgaagtatctgtgacttgagtgatagctcaggaataatctgagggcattctattaggaaggaggactagcaaagcctatagttagcctatcctaggcatgaactattctcattttagataggatgacttgataaataggatgaagtgagcaacctgtttgtcttcggttattgctatctacaagacattctgctagtcactgtggaaaagtttccttctcttgggttttttcctcttccccttcctcttaacagtgttggttatctttattatgtttctgtgtatttgtaacagctgtttcacccttgtattgcataatggggatttttcttggaataaaaagtgaggcatgtaaattcattgagaactaaccgtagtttgtaaagaagtaaaaggcctttgtatctagttttttgcagatcacatttctttgaatgctggaaagtgaaataaactggtctaggagccaaaaataaa

SEQ ID NO: 27624 - DNA, 1194 bp, Homo sapiens
  source 1..1194: mol_type = unassigned DNA
cgcggacggtttgctgagcccgttagtgcgcccggccgagacacgccgccgccatgtcccgctacctgcgtccccccaacacgtctctgttcgtcaggaacgtggccgacgacaccaggtctgaagacttgcggcgtgaatttggtcgttatggtcctatagttgatgtgtatgttccacttgatttctacactcgccgtccaagaggatttgcttatgttcaatttgaggatgttcgtgatgctgaagacgctttacataatttggacagaaagtggatttgtggacggcagattgaaatacagtttgcccagggggatcgaaagacaccaaatcagatgaaagccaaggaagggaggaatgtgtacagttcttcacgctatgatgattatgacagatacagacgttctagaagccgaagttatgaaaggaggagatcaagaagtcggtcttttgattacaactatagaagatcgtatagtcctagaaacagtagaccgactggaagaccacggcgtagcagaagccattccgacaatgatagccaagtaagcaagaagaaaaatgagagataatgcttcagtgagagaggaaaggtgctacatagagtatgagctgttaagttacatcccaggggaaagacctgggaactattgtattattctcttgaaaatttggcccagtaagctgctacatccagttcaactaacaaaatcctgtataccacagagaagaataaaggaaaccaaactgacaaacatccttcttttatttaagaccaaactgcagctggaatacccagtacagttctgcttactacacttcaagaaagatctgaaagcggaaaaagaaccaaagaagggcagttcaagcgaccaaagggtgggtggaaggtgctgcagtatgaatactgtacgaatattttgactctggtctgaaaagataaaagaatgttatcgaaaactacatggaataattgaagtcccttcaagtttgaaagtaagcattttaggacaaataaaaggaaattcaactttgtacttgtggaaactaatccctaaatatgaataggtttatattgattcatgggtaacaggtccataataaattattggaaactaggatgtctgaatatcaaggaagacagccatagtctcttacagtgcctctgttggtctgtctcaaactgaattg

SEQ ID NO: 27625 - DNA, 866 bp, Homo sapiens
  source 1..866: mol_type = unassigned DNA
tgagcccgttagtgcgcccggccgagacacgccgccgccatgtcccgctacctgcgtccccccaacacgtctctgttcgtcaggaacgtggccgacgacaccaggtctgaagacttgcggcgtgaatttggtcgttatggtcctatagttgatgtgtatgttccacttgatttctacactcgccgtccaagaggatttgcttatgttcaatttgaggatgttcgtgatgctgaagacgctttacataatttggacagaaagtggatttgtggacggcagattgaaatacagtttgcccagggggatcgaaagacaccaaatcagatgaaagccaaggaagggaggaatgtgtacagttcttcacgctatgatgattatgacagatacagacgttctagaagccgaagttatgaaaggaggagatcaagaagtcggtcttttgattacaactatagaagatcgtatagtcctagaaatagaccgactggaagaccacggcgtagcagaagccattccgacaatgatagccaagtaagcaagaagaaaaatgagagataatgcttcagtgagagaggaaaggtgctacatagagtatgagctgttaagttacatcccaggggaaagacctgggaactattgtattattctcttgaaaatttggcccagtaagctgctacatccagttcaactaacaaaatcctgtataccacagagaagaataaaggaaaccaaactgacaaacatccttcttttatttaagaccaaactgcagctggaatacccagtacagttctgcttactacacttcaagaaagatctgaaagcggaaaaagaaccaaagaagggcagttcaagcgaccaaaggg

SEQ ID NO: 27626 - DNA, 1918 bp, Homo sapiens
  source 1..1918: mol_type = unassigned DNA
ggacgcctggtgttctcgcgggaaagaaccgttgcgcccgactttgcgcggaggtaggagggggaagtggaggcgggagtgaagtctcgcgagaagagtcggttgccgtagcagagccctctagctgtgtgtgtctgaggctcggccgcctgagccgcggacggtttgctgagcccgttagtgcgcccggccgagacacgccgccgccatgtcccgctacctgcgtccccccaacacgtctctgttcgtcaggaacgtggccgacgacaccaggtctgaagacttgcggcgtgaatttggtcgttatggtcctatagttgatgtgtatgttccacttgatttctacactcgccgtccaagaggatttgcttatgttcaatttgaggatgttcgtgatgctgaagacgctttacataatttggacagaaagtggatttgtggacggcagattgaaatacagtttgcccagggggatcgaaagacaccaaatcagatgaaagccaaggaagggaggaatgtgtacagttcttcacgctatgatgattatgacagatacagacgttctagaagccgaagttatgaaaggaggagatcaagaagtcggtcttttgattacaactatagaagatcgtatagtcctagaaaaccaaactgcagctggaatacccagtacagttctgcttactacacttcaagaaagatctgaaagcggaaaaagaaccaaagaagggcagttcaagcgaccaaagggtgggtggaaggtgctgcagtatgaatactgtacgaatattttgactctggtctgaaaagataaaagaatgttatcgaaaactacatggaataattgaagtcccttcaagtttgaaagtaagcattttaggacaaataaaaggaaattcaactttgtacttgtggaaactaatccctaaatatgaataggtttatattgattcatgggtaacaggtccataataaattattggaaactaggatgtctgaatatcaaggaagacagccatagtctcttacagtgcctctgttggtctgtctcaaactgaattgggtgggaaaaggtatggtccaatataaaagttccatttttgccattattggcaaatcttgcctttgtttattttggtgccagtgttttctgcttaatcatttgctttgttggcatctgtgtttatttacttgtacaccacatgcagtttacatctgtcttaactactccttcccaggtaaattccaattatatttgacatccagctaagagggcccatctcttctcacctctttcctagtcagtatattcagcaaatatttattgagcccttactgtgggcaaatcattgtactggataattgagaaaaatagataattcccttattcagtaaatgtctactgagcacaatctagtgaatcattacagtatggcctcattgttttgtttgaggtgtgttattcataacaatattttacaccattcgtatcaatgtaattatagaacacaatatacgatcaaggataagtaattgtgtggttatctgccatttaaaagtatccagtatttgatcacattattataaataatgaaaaaatgatttaatctgtaataaactggtttattgtgcagtgactgtaatatactagagttataataaattgtttactctgcctcaccaaacacatgctaggatataacccccaaaataagtatttaactttgcattaggtataaaggagactgggtgctataattagattattttgaggcagacagagagctgttatcctaactgatttagtatgttctgtaattgagaaaatgttcaccaaattatactttttagtgatttacatgtacattttataggggacatgttctgtgtatagcgaataaataacttttatagtatc

SEQ ID NO: 27627 - DNA, 3449 bp, Homo sapiens
  source 1..3449: mol_type = unassigned DNA
gctgagcccgttagtgcgcccggccgagacacgccgccgccatgtcccgctacctgcgtccccccaacacgtctctgttcgtcaggaacgtggccgacgacaccaggtctgaagacttgcggcgtgaatttggtcgttatggtcctatagttgatgtgtatgttccacttgatttctacactcgccgtccaagaggatttgcttatgttcaatttgaggatgttcgtgatgctgaagacgctttacataatttggacagaaagtggatttgtggacggcagattgaaatacagtttgcccagggggatcgaaagacaccaaatcagatgaaagccaaggaagggaggaatgtgtacagttcttcacgctatgatgattatgacagatacagacgttctagaagccgaagttatgaaaggaggagatcaagaagtcggtcttttgattacaactatagaagatcgtatagtcctagaaatagaccgactggaagaccacggcgtagcagaagccattccgacaatgatagaccaaactgcagctggaatacccagtacagttctgcttactacacttcaagaaagatctgaaagcggaaaaagaaccaaagaagggcagttcaagcgaccaaagggtgggtggaaggtgctgcagtatgaatactgtacgaatattttgactctggtctgaaaagataaaagaatgttatcgaaaactacatggaataattgaagtcccttcaagtttgaaagtaagcattttaggacaaataaaaggaaattcaactttgtacttgtggaaactaatccctaaatatgaataggtttatattgattcatgggtaacaggtccataataaattattggaaactaggatgtctgaatatcaaggaagacagccatagtctcttacagtgcctctgttggtctgtctcaaactgaattgggtgggaaaaggtatggtccaatataaaagttccatttttgccattattggcaaatcttgcctttgtttattttggtgccagtgttttctgcttaatcatttgctttgttggcatctgtgtttatttacttgtacaccacatgcagtttacatctgtcttaactactccttcccaggtaaattccaattatatttgacatccagctaagagggcccatctcttctcacctctttcctagtcagtatattcagcaaatatttattgagcccttactgtgggcaaatcattgtactggataattgagaaaaatagataattcccttattcagtaaatgtctactgagcacaatctagtgaatcattacagtatggcctcattgttttgtttgaggtgtgttattcataacaatattttacaccattcgtatcaatgtaattatagaacacaatatacgatcaaggataagtaattgtgtggttatctgccatttaaaagtatccagtatttgatcacattattataaataatgaaaaaatgatttaatctgtaataaactggtttattgtgcagtgactgtaatatactagagttataataaattgtttactctgcctcaccaaacacatgctaggatataacccccaaaataagtatttaactttgcattaggtataaaggagactgggtgctataattagattattttgaggcagacagagagctgttatcctaactgatttagtatgttctgtaattgagaaaatgttcaccaaattatactttttagtgatttacatgtacattttataggggacatgttctgtgtatagcgaataaataacttttatagtatcacaaaatgttttggattccttagtttcttattaggatatgatgtttctttacctatacattgatttcatcacatttgatttttgtcatcttttttgccacatacttaaaattttccatataaaattaactaaaaatctggaagtggaatttaagcttttaatttgtagcaattttgaaaatatagcagaggtatattttcaagggaggtgtgaaatggaggtattattgtttgtattttattttagaaattttgtttgaacttgcccaagatcacacagcaagtgtcagatcctaggttacagcccataatttttcacttgtttcatcttttgttaccatgtttgttgtttaatccaatggggaagtgtttttatagctttattttcatggagatagtaacattgatataatgggatctagaatttacttagagtcaaagtgactagatttaattacaaaaagtattttgttgtataccgttatacactcattaacataggggttcttatggacagaggttctatgtatttttaaaagaatatgtagaggctatagacttttttgccctctacctcccttctccatttccttttgaagttaagacatttaagggggagaattaaggtgcatattgagttggggttttgtttaaaaaaaattaggtaaatacatatataactacaataacaacagttggtagttctctaaaatatttaattatggtaaatcagaaaaggccctttaatttttgcatctgttgaatgaattgctttaggatctcttctgtggttgtttctctctatactgaatgctgtcaatattattgagcacttactgtgccgaaccatgtgcttttcaaatatttctatttaatcctaaaaacactcctgggaaatgggtattattcccattttacagatgagaaaattgtcctttgtagaatacccatcatgtgatagcttcttgcatattatgctattcatttctcacaaccttacaaggtaaatggataatgttcctggatgagagattaaacgtactcgaagatcttatggttgtgtggctcagagactctaagcatggctttccaaatctcattctcttgtagagattttccattgtattgcattttgaccatgttcctgtttacaaaacctaagattatattctgaagtatctgtgacttgagtgatagctcaggaataatctgagggcattctattaggaaggaggactagcaaagcctatagttagcctatcctaggcatgaactattctcattttagataggatgacttgataaataggatgaagtgagcaacctgtttgtcttcggttattgctatctacaagacattctgctagtcactgtggaaaagtttccttctcttgggttttttcctcttccccttcctcttaacagtgttggttatctttattatgtttctgtgtatttgtaacagctgtttcacccttgtattgcataatggggatttttcttggaataaaaagtgaggcatgtaaattcattgagaactaaccgtagtttgtaaagaagtaaaaggcctttgtatctagttttttgcagatcacatttctttgaatgctggaaagtgaaataaactggtctaggagccaaaaataaa

SEQ ID NO: 27628 - DNA, 2918 bp, Homo sapiens
  source 1..2918: mol_type = unassigned DNA
gccgcctgagccgcggacggtttgctgagcccgttagtgcgcccggccgagacacgccgccgccatgtcccgctacctgcgtccccccaacacgtctctgttcgtcaggaacgtggccgacgacaccaggtctgaagacttgcggcgtgaatttggtcgttatggtcctatagttgatgtgtatgttccacttgatttctacactcgccgtccaagaggatttgcttatgttcaatttgaggatgttcgtgatgctgaagacgctttacataatttggacagaaagtggatttgtggacggcagattgaaatacagtttgcccagggggatcgaaagacaccaaatcagatgaaagccaaggaagggaggaatgtgtacagttcttcacgctatgatgattatgacagatacagacgttctagaagccgaagttatgaaaggaggagatcaagaagtcggtcttttgattacaactatagaagatcgtatagtcctagaaacagtagaccgactggaagaccacggcgtagcagaagccattccgacaatgatagattcaaacaccgaaatcgatctttttcaagatctaaatccaattcaagatcacggtccaagtcccagcccaagaaagaaatgaaggctaaatcacgttctaggtctgcatctcacaccaaaactagaggcacctctaaaacagattccaaaacacattataagtctggctcaagatatgaaaaggaatcaaggaaaaaagaaccacctagatccaaatctcagtcaagatcacagtctaggtctaggtcaaaatctagatcaaggtcttggactagtcctaagtccagtggccactgatagtataaaccatggtcatttttaggcatgtatcattcatttactcatagtttggtttacttaaattatcaggaatacaatgttgcaatgatgcttaaaaaacacttgttagttttccctgtaccaggcaatggttataattaaaatgatatgctgttgagaagccactcttaagagtccagtttgtttaatgttatgggcagctaccaatttgtggtgtctctgtatatttttgtaaagattctcattttttatgcttgaagtatttggtgaaaagatgttggttgaccataatttgcaacattgtctcattaaaaataaactttcatattcatatttggtagaactgttaacctagaaatgtagcttgctaataagatagaatgatacaaaagtgaagtagtagccacagtacaacactgactgctcagacacatttaggttcagggtggacctttatgtcttgtcaagatgtctaggcccggctgggcgtggtggctcacacctgtaatcccagcactttgggaggccgaggcgggcggatcacgaggtcaggagttcgagaccagcctgaccaacacggtgaaaccccgtctctactaaaaatacaaaaattatccgggcatggtggcacatgcctgtaatctcagctactcaggaggctgaggcaagagaatcgcttgaacctgggaggtagaagttgcagtgagccaaaatcacgccactgcactccagcctgggcaacagagtgagactccgtctcaaaaaaaaaaaaaaaccggatgtctaggccaatgataattatttttgatgcagtgtggattagttcttttgttaaccccactgtcttggggaatgatgccagctgggaaattgagtttttgactgaaacatggagccttcactgctttttttctggttcctatgaagatttggaacatagaaaacacaaaaactcaccttaaaatttgagcaggtcgttgatggcaaaaataattttaaggaaaaaggaatattcttatgtagttattctaaagtttaaggagcgttgttgaccataatattgcttagttttcttactgctgttaagtaagtaaattgtttcaaagtaggttttgtgtgtgtgtgcctagtgtaaaagaactgaaattttgatgcttacagcacttggctcgtgcatttgtatcaaaatttgcctgcctctttatgagggaggcctgcttttcacacctcagtttatttaatacgaggcaagttgtaagacaacactcattctaggtgattctgtggtgccatgaaatttaaggtaatttggggaaaaggattagtcagttttaagcaagagtcacatcttttgagctttcgattatcagtgtagtacctgactaaaaatgaagtaatacccttaaaccatttataatttctagtatttctctgaaagatcgttttggggacaaaagtgacttgacatgtccaatttcatttcagaataaaaagctagcatctttaaaaatctcagattgcttgcttacagatacaagtacgaattatggacaaacgattccttttagaggattacttttttcaatttcggttttagtaatctaggctttgcctgtaaagaatacaacgatggattttaaatactgtttgtggaatgtgtttaaaggattgattctagaacctttgtatatttgatagtatttctaactttcatttctttactgtttgcagttaatgttcatgttctgctatgcaatcgtttatatgcacgtttctttaatttttttagattttcctggatgtatagtttaaacaacaaaaagtctatttaaaactgtagcagtagtttacagttctagcaaagaggaaagttgtggggttaaactttgtattttctttcttatagaggcttctaaaaaggtatttttatatgttctttttaacaaatattgtgtacaacctttaaaacatcaatgtttggatcaaaacaagacccagcttattttctgcttgctgtaaattaagcaaacatgctataataaaaacaaaatgaaggaaataa

SEQ ID NO: 27629 - DNA, 3034 bp, Homo sapiens
  source 1..3034: mol_type = unassigned DNA
aaagcattttactgtacaggtaaggaatgtgccatgttgttttacctatctctctttctctctcactcccatgcacacatcctgtgtgtattcagagaccttcagaaacattcatattcattttcatgagtcagcaaaagccctacgcttgattccaacagaatatttcctttacatactttcttctcttaatttttacaaaatttgtatggtaggtgtaaaagaaaatcatagtaactgtaccatattattaacccctaaatcaaactttttttgtcttgtgtatcttgatttttctgtgtgctttatagtgaagcagccgacacgagtcgttgttcataaaacagcttttgaaagttgagagcacacccctggagaaccgactgtgcttgcttacgtttggttcatgacttaaaaatcgagtacaggtgatgaaatcttggcagtgttaacaaaaaagtagtgtgtattgtgctatttttttttactctagaaacttaaccatttgtagagaaaaaggaaacaaattttcacacattgaagttcattctgacataaaattaatgataaataatcatagaaatcaagctttgtattttagcgaacataagtactttcaacaaactcaggtggtgtatcagggagacattttctgggtgtttttgtgtgttttctgtcttagaaaagaatgtgttctaatgcaaggatgtttctctgcaggagttattcctgatgaagctaaagctttgtctctgttggcaccagctaatgcagtggcaggtcttctgcctggtggtggactcctgcctactcctaacccacttacccagattggcgctgttccactggctgctttgggggctcctactcttgatcctgcccttgctgcacttgggcttcctggagcaaacttgaactctcagtctcttgctgcagatcagttgctgaagcttatgagtactgttgatcccaagttgaatcatgtagctgctggtctcgtttcaccaagtctgaaatcggatacctctagtaaagaaatagaggaagctatgaaaagagtacgagaagcacagtccctaatttctgctgctatagaaccagataagaaagaagaaaaaagaaggcattcaagatcaagatcacgttctaggaggaggaggactccctcatcttctagacacaggcggtcaagaagcagatcgagacggcggtcacattctaagtctaggagtcggcgacgatccaaaagcccaaggcggagaagatctcattccagagaaagaggtagaaggtcaaggagcacatcaaaaacaagagacaaaaagaaagaagacaaagaaaagaaacgttctaaaacaccaccaaaaagttacagcacagccagacgttctagaagtgcaagcagagagagacgacgacgaagaagcaggagtggcacaagatctcctaaaaagcctcggtctcctaaaagaaaattgtcccgctcaccatcccctaggagacataaaaaggagaagaagaaagataaagacaaagaaagaagtagggatgaaagagaacgatcaacaagcaagaagaagaagagtaaagataaggaaaaggaccgggaaagaaaatcagagagtgataaagatgtaaaacaggttacacgggattatgatgaagaggaacaggggtatgacagtgagaaagagaaaaaagaagagaagaaaccaatagaaacaggttcccctaaaacaaaggaatgttctgtggaaaagggaactggtgattcactaagagaatccaaagtgaatggggatgatcatcatgaagaagacatggatatgagtgactgaatattgcctctgagggagtccaactgtatacctgcatcagtgtcattcctttgtgtgatttcttaatgctgtatttgttcatctcaaacctagatgtatacagctctgagttataaatggttataaagctcctgttactcatattagttatttacatcaaaaagcttttagaaaatggtacgaggtaaccaattcttgtcatggtgaaatctgattgagtaaccaagcagttttactattctggtgctgcttcataacaaaaatgaaaagctgcatgcatctacagcaggcatggattgtttatgtcgtatgatatcctttattaagtaagttcacttatagtatttctataatttgattcattgccgtaatagagccatgtaggaaatgcactgattgcatgttattgtggcaagaatatcctaaatgtcattaaaatcctccaacatgatggatctacttatggtcttgtttgttgacatgacaaattaacattcttatagttacatctggaaatgagcatttgaaatagataatcctttaagccttgtggcaaaatttttgtggcttttgtttaactttgaaaggttattatgcactaaccttttttggtggctaattagggtttaaatacagaaacaagatttcaaataaaactgtctttggcagtgagtaaatagcatattttgaagtagagttgtatactttttcataagatgtttgggaatttttttcctgaagtaataatttattccacatctacatcagtgaaagctatctacctatcctgagtctatcttaaaggaaaaaaagaaaaaaaccttatctcttgcccttattttgaattttccactctttcattaatttgttttaagctccgtgttggaaaaaaggggtagtgcattttaaattgaccttcatacgcttttaaaataagacaaatctacttgataatgtacctttatttgatctcaagttgtataaaaccaataaatttgtgttactgcagtagtaatcttatgcacacggtgatttcatgttatatatgcaaagtaggcaactgttttcttagttacagaagtttcaagcttcacttttgtgcagtagaaacaaaagtaggctacagtctgtgccatgttgatgtacagtttctgaaattgttttacaagactttgataataaaacccttaaactta

SEQ ID NO: 27630 - DNA, 3784 bp, Homo sapiens
  source 1..3784: mol_type = unassigned DNA
agagaagccttttccgttgccggtgccggcctagcgtcctggaattacttcaatcaacaggagcgagaacccgagcagcgccatgagcaacactaccgtcgtccccagcactgcaggtccgggccccagcggcgggcccggtggcggaggtggtggtggcggcggaggcggcggcaccgaggtaatccaggtgactaatgtctccccgagcgctagctctgagcagatgcggactctcttcggtttcctaggcaagatcgacgaactgcgcctcttcccgccggatgattcgcctttgccagtctcatctcgtgtctgctttgttaagttccatgatccagactcagcagttgtggcacagcatctgacaaacactgtattcgttgacagagctttgatagtcgtaccatatgcagaaggagttattcctgatgaagctaaagctttgtctctgttggcaccagctaatgcagtggcaggtcttctgcctggtggtggactcctgcctactcctaacccacttacccagattggcgctgttccactggctgctttgggggctcctactcttgatcctgcccttgctgcacttgggcttcctggagcaaacttgaactctcagtctcttgctgcagatcagttgctgaagcttatgagtactgttgatcccaagttgaatcatgtagctgctggtctcgtttcaccaagtctgaaatcggatacctctagtaaagaaatagaggaagctatgaaaagagtacgagaagcacagtccctaatttctgctgctatagaaccagataagaaagaagaaaaaagaaggcattcaagatcaagatcacgttctaggaggaggaggactccctcatcttctagacacaggcggtcaagaagcagatcgagacggcggtcacattctaagtctaggagtcggcgacgatccaaaagcccaaggcggagaagatctcattccagagaaagaggtagaaggtcaaggagcacatcaaaaacaagagacaaaaagaaagaagacaaagaaaagaaacgttctaaaacaccaccaaaaagttacagcacagccagacgttctagaagtgcaagcagagagagacgacgacgaagaagcaggagtggcacaagatctcctaaaaagcctcggtctcctaaaagaaaattgtcccgctcaccatcccctaggagacataaaaaggagaagaagaaagataaagacaaagaaagaagtagggatgaaagagaacgatcaacaagcaagaagaagaagagtaaagataaggaaaaggaccgggaaagaaaatcagagagtgataaagatgtaaaacaggttacacgggattatgatgaagaggaacaggggtatgacagtgagaaagagaaaaaagaagagaagaaaccaatagaaacaggttcccctaaaacaaaggaatgttctgtggaaaagggaactggtgattcactaagagaatccaaagtgaatggggatgatcatcatgaagaagacatggatatgagtgactgaatattgcctctgagggagtccaactgtatacctgcatcagtgtcattcctttgtgtgatttcttaatgctgtatttgttcatctcaaacctagatgtatacagctctgagttataaatggttataaagctcctgttactcatattagttatttacatcaaaaagcttttagaaaatggtacgaggtaaccaattcttgtcatggtgaaatctgattgagtaaccaagcagttttactattctggtgctgcttcataacaaaaatgaaaagctgcatgcatctacagcaggcatggattgtttatgtcgtatgatatcctttattaagtaagttcacttatagtatttctataatttgattcattgccgtaatagagccatgtaggaaatgcactgattgcatgttattgtggcaagaatatcctaaatgtcattaaaatcctccaacatgatggatctacttatggtcttgtttgttgacatgacaaattaacattcttatagttacatctggaaatgagcatttgaaatagataatcctttaagccttgtggcaaaatttttgtggcttttgtttaactttgaaaggttattatgcactaaccttttttggtggctaattagggtttaaatacagaaacaagatttcaaataaaactgtctttggcagtgagtaaatagcatattttgaagtagagttgtatactttttcataagatgtttgggaatttttttcctgaagtaataatttattccacatctacatcagtgaaagctatctacctatcctgagtctatcttaaaggaaaaaaagaaaaaaaccttatctcttgcccttattttgaattttccactctttcattaatttgttttaagctccgtgttggaaaaaaggggtagtgcattttaaattgaccttcatacgcttttaaaataagacaaatctacttgataatgtacctttatttgatctcaagttgtataaaaccaataaatttgtgttactgcagtagtaatcttatgcacacggtgatttcatgttatatatgcaaagtaggcaactgttttcttagttacagaagtttcaagcttcacttttgtgcagtagaaacaaaagtaggctacagtctgtgccatgttgatgtacagtttctgaaattgttttacaagactttgataataaaacccttaaacttatgttcatgttcctgtaaaaccgtatttgtatttatttacgctactgaatgtatgacatttacctcattcattttacaaattctttccctttctgtccacatatttcagtatagtaaaaagaggaagtctatcactgtagtgataattgccatcaaaattgtcaaaaatgatttaatttctatccaaaatagtccttttcttagcttagtatcattttattgcttattttttgtgtgggaatggggttggataaagcaatgaactttagtataaacaaatcccacctatatctagcaaatttatattttcggtgaaatacagatatttgcctttctggagtagtatagaagctgtcaatatgtatctactgtacagtactaaatagtattcatttatgaaatgagtagtgtttgggtggctggggttaagggaaaatgagacttggaattgtagcttttatccaagttttgagtataaatagggttttgttttgttttttttaacctaaaaactgaaatgccatatagaaaaacagcattgtttttacagtttgtagtaagtaactttttaaagattttatcaaaaagaattgtctatagtgagtaaaagaagttctaataatggtcctaatcactgcatttttaaaaaacaaagttcaacacaaatgacatttgttttaaactttagtagataaaaggtgaaccatgtgacatgggcatttttgtaagtcaaaaacaaatttcacatatggtaaacctaatattcacagtgtgttccctcacttgtaatctctgaatacaaatatactagcttttctaaagggaatcatttttttaaaagtagtgccactgacaagatgctacagtgaagattatccattcttaggatatttattttcagtgaacattttctgcacaaaggtagtgttgcactgggacacaagccttttaacagataaccagttgaaatcaaacactgcctccacaccgagttctgttgtgtatttgatagtaaattgatttaaaaataaaagtggtttttgttagaaaaa

SEQ ID NO: 27631 - DNA, 2385 bp, Homo sapiens
  source 1..2385: mol_type = unassigned DNA
gcagtccagatgtcgtcagcaccagcgcctgggctggaggacagagaagccttttccgttgccggtgccggcctagcgtcctggaattacttcaatcaagagcgagaacccgagcagcgccatgagcaacactaccgtcgtccccagcactgcaggtccgggccccagcggcgggcccggtggcggaggtggtggtggcggcggaggcggcggcaccgaggtaatccaggtgactaatgtctccccgagcgctagctctgagcagatgcggactctcttcggtttcctaggcaagatcgacgaactgcgcctcttcccgccggatgattcgcctttgccagtctcatctcgtgtctgctttgttaagttccatgatccagactcagcagttgtggcacagcatctgacaaacactgtattcgttgacagagctttgatagtcgtaccatatgcagaaggagttattcctgatgaagctaaagctttgtctctgttggcaccagctaatgcagtggcaggtcttctgcctggtggtggactcctgcctactcctaacccacttacccagattggcgctgttccactggctgctttgggggctcctactcttgatcctgcccttgctgcacttgggcttcctggagcaaacttgaactctcagtctcttgctgcagatcagttgctgaagcttatgagtactgttgatcccaagttgaatcatgtagctgctggtctcgtttcaccaagtctgaaatcggatacctctagtaaagaaatagaggaagctatgaaaagagtacgagaagcacagtccctaatttctgctgctatagaaccagataagaaagaagaaaaaagaaggcattcaagatcaagatcacgttctaggaggaggaggactccctcatcttctagacacaggcggtcaagaagcagatcgagacggcggtcacattctaagtctaggagtcggcgacgatccaaaagcccaaggcggagaagatctcattccagagaaagaggtagaaggtcaaggagcacatcaaaaacaagagacaaaaagaaagaagacaaagaaaagaaacgttctaaaacaccaccaaaaagttacagcacagccagacgttctagaagtgcaagcagagagagacgacgacgaagaagcaggagtggcacaagatctcctaaaaagcctcggtctcctaaaagaaaattgtcccgctcaccatcccctaggagacataaaaaggagaagaagaaagataaagacaaagaaagaagtagggatgaaagagaacgatcaacaagcaagaagaagaagagtaaagataaggaaaaggaccgggaaagaaaatcagagagtgataaagatgtaaaagttacacgggattatgatgaagaggaacaggggtatgacagtgagaaagagaaaaaagaagagaagaaaccaatagaaacaggttcccctaaaacaaaggaatgttctgtggaaaagggaactggtgattcactaagagaatccaaagtgaatggggatgatcatcatgaagaagacatggatatgagtgactgaatattgcctctgagggagtccaactgtatacctgcatcagtgtcattcctttgtgtgatttcttaatgctgtatttgttcatctcaaacctagatgtatacagctctgagttataaatggttataaagctcctgttactcatattagttatttacatcaaaaagcttttagaaaatggtacgaggtaaccaattcttgtcatggtgaaatctgattgagtaaccaagcagttttactattctggtgctgcttcataacaaaaatgaaaagctgcatgcatctacagcaggcatggattgtttatgtcgtatgatatcctttattaagtaagttcacttatagtatttctataatttgattcattgccgtaatagagccatgtaggaaatgcactgattgcatgttattgtggcaagaatatcctaaatgtcattaaaatcctccaacatgatggatctacttatggtcttgtttgttgacatgacaaattaacattcttatagttacatctggaaatgagcatttgaaatagataatcctttaagccttgtggcaaaatttttgtggcttttgtttaactttgaaaggttattatgcactaaccttttttggtggctaattagggtttaaatacagaaacaagatttcaaataaaactgtctttggcagtgagtaaatagcatattttgaagtagagttgtatactttttcataagatgtttgggaatttttttcctgaagtaataatttattccacatctacatcagtgaaagctatctacctatcctgagtctatcttaaaggaaaaaaa

SEQ ID NO: 27632 - DNA, 1408 bp, Homo sapiens
  source 1..1408: mol_type = unassigned DNA
gcgaggtggggcggccgtttgttttctcgtggtctcgagctcgcgcgctctcatcccctcccccgcggcgtgcggcggggcggagaaacggcggcggcggcggcggcatcggcagcagtagcagaggctgtagcatcggacaccctcctctctcccgcaatccggttcctcttccccctccttctcactgtttgttgtgtgtttgatgtgttaaagcaggagcgagaacccgagcagcgccatgagcaacactaccgtcgtccccagcactgcaggtccgggccccagcggcgggcccggtggcggaggtggtggtggcggcggaggcggcggcaccgaggtaatccaggtgactaatgtctccccgagcgctagctctgagcagatgcggactctcttcggtttcctaggcaagatcgacgaactgcgcctcttcccgccggatgattcgcctttgccagtctcatctcgtgtctgctttgttaagttccatgatccagactcagcagttgtggcacagcatctgacaaacactgtattcgttgacagagctttgatagtcgtaccatatgcagaaggagttattcctgatgaagctaaagctttgtctctgttggcaccagctaatgcagtggcaggtcttctgcctggtggtggactcctgcctactcctaacccacttacccagattggcgctgttccactggctgctttgggggctcctactcttgatcctgcccttgctgcacttgggcttcctggagcaaacttgaactctcagtctcttgctgcagatcagttgctgaagcttatgagtactgttgatcccaagttgaatcatgtagctgctggtctcgtttcaccaagtctgaaatcggatacctctagtaaagaaatagaggaagctatgaaaagagtacgagaagcacagtccctaatttctgctgctatagaaccagataagaaagaagaaaaaagaaggcattcaagatcaagatcacgttctaggaggaggaggactccctcatcttctagacacaggcggtcaagaagcagatcgagacggcggtcacattctaagtctaggagtcggcgacgatccaaaagcccaaggcggagaagatctcattccagagaaagaggtagaaggtcaaggagcacatcaaaaacaagagacaaaaagaaagaagacaaagaaaagaaacgttctaaaacaccaccaaaaagttacagcacagccagacgttctagaagtgcaagcagtttgcacatttgtgattctagagagagacgacgacgaagaagcaggagtggcacaagatctcctaaaaagcctcggtctcctaaaagaaaattgtcccgctcaccatcccctaggagacataaaaaggagaagaagaaagataaa

SEQ ID NO: 27633 - DNA, 1534 bp, Homo sapiens
  source 1..1534: mol_type = unassigned DNA
agagaagccttttccgttgccggtgccggcctagcgtcctggaattacttcaatcaagagcgagaacccgagcagcgccatgagcaacactaccgtcgtccccagcactgcaggtccgggccccagcggcgggcccggtggcggaggtggtggtggcggcggaggcggcggcaccgaggtaatccaggtgactaatgtctccccgagcgctagctctgagcagatgcggactctcttcggtttcctaggcaagatcgacgaactgcgcctcttcccgccggatgattcgcctttgccagtctcatctcgtgtctgctttgttaagttccatgatccagactcagcagttgtggcacagcatctgacaaacactgtattcgttgacagagctttgatagtcgtaccatatgcagaaggagttattcctgatgaagctaaagctttgtctctgttggcaccagctaatgcagtggcaggtcttctgcctggtggtggactcctgcctactcctaacccacttacccagattggcgctgttccactggctgctttgggggctcctactcttgatcctgcccttgctgcacttgggcttcctggagcaaacttgaactctcagtctcttgctgcagatcagttgctgaagcttatgagtactgttgatcccaagttgaatcatgtagctgctggtctcgtttcaccaagtctgaaatcggatacctctagtaaagaaatagaggaagctatgaaaagagtacgagaagcacagtccctaatttctgctgctatagaaccagataagaaagaagaaaaaagaaggcattcaagatcaagatcacgttctaggaggaggaggactccctcatcttctagacacaggcggtcaagaagcagatcgagacggcggtcacattctaagtctaggagtcggcgacgatccaaaagcccaaggcggagaagatctcattccagagaaagaggtagaaggtcaaggagcacatcaaaaacaagagacaaaaagaaagaagacaaagaaaagaaacgttctaaaacaccaccaaaaagttacagcacagccagacgttctagaagtgcaagcagagagagacgacgacgaagaagcaggagtggcacaagatctcctaaaaagcctcggtctcctaaaagaaaattgtcccgctcaccatcccctaggagacataaaaaggagaagaagaaagataaagacaaagaaagaagtagggatgaaagagaacgatcaacaagcaagaagaagaagagtaaagataaggaaaaggaccgggaaagaaaatcagagagtgataaagatgtaaaacaggttacacgggattatgatgaagaggaacaggggtatgacagtgagaaagagaaaaaagaagagaagaaaccaatagaaacaggttcccctaaaacaaaggaatgttctgtggaaaagggaactggtgattcactaagagaatccaaagtgaatggggatgatcatcatgaagaagacatggatatgagtgactga

SEQ ID NO: 27634 - DNA, 1014 bp, Homo sapiens
  source 1..1014: mol_type = unassigned DNA
ggcgtgcggcggggcggagaaacggcggcggcggcggcggcatcggcagcagtagcagaggctgtagcatcggacaccctcctctctcccgcaatccggttcctcttccccctccttctcactgtttgttgtgtgtttgatgtgttaaagcaggagcgagaacccgagcagcgccatgagcaacactaccgtcgtccccagcactgcaggtccgggccccagcggcgggcccggtggcggaggtggtggtggcggcggaggcggcggcaccgaggtaatccaggtgactaatgtctccccgagcgctagctctgagcagatgcggactctcttcggtttcctaggcaagatcgacgaactgcgcctcttcccgccggatgattcgcctttgccagtctcatctcgtgtctgctttgttaagttccatgatccagactcagcagttgtggcacagcatctgacaaacactgtattcgttgacagagctttgatagtcgtaccatatgcagaagtgaagcagccgacacgagtcgttgttcataaaacagcttttgaaagttgagagcacacccctggagaaccgactgtgcttgcttacgtttggttcatgacttaaaaatcgagtacaggagttattcctgatgaagctaaagctttgtctctgttggcaccagctaatgcagtggcaggtcttctgcctggtggtggactcctgcctactcctaacccacttacccagattggcgctgttccactggctgctttgggggctcctactcttgatcctgcccttgctgcacttgggcttcctggagcaaacttgaactctcagtctcttgctgcagatcagttgctgaagcttatgagtactgttgatcccaagttgaatcatgtagctgctggtctcgtttcaccaagtctgaaatcggatacctctagtaaagaaatagaggaagctatgaaaagagtacgagaagcacagtccctaatttctgctgctatagaaccaggtaa

SEQ ID NO: 27635 - DNA, 943 bp, Homo sapiens
  source 1..943: mol_type = unassigned DNA
ttccgttgccggtgccggcctagcgtcctggaattacttcaatcaagagcgagaacccgagcagcgccatgagcaacactaccgtcgtccccagcactgcaggtccgggccccagcggcgggcccggtggcggaggtggtggtggcggcggaggcggcggcaccgaggtaatccaggtgactaatgtctccccgagcgctagctctgagcagatgcggactctcttcggtttcctaggcaagatcgacgaactgcgcctcttcccgccggatgattcgcctttgccagtctcatctcgtgtctgctttgttaagttccatgatccagactcagcagttgtggcacagcatctgacaaacactgtattcgttgacagagctttgatagtcgtaccatatgcagaagtatttcatggttctatcaaagcagcagtaaaaaaaatactcttgacgcatgaaaattaactgttcttttccctggttcagcctgaactatataccaggccctgctgaaaataccacccaacagttttcttctgcagcttatccagtttctcttaagtgccctgtacatattgtatgttttatgatgagatgcagtttcttaatatgtattacagaaatactactggtatttgcaaatatgtagtttaattgtattattgaactctcattttgggggcttgggcacattaacagattaatccatctgtatagggcttttgctgttggatagaatttaaattgtctacataaatatttgttttaggacccttagattttatctgaatacacagattaggctttaaaaacagatatatatgtcatttttggcttaaggagtttggctaagttagcttttcaactggcactgtatggcagcattttttggtatggttagcatggcacatggcgaaacataaagcattttactgtacaggtaa

SEQ ID NO: 27636 - DNA, 2845 bp, Homo sapiens
  source 1..2845: mol_type = unassigned DNA
agttgttactcaggtgcgctagcctgcggagcccgtccgtgctgttctgcggcaaggcctttcccagtgtccccacgcggaaggcaactgcctgaggaagccggcgccagttcgcggggctccgggccgccactcagagctatgagctacggccgcccccctcccgatgtggagggtatgacctccctcaaggtggacaacctgacctaccgcacctcgcccgacacgctgaggcgcgtcttcgagaagtacgggcgcgtcggcgacgtgtacatcccgcgggaccgctacaccaaggagtcccgcggcttcgccttcgttcgctttcacgacaagcgcgacgctgaggacgctatggatgccatggacggggccgtgctggacggccgcgagctgcgggtgcaaatggcgcgctacggccgccccccggactcacaccacagccgccggggaccgccaccccgcaggtacgggggcggtggctacggacgccggagccgcagccctaggcggcgtcgccgcagccgatcccggagtcggagtcgttccaggtctcgcagccgatctcgctacagccgctcgaagtctcggtcccgcactcgttctcgatctcggtcgacctccaagtccagatccgcacgaaggtccaagtccaagtcctcgtcggtctccagatctcgttcgcggtccaggtcccggtctcggtccaggagtcctcccccagtgtccaagagggaatccaaatccaggtcgcgatcgaagagtccccccaagtctcctgaagaggaaggagcggtgtcctcttaagaaaatggtaatgtctgggaatccgagacacataaccctaattcataaatgggatttggggtaggtctttttgagtcgtgttaatgtaagaatgactcctatcattaggagtgctgctcggaggttactcacctttgggagtaatactgaagagaggggtctgcagaaaggatgtgtatgaagcttagataataatggctgtttcgtaaactgtttgagacctattaatgaaaatgactatttcttgctgtttttatccaacgtctgcattttccccctttaaagctgcggtctcctgtttgataaaagaatattggccagtattgcagattttaactgatttggctgatcctccagggaccagtttctgtgggcgtgtattggagcaggtttgtctttaaatgttaaagatgcactatcctcttagagaaacaatcagttcaactattgttgtactgactgggacttcatattctaatggatgtggcaaaagaattgcaataagaagcagtgaacatttggaaccccaaaagaaagttacaggtattgcactgggtggggaaaggatagtgtgtctttaactcttaaattgtttggtcctattttttaaaaaggaaagggccctaagtagctcagatattaaagtagtattctcaattaccaaatgtttcatttgaaacaatttatcttaatgaaatatagaccaattctctgatctcgagttgtttttgtttggatacagcccttttttttttctttttttttcttccccttacctttcttcaccttggttatttggccaggaatacgtaaattcaaacttgtacatgctgatggtagcctttgtgaaattttcctaattgggccttttaaaaacatggctgggtggaacatttctgtaccctactggtttgaccagagccttagtaagtacgtgcctgaaactgaaaccatgtgcactttaatggaaggtaagctgaacttctttcttttcaaacctagatgtatcggcaagcagtgtaaacggaggacttggggaaaaaggaccacatagtccatcgaagaagagtccttggaacaagcaactggctattgaaaaggttattttgtaacatttgtctaactttttacttgtttaagctttgcctcagttggcaaacttcattttatgtgccattttgttgctgttattcaaatttcttgtaatttagtgaggtgaacgacttcagatttcattattggatttggatatttgaggtaaaatttcattttgttatatagtgctgactttttttgtttgaaattaaacagattggtaacctaatttgtggcctcctgacttttaaggaaaacgtgtgcagccattacacacagcctaaagctgtcaagagattgactcagcattgccttcattccttaaaattaaaaacctacaaaagttggtgtaaatttgtatatgttatttaccttcagatctaaatggtaatctgaacccaaatttgtataaagacttttcaggtgaaaagacttgattttttgaaaggattgtttatcaaacacaattctaatctcttctcttatgtatttttgtgcactaggcgcagttgtgtagcagttgagtaatgctggttagctgttaaggtggcgtgttgcagtgcagagtgcttggctgtttcctgttttctcccgattgctcctgtgtaaagatgccttgtcgtgcagaaacaaatggctgtccagtttattaaaatgcctgacaactgcacttccagtcacccgggccttgcatataaataacggagcatacagtgagcacatctagctgatgataaatacacctttttttccctcttccccctaaaaatggtaaatctgatcatatctacatgtatgaacttaacatggaaaatgttaaggaagcaaatggttgtaactttgtaagtacttataacatggtgtatctttttgcttatgaatattctgtattataaccattgtttctgtagtttaattaaaacattttcttggtgttagcttt

SEQ ID NO: 27637 - DNA, 1814 bp, Homo sapiens
  source 1..1814: mol_type = unassigned DNA
agttgttactcaggtgcgctagcctgcggagcccgtccgtgctgttctgcggcaaggcctttcccagtgtccccacgcggaaggcaactgcctgagaggcgcggcgtcgcaccgcccagagctgaggaagccggcgccagttcgcggggctccgggccgccactcagagctatgagctacggccgcccccctcccgatgtggagggtatgacctccctcaaggtggacaacctgacctaccgcacctcgcccgacacgctgaggcgcgtcttcgagaagtacgggcgcgtcggcgacgtgtacatcccgcgggaccgctacaccaaggagtcccgcggcttcgccttcgttcgctttcacgacaagcgcgacgctgaggacgctatggatgccatggacggggccgtgctggacggccgcgagctgcgggtgcaaatggcgcgctgcggtggctacggacgccggagccgcagccctaggcggcgtcgccgcagccgatcccggagtcggagtcgttccaggtctcgcagccgatctcgctacagccgctcgaagtctcggtcccgcactcgttctcgatctcggtcgacctccaagtccagatccgcacgaaggtccaagtccaagtcctcgtcggtctccagatctcgttcgcggtccaggtcccggtctcggtccaggagtcctcccccagtgtccaagagggaatccaaatccaggtcgcgatcgaagagtccccccaagtctcctgaagaggaaggagcggtgtcctcttaagaaaatgatgtatcggcaagcagtgtaaacggaggacttggggaaaaaggaccacatagtccatcgaagaagagtccttggaacaagcaactggctattgaaaaggttattttgtaacatttgtctaactttttacttgtttaagctttgcctcagttggcaaacttcattttatgtgccattttgttgctgttattcaaatttcttgtaatttagtgaggtgaacgacttcagatttcattattggatttggatatttgaggtaaaatttcattttgttatatagtgctgactttttttgtttgaaattaaacagattggtaacctaatttgtggcctcctgacttttaaggaaaacgtgtgcagccattacacacagcctaaagctgtcaagagattgactcagcattgccttcattccttaaaattaaaaacctacaaaagttggtgtaaatttgtatatgttatttaccttcagatctaaatggtaatctgaacccaaatttgtataaagacttttcaggtgaaaagacttgattttttgaaaggattgtttatcaaacacaattctaatctcttctcttatgtatttttgtgcactaggcgcagttgtgtagcagttgagtaatgctggttagctgttaaggtggcgtgttgcagtgcagagtgcttggctgtttcctgttttctcccgattgctcctgtgtaaagatgccttgtcgtgcagaaacaaatggctgtccagtttattaaaatgcctgacaactgcacttccagtcacccgggccttgcatataaataacggagcatacagtgagcacatctagctgatgataaatacacctttttttccctcttccccctaaaaatggtaaatctgatcatatctacatgtatgaacttaacatggaaaatgttaaggaagcaaatggttgtaactttgtaagtacttataacatggtgtatctttttgcttatgaatattctgtattataaccattgtttctgtagtttaattaaaacattttcttggtgtt

SEQ ID NO: 27638 - DNA, 2878 bp, Homo sapiens
  source 1..2878: mol_type = unassigned DNA
gttgttactcaggtgcgctagcctgcggagcccgtccgtgctgttctgcggcaaggcctttcccagtgtccccacgcggaaggcaactgcctgagaggcgcggcgtcgcaccgcccagagctgaggaagccggcgccagttcgcggggctccgggccgccactcagagctatgagctacggccgcccccctcccgatgtggagggtatgacctccctcaaggtggacaacctgacctaccgcacctcgcccgacacgctgaggcgcgtcttcgagaagtacgggcgcgtcggcgacgtgtacatcccgcgggaccgctacaccaaggagtcccgcggcttcgccttcgttcgctttcacgacaagcgcgacgctgaggacgctatggatgccatggacggggccgtgctggacggccgcgagctgcgggtgcaaatggcgcgctacggccgccccccggactcacaccacagccgccggggaccgccaccccgcaggtacgggggcggtggctacggacgccggagccgcagccctaggcggcgtcgccgcagccgatcccggagtcggagtcgttccaggtctcgcagccgatctcgctacagccgctcgaagtctcggtcccgcactcgttctcgatctcggtcgacctccaagtccagatccgcacgaaggtccaagtccaagtcctcgtcggtctccagatctcgttcgcggtccaggtcccggtctcggtccaggagtcctcccccagtgtccaagagggaatccaaatccaggtcgcgatcgaagagtccccccaagtctcctgaagaggaaggagcggtgtcctcttaagaaaatggtaatgtctgggaatccgagacacataaccctaattcataaatgggatttggggtaggtctttttgagtcgtgttaatgtaagaatgactcctatcattaggagtgctgctcggaggttactcacctttgggagtaatactgaagagaggggtctgcagaaaggatgtgtatgaagcttagataataatggctgtttcgtaaactgtttgagacctattaatgaaaatgactatttcttgctgtttttatccaacgtctgcattttccccctttaaagctgcggtctcctgtttgataaaagaatattggccagtattgcagattttaactgatttggctgatcctccagggaccagtttctgtgggcgtgtattggagcaggtttgtctttaaatgttaaagatgcactatcctcttagagaaacaatcagttcaactattgttgtactgactgggacttcatattctaatggatgtggcaaaagaattgcaataagaagcagtgaacatttggaaccccaaaagaaagttacaggtattgcactgggtggggaaaggatagtgtgtctttaactcttaaattgtttggtcctattttttaaaaaggaaagggccctaagtagctcagatattaaagtagtattctcaattaccaaatgtttcatttgaaacaatttatcttaatgaaatatagaccaattctctgatctcgagttgtttttgtttggatacagcccttttttttttctttttttttcttccccttacctttcttcaccttggttatttggccaggaatacgtaaattcaaacttgtacatgctgatggtagcctttgtgaaattttcctaattgggccttttaaaaacatggctgggtggaacatttctgtaccctactggtttgaccagagccttagtaagtacgtgcctgaaactgaaaccatgtgcactttaatggaaggtaagctgaacttctttcttttcaaacctagatgtatcggcaagcagtgtaaacggaggacttggggaaaaaggaccacatagtccatcgaagaagagtccttggaacaagcaactggctattgaaaaggttattttgtaacatttgtctaactttttacttgtttaagctttgcctcagttggcaaacttcattttatgtgccattttgttgctgttattcaaatttcttgtaatttagtgaggtgaacgacttcagatttcattattggatttggatatttgaggtaaaatttcattttgttatatagtgctgactttttttgtttgaaattaaacagattggtaacctaatttgtggcctcctgacttttaaggaaaacgtgtgcagccattacacacagcctaaagctgtcaagagattgactcagcattgccttcattccttaaaattaaaaacctacaaaagttggtgtaaatttgtatatgttatttaccttcagatctaaatggtaatctgaacccaaatttgtataaagacttttcaggtgaaaagacttgattttttgaaaggattgtttatcaaacacaattctaatctcttctcttatgtatttttgtgcactaggcgcagttgtgtagcagttgagtaatgctggttagctgttaaggtggcgtgttgcagtgcagagtgcttggctgtttcctgttttctcccgattgctcctgtgtaaagatgccttgtcgtgcagaaacaaatggctgtccagtttattaaaatgcctgacaactgcacttccagtcacccgggccttgcatataaataacggagcatacagtgagcacatctagctgatgataaatacacctttttttccctcttccccctaaaaatggtaaatctgatcatatctacatgtatgaacttaacatggaaaatgttaaggaagcaaatggttgtaactttgtaagtacttataacatggtgtatctttttgcttatgaatattctgtattataaccattgtttctgtagtttaattaaaacattttcttggtgttagcttttctc

SEQ ID NO: 27639 - DNA, 1341 bp, Homo sapiens
  source 1..1341: mol_type = unassigned DNA
ccagttgttactcaggtgcgctagcctgcggagcccgtccgtgctgttctgcggcaaggcctttcccagtgtccccacgcggaaggcaactgcctgagaggcgcggcgtcgcaccgcccagagctgaggaagccggcgccagttcgcggggctccgggccgccactcagagctatgagctacggccgcccccctcccgatgtggagggtatgacctccctcaaggtggacaacctgacctaccgcacctcgcccgacacgctgaggcgcgtcttcgagaagtacgggcgcgtcggcgacgtgtacatcccgcgggaccgctacaccaaggagtcccgcggcttcgccttcgttcgctttcacgacaagcgcgacgctgaggacgctatggatgccatggacggagccgatcccggagtcggagtcgttccaggtctcgcagccgatctcgctacagccgctcgaagtctcggtcccgcactcgttctcgatctcggtcgacctccaagtccagatccgcacgaaggtccaagtccaagtcctcgtcggtctccagatctcgttcgcggtccaggtcccggtctcggtccaggagtcctcccccagtgtccaagagggaatccaaatccaggtcgcgatcgaagagtccccccaagtctcctgaagaggaaggagcggtgtcctcttaagaaaatgctgcggtctcctgtttgataaaagaatattggccagtattgcagattttaactgatttggctgatcctccagggaccagtttctgtgggcgtgtattggagcagatgtatcggcaagcagtgtaaacggaggacttggggaaaaaggaccacatagtccatcgaagaagagtccttggaacaagcaactggctattgaaaaggcgcagttgtgtagcagttgagtaatgctggttagctgttaaggtggcgtgttgcagtgcagagtgcttggctgtttcctgttttctcccgattgctcctgtgtaaagatgccttgtcgtgcagaaacaaatggctgtccagtttattaaaatgcctgacaactgcacttccagtcacccgggccttgcatataaataacggagcatacagtgagcacatctagctgatgataaatacacctttttttccctcttccccctaaaaatggtaaatctgatcatatctacatgtatgaacttaacatggaaaatgttaaggaagcaaatggttgtaactttgtaagtacttataacatggtgtatctttttgcttatgaatattctgtattataaccattgtttctgtagtttaattaaaacattttcttggtgttagcttttctc

SEQ ID NO: 27640 - DNA, 2959 bp, Homo sapiens
  source 1..2959: mol_type = unassigned DNA
agaaggtttcatttccgggtggcgcgggcgccattttgtgaggagcgatataaacgggcgcagaggccggctgcccgcccagttgttactcaggtgcgctagcctgcggagcccgtccgtgctgttctgcggcaaggcctttcccagtgtccccacgcggaaggcaactgcctgagaggcgcggcgtcgcaccgcccagagctgaggaagccggcgccagttcgcggggctccgggccgccactcagagctatgagctacggccgcccccctcccgatgtggagggtatgacctccctcaaggtggacaacctgacctaccgcacctcgcccgacacgctgaggcgcgtcttcgagaagtacgggcgcgtcggcgacgtgtacatcccgcgggaccgctacaccaaggagtcccgcggcttcgccttcgttcgctttcacgacaagcgcgacgctgaggacgctatggatgccatggacggggccgtgctggacggccgcgagctgcgggtgcaaatggcgcgctacggccgccccccggactcacaccacagccgccggggaccgccaccccgcaggtacgggggcggtggctacggacgccggagccgcagccctaggcggcgtcgccgcagccgatcccggagtcggagtcgttccaggtctcgcagccgatctcgctacagccgctcgaagtctcggtcccgcactcgttctcgatctcggtcgacctccaagtccagatccgcacgaaggtccaagtccaagtcctcgtcggtctccagatctcgttcgcggtccaggtcccggtctcggtccaggagtcctcccccagtgtccaagagggaatccaaatccaggtcgcgatcgaagagtccccccaagtctcctgaagaggaaggagcggtgtcctcttaagaaaatggtaatgtctgggaatccgagacacataaccctaattcataaatgggatttggggtaggtctttttgagtcgtgttaatgtaagaatgactcctatcattaggagtgctgctcggaggttactcacctttgggagtaatactgaagagaggggtctgcagaaaggatgtgtatgaagcttagataataatggctgtttcgtaaactgtttgagacctattaatgaaaatgactatttcttgctgtttttatccaacgtctgcattttccccctttaaagctgcggtctcctgtttgataaaagaatattggccagtattgcagattttaactgatttggctgatcctccagggaccagtttctgtgggcgtgtattggagcaggtttgtctttaaatgttaaagatgcactatcctcttagagaaacaatcagttcaactattgttgtactgactgggacttcatattctaatggatgtggcaaaagaattgcaataagaagcagtgaacatttggaaccccaaaagaaagttacaggtattgcactgggtggggaaaggatagtgtgtctttaactcttaaattgtttggtcctattttttaaaaaggaaagggccctaagtagctcagatattaaagtagtattctcaattaccaaatgtttcatttgaaacaatttatcttaatgaaatatagaccaattctctgatctcgagttgtttttgtttggatacagcccttttttttttctttttttttcttccccttacctttcttcaccttggttatttggccaggaatacgtaaattcaaacttgtacatgctgatggtagcctttgtgaaattttcctaattgggccttttaaaaacatggctgggtggaacatttctgtaccctactggtttgaccagagccttagtaagtacgtgcctgaaactgaaaccatgtgcactttaatggaaggtaagctgaacttctttcttttcaaacctagatgtatcggcaagcagtgtaaacggaggacttggggaaaaaggaccacatagtccatcgaagaagagtccttggaacaagcaactggctattgaaaaggttattttgtaacatttgtctaactttttacttgtttaagctttgcctcagttggcaaacttcattttatgtgccattttgttgctgttattcaaatttcttgtaatttagtgaggtgaacgacttcagatttcattattggatttggatatttgaggtaaaatttcattttgttatatagtgctgactttttttgtttgaaattaaacagattggtaacctaatttgtggcctcctgacttttaaggaaaacgtgtgcagccattacacacagcctaaagctgtcaagagattgactcagcattgccttcattccttaaaattaaaaacctacaaaagttggtgtaaatttgtatatgttatttaccttcagatctaaatggtaatctgaacccaaatttgtataaagacttttcaggtgaaaagacttgattttttgaaaggattgtttatcaaacacaattctaatctcttctcttatgtatttttgtgcactaggcgcagttgtgtagcagttgagtaatgctggttagctgttaaggtggcgtgttgcagtgcagagtgcttggctgtttcctgttttctcccgattgctcctgtgtaaagatgccttgtcgtgcagaaacaaatggctgtccagtttattaaaatgcctgacaactgcacttccagtcacccgggccttgcatataaataacggagcatacagtgagcacatctagctgatgataaatacacctttttttccctcttccccctaaaaatggtaaatctgatcatatctacatgtatgaacttaacatggaaaatgttaaggaagcaaatggttgtaactttgtaagtacttataacatggtgtatctttttgcttatgaatattctgtattataaccattgtttctgtagtttaattaaaacattttcttggtgttagcttttctc

SEQ ID NO: 27641 - DNA, 1518 bp, Homo sapiens
  source 1..1518: mol_type = unassigned DNA
tttcgtggacgccgggtgagtgagagagttggttggtgttgggccggaggaaagcgggaagactcatcggagcgtgtggatttgagccgccgcattttttaaccctagatctcgaaatgcatcgtgattcctgtccattggactgtaaggtttatgtaggcaatcttggaaacaatggcaacaagacggaattggaacgggcttttggctactatggaccactccgaagtgtgtgggttgctagaaacccacccggctttgcttttgttgaatttgaagatccccgagatgcagctgatgcagtccgagagctagatggaagaacactatgtggctgccgtgtaagagtggaactgtcgaatggtgaaaaaagaagtagaaatcgtggcccacctccctcttggggtcgtcgccctcgagatgattatcgtaggaggagtcctccacctcgtcgcagagtcaccatcatgtctcttctcaccaccctctgaatctgcattagccagtcaactagccctttcagcgtcatgtgaccagcgcgccccattcagcttggctggtgtcgtttcacatgacccaggctggccagtcgtcaggttgcaccgccctttggttcccgagcatgctgttttctctcagccttctctccaaccttaaccaaatcggcagcagccacctcgaccgcccacacattcctggccaatcagctcagctgtttatttaccaaatgtcttcacaacaactacagcagcagccttcggctaacaaaaaagcaggaaaaatccacaacacccccttcgccaaccaactaaatccaacgcaacatctggcaaaaccttttcagcaaattcttcctggccgtcagtccggcagcctcacctcaccatttctagcttgttgaaacccaaaactagtaagtttttcctgcttatacagtttactgctggttaaaataaggagtaagcggcttaaagtaattcttttttctggatcaaaggctggctgtgcataattgaatggtaacgtacatatatattgcttgaaaaacttttaagggtgatagggaactcgtaatgtaactaggccttcaagtgaaacttatttgcatgtgcaagatgccaaactaaaaattttaatatctctaacagattagcttttctggcaaaaatttgttgaatcctatcacctttaaatggttttactaacagtttcaaaatttaaaattttggggttgaagtgtgggccaagctaaggtaattttggtaagcctaaacacactcttaaatgtgacgatcacaaatgcagttctaatgtagcacttaatggcatcaatatttacacctaccgcgttttcacaaaattacactatccacctggtacctaagtcttgtcatggacttacaggtttgcatgggttccaaatactggtttatggtactgtttttggaactacttgtgggactatattttggtgtggtgtttgggtagtgaagttagtttgacatgaagttttgcatt

SEQ ID NO: 27642 - DNA, 2054 bp, Homo sapiens
  source 1..2054: mol_type = unassigned DNA
tttcgtggacgccgggtgagtgagagagttggttggtgttgggccggaggaaagcgggaagactcatcggagcgtgtggatttgagccgccgcattttttaaccctagatctcgaaatgcatcgtgattcctgtccattggactgtaaggtttatgtaggcaatcttggaaacaatggcaacaagacggaattggaacgggcttttggctactatggaccactccgaagtgtgtgggttgctagaaacccacccggctttgcttttgttgaatttgaagatccccgagatgcagctgatgcagtccgagagctagatggaagaacactatgtggctgccgtgtaagagtggaactgtcgaatggtgaaaaaagaagtagaaatcgtggcccacctccctcttggggtcgtcgccctcgagatgattatcgtaggaggagtcctccacctcgtcgcagatctccaagaaggagaagcttctctcgcagccggagcaggtccctttctagagataggagaagagagagatcgctgtctcgggagagaaatcacaagccgtcccgatccttctctaggtctcgtagtcgatctaggtcaaatgaaaggaaatagaagacagtttgcaagagaagtggtgtacaggaaattacttcatttgacaggagtatgtacagaaaattcaagttttgtttgagacttcataagcttggtgcatttttaagatgttttagctgttcaaatctgtttgtctcttgaaacagtgacacaaaggtgtaattctctatggtttgaaatggatcatacgaggcatgtaataccaagaattgttactttacaatgttcccttaagcaaaattgaatttgctttgaacttttagttatgcacagactgataataaacctctaaacctgcccagcggaagtgtgtttttttttaaatttaaatacagaaacaactggcaaaaattgaactaagatttacttttttttccatagctgggatataggctgcagctatagttgaacaagcagtctttaaaaactgctgtgaaacacaggccatcagggaaaacgaaatgctgcactattaaattagaggtttttgaaaaatccaactctcatcctgggcagaggttgcctagttggtatagaatgttaagtttcaagaaagtttacctttgctttaggtcataagttccttatttgattgctgtatatggatacatggctgttcgtgacattctttatgtgcaaatttgtgatttcaaaaatgtcctgccagtttaagggtacattgtagagccgaactttgagttactgtgcaagatttttttttcatgctgtcatttgtaatatgttttgtgagaatccttgggattaaagttttggttacaaattgttctttaacttgaaagcctgtttttccttgcaaactcaaatctgtgagcttggtaccaagtccaggtataacattcctattggaagccatacttatattttcttgtaaagtgcttttgaattaataaaatattagcataattgtgtatagtcagttgaacccactgttaccattgttcttatcccatgggaagcagttggttacacgattcttattttataagaaacagctgagaggcactatggattagtcttctgaagtgaaggaaatatagatgtcacctaagtgatagttaacccattttttttttttttaggcatagaagccagttcagggtccataatatttagtgaccaacattttaaagtatagcagcaacctggttcttaaacacaaagtaagttgcccattaacaaatggcttttatctttagcatgaaaactttccacaggtctaaaaattgcttccattttataatttgaggtgttgcatgggaattctaagctgatccatcatgatgtaaaagttcacaatatggttcaaatgtaacagtgcagaattgaatatggaggcatgcataaccttcctcttagaaaatggcaggtgttgtaatttcaaatttttgtgcaattagattaaatcataatgcaacagtc

SEQ ID NO: 27643 - DNA, 2387 bp, Homo sapiens
  source 1..2387: mol_type = unassigned DNA
gccgagcgggaagcgaacgcgcgctctctccggttaccttccgcctcggggaagggcgggggaagtggaagcgcgcgctcgcgagctgcgtgctcgcgtacgtcgccggggttcggctgcgtccgtcccgccgcccgcccgttgccgccgccgccgctgccgccgtgctctcgctttgcccgccgccgcctaaggggggctggggccggggccagccatcactgccgttgccgggatgccgcgggtgtacatcggccgcctgagctaccaggcccgggagcgcgatgtggagcgcttctttaagggctacgggaagatcctggaggtggatctgaagaacggatatggttttgtggagtttgatgatctgcgtgatgcagatgatgctgtttatgaactgaatggcaaagacctttgtggtgagcgagtaattgttgagcatgcccgcggcccacggcgagatggcagttacggttctggacgcagtggatatggttatagaagaagtggccgagataaatatggccctcctactcgcacagagtacagacttattgtggagaatttgtcaagtcggtgcagctggcaagacctaaaggattatatgcgtcaggcaggagaagtgacttatgcagatgctcacaagggacgcaaaaatgaaggggtgattgaatttgtatcttattctgatatgaaaagagctttggaaaagttggatggaactgaagtcaatgggagaaaaatcagattagttgaagacaagccaggttccagacgacgccggtcctactccagaagccggagtcattcaaggtctcgctctcgaagcagacattcccgtaagagcagaagccgaagtggcagcagcaaaagcagtcattctaagagtagatctcggtccaggtcgggctcccgctcccggagcaagagccggagccggagccagagtcggagccggagcaagaaagagaaaagcaggagccccagcaaggaaaagagccgcagccgcagccatagcgctggcaagagccgcagcaagagcaaagaccaagctgaagagaagatccaaaacaatgacaatgtcgggaaacccaagagccggagtcctagcaggcataaaagtaagagcaaaagtcggagcaggagtcaggagaggagagtggaggaggagaagcgagggagtgtgagcaggggcaggagccaggagaagagcctccgccagagtcggagccggagcaggagcaaagggggcagcaggagccggagcaggagccgcagcaagagcaaggacaagaggaagggcaggaagagaagcagagaggagagccgcagtcgcagtcgcagccgcagcaagagtgagaggagcagaaagcgaggcagcaagcgagacagcaaggcgggcagcagcaagaagaagaagaaggaagacactgaccgctcccagtccagatctccatcccgctccgtgtcaaaggagcgggaacatgccaagtctgaatccagccagagggaaggtcgaggagagagtgagaatgctggcaccaatcaggagacccggtccaggtcgagatccaattccaaatcgaaaccaaaccttccatcagaatcacgctccagatcaaagtcagcttcaaaaacccgatctcggtccaagtctagatccaggtctgcttccagatcgccctcccgatctagatctaggtcccactcaaggtcctaactggctatggccacagctggaactacccgagaagtcttttgtacatgtttggtagccgtagcacaagtgattggagtagaacatgtcactgctgtacatttttaactcccctaatggtgtgtctataattgttaaatctaagtgcttcctctcagtaaagcctcctggcaccaggccttcctgctcgactgaaaaaaattttctctttgaaaatccccttttactcatggcccacagtagaatatccaaaacgccttggctttcaggcctggcctttcctacagggagctcagtaacctggacggctctaaggctggaatgaccacataggtaggtatggtgagttcaaccatttttgctcttgaattgatgcccttcgatgtatgccatttagtgaaagtgctaagtcttaagtttcctaccactttggtttcatatttttggacttaacaaagttgtgaatagcacagtcgaggaaaattgatacctgcagtaacccataggaaataaactgtagagttccatattctggtattgtgattatattgttttatattaaaaaagaaaagaaaagaattttttttaattttatttttccccgtcttgcaaagtatagtgacccctgtttccattaaatttgaataaagactatttttgcttgacaaaa

SEQ ID NO: 27644 - DNA, 1701 bp, Homo sapiens
  source 1..1701: mol_type = unassigned DNA
tgcgtgctcgcgtacgtcgccggggttcggctgcgtccgtcccgccgcccgcccgttgccgccgccgccgctgccgccgtgctctcgctttgcccgccgccgcctaaggggggctggggccggggccagccatcactgccgttgccgggatgccgcgggtgtacatcggccgcctgagctaccaggcccgggagcgcgatgtggagcgcttctttaagggctacgggaagatcctggaggtggatctgaagaacggatatggttttgtggagtttgatgatctgcgtgatgcagatgatgctgtttatgaactgaatggcaaagacctttgtggtgagcgagtaattgttgagcatgcccgcggcccacggcgagatggcagttacggttctggacgcagtggatatggttatagaagaagtggccgagataaatatggccctcctactcgcacagagtacagacttattgtggagaatttgtcaagtcggtgcagctggcaagacctaaaggattatatgcgtcaggcaggagaagtgacttatgcagatgctcacaagggacgcaaaaatgaaggggtgattgaatttgtatcttattctgatatgaaaagagctttggaaaagttggatggaactgaagtcaatgggagaaaaatcagattagttgaagacaagccaggttccagacgacgccggtcctactccagaagccggagtcattcaaggtctcgctctcgaagcagacattcccgtaagagcagaagccgaagtggcagcagcaaaagcagtcattctaagagtagatctcggtccaggtcgggctcccgctcccggagcaagagccggagccggagccagagtcggagccggagcaagaaagagaaaagcaggagccccagcaaggaaaagagccgcagccgcagccatagcgctggcaagagccgcagcaagagcaaagaccaagctgaagagaagatccaaaacaatgacaatgtcgggaaacccaagagccggagtcctagcaggcataaaagtaagagcaaaagtcggagcaggagtcaggagaggagagtggaggaggagaagcgagggagtgtgagcaggggcaggagccaggagaagagcctccgccagagtcggagccggagcaggagcaaagggggcagcaggagccggagcaggagccgcagcaagagcaaggacaagaggaagggcaggaagagaagcagagaggagagccgcagtcgcagtcgcagccgcagcaagagtgagaggagcagaaagcgaggcagcttggctttcaggcctggcctttcctacagggagctcagtaacctggacggctctaaggctggaatgaccacataggtaggtatggtgagttcaaccatttttgctcttgaattgatgcccttcgatgtatgccatttagtgaaagtgctaagtcttaagtttcctaccactttggtttcatatttttggacttaacaaagttgtgaatagcacagtcgaggaaaattgatacctgcagtaacccataggaaataaactgtagagttccatattctggtattgtgattatattgttttatattaaaaaagaaaagaaaagaattttttttaattttatttttccccgtcttgcaaagtatagtgacccctgtttccattaaatttgaataaagactatttttgcttg

SEQ ID NO: 27645 - DNA, 1591 bp, Homo sapiens
  source 1..1591: mol_type = unassigned DNA
gtgctcgcgtacgtcgccggggttcggctgcgtccgtcccgccgcccgcccgttgccgccgccgccgctgccgccgtgctctcgctttgcccgccgccgcctaaggggggctggggccggggccagccatcactgccgttgccgggatgccgcgggtgtacatcggccgcctgagctaccaggcccgggagcgcgatgtggagcgcttctttaagggctacgggaagatcctggaggtggatctgaagaacggatatggttttgtggagtttgatgatctgcgtgatgcagatgatgctgtttatgaactgaatggcaaagacctttgtggtgagcgagtaattgttgagcatgcccgcggcccacggcgagatggcagttacggttctggacgcagtggatatggttatagaagaagtggccgagataaatatggccctcctactcgcacagagtacagacttattgtggagaatttgtcaagtcggtgcagctggcaagacctaaaggtcgggctcccgctcccggagcaagagccggagccggagccagagtcggagccggagcaagaaagagaaaagcaggagccccagcaaggaaaagagccgcagccgcagccatagcgctggcaagagccgcagcaagagcaaagaccaagctgaagagaagatccaaaacaatgacaatgtcgggaaacccaagagccggagtcctagcaggcataaaagtaagagcaaaagtcggagcaggagtcaggagaggagagtggaggaggagaagcgagggagtgtgagcaggggcaggagccaggagaagagcctccgccagagtcggagccggagcaggagcaaagggggcagcaggagccggagcaggagccgcagcaagagcaaggacaagaggaagggcaggaagagaagcagagaggagagccgcagtcgcagtcgcagccgcagcaagagtgagaggagcagaaagcgaggcagcaagcgagacagcaaggcgggcagcagcaagaagaagaagaaggaagacactgaccgctcccagtccagatctccatcccgctccgtgtcaaaggagcgggaacatgccaagtctgaatccagccagagggaaggtcgaggagagagtgagaatgctggcaccaatcaggagacccggtccaggtcgagatccaattccaaatcgaaaccaaaccttccatcagaatcacgctccagatcaaagtcagcttcaaaaacccgatctcggtccaagtctagatccaggtctgcttccagatcgccctcccgatctagatctaggtcccactcaaggtcctaactggctatggccacagctggaactacccgagaagtcttttgtacatgtttggtagccgtagcacaagtgattggagtagaacatgtcactgctgtacatttttaactcccctaatggtgtgtctataattgttaaatctaagtgcttcctctcagtaaagcctcctggcaccaggccttcctgctcgactgaaaaaaattttctctttgaaaatccccttttactcatggcccacagtagaatatccaaaacgccttggctttca

SEQ ID NO: 27646 - DNA, 1638 bp, Homo sapiens
  source 1..1638: mol_type = unassigned DNA
gacgtaggacgcgccctccattttgtggagcgccagagctgctaagtgcgtcagttgtggagtggcgtagacgagttaagtcctggtctgcgtggaggtcgacgactccgtcgcagactacggacctgtctgggtctcagccgccaaagaccccgtccggtaggtgagtggctcactttgagggcaagccttctcggatcgaggcttcttcatggccgctcagatcgtgagcggccggggctgctctctttgcggaggatggcgtctaatgagcgcagttgattcgaggaagtactagccggacatcatgagtggctgtcgggtattcatcgggagactaaatccagcggccagggagaaggacgtggaaagattcttcaagggatatggacggataagagatattgatctgaaaagaggctttggttttgtggaatttgaggatccaagggatgcagatgatgctgtgtatgagcttgatggaaaagaactctgtagtgaaagggttactattgaacatgctagggctcggtcacgaggtggaagaggtagaggacgatactctgaccgttttagtagtcgcagacctcgaaatgatagacgaaatgctccacctgtaagaacagaaaatcgtcttatagttgagaatttatcctcaagagtcagctggcaggatctcaaagatttcatgagacaagctggggaagtaacgtttgcggatgcacaccgacctaaattaaatgaaggggtggttgagtttgcctcttatggtgacttaaagaatgctattgaaaaactttctggaaaggaaataaatgggagaaaaataaaattaattgaaggcagcaaaaggcacagtaggtcaagaagcaggtctcgatcccggaccagaagttcctctaggtctcgtagccgatcccgttcccgtagtcgcaaatcttacagccggtcaagaagcaggagcaggagccggagccggagcaagtcccgttctgttagtaggtctcccgtgcctgagaagagccagaaacgtggttcttcaagtagatctaagtctccagcatctgtggatcgccagaggtcccggtcccgatcaaggtccagatcagttgacagtggcaattaaactgtaaataacttgccctgggggcctttttttaaaaaacaaaaaccacaaaaattcccaaaccatacttgctaaaaattctggtaagtatgtgcttttctgtgggggtgggatttggaaggggggttgggttgggctggatatctttgtagatgtggaccaccaaggggttgttgaaaactaattgtattaaatgtcttttgataagccttctgctcacatttttgtgaatgtctgaagtatatagtttgtgtatattgacagagctcttttataactaaagcaaatttaatttttttgtactagaaaaaaatttgaacattttagttcttggttataaaaatgttaattcagaattagtttaatgccttaattaaactaattaatagctttggacacttaaaagagctctaaatttgcttgtacataaaggcttaatttgttttccttgttagggtcaagggtgtcctccactctttaacagctgctggacagacacattagagcagctg

SEQ ID NO: 27647 - DNA, 822 bp, Homo sapiens
  source 1..822: mol_type = unassigned DNA
agttgtggagtggcgtagacgagttaagtcctggtctgcgtggaggtcgacgactccgtcgcagactacggacctgtctgggtctcagccgccaaagaccccgtccggtaggaagtactagccggacatcatgagtggctgtcgggtattcatcgggagactaaatccagcggccagggagaaggacgtggaaagattcttcaagggatatggacggataagagatattgatctgaaaagaggctttggttttgtggaatttgaggatccaagggatgcagatgatgctgtgtatgagcttgatggaaaagaactctgtagtgaaagggttactattgaacatgctagggctcggtcacgaggtggaagaggtagaggacgatactctgaccgttttagtagtcgcagacctcgaaatgatagacgaaatgctccacctgtaagaacagaaaatcgtcttatagttgagaatttatcctcaagagtcagctggcagcctgtctgtgtcgttggccttatgacgaggagtgcctgtgggttatcctaatcgttgtcttggtcactcttggttgggcctggttgactttgccagtcagctcctacagtgatcagttggccacctctagatctgtgtttgccggtctagacgttatcggtgcacttccttgaagtgccaggttgcagcgatcccagagcgttgataacgtgatctgatccctaagttgagacctgtcttcctgtaacgcttccgaataagaggtccggtcgaaaagagttgaaagatacgaaattaggtggtcgttggaatcctgatcgcagtaa

SEQ ID NO: 27648 - DNA, 2815 bp, Homo sapiens
  source 1..2815: mol_type = unassigned DNA
gccggaggaagcgccacgggcggctcagacctgaggccgcaagggcgcgccgggcgggcagggcggagggtccgatttcctccctctgaacggaaaaaaagccactttccctgggaagaactcgaagaagttggatgtctgatcttcaccttggatttgtggtctcggcccgcgggcgactcaccccacccaccaggatcccacgaagccgggccggctcagcccgctggcgccatctagtgtcgaatgaggaggcggccctctgcggctggaggggacgcttgggcgtgtgaaatctgaacggagaggattaaccaaataccatttggacttaaaagcagcttgaggccgggcgcggtggctcatgcctgtaatcccagcactttgggaggccgagacgggccgatcacgaggtcaggagatcgagaccatcccggctaacacggtgaaaccccgtctctactaaaaatacaaaaaaattagccggtgtggtggcgggcgcctgtagtcgcagctactcgggaggctgaggcagaagaatggcgtgaacccgggaggcggagcccagatcgcgccactgcactccagcctgggcgacagagcaagactgtctcaaaaaaaacaacaaaaaacagcttgaaacctcttccagccactctcccagagtgacggacatgcagaaatctgtattccagcctcaattcaagacagccttctagctgcagtcccattttcaacatttcatcagtgaaaatcctttcatttaaaaaatacttcagtgccttagtcttctcaccacaacaaaaccacacagctgtggcatggttgaaaaaagaactcgaacatctaggagctccctgctttgagggcaaatttaaattgcaagcagcaagagctaaggaaaggccaggtatttctgcaaagctaagtttctcctaattagtaatcttctgggtgtctaagaaaaactttagatacaagaagggttgccacttttctcaggagactcttctgggagagatgatgatgaaccgaacgccaaggacttagcaggggcgaacgacgtcaacagatgtccctccagactccggcaccagccggccgagcccaaacgagttctcgcccccgaccccacccaccgcgggagcagggttcggtcactcgcagtgtcagagaggcccacatcctcctaaatttccggccctcccaaaacttccgtcttccctaggtccaacggggtggacccaaggcccaggggcgtccccggaagtgacgtaggacgcgccctccattttgtggagcgccagagctgctaagtgcgtcagttgtggagtggcgtagacgagttaagtcctggtctgcgtggaggtcgacgactccgtcgcagactacggacctgtctgggtctcagccgccaaagaccccgtccggtaggaagtactagccggacatcatgagtggctgtcgggtattcatcgggagactaaatccagcggccagggagaaggacgtggaaagattcttcaagggatatggacggataagagatattgatctgaaaagaggctttggttttgtggaatttgaggatccaagggatgcagatgatgctgtgtatgagcttgatggaaaagaactctgtagtgaaagggttactattgaacatgctagggctcggtcacgaggtggaagaggtagaggacgatactctgaccgttttagtagtcgcagacctcgaaatgatagacgaaatgctccacctgtaagaacagaaaatcgtcttatagttgagaatttatcctcaagagtcagctggcaggatctcaaagatttcatgagacaagctggggaagtaacgtttgcggatgcacaccgacctaaattaaatgaaggggtggttgagtttgcctcttatggtgacttaaagaatgctattgaaaaactttctggaaaggaaataaatgggagaaaaataaaattaattgaaggcagcaaaaggcacagtaggtcaagaagcaggtctcgatcccggaccagaagttcctctaggtctcgtagccgatcccgttcccgtagtcgcaaatcttacagccggtcaagaagcaggagcaggagccggagccggagcaagtcccgttctgttagtaggtctcccgtgcctgagaagagccagaaacgtggttcttcaagtagatctaagtctccagcatctgtggatcgccagaggtcccggtcccgatcaaggtccagatcagttgacagtggcaattaaactgtaaataacttgccctgggggcctttttttaaaaaacaaaaaccacaaaaattcccaaaccatacttgctaaaaattctggtaagtatgtgcttttctgtgggggtgggatttggaaggggggttgggttgggctggatatctttgtagatgtggaccaccaaggggttgttgaaaactaattgtattaaatgtcttttgataagccttctgctcacatttttgtgaatgtctgaagtatatagtttgtgtatattgacagagctcttttataactaaagcaaatttaatttttttgtactagaaaaaaatttgaacattttagttcttggttataaaaatgttaattcagaattagtttaatgccttaattaaactaattaatagctttggacacttaaaagagctctaaatttgcttgtacataaaggcttaatttgttttccttgttagggtcaagggtgtcctccactctttaacagctgctggacagacacattagagcagctgtttgttattgataataaaatattataaaact

SEQ ID NO: 27649 - DNA, 1500 bp, Homo sapiens
  source 1..1500: mol_type = unassigned DNA
gccagagctgctaagtgcgtcagttgtggagtggcgtagacgagttaagtcctggtctgcgtggaggtcgacgactccgtcgcagactacggacctgtctgggtctcagccgccaaagaccccgtccggtaggaagtactagccggacatcatgagtggctgtcgggtattcatcgggagactaaatccagcggccagggagaaggacgtggaaagattcttcaagggatatggacggataagagatattgatctgaaaagaggctttggttttgtggaatttgaggatccaagggatgcagatgatgctgtgtatgagcttgatggaaaagaactctgtagtgaaagggttactattgaacatgctagggctcggtcacgaggtggaagaggtagaggacgatactctgaccgttttagtagtcgcagacctcgaaatgatagacgaaatgctccacctgtaagaacagaaaatcgtcttatagttgagaatttatcctcaagagtcagctggcaggatctcaaagatttcatgagacaagctggggaagtaacgtttgcggatgcacaccgacctaaattaaatgaaggggtggttgagtttgcctcttatggtgacttaaagaatgctattgaaaaactttctggaaaggaaataaatgggagaaaaataaaattaattgaaggcagcaaaaggcacagtaggtcaagaagcaggtctcgatcccggaccagaagttcctctaggtctcgtagccgatcccgttcccgtagtcgcaaatcttacagccggtcaagaagcaggagcaggagccggagccggagcaagtcccgttctgttagtaggtctcccgtgcctgagaagagccagaaacgtggttcttcaagtagatctaagtctccagcatctgtggatcgccagaggtcccggtcccgatcaaggtccagatcagttgacagtggcaattaaactgtaaataacttgccctgggggcctttttttaaaaaacaaaaaccacaaaaattcccaaaccatacttgctaaaaattctggtaagtatgtgcttttctgtgggggtgggatttggaaggggggttgggttgggctggatatctttgtagatgtggaccaccaaggggttgttgaaaactaattgtattaaatgtcttttgataagccttctgctcacatttttgtgaatgtctgaagtatatagtttgtgtatattgacagagctcttttataactaaagcaaatttaatttttttgtactagaaaaaaatttgaacattttagttcttggttataaaaatgttaattcagaattagtttaatgccttaattaaactaattaatagctttggacacttaaaagagctctaaatttgcttgtacataaaggcttaatttgttttccttgttagggtcaagggtgtcctccactctttaacagctgctggacagacacattagagcagctgtttgttattgataataaa

SEQ ID NO: 27650 - DNA, 3683 bp, Homo sapiens
  source 1..3683: mol_type = unassigned DNA
gtgaggcgcgtgttcgggctcttgccgtccccgcacccgcaccgcggttactggcttgcggtccgccgttcgacaaccagcccttgggtccccgcccgccacggacatgccgcgcgtctacataggacgcctgagctacaacgtccgggagaaggacatccagcgctttttcagtggctatggccgcctcctcgaagtagacctcaaaaatgggtacggcttcgtggagttcgaggactcccgcgacgccgacgacgccgtttacgagctgaacggcaaggagctctgcggcgagcgcgtgatcgtagagcacgcccggggcccgcgtcgcgatcgcgacggctacagctacggaagccgcagtggtggaggtggatacagcagtcggagaacatctggcagagacaaatacggaccacctgttcgtacagaatacaggcttattgtagaaaatctttctagtcggtgcagttggcaagatttaaaggattttatgcgacaagcaggtgaagtaacctatgcggatgcccacaaggaacgaacaaatgagggtgtaattgagtttcgctcctactctgacatgaagcgtgctttggacaaactggatggcacagaaataaatggcagaaatattaggcttattgaagataagccacgcacaagccataggcgatcttactctggaagcagatccaggtctcgatctagaagacggtcacgaagtaggagtcgcaggagcagccgcagtagatctcgaagtatctcaaaaagtcgctcccgttccaggtcgcggagcaaaggtcgatcacgttctcgatcaaaaggcaggaaatctagatcaaagagcaaatctaagcccaagtctgatcggggctcccattcacattctcgaagcagatctaaggatgagtatgagaaatctcgaagcaggtctcggtcccgatcccctaaagaaaatggaaagggtgatataaagtcaaaatccagatcaaggagccagtcccgttccaattcgccgctacctgttccaccctcaaaggcccgttctgtgtcccctccaccaaaaagagctacttcaagatcccgttctagatctcgctcaaagtcaagatcaaggtccaggtcgagttccagagattaactcagaactccttgtttgcacattattatggaacactttcctacttaggcagttactcttccatgtttatacttggcctcttctgcaagaggaatctcttgaaaacaggggcacacagaaatttgatttgtggccaaattggatgaaaaagatgaggctctaaggaaatggtggcatgaagaccctctcccttctttgtagaattaagataactttgattttatagcttttgagctaacgtaacttttgtaaagattaagctcatttagtgttgtttttttttttttttttttttttttttttttttttttagtatttcagcaggatctgctggcagggtttttttgttttatttgtttgcttatttttaaattaactgttttgagctttgaatacttaaggctttagagggagaacccaattttcaattatgttggctttttataaagcttgagttatgtaagatttaaataaaagtttgctaccaagatgattgccttattgaataggtcactattaaattcctttaaatgttgatatctgccatttgtggaaacaacgtaaattctacttaagtgtaaacaaggcaagcctcagaccagcaataaattactcagtttggataacattattttgtgcagttaatcaaatttgccaaagtctttatctgcccctttaacaagttgagtaaaaataaaaggtattttttagtcaatgtgttccatgattttgcttaaattaatacttttaagtaatggaacttttttcaaaggcaaatttaaactatttaagaaatagctcctaatacttgggatcttgtttagagaatccactttctggaagttctcagcataattagtgttgagagtggttcagttgtctttaatgtttgtcatgtggaaatggaagtagcctctttttgttctgaaattgagtttattcaaagtgtaaaagcacatactgcattttctgctgaaagatcattatgtttaacaggcacttaatctcagtaaagtcagttgccagttaagttccacccagtagtcagtcccctttgtagttagtgggattatttgataattggttagatcatacttgtaaattttaatgctttgtgtaattggtttgaaaaacagtgaaatgggtaaacgcaaaacttttgtactttattacgagtaaagtgtaatgagtactgtggaaaccaaatttgaatactgcaaatttgtaggagttactaggttagcaattagtccatacatccataagcctgatgagttgaaattgcagtttgagaagtgaattaaccttacatccctttgttcagataccttaaaagttactttatttaaaagcatttattaatcttagtctgaaatcaaaatatagattaattggctcagctttaatacctttctaggaggtgtcacaatgtagggtaccaagggttggattgtgatggggcatggtcgtacactgctcattgtgccacaggtgtgactggaaagcatgatattctagggttggtttgtagattcaaataatccagaaatatacctaataagattgagtgaaaaatttgagtcaaatatctagggcattcacagagtagctgtgagttcttggtaatgtgaaaaaggccttgtttttcagaaattcctgggtttcctgttaaaaaatcttaaagcccaaccttaggaatatagtgccccaaaaggcggatgcttcttccattatcttattttctttgatactttatttaattagatgtttataaagaaatgggtttatttttccagcataaacctcagaatttaaggaaagaaaatgatgtctgttgttatagttcattgttttgcctactcagcagaagtgatgactcttaaaaattggctttgaccaaagttctcttgttttcagggaaagaacataaaagctttttgaactacagcctttttaaaagagggatgggaggatattacagtaagaaattaggctttctaaaagtatgaaacatccttcaactgggctctcttgttaataggacatcatatggtaatagactggtttgactatattgttagctgccacagtaagcaggtcattgtataggtaaatgcctgcacccataattttctagtaatagccacgaccaatttattaacagtcagggcctatccttgcctgtagttctcagtcactggatgcacaaaatcactgtgtaacattggctcacttggtgagcatagggttgactgataaaatgtttaattcccttgctagcttgtgagaagaatgagttgatgacatgctccataccagtggctagatggagtattaaggtggagcagaaaagaagtgagaacatcttgattcccctttcttttacttgatggtgtttatgaacatgccgtagtgcctttatggccagtttgagtcctgcctactttgacttttacgttcccattcctgtgttaccaccttcctcccgatttgttcacctattttgtgctttaaatctcaataaaatacttactgagggaaa

SEQ ID NO: 27651 - DNA, 2489 bp, Homo sapiens
  source 1..2489: mol_type = unassigned DNA
agtctcttcagttccttccgcgtcgtttcttggctgtttccgcccagctcctttgtgccgcgcagaacaacgagatgacgcatgcgcaaagcgcagcggccgcatatataaacgcgaacccgggctcttcctcgtagtgccgccgggactcttggcgggtgaaggtgtgtgtcagcttttgcgtcactcgagccctgggcgctgcttgctaaagagccgagcacgcgggtctgtcatcatgtcgcgttacgggcggtacggaggagaaaccaaggtgtatgttggtaacctgggaactggcgctggcaaaggagagttagaaagggctttcagttattatggtcctttaagaactgtatggattgcgagaaatcctccaggatttgcctttgtggaattcgaagatcctagagatgcagaagatgcagtacgaggactggatggaaaggtgatttgtggctcccgagtgagggttgaactatcgacaggcatgcctcggagatcacgttttgatagaccacctgcccgacgtccctttgatccaaatgatagatgctatgagtgtggcgaaaagggacattatgcttatgattgtcatcgttacagccggcgaagaagaagcaggtcacggtctagatcacattctcgatccagaggaaggcgatactctcgctcacgcagcaggagcaggggacgaaggtcaaggtcagcatctcctcgacgatcaagatctatctctcttcgtagatcaagatcagcttcactcagaagatctaggtctggttctataaaaggatcgaggtatttccaatccccgtcgaggtcaagatcaagatccaggtctatttcacgaccaagaagcagccgatcaaagtccagatctccatctccaaaaagaagtcgttccccatcaggaagtcctcgcagaagtgcaagtcctgaaagaatggactgaagctctcaagttcaccctttagggaaaagttattttgtttacattattataagggatttgtgatgtctgtaaagtgtaacctaggaaagataattcaaccatctaatcaaaatggatctggattactatgtaaattcacagcagtaagataatataaattttgttgaatgtattaacatcatatggtctgaaaatgtgggtttttatttggcacatttaaataaaatgtttctaactagatttttgatttgtgttcaatattaacacttcttaatttgatatatttgagagtcagacattataattgttaaccttattcatacatacctacattcagaattgaaaggtgttggttaagtcttgaacatcactattctatgcataaaacttggccaggatcttaagggactttgaaaattccatcttacccttgtagctctgggtaagatgacctgagtcccttatgatacagcctgaatgcatcatgacagatccttaagttagctaatccgtttgaagttggtgttagtaggtattgtatgatcagtggtgaagcaagtaggaccactgatgtgtctaaatgagcatgacaggaactaaacgaaactgattaaatgtatgagaaatagaaacatttctggatgatctttatactaattgcagctttcaggctactaggtggcatagtgttaattaggactccccaagatatggggagttctactctcaatggtcttgtttctttgctttctacattagttaaccagttttataccaaaaaatgcatgtttgaggaattgtctgaaattgggacaaaacaccttcatgtaaaccagctttgcaaaattttccagcccagatactcttcatctattcaaatggattgtcttattctgagcaaagacctgttgttaatcttcaagctaggttttgcagttcccaaccacaacattcttctattttgccaggctggtgcaaagtaattaaagatgtcaatcagaaatgtcaatgagactaaagtggttttgtaaatctcagctatatttagcaacactccatgtagctaatattttttggtagcatctggtagaccttagaatgttacatagccagtaggttctttattcaaattttaagtatcttaagaatagtagggcagtaacagttacttttgagagttttctggtcaagcttttaccaggcattctctagccttggtacaaaaaaaaaaaaacctgctggttgcgcagatacctaggcttgtccattttatgcatttcagcaaagtcattggatactattgcaacttgggaatactggtctgcatcaagtttattcggtagtttgaccgctagtatgttggaagttatttggattgtttttggaattttgactggctgaattatggttggtataaagttatgtgtataactggcaggcttatttatctgttgcacttggttagctttaattgttctgtattatttaaagataagtttactcaacaataaatctgcagagattgaacaaataa

SEQ ID NO: 27652 - DNA, 1169 bp, Homo sapiens
  source 1..1169: mol_type = unassigned DNA
gtagtgccgccgggactcttggcgggtgaaggtgtgtgtcagcttttgcgtcactcgagccctgggcgctgcttgctaaagagccgagcacgcgggtctgtcatcatgtcgcgttacgggcggtacggaggagaaaccaaggtgtatgttggtaacctgggaactggcgctggcaaaggagagttagaaagggctttcagttattatggtcctttaagaactgtatggattgcgagaaatcctccaggatttgcctttgtggaattcgaagatcctagagatgcagaagatgcagtacgaggactggatggaaaggtgatttgtggctcccgagtgagggttgaactatcgacaggcatgcctcggagatcacgttttgatagaccacctgcccgacgtccctttgatccaaatgatagatgctatgagtgtggcgaaaagggacattatgcttatgattgtcatcgttacagccggcgaagaagaagcaggtcacggtctagatcacattctcgatccagaggaaggcgatactctcgctcacgcagcaggagcaggggacgaaggtcaaggtcagcatctcctcgacgatcaagatctatctctcttcgtagatcaagatcagcttcactcagaagatctaggtctggttctataaaaggatcgaggtatttccaatccccgtcgaggtcaagatcaagatccaggtctatttcacgaccaagaagcagtcgttccccatcaggaagtcctcgcagaagtgcaagtcctgaaagaatggactgaagctctcaagttcaccctttagggaaaagttattttgtttacattattataagggatttgtgatgtctgtaaagtgtaacctaggaaagataattcaaccatctaatcaaaatggatctggattactatgtaaattcacagcagtaagataatataaattttgttgaatgtattaacatcatatggtctgaaaatgtgggtttttatttggcacatttaaataaaatgtttctaactagatttttgatttgtgttcaatattaacacttcttaatttgatatatttgagagtcagacattataattgttaaccttattcatacatacctacattcagaattgaaaggtgttggttaagtcttgaacatcactattctatgcat

SEQ ID NO: 27653 - DNA, 1201 bp, Homo sapiens
  source 1..1201: mol_type = unassigned DNA
cgcagccgcgttctctttaagaggactccttttgcctccgccgaccccttcgcttccgctccgcgttcccacaatgcagtgcggctgagcgcctcggagcccgcggggacgctgcggggggacccgtgctgaggcggcggcggcgacgtgggctgcggcgggcccgcggcgtcgggcggtgcggatgtcgggctgggcggacgagcgcggcggcgagggcgacgggcgcatctacgtggggaaccttccgaccgacgtgcgcgagaaggacttggaggacctgttctacaagtacggccgcatccgcgagatcgagctcaagaaccggcacggcctcgtgcccttcgccttcgtgcgcttcgaggacccccgagatgcagaggatgctatttatggaagaaatggttatgattatggccagtgtcggcttcgtgtggagttccccaggacttatggaggtcggggtgggtggccccgtggtgggaggaatgggcctcctacaagaagatctgatttccgagttcttgtttcaggacttcctccgtcaggcagctggcaggacctgaaggatcacatgcgagaagctggggatgtctgttatgctgatgtgcagaaggatggagtggggatggtcgagtatctcagaaaagaagacatggaatatgccctgcgtaaactggatgacaccaaattccgctctcatgagggtgaaacttcctacatccgagtttatcctgagagaagcaccagctatggctactcacggtctcggtctgggtcaaggggccgtgactctccataccaaagcaggggttccccacactacttctctcctttcaggccctactgagacaggtgatgggaattttttctttattttttaggttaactgagctgctttgtgctcagaatctacattccagattgaggatttagtgtcttaggaaatttttttaattttttttttttaaagaagaaaaaaaactacataatttctaccagggccatattagcagtgaaacattttaaactgcagaaattgtggttttggttcagaaacaagttgtatatttttcacccctgattatgggaaaaaaatcagttctgtctttgtgggttgctctactatggagatcaacagttactgtgactgagtcggcccattctgtttagaaatatattttaaatgtttagtaattga

SEQ ID NO: 27654 - DNA, 6060 bp, Homo sapiens
  source 1..6060: mol_type = unassigned DNA
cggtgggcgggcgcggggacggtcccctggaacgggtccgaggctctcgcaggcagggctgggccgggcaggagctgcgaggccggcacaagggaggcggccctggggacctgacagggcgggggcgggggcgggcacgccgccgcctgcgcggttccgggtgctcccggcgcggcgctgcccagggcacacttgaccgaggtcgggctgcggggaaaggcgggtctggggagaaccccgagagacgcggcgtcctccaactcctcctccttctcctcgcggccgccgaagccacagcccgagcccgagcccgagcccgagccggcgccaccgcgcccccggccatggcttttgccaatttccgccgcatcctgcgcctgtctaccttcgagaagagaaagtcccgcgaatatgagcacgtccgccgcgacctggaccccaacgaggtgtgggagatcgtgggcgagctgggcgacggcgccttcggcaaggtttacaaggccaagaataaggagacgggtgctttggctgcggccaaagtcattgaaaccaagagtgaggaggagctggaggactacatcgtggagattgagatcctggccacctgcgaccacccctacattgtgaagctcctgggagcctactatcacgacgggaagctgtggatcatgattgagttctgtccagggggagccgtggacgccatcatgctggagctggacagaggcctcacggagccccagatacaggtggtttgccgccagatgctagaagccctcaacttcctgcacagcaagaggatcatccaccgagatctgaaagctggcaacgtgctgatgaccctcgagggagacatcaggctggctgactttggtgtgtctgccaagaatctgaagactctacagaaacgagattccttcatcggcacgccttactggatggcccccgaggtggtcatgtgtgagaccatgaaagacacgccctacgactacaaagccgacatctggtccctgggcatcacgctgattgagatggcccagatcgagccgccacaccacgagctcaaccccatgcgggtcctgctaaagatcgccaagtcggaccctcccacgctgctcacgccctctaagtggtctgtagagttccgtgacttcctgaagatagccctggataagaacccagaaacccgacccagtgccgcgcagctgctggagcatcccttcgtcagcagcatcaccagtaacaaggctctgcgggagctggtggctgaggccaaggccgaggtgatggaagagatcgaagacggccgggatgagggggaagaggaggacgccgtggatgccgcctccaccctggagaaccatactcagaactcctctgaggtgagtccgccaagcctcaatgctgacaagcctctcgaggagtcaccttccaccccgctggcacccagccagtctcaggacagtgtgaatgagccctgcagccagccctctggggacagatccctccaaaccaccagtcccccagtcgtggcccctggaaatgagaacggcctggcagtgcctgtgcccctgcggaagtcccgacccgtgtcaatggatgccagaattcaggtagcccaggagaagcaagttgctgagcagggtggggacctcagcccagcagccaacagatctcaaaaggccagccagagccggcccaacagcagcgccctggagaccttgggtggggagaagctggccaatggcagcctggagccacctgcccaggcagctccagggccttccaagagggactcggactgcagcagcctctgcacctctgagagcatggactatggtaccaatctctccactgacctgtcgctgaacaaagagatgggctctctgtccatcaaggacccgaaactgtacaaaaaaaccctcaagcggacacgcaaatttgtggtggatggtgtggaggtgagcatcaccacctccaagatcatcagcgaagatgagaagaaggatgaggagatgagatttctcaggcgccaggaactccgagagcttcggctgctccagaaagaagagcatcggaaccagacccagctgagtaacaagcatgagctgcagctggagcaaatgcataaacgttttgaacaggaaatcaacgccaagaagaagttctttgacacggaattagagaacctggagcgtcagcaaaagcagcaagtggagaagatggagcaagaccatgccgtgcgccgccgggaggaggccaggcggatccgcctggagcaggatcgggactacaccaggttccaagagcagctcaaactgatgaagaaagaggtgaagaacgaggtggagaagctcccccgacagcagcggaaggaaagcatgaagcagaagatggaggagcacacgcagaaaaagcagcttcttgaccgggactttgtagccaagcagaaggaggacctggagctggccatgaagaggctcaccaccgacaacaggcgggagatctgtgacaaggagcgcgagtgcctcatgaagaagcaggagctccttcgagaccgggaagcagccctgtgggagatggaagagcaccagctgcaggagaggcaccagctggtgaagcagcagctcaaagaccagtacttcctccagcggcacgagctgctgcgcaagcatgagaaggagcgggagcagatgcagcgctacaaccagcgcatgatagagcagctgaaggtgcggcagcaacaggaaaaggcgcggctgcccaagatccagaggagtgagggcaagacgcgcatggccatgtacaagaagagcctccacatcaacggcgggggcagcgcagctgagcagcgtgagaagatcaagcagttctcccagcaggaggagaagaggcagaagtcggagcggctgcagcaacagcagaaacacgagaaccagatgcgggacatgctggcgcagtgtgagagcaacatgagcgagctgcagcagctgcagaatgaaaagtgccacctcctggtagagcacgaaacccagaaactgaaggccctggatgagagccataaccagaacctgaaggaatggcgggacaagcttcggccgcgcaagaaggctctggaagaggatctgaaccagaagaagcgggagcaggagatgttcttcaagctgagcgaggaggcggagtgcccaaacccctccaccccaagcaaggccgccaagttcttcccctacagttctgcggatgcttcttaacaaccgcccggggctgtggctggcagcttggtgggccccagggccttctccttcattctctgtgaacatgtaactcaggaccccttttccctcttgcgtctgtgccagctcaaatccagcccctcgccctgtgccaccccaactgtgcctgatagacctgccccagcgttcctgacttcttgctggcctgtggagggtgaggtgtaattatttgtcacctgaacctaatgtatattctccttgagccccagatcccttcaagctggaagggatggggctgttggtggggtcagggtccaagaggaatgggtgttctgtggcctcgagtcctctcctgtttgcgaaaataccagttttgctctctgtgggacaaagcactgctgatgaagtccccgtgggctcatccgggctggaattcttggtttttcagccattccctgcagagtcactcaatcatcaagtccctcacagccatttctgttcccagaggagccaggcctgcagctggctgctcaggagatggcctcattcctcctgttctcccagtttgctttccacttaagacaaagccttgtctatgtggggggcggggaccggggaaagagggaggctgaaatgtttattctgcttctcccgtgtttcatgccatctcgcgtcccccttcctgcacatgggtgtgaatgcacacacatacgcgtacacacaggacttggtctgctggcctggcctcttctgcccaggtgggttggaacacgtttgctgcctgagcctgtgccactgagcatgttaggtggagcagttggtgtggcacgtgcggggtgttggcaccggaggcatggaaaagcacaggctgtactgccaggctgcgatgcgtgctggcccccgcacaggctcctgtgtgcagggactgattcctcagcacacgaggcttccacaacccagtctgctccatagcactctggcccaccctgtctgcaggtgaaacaggagggctgtttgcctctgccccatccccccgactgtgttcaggagtcccaccttgcatttcagacctgggctggcagtctgttggacttctcttcaggaagaaaaagcatcagggggaaatggaatgcccctgccccaggaacatggcagaagcacaggttctgtacctcagatggactcctgctgggccttcggggtctcagttggcttcccccagattctgattctacagctgcagaatgtatataacgcaataaaagcaaatgtttgaaccagtatgcgggtttacttacaaggaaaccttttttcaccctgatttctaattattttattgaaacaactataaaatgtatggtttctccaggaagatatctgctttttaaaacaacaaacaagaacaacaacacaaaactggtaatgatttggagtaatcatgcgggcatattgagtctgggtagtgtttcgctggtggtagagtggttgagacttcctgggaggactttttccgccttcactcctacagatttaagattctttatttttaggccgggcatggtgactcacctgaggtgaggagttcgagactagcctggccaacatggcaaaaccctgtctctactaaaagtacaaaaattagccaggcgtggtggtgcatgcctataatcccagctactcgggaggctgaggcaggagaatcgcttgaacccaggaggcagaggttgcagtaagccaaggtcacaccactgcactccagcctaggtgacagggcgagactctgtctctcaaaaaaaaaaaaaaaaaaaattctttgagacagggtctctaatatgttgcccaagctgatctcaaactcgtggctcaactgattctcccgcttcaaccttgagtagctgggacgacagatacatgctactgcacccagctaggttaaggttctgtatactctgtctttctaaagcaattccctggaaattttctcaacattggttataactgaatgcttgggaagggaggggcagcccttcaacaggaaaaggggactgcccaaatcttaaatgcacagtcaagattctcttggagctagcaatggttctcaggttagtgagcatttagcttgcctgctgcagaatttgacccagatgggggtgttttttaggtctctcacaaatgagacaagcgaaacaattgtctccttttattctctttggtgcattggtgctggggaaacatgaactagcggcagtgtaactgcagaacatagacccagttctaccaggccaggccagcgttgggaaccaccagacagggctgctttgggctttgcttacagtatttccatgtgtagcctggcgtgtgagaaagtattaggtgaaatgccagtttcatggttcaggtgaaagtctgtgatcattcccctcgtggctcgtccttcacatcacttttgcccttcaaggagttgccgcgtccccgctcagtgccgcctgagccctcagagctcccctgtgcttttctggatggggactggcggggtcacctagcctcaccgtggagccaccgtgcaatgcccatctctgagaggcccacgcggtattcctcgtgccctgtgttagtgctttctgtataagggacagacagaactgggtttttttcctctgtctggttttagagtaaatgtaactaacttttattttccctttatgaaagatagaaattatttttatgtagtttccagactttatacaaaatttttgtaaaatgttctctggaaagttaactacaagaatgtaaatatgcttctaataaaataacaaggttatttgcc

SEQ ID NO: 27655 - DNA, 2962 bp, Homo sapiens
  source 1..2962: mol_type = unassigned DNA
gggcgggcacgccgccgcctgcgcggttccgggtgctcccggcgcggcgctgcccatggcttttgccaatttccgccgcatcctgcgcctgtctaccttcgagaagagaaagtcccgcgaatatgagcacgtccgccgcgacctggaccccaacgaggtgtgggagatcgtgggcgagctgggcgacggcgccttcggcaaggtttacaaggccaagaataaggagacgggtgctttggctgcggccaaagtcattgaaaccaagagtgaggaggagctggaggactacatcgtggagattgagatcctggccacctgcgaccacccctacattgtgaagctcctgggagcctactatcacgacgggaagctgtggatcatgattgagttctgtccagggggagccgtggacgccatcatgctggagctggacagaggcctcacggagccccagatacaggtggtttgccgccagatgctagaagccctcaacttcctgcacagcaagaggatcatccaccgagatctgaaagctggcaacgtgctgatgaccctcgagggagacatcaggctggctgactttggtgtgtctgccaagaatctgaagactctacagaaacgagattccttcatcggcacgccttactggatggcccccgaggtggtcatgtgtgagaccatgaaagacacgccctacgactacaaagccgacatctggtccctgggcatcacgctgattgagatggcccagatcgagccgccacaccacgagctcaaccccatgcgggtcctgctaaagatcgccaagtcggaccctcccacgctgctcacgccctctaagtggtctgtagagttccgtgacttcctgaagatagccctggataagaacccagaaacccgacccagtgccgcgcagctgctggagcatcccttcgtcagcagcatcaccagtaacaaggctctgcgggagctggtggctgaggccaaggccgaggtgatggaagagatcgaagacggccgggatgagggggaagaggaggacgccgtggatgccgcctccaccctggagaaccatactcagaactcctctgaggtgagtccgccaagcctcaatgctgacaagcctctcgaggagtcaccttccaccccgctggcacccagccagtctcaggacagtgtgaatgagccctgcagccagccctctggggacagatccctccaaaccaccagtcccccagtcgtggcccctggaaatgagaacggcctggcagtgcctgtgcccctgcggaagtcccgacccgtgtcaatggatgccagaattcaggtagcccaggagaagcaagttgctgagcagggtggggacctcagcccagcagccaacagatctcaaaaggccagccagagccggcccaacagcagcgccctggagaccttgggtggggagaagctggccaatggcagcctggagccacctgcccaggcagctccagggccttccaagagggactcggactgcagcagcctctgcacctctgagagcatggactatggtaccaatctctccactgacctgtcgctgaacaaagagatgggctctctgtccatcaaggacccgaaactgtacaaaaaaaccctcaagcggacacgcaaatttgtggtggatggtgtggaggtgagcatcaccacctccaagatcatcagcgaagatgagaagaaggatgaggagatgagatttctcaggcgccaggaactccgagagcttcggctgctccagaaagaagagcatcggaaccagacccagctgagtaacaagcatgagctgcagctggagcaaatgcataaacgttttgaacaggaaatcaacgccaagaagaagttctttgacacggaattagagaacctggagcgtcagcaaaagcagcaagtggagaagatggagcaagaccatgccgtgcgccgccgggaggaggccaggcggatccgcctggagcaggatcgggactacaccaggttccaagagcagctcaaactgatgaagaaagaggtgaagaacgaggtggagaagctcccccgacagcagcggaaggaaagcatgaagcagaagatggaggagcacacgcagaaaaagcagcttcttgaccgggactttgtagccaagcagaaggaggacctggagctggccatgaagaggctcaccaccgacaacaggcgggagatctgtgacaaggagcgcgagtgcctcatgaagaagcaggagctccttcgagaccgggaagcagccctgtgggagatggaagagcaccagctgcaggagaggcaccagctggtgaagcagcagctcaaagaccagtacttcctccagcggcacgagctgctgcgcaagcatgagaaggagcgggagcagatgcagcgctacaaccagcgcatgatagagcagctgaaggtgcggcagcaacaggaaaaggcgcggctgcccaagatccagaggagtgagggcaagacgcgcatggccatgtacaagaagagcctccacatcaacggcgggggcagcgcagctgagcagcgtgagaagatcaagcagttctcccagcaggaggagaagaggcagaagtcggagcggctgcagcaacagcagaaacacgagaaccagatgcgggacatgctggcgcagtgtgagagcaacatgagcgagctgcagcagctgcagaatgaaaagtgccacctcctggtagagcacgaaacccagaaactgaaggccctggatgagagccataaccagaacctgaaggaatggcgggacaagcttcggccgcgcaagaaggctctggaagaggatctgaaccagaagaagcgggagcaggagatgttcttcaagctgagcgaggaggcggagtgcccaaacccctccaccccaagcaaggccgccaagttcttcccctacagttctgcggatgcttcttaa

SEQ ID NO: 27656 - DNA, 3601 bp, Homo sapiens
  source 1..3601: mol_type = unassigned DNA
gataggcgccgggcagctgagctggtaggaggaccagacggggaggttcggctccgccccccagcgtcccgtggccatgacgaccgctcagagggactccctgttgtggaagctcgcggggttgctgcgggagtccggggatgtggtcctgtctggctgtagcaccctgagcctgctgactcccacactgcaacagctgaaccacgtatttgagctgcacctggggccatggggccctggccagacaggctttgtggctctgccctcccatcctgccgactcccctgttattcttcagcttcagtttctcttcgatgtgctgcagaaaacactttcactcaagctggtccatgttgctggtcctggccccacagggcccatcaagattttccccttcaaatcccttcggcacctggagctccgaggtgttcccctccactgtctgcatggcctccgaggcatctactcccagctggagaccctgatttgcagcaggagcctccaggcattagaggagctcctctcagcctgcggcggcgacttctgctctgccctcccttggctggctctgctttctgccaacttcagctacaatgcactgaccgccttagacagctccctgcgcctcttgtcagctctgcgtttcttgaacctaagccacaatcaagtccaggactgtcagggattcctgatggatttgtgtgagctccaccatctggacatctcctataatcgcctgcatttggtgccaagaatgggaccctcaggggctgctctgggggtcctgatactgcgaggcaatgagcttcggagcctgcatggcctagagcagctgaggaatctgcggcacctggatttggcatacaacctgctggaaggacaccgggagctgtcaccactgtggctgctggctgagctccgcaagctctacctggaggggaaccctctttggttccaccctgagcaccgagcagccactgcccagtacttgtcaccccgggccagggatgctgctactggcttccttctcgatggcaaggtcttgtcactgacagattttcagactcacacatccttggggctcagccccatgggcccacctttgccctggccagtggggagtactcctgaaacctcaggtggccctgacctgagtgacagcctctcctcagggggtgttgtgacccagcccctgcttcataaggttaagagccgagtccgtgtgaggcgggcaagcatctctgaacccagtgatacggacccggagccccgaactctgaacccctctccggctggatggttcgtgcagcagcacccggagctggagctcatgagcagcttccgggaacggttcggccgcaactggctgcagtacaggagtcacctggagccctccggaaaccctctgccggccacccccactacttctgcacccagtgcacctccagccagctcccagggccccgacactgcacccagaccttcacccccgcaggaggaagccagaggcccccaggagtcaccacagaaaatgtcagaggaggtcagggcggagccacaggaggaggaagaggagaaggaggggaaggaggagaaggaggagggggagatggtggaacagggagaagaggaggcaggagaggaggaagaagaggagcaggaccagaaggaagtggaagcggaactctgtcgccccttgttggtgtgtcccctggaggggcctgagggcgtacggggcagggaatgctttctcagggtcacttctgcccacctgtttgaggtggaactccaagcagctcgcaccttggagcgactggagctccagagtctggaggcagctgagatagagccggaggcccaggcccagaggtcgcccaggcccacgggctcagatctgctccctggagcccccatcctcagtctgcgcttctcctacatctgccctgaccggcagttgcgtcgctatttggtgctggagcctgatgcccacgcagctgtccaggagctgcttgccgtgttgaccccagtcaccaatgtggctcgggaacagcttggggaggccagggacctcctgctgggtagattccagtgtctacgctgtggccatgagttcaagccagaggagcccaggatgggattagacagtgaggaaggctggaggcctctgttccaaaagacagaatctcctgctgtgtgtcctaactgtggtagtgaccacgtggttctcctcgctgtgtctcggggaacccccaacagggagcggaaacagggagagcagtctctggctccttctccgtctgccagccctgtctgccaccctcctggccatggtgaccaccttgacagggccaagaacagcccacctcaggcaccgagcacccgtgaccatggtagttggagcctcagtcccccccctgagcgctgtggcctccgctctgtggaccaccgactccggctcttcctggatgttgaggtgttcagcgatgcccaggaggagttccagtgctgcctcaaggtgccagtggcattggcaggccacactggggagttcatgtgccttgtggttgtgtctgaccgcaggctgtacctgttgaaggtgactggggagatgcgtgagcctccagctagctggctgcagctgaccctggctgttcccctgcaggatctgagtggcatagagctgggcctggcaggccagagcctgcggctagagtgggcagctggggcgggccgctgtgtgctgctgccccgagatgccaggcattgccgggccttcctagaggagctccttgatgtcttgcagtctctgccccctgcctggaggaactgtgtcagtgccacagaggaggaggtcaccccccagcaccggctctggccattgctggaaaaagactcatccttggaggctcgccagttcttctaccttcgggcgttcctggttgaaggcccttccacctgcctcgtatccctgttgctgactccgtccaccctgttcctgttagatgaggatgctgcagggtccccggcagagccctctcctccagcagcatctggcgaagcctctgagaaggtgcctccctcggggccgggccctgctgtgcgtgtcagggagcagcagccactcagcagcctgagctccgtgctgctctaccgctcagcccctgaggacttgcggctgctcttctacgatgaggtgtcccggctggagagcttttgggcactccgtgtggtgtgtcaggagcagctgacagccctgcttgcctggatccgggaaccatgggaggagctgttttccatcggactccggacagtgatccaagaggcgctggcccttgaccgatgagggtcccacgctgaccttggccctgacctcaggagccacgctgtagacattccctctcctggtctctgggtctggcttccaggctctggctgtggatgtcttcagcctctgggtgctggccagtgaggtcccaaatgacccagggcttaagggagaggcgagagaatgatctggcctcaggggacaggccacctggtcaggaggaatatttttcctgcactttttctcaggtatcaataaagttgtttccaactcata

SEQ ID NO: 27657 - DNA, 2211 bp, Homo sapiens
  source 1..2211: mol_type = unassigned DNA
atcattgataggcgccgggcagctgagctggtaggaggaccagacggggaggttcggctccgccccccagcgtcccgtggccatgacgaccgctcagagggactccctgttgtggaagctcgcggggttgctgcgggagtccggggatgtggtcctgtctggctgtagcaccctgagcctgctgactcccacactgcaacagctgaaccacgtatttgagctgcacctggggccatggggccctggccagacaggctttgtggctctgccctcccatcctgccgactcccctgttattcttcagcttcagtttctcttcgatgtgctgcagaaaacactttcactcaagctggtccatgttgctggtcctggccccacagggcccatcaagattttccccttcaaatcccttcggcacctggagctccgaggtgttcccctccactgtctgcatggcctccgaggcatctactcccagctggagaccctgatttgcagcaggagcctccaggcattagaggagctcctctcagcctgcggcggcgacttctgctctgccctcccttggctggctctgctttctgccaacttcagctacaatgcactgaccgccttagacagctccctgcgcctcttgtcagctctgcgtttcttgaacctaagccacaatcaagtccaggactgtcagggattcctgatggatttgtgtgagctccaccatctggacatctcctataatcgcctgcatttggtgccaagaatgggaccctcaggggctgctctgggggtcctgatactgcgaggcaatgagcttcggagcctgcatggcctagagcagctgaggaatctgcggcacctggatttggcatacaacctgctggaaggacaccgggagctgtcaccactgtggctgctggctgagctccgcaagttccttctcgatggcaaggtcttgtcactgacagattttcagactcacacatccttggggctcagccccatgggcccacctttgccctggccagtggggagtactcctgaaacctcaggtggccctgacctgagtgacagcctctcctcagggggtgttgtgacccagcccctgcttcataaggttaagagccgagtccgtgtgaggcgggcaagcatctctgaacccagtgatacggacccggagccccgaactctgaacccctctccggctggatggttcgtgcagcagcacccggagctggagctcatgagcagcttccgggaacggttcggccgcaactggctgcagtacaggagtcacctggagccctccggaaaccctctgccggccacccccactacttctgcacccagtgcacctccagccagctcccagggccccgacactgcacccagaccttcacccccgcaggaggaagccagaggcccccaggagtcaccacagaaaatgtcagaggaggtcagggcggagccacaggaggaggaagaggagaaggaggggaaggaggagaaggaggagggggagatggtggaacagggagaagaggaggcaggagaggaggaagaagaggagcaggaccagaaggaagtggaagcggaactctgtcgccccttgttggtgtgtcccctggaggggcctgagggcgtacggggcagggaatgctttctcagggtcacttctgcccacctgtttgaggtggaactccaagcagctcgcaccttggagcgactggagctccagagtctggaggcagctgagatagagccggaggcccaggcccagaggtcgcccaggcccacgggctcagatctgctccctggagcccccatcctcagtctgcgcttctcctacatctgccctgaccggcagttgcgtcgctatttggtgctggagcctgatgcccacgcagctgtccaggtgatggcgcccagagtgggggcccaggaggctgtggggattaagagagccagagggaagtggcagcaggcctgagggccgggggcctgtgggaggtgtccgtctggggtccgcctgctcacagctgcctctgatccaccctctgtcaggagctgcttgccgtgttgaccccagtcaccaatgtggctcgggaacagcttggggaggccagggacctcctgctgggtagattccagtgtctacgctgtggccatgagttcaagccagaggagcccaggatgggattagacagtgaggaa

SEQ ID NO: 27658 - DNA, 1663 bp, Homo sapiens
  source 1..1663: mol_type = unassigned DNA
ctgcctctttccttgcccttcacccaccctccctccaggtcctccaaatgcagtgaggttaggaaggacgtctgcgctcagatcaagaatccagttacctcaaagctccccaacttccacctccgcagagctatgacgtcatggcaggcacgccagaggccgaaggatgcaaaagtggttttctgctttcgatgatgcaatcattcagcgacagtggcgggcaaacccctcccggggcgggggaggtgtgagcttcacgaaggaggttgacaccaacgtggccaccggcgcccctccacgccgccaacgagtccccgggcgtgcgtgcccttggagggagccaatccgcggccggcgtggggcccggcctggcggaggtgatgctggagggacgcccggggagaccgtacgtcactgctctgcgccggaagaccctattttcaggttctcttccctccattcctaccccttccccggtaccataaaatcccgggatatgagctggaagaggcatcacctgatcccggagacctttggagttaagaggcggcggaagcgagggcctgtggagtcggatcctcttcggggtgagccagggtcggcgcgcgcggctgtctcagaactcatgcagctgttcccgcgaggcctgtttgaggacgcgctgccgcccatcgtgctgaggagccaggtgtacagccttgtgcctgacaggaccgtggccgaccggcagctgaaggagcttcaagagcagggggagatcagaatcgtccagctgggcttcgacttggatgcccatggaattatcttcactgaggactacaggaccagagtcctcaaggcctgtgatggccgaccgtatgctggggcagtgcagaaatttctagcttcagtacttccagcctgtggggaccttagtttccagcaggaccaaatgacacagacctttggcttcagggactcagaaatcacgcatctggtgaatgctggagtcctcaccgtccgagatgctgggagctggtggctagctgtgcctggagctgggagattcatcaagtactttgttaaagggcgccaggctgtccttagcatggtccggaaggcaaagtaccgggaactgctcctatcagagctcctgggccggcgggcgcctgtcgtggtgcggcttggcctcacctaccatgtgcacgacctcattggggcccagctagtggactgcatctctaccacttcaggaaccctcctccgcctgccagagacatgaagattctgctcatcattgctcagctcctcagagtgggccgggaggggactagaagagctgcatgatggtggctgagacagggtcaccttgggaaggcttgggagccaggatgagtgtcgggctctcgtgtgtgcaaaaggtcagatgtgactgctgctgtttgcctggtttctgacccagtggtggggtttgagcaatgcttctctgcccttccatggaaagtggaaccagaaatggtgccaaggctgtggctgttccctttcgtgtaaaatggtgctgttattactctgtcttgaaataggaaggtgggatttctggggaggctggtgaaggagggcagggttcttttctctacgtgtcatgttaaaattgccaaataaagtacctctgcctgtgatattt

SEQ ID NO: 27659 - DNA, 1557 bp, Homo sapiens
  source 1..1557: mol_type = unassigned DNA
cttccacctccgcagagctatgacgtcatggcaggcacgccagaggccgaaggatgcaaaagtggttttctgctttcgatgatgcaatcattcagcgacagtggcgggcaaacccctcccggggcgggggaggtgtgagcttcacgaaggaggttgacaccaacgtggccaccggcgcccctccacgccgccaacgagtccccgggcgtgcgtgcccttggagggagccaatccgcggccggcgtggggcccggcctggcggaggtgatgctggagggacgcccggggagaccgtacgtcactgctctgcgccggaagaccctattttcaggttctcttccctccattcctaccccttccccggtaccataaaatcccgggatatgagctggaagaggcatcacctgatcccggagacctttggagttaagaggcggcggaagcgagggcctgtggagtcggatcctcttcggggtgagccagggtcggcgcgcgcggctgtctcagaactcatgcagctgttcccgcgaggcctgtttgaggacgcgctgccgcccatcgtgctgaggagccaggtgtacagccttgtgcctgacaggaccgtggccgaccggcagctgaaggagcttcaagagcagggggagatcagaatcgtccagctgggcttcgacttggatgcccatggaattatcttcactgaggactacaggaccagagtatgtgactgtgtcctcaaggcctgtgatggccgaccgtatgctggggcagtgcagaaatttctagcttcagtacttccagcctgtggggaccttagtttccagcaggaccaaatgacacagacctttggcttcagggactcagaaatcacgcatctggtgaatgctggagtcctcaccgtccgagatgctgggagctggtggctagctgtgcctggagctgggagattcatcaagtactttgttaaagggcgccaggctgtccttagcatggtccggaaggcaaagtaccgggaactgctcctatcagagctcctgggccggcgggcgcctgtcgtggtgcggcttggcctcacctaccatgtgcacgacctcattggggcccagctagtggactgcatctctaccacttcaggaaccctcctccgcctgccagagacatgaagattctgctcatcattgctcagctcctcagagtgggccgggaggggactagaagagctgcatgatggtggctgagacagggtcaccttgggaaggcttgggagccaggatgagtgtcgggctctcgtgtgtgcaaaaggtcagatgtgactgctgctgtttgcctggtttctgacccagtggtggggtttgagcaatgcttctctgcccttccatggaaagtggaaccagaaatggtgccaaggctgtggctgttccctttcgtgtaaaatggtgctgttattactctgtcttgaaataggaaggtgggatttctggggaggctggtgaaggagggcagggttcttttctctacgtgtcatgttaaaattgccaaataaagtacctctgcctgtga

SEQ ID NO: 27660 - DNA, 1557 bp, Homo sapiens
  source 1..1557: mol_type = unassigned DNA
cttccacctccgcagagctatgacgtcatggcaggcacgccagaggccgaaggatgcaaaagtggttttctgctttcgatgatgcaatcattcagcgacagtggcgggcaaacccctcccggggcgggggaggtgtgagcttcacgaaggaggttgacaccaacgtggccaccggcgcccctccacgccgccaacgagtccccgggcgtgcgtgcccttggagggagccaatccgcggccggcgtggggcccggcctggcggaggtgatgctggagggacgcccggggagaccgtacgtcactgctctgcgccggaagaccctattttcaggttctcttccctccattcctaccccttccccggtaccataaaatcccgggatatgagctggaagaggcatcacctgatcccggagacctttggagttaagaggcggcggaagcgagggcctgtggagtcggatcctcttcggggtgagccagggtcggcgcgcgcggctgtctcagaactcatgcagctgttcccgcgaggcctgtttgaggacgcgctgccgcccatcgtgctgaggagccaggtgtacagccttgtgcctgacaggaccgtggccgaccggcagctgaaggagcttcaagagcagggggagatcagaatcgtccagctgggcttcgacttggatgcccatggaattatcttcactgaggactacaggaccagagtatgtgactgtgtcctcaaggcctgtgatggccgaccgtatgctggggcagtgcagaaatttctagcttcagtacttccagcctgtggggaccttagtttccagcaggaccaaatgacacagacctttggcttcagggactcagaaatcacgcatctggtgaatgctggagtcctcaccgtccgagatgctgggagctggtggctagctgtgcctggagctgggagattcatcaagtactttgttaaagggcgccaggctgtccttggcatggtccggaaggcaaagtaccgggaactgctcctatcagagctcctgggccggcgggcgcctgtcgtggtgcggcttggcctcacctaccatgtgcacgacctcattggggcccagctagtggactgcatctctaccacttcaggaaccctcctccgcctgccagagacatgaagattctgctcatcattgctcagctcctcagagtgggccgggaggggactagaagagctgcatgatggtggctgagacagggtcaccttgggaaggcttgggagccaggatgagtgtcgggctctcgtgtgtgcaaaaggtcagatgtgactgctgctgtttgcctggtttctgacccagtggtggggtttgagcaatgcttctctgcccttccatggaaagtggaaccagaaatggtgccaaggctgtggctgttccctttcgtgtaaaatggtgctgttattactctgtcttgaaataggaaggtgggatttctggggaggctggtgaaggagggcagggttcttttctctacgtgtcatgttaaaattgccaaataaagtacctctgcctgtga

SEQ ID NO: 27661 - DNA, 1620 bp, Homo sapiens
  source 1..1620: mol_type = unassigned DNA
gtcctccaaatgcagtgaggttaggaaggacgtctgcgctcagatcaagaatccagttacctcaaagctccccaacttccacctccgcagagctatgacgtcatggcaggcacgccagaggccgaaggatgcaaaagtggttttctgctttcgatgatgcaatcattcagcgacagtggcgggcaaacccctcccggggcgggggaggtgtgagcttcacgaaggaggttgacaccaacgtggccaccggcgcccctccacgccgccaacgagtccccgggcgtgcgtgcccttggagggagccaatccgcggccggcgtggggcccggcctggcggaggtgatgctggagggacgcccggggagaccgtacgtcactgctctgcgccggaagaccctattttcaggttctcttccctccattcctaccccttccccggtaccataaaatcccgggatatgagctggaagaggcatcacctgatcccggagacctttggagttaagaggcggcggaagcgagggcctgtggagtcggatcctcttcggggtgagccagggtcggcgcgcgcggctgtctcagaactcatgcagctgttcccgcgaggcctgtttgaggacgcgctgccgcccatcgtgctgaggagccaggtgtacagccttgtgcctgacaggaccgtggccgaccggcagctgaaggagcttcaagagcagggggagatcagaatcgtccagctgggcttcgacttggatgcccatggaattatcttcactgaggactacaggaccagagtcctcaaggcctgtgatggccgaccgtatgctggggcagtgcagaaatttctagcttcagtacttccagcctgtggggaccttagtttccagcaggaccaaatgacacagacctttggcttcagggactcagaaatcacgcatctggtgaatgctggagtcctcaccgtccgagatgctgggagctggtggctagctgtgcctggagctgggagattcatcaagtactttgttaaagggcgccaggctgtccttggcatggtccggaaggcaaagtaccgggaactgctcctatcagagctcctgggccggcgggcgcctgtcgtggtgcggcttggcctcacctaccatgtgcacgacctcattggggcccagctagtggactgcatctctaccacttcaggaaccctcctccgcctgccagagacatgaagattctgctcatcattgctcagctcctcagagtgggccgggaggggactagaagagctgcatgatggtggctgagacagggtcaccttgggaaggcttgggagccaggatgagtgtcgggctctcgtgtgtgcaaaaggtcagatgtgactgctgctgtttgcctggtttctgacccagtggtggggtttgagcaatgcttctctgcccttccatggaaagtggaaccagaaatggtgccaaggctgtggctgttccctttcgtgtaaaatggtgctgttattactctgtcttgaaataggaaggtgggatttctggggaggctggtgaaggagggcagggttcttttctctacgtgtcatgttaaaattgccaaataaagtacctctgcctgtga

SEQ ID NO: 27662 - DNA, 1620 bp, Homo sapiens
  source 1..1620: mol_type = unassigned DNA
gtcctccaaatgcagtgaggttaggaaggacgtctgcgctcagatcaagaatccagttacctcaaagctccccaacttccacctccgcagagctatgacgtcatggcaggcacgccagaggccgaaggatgcaaaagtggttttctgctttcgatgatgcaatcattcagcgacagtggcgggcaaacccctcccggggcgggggaggtgtgagcttcacgaaggaggttgacaccaacgtggccaccggcgcccctccacgccgccaacgagtccccgggcgtgcgtgcccttggagggagccaatccgcggccggcgtggggcccggcctggcggaggtgatgctggagggacgcccggggagaccgtacgtcactgctctgcgccggaagaccctattttcaggttctcttccctccattcctaccccttccccggtaccataaaatcccgggatatgagctggaagaggcatcacctgatcccggagacctttggagttaagaggcggcggaagcgagggcctgtggagtcggatcctcttcggggtgagccagggtcggcgcgcgcggctgtctcagaactcatgcagctgttcccgcgaggcctgtttgaggacgcgctgccgcccatcgtgctgaggagccaggtgtacagccttgtgcctgacaggaccgtggccgaccggcagctgaaggagcttcaagagcagggggagatcagaatcgtccagctgggcttcgacttggatgcccatggaattatcttcactgaggactacaggaccagagtcctcaaggcctgtgatggccgaccgtatgctggggcagtgcagaaatttctagcttcagtacttccagcctgtggggaccttagtttccagcaggaccaaatgacacagacctttggcttcagggactcagaaatcacgcatctggtgaatgctggagtcctcaccgtccgagatgctgggagctggtggctagctgtgcctggagctgggagattcatcaagtactttgttaaagggcgccaggctgtccttagcatggtccggaaggcaaagtaccgggaactgctcctatcagagctcctgggccggcgggcgcctgtcgtggtgcggcttggcctcacctaccatgtgcacgacctcattggggcccagctagtggactgcatctctaccacttcaggaaccctcctccgcctgccagagacatgaagattctgctcatcattgctcagctcctcagagtgggccgggaggggactagaagagctgcatgatggtggctgagacagggtcaccttgggaaggcttgggagccaggatgagtgtcgggctctcgtgtgtgcaaaaggtcagatgtgactgctgctgtttgcctggtttctgacccagtggtggggtttgagcaatgcttctctgcccttccatggaaagtggaaccagaaatggtgccaaggctgtggctgttccctttcgtgtaaaatggtgctgttattactctgtcttgaaataggaaggtgggatttctggggaggctggtgaaggagggcagggttcttttctctacgtgtcatgttaaaattgccaaataaagtacctctgcctgtga

SEQ ID NO: 27663 - DNA, 1620 bp, Homo sapiens; identical to SEQ ID NO: 27662
  source 1..1620: mol_type = unassigned DNA

SEQ ID NO: 27664 - DNA, 1620 bp, Homo sapiens; identical to SEQ ID NO: 27662
  source 1..1620: mol_type = unassigned DNA

SEQ ID NO: 27665 - DNA, 1557 bp, Homo sapiens; identical to SEQ ID NO: 27659
  source 1..1557: mol_type = unassigned DNA

SEQ ID NO: 27666 - DNA, 1557 bp, Homo sapiens; identical to SEQ ID NO: 27659
  source 1..1557: mol_type = unassigned DNA

SEQ ID NO: 27667 - DNA, 1557 bp, Homo sapiens; identical to SEQ ID NO: 27659
  source 1..1557: mol_type = unassigned DNA

SEQ ID NO: 27668 - DNA, 1620 bp, Homo sapiens; identical to SEQ ID NO: 27662
  source 1..1620: mol_type = unassigned DNA

SEQ ID NO: 27669 - DNA, 1557 bp, Homo sapiens; identical to SEQ ID NO: 27659
  source 1..1557: mol_type = unassigned DNA

SEQ ID NO: 27670 - DNA, 575 bp, Homo sapiens
  source 1..575: mol_type = unassigned DNA
aggctgaaggtctgacacaagcattagtgagatgctcccctcgaagaatagtcttgtttcttctaaggactgattctcaccccggctttggctctcctaattttagagggtcctccaaatgcagtgaggttaggaaggacgtctgcgctcagatcaagaatccagttacctcaaagctccccaacttccacctccgcagagctatgacgtcatggcaggcacgccagaggccgaaggatgcaaaagtggttttctgctttcgatgatgcaatcattcagcgacagtggcgggcaaacccctcccggggcgggggaggtgtgagcttcacgaaggaggttgacaccaacgtggccaccggcgcccctccacgccgccaacgagtccccgggcgtgcgtgcccttggagggagccaatccgcggccggcgtggggcccggcctggcggaggtgatgctggagggacgcccggggagaccgtacgtcactgctctgcgccggaagaccctattttcaggttctcttccctccattcctaccccttccccggtaccataaaatcccgggatatgagctg

SEQ ID NO: 27671 - DNA, 1804 bp, Homo sapiens
  source 1..1804: mol_type = unassigned DNA
gtctgacacaagcattagtgagatgctcccctcgaagaatagtcttgtttcttctaaggactgattctcaccccggctttggctctcctaattttagagggtcctccaaatgcagtgaggttaggaaggacgtctgcgctcagatcaagaatccagttacctcaaagctccccaacttccacctccgcagagctatgacgtcatggcaggcacgccagaggccgaaggatgcaaaagtggttttctgctttcgatgatgcaatcattcagcgacagtggcgggcaaacccctcccggggcgggggaggtgtgagcttcacgaaggaggttgacaccaacgtggccaccggcgcccctccacgccgccaacgagtccccgggcgtgcgtgcccttggagggagccaatccgcggccggcgtggggcccggcctggcggaggtgatgctggtatgtgcgtcgccaccgcccctcccagcactgacgggcctgagggacgacaagttgacgctcctttcgtcatcacctggtctaggagggacgcccggggagaccgtacgtcactgctctgcgccggaagaccctattttcaggttctcttccctccattcctaccccttccccggtaccataaaatcccgggatatgagctggaagaggcatcacctgatcccggagacctttggagttaagaggcggcggaagcgagggcctgtggagtcggatcctcttcggggtgagccagggtcggcgcgcgcggctgtctcagaactcatgcagctgttcccgcgaggcctgtttgaggacgcgctgccgcccatcgtgctgaggagccaggtgtacagccttgtgcctgacaggaccgtggccgaccggcagctgaaggagcttcaagagcagggggagatcagaatcgtccagctgggcttcgacttggatgcccatggaattatcttcactgaggactacaggaccagagtcctcaaggcctgtgatggccgaccgtatgctggggcagtgcagaaatttctagcttcagtacttccagcctgtggggaccttagtttccagcaggaccaaatgacacagacctttggcttcagggactcagaaatcacgcatctggtgaatgctggagtcctcaccgtccgagatgctgggagctggtggctagctgtgcctggagctgggagattcatcaagtactttgttaaagggcgccaggctgtccttggcatggtccggaaggcaaagtaccgggaactgctcctatcagagctcctgggccggcgggcgcctgtcgtggtgcggcttggcctcacctaccatgtgcacgacctcattggggcccagctagtggactgcatctctaccacttcaggaaccctcctccgcctgccagagacatgaagattctgctcatcattgctcagctcctcagagtgggccgggaggggactagaagagctgcatgatggtggctgagacagggtcaccttgggaaggcttgggagccaggatgagtgtcgggctctcgtgtgtgcaaaaggtcagatgtgactgctgctgtttgcctggtttctgacccagtggtggggtttgagcaatgcttctctgcccttccatggaaagtggaaccagaaatggtgccaaggctgtggctgttccctttcgtgtaaaatggtgctgttattactctgtcttgaaataggaaggtgggatttctggggaggctggtgaaggagggcagggttcttttctctacgtgtcatgttaaaattgccaaataaagtacctctgcctgtg

SEQ ID NO: 27672 - DNA, 1804 bp, Homo sapiens
  source 1..1804: mol_type = unassigned DNA
gtctgacacaagcattagtgagatgctcccctcgaagaatagtcttgtttcttctaaggactgattctcaccccggctttggctctcctaattttagagggtcctccaaatgcagtgaggttaggaaggacgtctgcgctcagatcaagaatccagttacctcaaagctccccaacttccacctccgcagagctatgacgtcatggcaggcacgccagaggccgaaggatgcaaaagtggttttctgctttcgatgatgcaatcattcagcgacagtggcgggcaaacccctcccggggcgggggaggtgtgagcttcacgaaggaggttgacaccaacgtggccaccggcgcccctccacgccgccaacgagtccccgggcgtgcgtgcccttggagggagccaatccgcggccggcgtggggcccggcctggcggaggtgatgctggtatgtgcgtcgccaccgcccctcccagcactgacgggcctgagggacgacaagttgacgctcctttcgtcatcacctggtctaggagggacgcccggggagaccgtacgtcactgctctgcgccggaagaccctattttcaggttctcttccctccattcctaccccttccccggtaccataaaatcccgggatatgagctggaagaggcatcacctgatcccggagacctttggagttaagaggcggcggaagcgagggcctgtggagtcggatcctcttcggggtgagccagggtcggcgcgcgcggctgtctcagaactcatgcagctgttcccgcgaggcctgtttgaggacgcgctgccgcccatcgtgctgaggagccaggtgtacagccttgtgcctgacaggaccgtggccgaccggcagctgaaggagcttcaagagcagggggagatcagaatcgtccagctgggcttcgacttggatgcccatggaattatcttcactgaggactacaggaccagagtcctcaaggcctgtgatggccgaccgtatgctggggcagtgcagaaatttctagcttcagtacttccagcctgtggggaccttagtttccagcaggaccaaatgacacagacctttggcttcagggactcagaaatcacgcatctggtgaatgctggagtcctcaccgtccgagatgctgggagctggtggctagctgtgcctggagctgggagattcatcaagtactttgttaaagggcgccaggctgtccttagcatggtccggaaggcaaagtaccgggaactgctcctatcagagctcctgggccggcgggcgcctgtcgtggtgcggcttggcctcacctaccatgtgcacgacctcattggggcccagctagtggactgcatctctaccacttcaggaaccctcctccgcctgccagagacatgaagattctgctcatcattgctcagctcctcagagtgggccgggaggggactagaagagctgcatgatggtggctgagacagggtcaccttgggaaggcttgggagccaggatgagtgtcgggctctcgtgtgtgcaaaaggtcagatgtgactgctgctgtttgcctggtttctgacccagtggtggggtttgagcaatgcttctctgcccttccatggaaagtggaaccagaaatggtgccaaggctgtggctgttccctttcgtgtaaaatggtgctgttattactctgtcttgaaataggaaggtgggatttctggggaggctggtgaaggagggcagggttcttttctctacgtgtcatgttaaaattgccaaataaagtacctctgcctgtg

SEQ ID NO: 27673 - DNA, 1804 bp, Homo sapiens; identical to SEQ ID NO: 27672
  source 1..1804: mol_type = unassigned DNA

SEQ ID NO: 27674 - DNA, 1804 bp, Homo sapiens; identical to SEQ ID NO: 27672
  source 1..1804: mol_type = unassigned DNA

SEQ ID NO: 27675 - DNA, 1804 bp, Homo sapiens; identical to SEQ ID NO: 27672
  source 1..1804: mol_type = unassigned DNA

SEQ ID NO: 27676 - DNA, 1668 bp, Homo sapiens
  source 1..1668: mol_type = unassigned DNA
ccagcggccagcgcgcgcgggcccaggccgcccggctccagcccagcagtagcggcagcagcggcggcggcggcagtgcgcgcgaggccctgcgcccccagcagctcctccctggcgccgtgcatggagacgcggcccgccacccgccgctgagcccccgccgcccggccgggacccgccagggctggggtggcctcgggctccggccggccccgccgcccgagggctgcgcgcggcccgcgggcctcgccgccccgcgcggatcgtcgcggcccggccgtcccgtcccaggaagtggccgtcctgagcgccatggctcactccccggtgcagtcgggcctgcccggcatgcagaacctaaaggcagacccagaagagctttttacaaaactagagaaaattgggaagggctcctttggagaggtgttcaaaggcattgacaatcggactcagaaagtggttgccataaagatcattgatctggaagaagctgaagatgagatagaggacattcaacaagaaatcacagtgctgagtcagtgtgacagtccatatgtaaccaaatattatggatcctatctgaaggatacaaaattatggataataatggaatatcttggtggaggctccgcactagatctattagaacctggcccattagatgaaacccagatcgctactatattaagagaaatactgaaaggactcgattatctccattcggagaagaaaatccacagagacattaaagcggccaacgtcctgctgtctgagcatggcgaggtgaagctggcggactttggcgtggctggccagctgacagacacccagatcaaaaggaacaccttcgtgggcaccccattctggatggcacccgaggtcatcaaacagtcggcctatgactcgaaggcagacatctggtccctgggcataacagctattgaacttgcaagaggggaaccacctcattccgagctgcaccccatgaaagttttattcctcattccaaagaacaacccaccgacgttggaaggaaactacagtaaacccctcaaggagtttgtggaggcctgtttgaataaggagccgagctttagacccactgctaaggagttattgaagcacaagtttatactacgcaatgcaaagaaaacttcctacttgaccgagctcatcgacaggtacaagagatggaaggccgagcagagccatgacgactcgagctccgaggattccgacgcggaaacagatggccaagcctcggggggcagtgattctggggactggatcttcacaatccgagaaaaagatcccaagaatctcgagaatggagctcttcagccatcggacttggacagaaataagatgaaagacatcccgaagaggcctttctctcagtgtttatctacaattatttctcctctgtttgcagagttgaaggagaagagccaggcgtgcggagggaacttggggtccattgaagagctgcgaggggccatctacctagcggaggaggcgtgccctggcatctccgacaccatggtggcccagctcgtgcagcggctccagaggagtatccatgggaaccaagcccctcctgactgccatctggcacaagtgcaggcgtttggaggcagtggatgtgtgctgggaagccgctctgtgtga

SEQ ID NO: 27677 - DNA, 2552 bp, Homo sapiens
  source 1..2552: mol_type = unassigned DNA
ccagcggccagcgcgcgcgggcccaggccgcccggctccagcccagcagtagcggcagcagcggcggcggcggcagtgcgcgcgaggccctgcgcccccagcagctcctccctggcgccgtgcatggagacgcggcccgccacccgccgctgagcccccgccgcccggccgggacccgccagggctggggtggcctcgggctccggccggccccgccgcccgagggctgcgcgcggcccgcgggcctcgccgccccgcgcggatcgtcgcggcccggccgtcccgtcccaggaagtggccgtcctgagcgccatggctcactccccggtgcagtcgggcctgcccggcatgcagaacctaaaggcagacccagaagagctttttacaaaactagagaaaattgggaagggctcctttggagaggtgttcaaaggcattgacaatcggactcagaaagtggttgccataaagatcattgatctggaagaagctgaagatgagatagaggacattcaacaagaaatcacagtgctgagtcagtgtgacagtccatatgtaaccaaatattatggatcctatctgaaggatacaaaattatggataataatggaatatcttggtggaggctccgcactagatctattagaacctggcccattagatgaaacccagatcgctactatattaagagaaatactgaaaggactcgattatctccattcggagaagaaaatccacagagacattaaagcggccaacgtcctgctgtctgagcatggcgaggtgaagctggcggactttggcgtggctggccagctgacagacacccagatcaaaaggaacaccttcgtgggcaccccattctggatggcacccgaggtcatcaaacagtcggcctatgactcgaaggcagacatctggtccctgggcataacagctattgaacttgcaagaggggaaccacctcattccgagctgcaccccatgaaagttttattcctcattccaaagaacaacccaccgacgttggaaggaaactacagtaaacccctcaaggagtttgtggaggcctgtttgaataaggagccgagctttagacccactgctaaggagttattgaagcacaagtttatactacgcaatgcaaagaaaacttcctacttgaccgagctcatcgacaggtacaagagatggaaggccgagcagagccatgacgactcgagctccgaggattccgacgcggaaacagatggccaagcctcggggggcagtgattctggggactggatcttcacaatccgagaaaaagatcccaagaatctcgagaatggagctcttcagccatcggacttggacagaaataagttgaaggagaagagccaggcgtgcggagggaacttggggtccattgaagagctgcgaggggccatctacctagcggaggaggcgtgccctggcatctccgacaccatggtggcccagctcgtgcagcggctccagagatactctctaagtggtggaggaacttcatcccactgaaattcctttggcatttggggttttgtttttccttttttccttcttcatcctcctccttttttaaaagtcaacgagagccttcgctgactccaccgaagaggtgcgccactgggagccaccccagcgccaggcgcccgtccagggacacacacagtcttcactgtgctgcagccagatgaagtctctcagatgggtggggagggtcagctccttccagcgatcattttattttattttattacttttgtttttaattttaaccatagtgcacatattccaggaaagtgtctttaaaaacaaaaacaaaccctgaaatgtatatttgggattatgataaggcaactaaagacatgaaacctcaggtatcctgctttaagttgataactccctctgggagctggagaatcgctctggtggatgggtgtacagatttgtatataatgtcatttttacggaaaccctttcggcgtgcataaggaatcactgtgtacaaactggccaagtgcttctgtagataacgtcagtggagtaaatattcgacaggccataacttgagtctattgccttgcctttattacatgtacattttgaattctgtgaccagtgatttgggttttattttgtatttgcagggtttgtcattaataattaatgcccctctcttacagaacactcctatttgtacctcaacaaatgcaaattttccccgtttgccctacgccccttttggtacacctagaggttgatttcctttttcatcgatggtactatttcttagtgttttaaattggaacatatcttgcctcatgaagctttaaattataattttcagtttctccccatgaagcgctctcgtctgacatttgtttggaatcgtgccactgctggtctgcgccagatgtaccgtcctttccaatacgattttctgttgcaccttgtagtggattctgcatatcatctttcccacctaaaaatgtctgaatgcttacacaaataaattttataacacgctt

SEQ ID NO: 27678 - DNA, 2492 bp, Homo sapiens
  source 1..2492: mol_type = unassigned DNA
tttgggttagggagagtgctttcgtttgttttaaatgggagaaactggagcatgttgccaagggcagagagccagcagagaggggtgaatggaagaaggagcgagaagggggttactgacgaagccttatcctggaggagagaaggatggactccagagcccagctttggggactggccttgaataaaaggagggccactctacctcatcctggagggagcacgaacctaaaggcagacccagaagagctttttacaaaactagagaaaattgggaagggctcctttggagaggtgttcaaaggcattgacaatcggactcagaaagtggttgccataaagatcattgatctggaagaagctgaagatgagatagaggacattcaacaagaaatcacagtgctgagtcagtgtgacagtccatatgtaaccaaatattatggatcctatctgaaggatacaaaattatggataataatggaatatcttggtggaggctccgcactagatctattagaacctggcccattagatgaaacccagatcgctactatattaagagaaatactgaaaggactcgattatctccattcggagaagaaaatccacagagacattaaagcggccaacgtcctgctgtctgagcatggcgaggtgaagctggcggactttggcgtggctggccagctgacagacacccagatcaaaaggaacaccttcgtgggcaccccattctggatggcacccgaggtcatcaaacagtcggcctatgactcgaaggcagacatctggtccctgggcataacagctattgaacttgcaagaggggaaccacctcattccgagctgcaccccatgaaagttttattcctcattccaaagaacaacccaccgacgttggaaggaaactacagtaaacccctcaaggagtttgtggaggcctgtttgaataaggagccgagctttagacccactgctaaggagttattgaagcacaagtttatactacgcaatgcaaagaaaacttcctacttgaccgagctcatcgacaggtacaagagatggaaggccgagcagagccatgacgactcgagctccgaggattccgacgcggaaacagatggccaagcctcggggggcagtgattctggggactggatcttcacaatccgagaaaaagatcccaagaatctcgagaatggagctcttcagccatcggacttggacagaaataagatgaaagacatcccgaagaggcctttctctcagtgtttatctacaattatttctcctctgtttgcagagttgaaggagaagagccaggcgtgcggagggaacttggggtccattgaagagctgcgaggggccatctacctagcggaggaggcgtgccctggcatctccgacaccatggtggcccagctcgtgcagcggctccagagatactctctaagtggtggaggaacttcatcccactgaaattcctttggcatttggggttttgtttttccttttttccttcttcatcctcctccttttttaaaagtcaacgagagccttcgctgactccaccgaagaggtgcgccactgggagccaccccagcgccaggcgcccgtccagggacacacacagtcttcactgtgctgcagccagatgaagtctctcagatgggtggggagggtcagctccttccagcgatcattttattttattttattacttttgtttttaattttaaccatagtgcacatattccaggaaagtgtctttaaaaacaaaaacaaaccctgaaatgtatatttgggattatgataaggcaactaaagacatgaaacctcaggtatcctgctttaagttgataactccctctgggagctggagaatcgctctggtggatgggtgtacagatttgtatataatgtcatttttacggaaaccctttcggcgtgcataaggaatcactgtgtacaaactggccaagtgcttctgtagataacgtcagtggagtaaatattcgacaggccataacttgagtctattgccttgcctttattacatgtacattttgaattctgtgaccagtgatttgggttttattttgtatttgcagggtttgtcattaataattaatgcccctctcttacagaacactcctatttgtacctcaacaaatgcaaattttccccgtttgccctacgccccttttggtacacctagaggttgatttcctttttcatcgatggtactatttcttagtgttttaaattggaacatatcttgcctcatgaagctttaaattataattttcagtttctccccatgaagcgctctcgtctgacatttgtttggaatcgtgccactgctggtctgcgccagatgtaccgtcctttccaatacgattttctgttgcaccttgtagtggattctgcatatcatctttcccacctaaaaatgtctgaatgcttacacaaataaattttataacacgctta

SEQ ID NO: 27679 - DNA, 4345 bp, Homo sapiens
  source 1..4345: mol_type = unassigned DNA
gcccgcgggcctcgccgccccgcgcggatcgtcgcggcccggccgtcccgtcccaggaagtggccgtcctgagcgccatggctcactccccggtgcagtcgggcctgcccggcatgcagaacctaaaggcagacccagaagagctttttacaaaactagagaaaattgggaagggctcctttggagaggtgttcaaaggcattgacaatcggactcagaaagtggttgccataaagatcattgatctggaagaagctgaagatgagatagaggacattcaacaagaaatcacagtgctgagtcagtgtgacagtccatatgtaaccaaatattatggatcctatctgaaggatacaaaattatggataataatggaatatcttggtggaggctccgcactagatctattagaacctggcccattagatgaaacccagatcgctactatattaagagaaatactgaaaggactcgattatctccattcggagaagaaaatccacagagacattaaagcggccaacgtcctgctgtctgagcatggcgaggtgaagctggcggactttggcgtggctggccagctgacagacacccagatcaaaaggaacaccttcgtgggcaccccattctggatggcacccgaggtcatcaaacagtcggcctatgactcgaaggcagacatctggtccctgggcataacagctattgaacttgcaagaggggaaccacctcattccgagctgcaccccatgaaagttttattcctcattccaaagaacaacccaccgacgttggaaggaaactacagtaaacccctcaaggagtttgtggaggcctgtttgaataaggagccgagctttagacccactgctaaggagttattgaagcacaagtttatactacgcaatgcaaagaaaacttcctacttgaccgagctcatcgacaggtacaagagatggaaggccgagcagagccatgacgactcgagctccgaggattccgacgcggaaacagatggccaagcctcggggggcagtgattctggggactggatcttcacaatccgagaaaaagatcccaagaatctcgagaatggagctcttcagccatcggacttggacagaaataagatgaaagacatcccgaagaggcctttctctcagtgtttatctacaattatttctcctctgtttgcagagttgaaggagaagagccaggcgtgcggagggaacttggggtccattgaagagctgcgaggggccatctacctagcggaggaggcgtgccctggcatctccgacaccatggtggcccagctcgtgcagcggctccagagatactctctaagtggtggaggaacttcatcccactgaaattcctttggcatttggggttttgtttttccttttttccttcttcatcctcctccttttttaaaagtcaacgagagccttcgctgactccaccgaagaggtgcgccactgggagccaccccagcgccaggcgcccgtccagggacacacacagtcttcactgtgctgcagccagatgaagtctctcagatgggtggggagggtcagctccttccagcgatcattttattttattttattacttttgtttttaattttaaccatagtgcacatattccaggaaagtgtctttaaaaacaaaaacaaaccctgaaatgtatatttgggattatgataaggcaactaaagacatgaaacctcaggtatcctgctttaagttgataactccctctgggagctggagaatcgctctggtggatgggtgtacagatttgtatataatgtcatttttacggaaaccctttcggcgtgcataaggaatcactgtgtacaaactggccaagtgcttctgtagataacgtcagtggagtaaatattcgacaggccataacttgagtctattgccttgcctttattacatgtacattttgaattctgtgaccagtgatttgggttttattttgtatttgcagggtttgtcattaataattaatgcccctctcttacagaacactcctatttgtacctcaacaaatgcaaattttccccgtttgccctacgccccttttggtacacctagaggttgatttcctttttcatcgatggtactatttcttagtgttttaaattggaacatatcttgcctcatgaagctttaaattataattttcagtttctccccatgaagcgctctcgtctgacatttgtttggaatcgtgccactgctggtctgcgccagatgtaccgtcctttccaatacgattttctgttgcaccttgtagtggattctgcatatcatctttcccacctaaaaatgtctgaatgcttacacaaataaattttataacacgcttattttgcatactccttgaaatgtgactcttcagaggacagggcacctgctgtgtatgtgtggccgtgcgtgtgtactcgtggctgtgtgtgtgtgatgagacactttggaagactccagggagaagtccccaggcctggagctgccgagtgcccaggtcagcgccctggactgcttgcgcacttgctcaccgagatgatgcagttggaggttgctgatctgtgcgattgctgtagcggttgccggggaccttaagagttattttgcttctctggaaggggcctatgcttgctaggcaggcagccagtgtgtctgtttttcttggtttgctgtgggaccttgcttggcgagggggaaaatctctgggtttctggagtgggagggttcgtgcagcagctgttgactggtacatgaagcattcttttatgtttgttgaagctgatgattgacatctcccgtgggtgtgccagttcttgtggagttaagacaggatttttggaagcaaggaagttagtgggtgagcttggggatgtagctcagctatctgctggtctagtggcctctaagctatagggaggggacagagccctgagctacagatgcttgagtgggttattgtgtcggtttgctagtgcagtctggtttttaagctctaaaattgaggtattttattagaagtggatttgggttgaactcttaatttgtataagggatatattttggttggggaaatagaactgagttgctaattcttattgtactcattactccatacaagaatgttatgttgaataataaaattggagaagatttcattttgtgtttccagggagtattctgtgtggggaactgtttccttacgtgaggccggcggcataagtcaaagatgagttttgtccttgcgaatcacacagattgagtctgtgttccccagggtgtgccgttacctgatttttaagtgagccagggcggacagcagcttttctgatttacagagttcttcagatttacaaatggacaatgacatcacagtttttagcactgaagccagtctcatgctagtaacagtgggtgagccgctcgagggactgggttctaatgaatactggtatgaacggggagtctctgcagtcgccagacaaatcatactcagccccttcccccgtagagcaacaagtggttcttttagagttgactggcagcatttcctgtcgggggaggtggggtttgatggagttagaaagctcgcctctgtgtacattctctcctgggctgttactttctgtagacgcacaaaatcagccccaatgtttttaagggcatcttagccaaggaagctggcttttgtgtcgccacttccaggcctgcattaagagagagcccaggcaccagggctaccactggaacctgcctcagcgtcaactgctgctggtctgtagccaggcccagcctttgagacgggtttactgtcaccagtagcctctcagtgccagccctgagctgctcctggctcagctgcccagagcctgcagcctggggaggtactcagcctctgggagacgagggccgtggactgggtggctggtagctcctgcgtttttgagctgtgtcctggctggctgctgccaatgaggtggacaccagtgtggtttggggtgcactggccacttcttgctgggttctgattttcttggaagtgcatctgccttccttatccaatagttttatccctgcattgctcttgtgaagtggctggtttggttctgtatgtagcattttgtacctttcctctggcaaaacactgtcagtttataaacattttttatatttccctcctttaaaaacagcttgtgtatttctgctataaaatgtgtcagcaaaggcagagtgacctaatagggcatgttcttaagcacagggactgtatcatgcaggggccaataaagctcaagaaaacgag

SEQ ID NO: 27680 - DNA, 1579 bp, Homo sapiens
  source 1..1579: mol_type = unassigned DNA
gcgcggcccgcgggcctcgccgccccgcgcggatcgtcgcggcccggccgtcccgtcccaggaagtggccgtcctgagcgccatggctcactccccggtgcagtcgggcctgcccggcatgcagaacctaaaggcagacccagaagagctttttacaaaactagagaaaattgggaagggctcctttggagaggtgttcaaaggcattgacaatcggactcagaaagtggttgccataaagatcattgatctggaagaagctgaagatgagatagaggacattcaacaagaaatcacagtgctgagtcagtgtgacagtccatatgtaaccaaatattatggatcctatctgaagttagaacctggcccattagatgaaacccagatcgctactatattaagagaaatactgaaaggactcgattatctccattcggagaagaaaatccacagagacattaaagcggccaacgtcctgctgtctgagcatggcgaggtgaagctggcggactttggcgtggctggccagctgacagacacccagatcaaaaggaacaccttcgtgggcaccccattctggatggcacccgaggtcatcaaacagtcggcctatgactcgaaggcagacatctggtccctgggcataacagctattgaacttgcaagaggggaaccacctcattccgagctgcaccccatgaaagttttattcctcattccaaagaacaacccaccgacgttggaaggaaactacagtaaacccctcaaggagtttgtggaggcctgtttgaataaggagccgagctttagacccactgctaaggagttattgaagcacaagtttatactacgcaatgcaaagaaaacttcctacttgaccgagctcatcgacaggtacaagagatggaaggccgagcagagccatgacgactcgagctccgaggattccgacgcggaaacagatggccaagcctcggggggcagtgattctggggactggatcttcacaatccgagaaaaagatcccaagaatctcgagaatggagctcttcagccatcggacttggacagaaataagatgaaagacatcccgaagaggcctttctctcagtgtttatctacaattatttctcctctgtttgcagagttgaaggagaagagccaggcgtgcggagggaacttggggtccattgaagagctgcgaggggccatctacctagcggaggaggcgtgccctggcatctccgacaccatggtggcccagctcgtgcagcggctccagagatactctctaagtggtggaggaacttcatcccactgaaattcctttggcatttggggttttgtttttccttttttccttcttcatcctcctccttttttaaaagtcaacgagagccttcgctgactccaccgaagaggtgcgccactgggagccaccccagcgccaggcgcccgtccagggacacacacagtcttcactgtgctgcagccagatgaagtctctcagatgggtggggagggtcagctccttccagcgatcattttattttattttattacttttgtttttaatttt

SEQ ID NO: 27681 - DNA, 1341 bp, Homo sapiens
  source 1..1341: mol_type = unassigned DNA
ccagcggccagcgcgcgcgggcccaggccgcccggctccagcccagcagtagcggcagcagcggcggcggcggcagtgcgcgcgaggccctgcgcccccagcagctcctccctggcgccgtgcatggagacgcggcccgccacccgccgctgagcccccgccgcccggccgggacccgccagggctggggtggcctcgggctccggccggccccgccgcccgagggctgcgcgcggcccgcgggcctcgccgccccgcgcggatcgtcgcggcccggccgtcccgtcccaggaagtggccgtcctgagcgccatggctcactccccggtgcagtcgggcctgcccggcatgcagaacctaaaggcagacccagaagagctttttacaaaactagagaaaattgggaagggctcctttggagaggtgttcaaaggcattgacaatcggactcagaaagtggttgccataaagatcattgatctggaagaagctgaagatgagatagaggacattcaacaagaaatcacagtgctgagtcagtgtgacagtccatatgtaaccaaatattatggatcctatctgaaggatacaaaattatggataataatggaatatcttggtggaggctccgcactagatctattagaacctggcccattagatgaaacccagatcgctactatattaagagaaatactgaaaggactcgattatctccattcggagaagaaaatccacagagacattaaagcggccaacgtcctgctgtctgagcatggcgaggtgaagctggcggactttggcgtggctggccagctgacagacacccagatcaaaaggaacaccttcgtgggcaccccattctggatggcacccgaggtcatcaaacagtcggcctatgactcgaaggcagacatctggtccctgggcataacagctattgaacttgcaagaggggaaccacctcattccgagctgcaccccatgaaagttttattcctcattccaaagaacaacccaccgacgttggaaggaaactacagtaaacccctcaaggagtttgtggaggcctgtttgaataaggagccgagctttagacccactgctaaggagttattgaagcacaagtttatactacgcaatgcaaagaaaacttcctacttgaccgagctcatcgacaggtacaagagatggaaggccgagcagagccatgacgactcgagctccgaggattccgacgcggaaacagatggccaagcctcggggggcagtgattctggggactggatcttcacaatccgagaatggagctcttcagccatcggacttggacagaaataa

SEQ ID NO: 27682 - DNA, 3596 bp, Homo sapiens
  source 1..3596: mol_type = unassigned DNA
aaagtgtgaggtcagtagtagtttttgtggtacgtgcagtggtggccgcttcaaggactattttcgtcgctgcttgcgttttaagtctccaatcctgggacgaggcccatttcagggttttctgtcaccttctagccgcccgccaccccagaggggtgccagatgccccagtttttgagtgcatgcaggcaggcgaaagtggctcgaaaagacctccggcctgaatgatctccatgaagacgcggtcacgcagcctccacactctcttccccttctcgaaaattctgtgccatttaagtttcaaaatcccttataaaataagtgtcagagagctacgtgtacccgtttcttccaaattttcatcacgaagtggagatttggacgtactattttgtgatctctgtttgcagaaagtgggtacggcatcagtgccttcataatcaggtttttcaggaattgttcaaatggatgaagatacacattacgataaagtggaagatgtggttggaagtcacatagaagatgcagtaacattttgggcccagagtatcaatagaaataaggatatcatgaagattggttgctcactgtctgaagtttgcccccaggccagttcagttttggggaatcttgacccaaacaagatttatggtggattattttctgaagatcagtgttggtacagatgcaaagtactgaaaatcatcagcgttgaaaagtgtctggtgaggtacattgactatggaaatactgaaattctaaatcgatctgatatagttgaaattcctttggagctgcagttttctagtgttgccaaaaagtataaactttggggactacacattccttctgatcaagaagttacccagtttgatcagggcacaacctttttggggagcttgatttttgaaaaggaaataaaaatgagaattaaagcaacctctgaagatggaacagttattgctcaggctgagtatggcagtgtggatataggggaagaggtgcttaagaaaggatttgcagagaaatgcagacttgcttccagaactgacatctgtgaggaaaaaaaattggatcctggtcaacttgttctcaggaacctcaaaagccccattcctttgtgggggcatagatcaaaccagtcaaccttcagcaggcccaaggggcacttaagtgagaaaatgactcttgacttgaaggatgaaaatgatgcaggcaatcttataacatttccaaaggaaagtttggctgttggtgactttaatttagggtctaacgtcagcctggaaaaaattaagcaggaccagaaactgattgaagaaaatgaaaaacttaaaacagagaaggacgctcttcttgaaagttataaggcgttagaattgaaagtagagcagattgcccaggagctgcagcaagagaaggcagctgctgtggatttgactaaccacttagaatacactctgaagacctatatagataccagaatgaaaaatctggcagctaagatggaaatactgaaagaaatgaggcatgtcgacatcagtgtccgtttcggaaaagacctttcagatgctatacaagtgttggatgaagggtgctttactactccagcttctttgaatggattagagataatatgggcagaatacagtctggctcaggagaatattaaaacttgtgaatatgtgagtgaagggaatattttgattgcccaaagaaatgaaatgcagcagaagctgtacatgtcagtagaagattttattctggaagttgatgagtcatctcttaataaacgcttaaaaacattgcaggatttgtcagtctctttagaagcagtgtatggacaagccaaagaaggagcaaattctgatgaaatacttaaaaaattttatgactggaagtgtgataaaagagaggagttcaccagtgttagaagtgaaacagacgcttctctgcaccgtcttgtagcatggttccaaagaaccttaaaggtttttgacctatctgtggaaggatcactgatttcagaagacgcaatggataatattgatgaaatcctagagaagactgagtcaagtgtctgcaaagagctggagatagctctggttgatcaaggtgatgcagacaaggagataatttcaaatacatatagtcaagtactgcaaaagattcattcagaggaaaggctcattgccacagtacaagctaagtacaaggacagtattgagtttaaaaagcagcttattgaatatttaaataagagtcccagtgtggatcacttgctatccattaagaagacattgaaaagcttaaaagctctactcagatggaaattggttgaaaagagtaatttggaagagtcagatgatcctgatggctctcaaattgagaaaataaaagaagaaataactcagctgcgcaataatgtctttcaggaaatttatcatgagagagaggaatatgagatgctaactagtttggcacagaaatggttccctgagctgcctctgcttcatcctgaaataggattactcaaatacatgaactctggtggtctccttacaatgagcttggaacgagatcttcttgatgctgagcccatgaaggaacttagcagcaagcgtcctttggtacgttctgaggttaatgggcagataattctgttaaagggctattctgtggatgttgacacagaagccaaggtgattgagagagcagccacctaccatagagcttggagagaagctgaaggagactcagggttactgccattgatattcctgtttttatgtaagtctgatcctatggcttatctgatggtcccatactaccctagggcaaacctgaatgctgttcaagccaacatgcctttaaattcagaagaaactttaaaggtcatgaaaggtgttgcccagggtctgcatacattgcataaggctgacataattcatggatcacttcatcagaacaatgtatttgctttaaaccgtgaacaaggaattgttggagattttgacttcaccaaatctgtgagtcagcgagcctcggtgaacatgatggttggtgacttgagtttgatgtcacctgagttgaaaatgggaaaacctgcttctccaggttcagacttatatgcttatggctgcctcttattatggctttctgttcaaaatcaggagtttgagataaataaagatggaatccccaaagtggatcagtttcatctggatgataaagtcaaatccctcctctgtagcttgatatgttatagaagttcaatgactgctgaacaagttttaaatgctgaatgtttcttgatgccaaaggagcaatcagttccaaacccagaaaaagatactgaatacaccctatataaaaaggaagaagaaataaagacggagaacttggataaatgtatggagaagacaagaaatggtgaagccaactttgattgttaaattattattgttgttgttgcagaggttctttttaaaaactttggtttggttaatacacagaaatatctagaaatgttctgggactagttgagttgtatctttagtattcaggttgtgaaaaataaagatgtttggctatgc

SEQ ID NO: 27683 - DNA, 3326 bp, Homo sapiens
  source 1..3326: mol_type = unassigned DNA
aacaccggatgatggcgcagcgctgtgcacgcaggcgcagtgtggggcccttgcggtcgaagctcacgcggtaagccgctgcacgtgtgctacggcgggcggagggccgaaagtccagtatgtgggtccagggtcactcttctagagcttccgcaacggaaagtgtgagtttttcaggaattgttcaaatggatgaagatacacattacgataaagtggaagatgtggttggaagtcacatagaagatgcagtaacattttgggcccagagtatcaatagaaataaggatatcatgaagattggttgctcactgtctgaagtttgcccccaggccagttcagttttggggaatcttgacccaaacaagatttatggtggattattttctgaagatcagtgttggtacagatgcaaagtactgaaaatcatcagcgttgaaaagtgtctggtgaggtacattgactatggaaatactgaaattctaaatcgatctgatatagttgaaattcctttggagctgcagttttctagtgttgccaaaaagtataaactttggggactacacattccttctgatcaagaagttacccagtttgatcagggcacaacctttttggggagcttgatttttgaaaaggaaataaaaatgagaattaaagcaacctctgaagatggaacagttattgctcaggctgagtatggcagtgtggatataggggaagaggtgcttaagaaaggatttgcagagaaatgcagacttgcttccagaactgacatctgtgaggaaaaaaaattggatcctggtcaacttgttctcaggaacctcaaaagccccattcctttgtgggggcatagatcaaaccagtcaaccttcagcaggcccaaggggcacttaagtgagaaaatgactcttgacttgaaggatgaaaatgatgcaggcaatcttataacatttccaaaggaaagtttggctgttggtgactttaatttagggtctaacgtcagcctggaaaaaattaagcaggaccagaaactgattgaagaaaatgaaaaacttaaaacagagaaggacgctcttcttgaaagttataaggcgttagaattgaaagtagagcagattgcccaggagctgcagcaagagaaggcagctgctgtggatttgactaaccacttagaatacactctgaagacctatatagataccagaatgaaaaatctggcagctaagatggaaatactgaaagaaatgaggcatgtcgacatcagtgtccgtttcggaaaagacctttcagatgctatacaagtgttggatgaagggtgctttactactccagcttctttgaatggattagagataatatgggcagaatacagtctggctcaggagaatattaaaacttgtgaatatgtgagtgaagggaatattttgattgcccaaagaaatgaaatgcagcagaagctgtacatgtcagtagaagattttattctggaagttgatgagtcatctcttaataaacgcttaaaaacattgcaggatttgtcagtctctttagaagcagtgtatggacaagccaaagaaggagcaaattctgatgaaatacttaaaaaattttatgactggaagtgtgataaaagagaggagttcaccagtgttagaagtgaaacagacgcttctctgcaccgtcttgtagcatggttccaaagaaccttaaaggtttttgacctatctgtggaaggatcactgatttcagaagacgcaatggataatattgatgaaatcctagagaagactgagtcaagtgtctgcaaagagctggagatagctctggttgatcaaggtgatgcagacaaggagataatttcaaatacatatagtcaagtactgcaaaagattcattcagaggaaaggctcattgccacagtacaagctaagtacaaggacagtattgagtttaaaaagcagcttattgaatatttaaataagagtcccagtgtggatcacttgctatccattaagaagacattgaaaagcttaaaagctctactcagatggaaattggttgaaaagagtaatttggaagagtcagatgatcctgatggctctcaaattgagaaaataaaagaagaaataactcagctgcgcaataatgtctttcaggaaatttatcatgagagagaggaatatgagatgctaactagtttggcacagaaatggttccctgagctgcctctgcttcatcctgaaataggattactcaaatacatgaactctggtggtctccttacaatgagcttggaacgagatcttcttgatgctgagcccatgaaggaacttagcagcaagcgtcctttggtacgttctgaggttaatgggcagataattctgttaaagggctattctgtggatgttgacacagaagccaaggtgattgagagagcagccacctaccatagagcttggagagaagctgaaggagactcagggttactgccattgatattcctgtttttatgtaagtctgatcctatggcttatctgatggtcccatactaccctagggcaaacctgaatgctgttcaagccaacatgcctttaaattcagaagaaactttaaaggtcatgaaaggtgttgcccagggtctgcatacattgcataaggctgacataattcatggatcacttcatcagaacaatgtatttgctttaaaccgtgaacaaggaattgttggagattttgacttcaccaaatctgtgagtcagcgagcctcggtgaacatgatggttggtgacttgagtttgatgtcacctgagttgaaaatgggaaaacctgcttctccaggttcagacttatatgcttatggctgcctcttattatggctttctgttcaaaatcaggagtttgagataaataaagatggaatccccaaagtggatcagtttcatctggatgataaagtcaaatccctcctctgtagcttgatatgttatagaagttcaatgactgctgaacaagttttaaatgctgaatgtttcttgatgccaaaggagcaatcagttccaaacccagaaaaagatactgaatacaccctatataaaaaggaagaagaaataaagacggagaacttggataaatgtatggagaagacaagaaatggtgaagccaactttgattgttaaattattattgttgttgttgcagaggttctttttaaaaactttggtttggttaatacacagaaatatctagaaatgttctgggactagttgagttgtatctttagtattcaggttgtgaaaaataaagatgtttggctatgcacaaaa

SEQ ID NO: 27684 - DNA, 3512 bp, Homo sapiens
  source 1..3512: mol_type = unassigned DNA
aaggactattttcgtcgctgcttgcgttttaagtctccaatcctgggacgaggcccatttcagggttttctgtcaccttctagccgcccgccaccccagaggggtgccagatgccccagtttttgagtgcatgcaggcaggcgaaagtggctcgaaaagacctccggcctgaatgatctccatgaagacgcggtcacgcagcctccacactctcttccccttctcgaaaattctgtgccatttaagtttcaaaatcccttataaaataagtgtcagagagctacgtgtacccgtttcttccaaattttcatcacgaagtggagatttggacgtactattttgtgatctctgtttgcagaaatttttcaggaattgttcaaatggatgaagatacacattacgataaagtggaagatgtggttggaagtcacatagaagatgcagtaacattttgggcccagagtatcaatagaaataaggatatcatgaagattggttgctcactgtctgaagtttgcccccaggccagttcagttttggggaatcttgacccaaacaagatttatggtggattattttctgaagatcagtgttggtacagatgcaaagtactgaaaatcatcagcgttgaaaagtgtctggtgaggtacattgactatggaaatactgaaattctaaatcgatctgatatagttgaaattcctttggagctgcagttttctagtgttgccaaaaagtataaactttggggactacacattccttctgatcaagaagttacccagtttgatcagggcacaacctttttggggagcttgatttttgaaaaggaaataaaaatgagaattaaagcaacctctgaagatggaacagttattgctcaggctgagtatggcagtgtggatataggggaagaggtgcttaagaaaggatttgcagagaaatgcagacttgcttccagaactgacatctgtgaggaaaaaaaattggatcctggtcaacttgttctcaggaacctcaaaagccccattcctttgtgggggcatagatcaaaccagtcaaccttcagcaggcccaaggggcacttaagtgagaaaatgactcttgacttgaaggatgaaaatgatgcaggcaatcttataacatttccaaaggaaagtttggctgttggtgactttaatttagggtctaacgtcagcctggaaaaaattaagcaggaccagaaactgattgaagaaaatgaaaaacttaaaacagagaaggacgctcttcttgaaagttataaggcgttagaattgaaagtagagcagattgcccaggagctgcagcaagagaaggcagctgctgtggatttgactaaccacttagaatacactctgaagacctatatagataccagaatgaaaaatctggcagctaagatggaaatactgaaagaaatgaggcatgtcgacatcagtgtccgtttcggaaaagacctttcagatgctatacaagtgttggatgaagggtgctttactactccagcttctttgaatggattagagataatatgggcagaatacagtctggctcaggagaatattaaaacttgtgaatatgtgagtgaagggaatattttgattgcccaaagaaatgaaatgcagcagaagctgtacatgtcagtagaagattttattctggaagttgatgagtcatctcttaataaacgcttaaaaacattgcaggatttgtcagtctctttagaagcagtgtatggacaagccaaagaaggagcaaattctgatgaaatacttaaaaaattttatgactggaagtgtgataaaagagaggagttcaccagtgttagaagtgaaacagacgcttctctgcaccgtcttgtagcatggttccaaagaaccttaaaggtttttgacctatctgtggaaggatcactgatttcagaagacgcaatggataatattgatgaaatcctagagaagactgagtcaagtgtctgcaaagagctggagatagctctggttgatcaaggtgatgcagacaaggagataatttcaaatacatatagtcaagtactgcaaaagattcattcagaggaaaggctcattgccacagtacaagctaagtacaaggacagtattgagtttaaaaagcagcttattgaatatttaaataagagtcccagtgtggatcacttgctatccattaagaagacattgaaaagcttaaaagctctactcagatggaaattggttgaaaagagtaatttggaagagtcagatgatcctgatggctctcaaattgagaaaataaaagaagaaataactcagctgcgcaataatgtctttcaggaaatttatcatgagagagaggaatatgagatgctaactagtttggcacagaaatggttccctgagctgcctctgcttcatcctgaaataggattactcaaatacatgaactctggtggtctccttacaatgagcttggaacgagatcttcttgatgctgagcccatgaaggaacttagcagcaagcgtcctttggtacgttctgaggttaatgggcagataattctgttaaagggctattctgtggatgttgacacagaagccaaggtgattgagagagcagccacctaccatagagcttggagagaagctgaaggagactcagggttactgccattgatattcctgtttttatgtaagtctgatcctatggcttatctgatggtcccatactaccctagggcaaacctgaatgctgttcaagccaacatgcctttaaattcagaagaaactttaaaggtcatgaaaggtgttgcccagggtctgcatacattgcataaggctgacataattcatggatcacttcatcagaacaatgtatttgctttaaaccgtgaacaaggaattgttggagattttgacttcaccaaatctgtgagtcagcgagcctcggtgaacatgatggttggtgacttgagtttgatgtcacctgagttgaaaatgggaaaacctgcttctccaggttcagacttatatgcttatggctgcctcttattatggctttctgttcaaaatcaggagtttgagataaataaagatggaatccccaaagtggatcagtttcatctggatgataaagtcaaatccctcctctgtagcttgatatgttatagaagttcaatgactgctgaacaagttttaaatgctgaatgtttcttgatgccaaaggagcaatcagttccaaacccagaaaaagatactgaatacaccctatataaaaaggaagaagaaataaagacggagaacttggataaatgtatggagaagacaagaaatggtgaagccaactttgattgttaaattattattgttgttgttgcagaggttctttttaaaaactttggtttggttaatacacagaaatatctagaaatgttctgggactagttgagttgtatctttagtattcaggttgtgaaaaataaagatgtttggctatgc

SEQ ID NO: 27685 - DNA, 661 bp, Homo sapiens
  source 1..661: mol_type = unassigned DNA
aaggactattttcgtcgctgcttgcgttttaagtctccaatcctgggacgaggcccatttcagggttttctgtcaccttctagccgcccgccaccccagaggggtgccagatgccccagtttttgagtgcatgcaggcaggcgaaagtggctcgaaaagacctccggcctgaatgatctccatgaagacgcggtcacgcagcctccacactctcttccccttctcgaaaattctgtgccatttaagtttcaaaatcccttataaaataagtgtcagagagctacgtgtacccgtttcttccaaattttcatcacgaagtggagatttggacgtactattttgtgatctctgtttgcagaaatttttcaggaattgttcaaatggatgaagatacacattacgataaagtggaagatgtggttggaagtcacatagaagatgcagtaacattttgggcccagagtatcaatagaaataaggatatcatgaagattggttgctcactgtctgaagtttgcccccaggccagttcagttttggggaatcttgacccaaacaagatttatggtggattattttctgaagatcagtgttggtacagatgcaaagtactgaaaatcatcagcgttgaaaagtgtctggtgaggtacattgactatgg

SEQ ID NO: 27686 - DNA, 563 bp, Homo sapiens
  source 1..563: mol_type = unassigned DNA
aagtgtgaggtcagtagtagtttttgtggtacgtgcagtggtggccgcttcaaggactattttcgtcgctgcttgcgttttaagtctccaatcctgggacgaggcccatttcagggttttctgtcaccttctagccgcccgccaccccagaggggtgccagatgccccagtttttgagtgcatgcaggcaggcgaaagtggctcgaaaagacctccggcctgaatgatctccatgaagacgcggtcacgcagcctccacactctcttccccttctcgaaaattctgtgccatttaagtttcaaaatcccttataaaataagtgtcagagagctacgtgtacccgtttcttccaaattttcatcacgaagtggagatttggacgtactattttgtgatctctgtttgcagaaagtggtttttcaggaattgttcaaatggatgaagatacacattacgataaagtggaagatgtggttggaagtcacatagaagatgcagtaacattttgggcccagagtatcaatagaaataaggatatcatgaagattggttgctcactgtc

SEQ ID NO: 27687 - DNA, 3085 bp, Homo sapiens
  source 1..3085: mol_type = unassigned DNA
gaaagtccagtatgtgggtccagggtcactcttctagagcttccgcaacggaaagtgtgagtttttcaggaattgttcaaatggatgaagatacacattacgataaagtggaagatgtggttggaagtcacatagaagatgcagtaacattttgggcccagagtatcaatagaaataaggatatcatgaagattggttgctcactgtctgaagtttgcccccaggccagttcagttttggggaatcttgacccaaacaagatttatggtggattattttctgaagatcagtgttggtacagatgcaaagtactgaaaatcatcagcgttgaaaagtgtctggtgaggtacattgactatggaaatactgaaattctaaatcgatctgatatagttgaaattcctttggagctgcagttttctagtgttgccaaaaagtataaactttggggactacacattccttctgatcaagaagttacccagtttgatcagggcacaacctttttggggagcttgatttttgaaaaggaaataaaaatgagaattaaagcaacctctgaagatggaacagttattgctcaggctgagtatggcagtgtggatataggggaagaggtgcttaagaaaggatttgcagagaaatgcagacttgcttccagaactgacatctgtgaggaaaaaaaattggatcctggtcaacttgttctcaggaacctcaaaagccccattcctttgtgggggcatagatcaaaccagtcaaccttcagcaggcccaaggggcacttaagtgagaaaatgactcttgacttgaaggatgaaaatgatgcaggcaatcttataacatttccaaaggaaagtttggctgttggtgactttaatttagggtctaacgtcagcctggaaaaaattaagcaggaccagaaactgattgaagaaaatgaaaaacttaaaacagagaaggacgctcttcttgaaagttataaggcgttagaattgaaagtagagcagattgcccaggagctgcagcaagagaaggcagctgctgtggatttgactaaccacttagaatacactctgaagacctatatagataccagaatgaaaaatctggcagctaagatggaaatactgaaagaaatgaggcatgtcgacatcagtgtccgtttcggaaaagacctttcagatgctatacaagtgttggatgaagggtgctttactactccagcttctttgaatggattagagataatatgggcagaatacagtctggctcaggagaatattaaaacttgtgaatatgtgagtgaagggaatattttgattgcccaaagaaatgaaatgcagcagaagctgtacatgtcagtagaagattttattctggaagttgatgagtcatctcttaataaacgcttaaaaacattgcaggatttgtcagtctctttagaagcagtgtatggacaagccaaagaaggagcaaattctgatgaaatacttaaaaaattttatgactggaagtgtgataaaagagaggagttcaccagtgttagaagtgaaacagacgcttctctgcaccgtcttgtagcatggttccaaagaaccttaaaggtttttgacctatctgtggaaggatcactgatttcagaagacgcaatggataatattgatgaaatcctagagaagactgagtcaagtgtctgcaaagagctggagatagctctggttgatcaaggtgatgcagacaaggagataatttcaaatacatatagtcaagtactgcaaaagattcattcagaggaaaggctcattgccacagtacaagctaagtacaaggacagtattgagtttaaaaagcagcttattgaatatttaaataagagtcccagtgtggatcacttgctatccattaagaagacattgaaaagcttaaaagctctactcagatggaaattggttgaaaagagtaatttggaagagtcagatgatcctgatggctctcaaattgagaaaataaaagaagaaataactcagctgcgcaataatgtctttcaggaaatttatcatgagagagaggaatatgagatgctaactagtttggcacagaaatggttccctgagctgcctctgcttcatcctgaaataggattactcaaatacatgaactctggtggtctccttacaatgagcttggaacgagatcttcttgatgctgagcccatgaaggaacttagcagcaagcgtcctttggtacgttctgaggttaatgggcagataattctgttaaagggctattctgtggatgttgacacagaagccaaggtgattgagagagcagccacctaccatagagcttggagagaagctgaaggagactcagggttactgccattgatattcctgtttttatgtaagtctgatcctatggcttatctgatggtcccatactaccctagggcaaacctgaatgctgttcaagccaacatgcctttaaattcagaagaaactttaaaggtcatgaaaggtgttgcccagggtctgcatacattgcataaggctgacataattcatggatcacttcatcagaacaatgtatttgctttaaaccgtgaacaaggaattgttggagattttgacttcaccaaatctgtgagtcagcgagcctcggtgaacatgatggttggtgacttgagtttgatgtcacctgagttgaaaatgggaaaacctgcttctccaggttcagacttatatgcttatggctgcctcttattatgggatgataaagtcaaatccctcctctgtagcttgatatgttatagaagttcaatgactgctgaacaagttttaaatgctgaatgtttcttgatgccaaaggagcaatcagttccaaacccagaaaaagatactgaatacaccctatataaaaaggaagaagaaataaagacggagaacttggataaatgtatggagaagacaagaaatggtgaagccaactttgattgttaaattattattgttgttgttgcagaggttctttttaaaaactttggtttggttaatacacagaaatatctagaaatgttctggga

SEQ ID NO: 27688 - DNA, 2707 bp, Homo sapiens
  source 1..2707: mol_type = unassigned DNA
gccggccggctggtaaccccccagcggagggaccgggccgagcccgcggacccctccgagtgtctcctggggcccagccgttggtaccccatttcccccgggtccggtatttggggtggtctctgtctgccccggttcatctccaccgtctcaccttcaccccatcttgggacgtgaaactttttgaaagtttagaagcgaacttactgtggggaccttcctctggggttagttctctggtgccaccttcagtgatctgtgtggcagctctgctgctcacttctggctttactgggttttggtatttaactgttgcttacgcacactggaaattttcacctgcagtttttcttctgcctaagctctcacgtgtgaatatgtgtctagtgcatccttaacctgaggacttcaccagttcgaaattacagttttcaccatcaactaccttatcctttttggcctggttttcttcctcaaacagtggaaacatttttaaagttgcttttgttgcagagttaaacaaatggctgatagtggcttagataaaaaatccacaaaatgccccgactgttcatctgcttctcagaaagatgtactttgtgtatgttccagcaaaacaagggttcctccagttttggtggtggaaatgtcacagacatcaagcattggtagtgcagaatctttaatttcactggagagaaaaaaagaaaaaaatatcaacagagatataacctccaggaaagatttgccctcaagaacctcaaatgtagagagaaaagcatctcagcaacaatggggtcggggcaactttacagaaggaaaagttcctcacataaggattgagaatggagctgctattgaggaaatctatacctttggaagaatattgggaaaagggagctttggaatagtcattgaagcgacagacaaggaaacagaaacgaagtgggcaattaaaaaagtgaacaaagaaaaggctggaagctctgctgtgaagttacttgaacgagaggtgaacattctgaaaagtgtaaaacatgaacacatcatacatctggaacaagtatttgaaacgccaaagaaaatgtaccttgtgatggagctttgtgaggatggagaactcaaagaaattctggataggaaagggcatttctcagagaatgagacaaggtggatcattcaaagtctcgcatcagctatagcatatcttcacaataatgatattgtacatagagatctgaaactggaaaatataatggttaaaagcagtcttattgatgataacaatgaaataaacttaaacataaaggtgactgattttggcttagcggtgaagaagcaaagtaggagtgaagccatgctgcaggccacatgtgggactcctatctatatggcccctgaagttatcagtgcccacgactatagccagcagtgtgacatttggagcataggcgtcgtaatgtacatgttattacgtggagaaccaccctttttggcaagctcagaagagaagctttttgagttaataagaaaaggagaactacattttgaaaatgcagtctggaattccataagtgactgtgctaaaagtgttttgaaacaacttatgaaagtagatcctgctcacagaatcacagctaaggaactactagataaccagtggttaacaggcaataaactttcttcggtgagaccaaccaatgtattagagatgatgaaggaatggaaaaataacccagaaagtgttgaggaaaacacaacagaagagaagaataagccgtccactgaagaaaagttgaaaagttaccaaccctggggaaatgtccctgatgccaattacacttcagatgaagaggaggaaaaacagtctactgcttatgaaaagcaatttcctgcaaccagtaaggacaactttgatatgtgcagttcaagtttcacatctagcaaactccttccagctgaaatcaagggagaaatggagaaaacccctgtgactccaagccaaggaacagcaaccaagtaccctgctaaatccggcgccctgtccagaaccaaaaagaaactctaaggttccctccagtgttggacagtacaaaaacaaagctgctcttgttagcactttgatgagggggtaggaggggaagaagacagccctatgctgagcttgtagccttttagctccacagagccccgccatgtgtttgcaccagcttaaaattgaagctgcttatctccaaagcagcataagctgcacatggcattaaaggacagccaccagtaggcttggcagtgggctgcagtggaaatcaactcaagatgtacacgaaggttttttaggggggcagataccttcaatttaaggctgtgggcacacttgctcatttttacttcaaattcttatgtttaggcacagctatttataggggaaaacaagaggccaaatatagtaatggaggtgccaaataattatgtgcactttgcactagaagactttgttagaaaattactaataaacttgccatacgtattacagcagaagtgcttcagtcattcacatgtgttcgtgagattttaggttgctatagattgtttaagacagcttattttaaatgtagaaaaataggagattttgtaactgcttgccattaacttgctgctaaattcccaatgtattgattaaatcaataaaaaacagatgttactcagc

SEQ ID NO: 27689 - DNA, 2558 bp, Homo sapiens
  source 1..2558: mol_type = unassigned DNA
gccggccggctggtaaccccccagcggagggaccgggccgagcccgcggacccctccgagtgtctcctggggcccagccgttggtaccccatttcccccgggtccggtatttggggtggtctctgtctgccccggttcatctccaccgtctcaccttcaccccatcttgggacgtgaaactttttgaaagtttagaagcgaacttactgtgggctctcacgtgtgaatatgtgtctagtgcatccttaacctgaggacttcaccagttcgaaattacagttttcaccatcaactaccttatcctttttggcctggttttcttcctcaaacagtggaaacatttttaaagttgcttttgttgcagagttaaacaaatggctgatagtggcttagataaaaaatccacaaaatgccccgactgttcatctgcttctcagaaagatgtactttgtgtatgttccagcaaaacaagggttcctccagttttggtggtggaaatgtcacagacatcaagcattggtagtgcagaatctttaatttcactggagagaaaaaaagaaaaaaatatcaacagagatataacctccaggaaagatttgccctcaagaacctcaaatgtagagagaaaagcatctcagcaacaatggggtcggggcaactttacagaaggaaaagttcctcacataaggattgagaatggagctgctattgaggaaatctatacctttggaagaatattgggaaaagggagctttggaatagtcattgaagcgacagacaaggaaacagaaacgaagtgggcaattaaaaaagtgaacaaagaaaaggctggaagctctgctgtgaagttacttgaacgagaggtgaacattctgaaaagtgtaaaacatgaacacatcatacatctggaacaagtatttgaaacgccaaagaaaatgtaccttgtgatggagctttgtgaggatggagaactcaaagaaattctggataggaaagggcatttctcagagaatgagacaaggtggatcattcaaagtctcgcatcagctatagcatatcttcacaataatgatattgtacatagagatctgaaactggaaaatataatggttaaaagcagtcttattgatgataacaatgaaataaacttaaacataaaggtgactgattttggcttagcggtgaagaagcaaagtaggagtgaagccatgctgcaggccacatgtgggactcctatctatatggcccctgaagttatcagtgcccacgactatagccagcagtgtgacatttggagcataggcgtcgtaatgtacatgttattacgtggagaaccaccctttttggcaagctcagaagagaagctttttgagttaataagaaaaggagaactacattttgaaaatgcagtctggaattccataagtgactgtgctaaaagtgttttgaaacaacttatgaaagtagatcctgctcacagaatcacagctaaggaactactagataaccagtggttaacaggcaataaactttcttcggtgagaccaaccaatgtattagagatgatgaaggaatggaaaaataacccagaaagtgttgaggaaaacacaacagaagagaagaataagccgtccactgaagaaaagttgaaaagttaccaaccctggggaaatgtccctgatgccaattacacttcagatgaagaggaggaaaaacagtctactgcttatgaaaagcaatttcctgcaaccagtaaggacaactttgatatgtgcagttcaagtttcacatctagcaaactccttccagctgaaatcaagggagaaatggagaaaacccctgtgactccaagccaaggaacagcaaccaagtaccctgctaaatccggcgccctgtccagaaccaaaaagaaactctaaggttccctccagtgttggacagtacaaaaacaaagctgctcttgttagcactttgatgagggggtaggaggggaagaagacagccctatgctgagcttgtagccttttagctccacagagccccgccatgtgtttgcaccagcttaaaattgaagctgcttatctccaaagcagcataagctgcacatggcattaaaggacagccaccagtaggcttggcagtgggctgcagtggaaatcaactcaagatgtacacgaaggttttttaggggggcagataccttcaatttaaggctgtgggcacacttgctcatttttacttcaaattcttatgtttaggcacagctatttataggggaaaacaagaggccaaatatagtaatggaggtgccaaataattatgtgcactttgcactagaagactttgttagaaaattactaataaacttgccatacgtattacagcagaagtgcttcagtcattcacatgtgttcgtgagattttaggttgctatagattgtttaagacagcttattttaaatgtagaaaaataggagattttgtaactgcttgccattaacttgctgctaaattcccaatgtattgattaaatcaataaaaaacagatgttactcagc

SEQ ID NO: 27690 - DNA, 2509 bp, Homo sapiens
  source 1..2509: mol_type = unassigned DNA
gccggccggctggtaaccccccagcggagggaccgggccgagcccgcggacccctccgagtgtctcctggggcccagccgttggtaccccatttcccccgggtccggtatttggggtggtctctgtctgccccggttcatctccaccgtctcaccttcaccccatcttgggacgtgaaactttttgaaagtttagaagcgaacttactgtggggaccttcctctggggttagttctctggtgccaccttcagtgatctgtgtggcagctctgctgctcacttctggctttactgggttttggtatttaactgttgcttacgcacactggaaattttcacctgcagtttttcttctgcctaagctctcacgtgtgaatatgtgtctagtgcatccttaacctgaggacttcaccagttcgaaattacagttttcaccatcaactaccttatcctttttggcctggttttcttcctcaaacagtggaaacatttttaaagttgcttttgttgcagagttaaacaaatggctgatagtggcttagataaaaaatccacaaaatgccccgactgttcatctgcttctcagaaagatgtactttgtgtatgttccagcaaaacaagggttcctccagttttggtggtggaaatgtcacagacatcaagcattggtagtgcagaatctttaatttcactggagagaaaaaaagaaaaaaatatcaacagagatataacctccaggaaagatttgccctcaagaacctcaaatgtagagagaaaagcatctcagcaacaatggggtcggggcaactttacagaaggaaaagttcctcacataaggattgagaatggagctgctattgaggaaatctatacctttggaagaatattgggaaaagggagctttggaatagtcattgaagcgacagacaaggaaacagaaacgaagtgggcaattaaaaaagtgaacaaagaaaaggctggaagctctgctgtgaagttacttgaacgagaggtgaacattctgaaaagtgtaaaacatgaacacatcatacatctggaacaagtatttgaaacgccaaagaaaatgtaccttgtgatggagctttgtgaggatggagaactcaaagaaattctggataggaaagggcatttctcagagaatgagacaaggtggatcattcaaagtctcgcatcagctatagcatatcttcacaataatgatattgtacatagagatctgaaactggaaaatataatggttaaaagcagtcttattgatgataacaatgaaataaacttaaacataaaggtgactgattttggcttagcggtgaagaagcaaagtaggagtgaagccatgctgcaggccacatgtgggactcctatctatatggcccctgaagttatcagtgcccacgactatagccagcagtgtgacatttggagcataggcgtcgtaatgtacatgttattacgtggagaaccaccctttttggcaagctcagaagagaagctttttgagttaataagaaaaggagaactacattttgaaaatgcagtctggaattccataagtgactgtgctaaaagtgttttgaaacaacttatgaaagtagatcctgctcacagaatcacagctaaggaactactagataaccagtggttaacatctactgcttatgaaaagcaatttcctgcaaccagtaaggacaactttgatatgtgcagttcaagtttcacatctagcaaactccttccagctgaaatcaagggagaaatggagaaaacccctgtgactccaagccaaggaacagcaaccaagtaccctgctaaatccggcgccctgtccagaaccaaaaagaaactctaaggttccctccagtgttggacagtacaaaaacaaagctgctcttgttagcactttgatgagggggtaggaggggaagaagacagccctatgctgagcttgtagccttttagctccacagagccccgccatgtgtttgcaccagcttaaaattgaagctgcttatctccaaagcagcataagctgcacatggcattaaaggacagccaccagtaggcttggcagtgggctgcagtggaaatcaactcaagatgtacacgaaggttttttaggggggcagataccttcaatttaaggctgtgggcacacttgctcatttttacttcaaattcttatgtttaggcacagctatttataggggaaaacaagaggccaaatatagtaatggaggtgccaaataattatgtgcactttgcactagaagactttgttagaaaattactaataaacttgccatacgtattacagcagaagtgcttcagtcattcacatgtgttcgtgagattttaggttgctatagattgtttaagacagcttattttaaatgtagaaaaataggagattttgtaactgcttgccattaacttgctgctaaattcccaatgtattgattaaatcaataaaaaacagatgttactcagc

SEQ ID NO: 27691 - DNA, 758 bp, Homo sapiens
  source 1..758: mol_type = unassigned DNA
tgggtatctcgctgccggccggctggtaaccccccagcggagggaccgggccgagcccgcggacccctccgagtgtctcctggggcccagccgttggtaccccatttcccccgggtccggtatttggggtggtctctgtctgccccggttcatctccaccgtctcaccttcaccccatcttgggacgtgaaactttttgaaagtttagaagcgaacttactgtggggcagggccactacttctcagcacatccggccttctggctcatctcctccctgcatctcactacgcccctccccactccagggcctgaagttaaatcattttggaaagtgatacaggagaggactctgctatgaaacttcctgagtgaaatgataagtggcatgaagaaaaacaaagcaagctctcacgtgtgaatatgtgtctagtgcatccttaacctgaggacttcaccagttcgaaattacagttttcaccatcaactaccttatcctttttggcctggttttcttcctcaaacagtggaaacatttttaaagttgcttttgttgcagagttaaacaaatggctgatagtggcttagataaaaaatccacaaaatgccccgactgttcatctgcttctcagaaagatgtactttgtgtatgttccagcaaaacaagggttcctccagttttggtggtggaaatgtcacagacatcaagcattggtagtgcagaatctttaatttcactggagagaaaaaaagaaaaaaa

SEQ ID NO: 27692 - DNA, 3103 bp, Homo sapiens
  source 1..3103: mol_type = unassigned DNA
atgtactcccaattacttctggaagtttctcaaagtactcctttatatgtactgcagagtgtatttttcttcctcctcaactgagatctttccaacttgccaccatgcagctgccaatggtcctagttaagtaaaatgctgccatacctattttagactcagggaaaaatagcacccactcatttttatttttgctcaatataaaaatgaggatacttatgaggatacttaaacttttaggattagctagttttctaaaaatcgaattattcactcctttgtaaagtatgtaataggaatttgctctaataatcaatagattaaggtttaaaatttgaaaccatagtaatgtatgtttaacaccaatattttaagcctttttaaaaaccacaacccacattaagaaatacatttcatactgtgatcaagtacacacgcacacacacactctatacatatatgtctgtccaattaaaagtttcacagaaatttccaaggaggtatgctaaatattatctctttgattctactttatttttaaaaagtggtatcaacccacaaaatggatttcataacccactacgcagtttgataagatgctgttttagaccatgcttttcaccagttttgtggtcctattttgtccttttcatgtctatacaggatgcttctagtgctagttgctagcttttctctgatttccaggatggtaataggttaagaatttctctaaatggttatttcttttctttctgcagctctcacgtgtgaatatgtgtctagtgcatccttaacctgaggacttcaccagttcgaaattacagttttcaccatcaactaccttatcctttttggcctggttttcttcctcaaacagtggaaacatttttaaagttgcttttgttgcagagttaaacaaatggctgatagtggcttagataaaaaatccacaaaatgccccgactgttcatctgcttctcagaaagatgtactttgtgtatgttccagcaaaacaagggttcctccagttttggtggtggaaatgtcacagacatcaagcattggtagtgcagaatctttaatttcactggagagaaaaaaagaaaaaaatatcaacagagatataacctccaggaaagatttgccctcaagaacctcaaatgtagagagaaaagcatctcagcaacaatggggtcggggcaactttacagaaggaaaagttcctcacataaggattgagaatggagctgctattgaggaaatctatacctttggaagaatattgggaaaagggagctttggaatagtcattgaagcgacagacaaggaaacagaaacgaagtgggcaattaaaaaagtgaacaaagaaaaggctggaagctctgctgtgaagttacttgaacgagaggtgaacattctgaaaagtgtaaaacatgaacacatcatacatctggaacaagtatttgaaacgccaaagaaaatgtaccttgtgatggagctttgtgaggatggagaactcaaagaaattctggataggaaagggcatttctcagagaatgagacaaggtggatcattcaaagtctcgcatcagctatagcatatcttcacaataatgatattgtacatagagatctgaaactggaaaatataatggttaaaagcagtcttattgatgataacaatgaaataaacttaaacataaaggtgactgattttggcttagcggtgaagaagcaaagtaggagtgaagccatgctgcaggccacatgtgggactcctatctatatggcccctgaagttatcagtgcccacgactatagccagcagtgtgacatttggagcataggcgtcgtaatgtacatgttattacgtggagaaccaccctttttggcaagctcagaagagaagctttttgagttaataagaaaaggagaactacattttgaaaatgcagtctggaattccataagtgactgtgctaaaagtgttttgaaacaacttatgaaagtagatcctgctcacagaatcacagctaaggaactactagataaccagtggttaacaggcaataaactttcttcggtgagaccaaccaatgtattagagatgatgaaggaatggaaaaataacccagaaagtgttgaggaaaacacaacagaagagaagaataagccgtccactgaagaaaagttgaaaagttaccaaccctggggaaatgtccctgatgccaattacacttcagatgaagaggaggaaaaacagtctactgcttatgaaaagcaatttcctgcaaccagtaaggacaactttgatatgtgcagttcaagtttcacatctagcaaactccttccagctgaaatcaagggagaaatggagaaaacccctgtgactccaagccaaggaacagcaaccaagtaccctgctaaatccggcgccctgtccagaaccaaaaagaaactctaaggttccctccagtgttggacagtacaaaaacaaagctgctcttgttagcactttgatgagggggtaggaggggaagaagacagccctatgctgagcttgtagccttttagctccacagagccccgccatgtgtttgcaccagcttaaaattgaagctgcttatctccaaagcagcataagctgcacatggcattaaaggacagccaccagtaggcttggcagtgggctgcagtggaaatcaactcaagatgtacacgaaggttttttaggggggcagataccttcaatttaaggctgtgggcacacttgctcatttttacttcaaattcttatgtttaggcacagctatttataggggaaaacaagaggccaaatatagtaatggaggtgccaaataattatgtgcactttgcactagaagactttgttagaaaattactaataaacttgccatacgtattacagcagaagtgcttcagtcattcacatgtgttcgtgagattttaggttgctatagattgtttaagacagcttattttaaatgtagaaaaataggagattttgtaactgcttgccattaacttgctgctaaattcccaatgtattgattaaatcaataaaaaacagatgttactcagc

SEQ ID NO: 27693 - DNA, 562 bp, Homo sapiens
  source 1..562: mol_type = unassigned DNA
gtgcagccggcacctcccggccaaccccgcggcttggagaaggggctttgcacccgccgccgctgtttgtcctcgcgcggcccccgtccactgccctgcggttgctctgcgggctgaaaagtttctcccggtgcagaattccgggctcagcgacagcctgcgccgagtgtgcgcacctgtcggagacccgccagtccgccggccgcggcagggccactacttctcagcacatccggccttctggctcatctcctccctgcatctcactacgcccctccccactccaggctctcacgtgtgaatatgtgtctagtgcatccttaacctgaggacttcaccagttcgaaattacagttttcaccatcaactaccttatcctttttggcctggttttcttcctcaaacagtggaaacatttttaaagttgcttttgttgcagagttaaacaaatggctgatagtggcttagataaaaaatccacaaaatgccccgactgttcatctgcttctcagaaagatgtactttgtgtatgttccagcaaaacaagggttcctccagtttt

SEQ ID NO: 27694 - DNA, 709 bp, Homo sapiens
  source 1..709: mol_type = unassigned DNA
gcctgaagttaaatcattttggaaagtgatacagctctcacgtgtgaatatgtgtctagtgcatccttaacctgaggacttcaccagttcgaaattacagttttcaccatcaactaccttatcctttttggcctggttttcttcctcaaacagtggaaacatttttaaagttgcttttgttgcagagttaaacaaatggctgatagtggcttagataaaaaatccacaaaatgccccgactgttcatctgcttctcagaaagatgtactttgtgtatgttccagcaaaacaagggttcctccagttttggtggtggaaatgtcacagacatcaagcattggtagtgcagaatctttaatttcactggagagaaaaaaagaaaaaaatatcaacagagatataacctccaggaaagatttgccctcaagaacctcaaatgtagagagaaaagcatctcagcaacaatggggtcggggcaactttacagaaggaaaagttcctcacataaggattgagaatggagctgctattgaggaaatctatacctttggaagaatattgggaaaagggagctttggaatagtcattgaagcgacagacaaggaaacagaaacgaagtgggcaattaaaaaagtgaacaaagaaaaggctggaagctctgctgtgaagttacttgaacgagaggtgaacattctgaaaagtgtaaaac

SEQ ID NO: 27695 - DNA, 582 bp, Homo sapiens
  source 1..582: mol_type = unassigned DNA
acacaggagggatgggtcggcagagtttgtaagtttggatgggtaataacttaacccaggggattgttggtggaggaacgagggagtcctgtagctagagataggcagaagcagacaggatatttgggttctaggtaagcaaggtgcatctaagacctaagaagtcttcagaggcagcagagacgaacaaatgaacgtgaaggcagggccactacttctcagcacatccggccttctggctcatctcctccctgcatctcactacgcccctccccactccagggtaaattccaataatgctgctctgttccagatggagttcatgttgactgagctctcacgtgtgaatatgtgtctagtgcatccttaacctgaggacttcaccagttcgaaattacagttttcaccatcaactaccttatcctttttggcctggttttcttcctcaaacagtggaaacatttttaaagttgcttttgttgcagagttaaacaaatggctgatagtggcttagataaaaaatccacaaaatgccccgactgttcatctgcttctcagaaagatgtactttgtgtatgttcc

SEQ ID NO: 27696 - DNA, 6409 bp, Homo sapiens
  source 1..6409: mol_type = unassigned DNA
atgggccaccaggagtctccgctggcccgggcgccggcgggaggtgcagcttatgtaaagaggttatgtaaagggctcagctggcgcgaacacgtggaaagccacgggagcctaggagcccaggcttccccagcgagcgccgcggcagcagaaggatccgctacacgccgggctcgggccgccacctcccgcgctgctcggtcccggaggcagcccgggcccggagcggaccatccccaggcaggggctccaggggggaaacgggccgcccggaagtggaggtgcgcgggccaggtcacaatccaaggtccggctcctccgcgtcccagggccggacggagggatgaggcagggggggcccgggcagcgccgttgctgctccccccgccgcccgcagccatggaaacggggaaggacggcgcccgcagaggtacacaaagcccggagcggaaaaggcgaagcccagtgccgcgggcgcccagcacgaagctgaggccggcggcggcggcccgggccatggatccggtggcggccgaggccccgggcgaggccttcctggcgcggcgacggcctgagggcggtggcgggtccgcgcggccgcgttacagcctgttggcggagatcgggcgcggcagctacggcgtggtttatgaggcagtggccgggcgcagcggggcccgggtggcggtcaagaagatccgctgcgacgcccccgagaacgtggagctggcgctggctgaattctgggccctcaccagcctcaagcggcgccaccagaacgtcgtgcagtttgaggagtgcgtcctgcagcgcaatgggttagcccagcgcatgagtcacggcaacaagagctcgcagctttacctgcgcctggtggagacctcgctgaaaggagaaaggatcctgggttatgctgaggagccctgctatctctggtttgtcatggagttctgtgaaggtggagacctgaatcagtatgtcctgtcccggaggccagacccagccaccaacaaaagtttcatgctacagctgacgagcgccattgccttcctgcacaaaaaccatattgtgcacagggacctgaagccagacaacatcctcatcacagagcggtctggcacccccatcctcaaagtggccgactttggactaagcaaggtctgtgctgggctggcaccccgaggcaaagagggcaatcaagacaacaaaaatgtgaatgtgaataagtactggctgtcctcagcctgcggttcggacttctacatggctcctgaagtctgggagggacactacacagccaaggcggacatctttgccctgggcattatcatctgggcaatgatagaaagaatcacttttattgactctgagaccaagaaggagctcctggggacctacattaaacaggggactgagatcgtccctgttggtgaggcgctgctagaaaacccaaagatggagttgcacatcccccaaaaacgcaggacttccatgtctgaggggatcaagcagctcttgaaagatatgttagctgctaacccacaggaccggcctgatgcctttgaacttgaaaccagaatggaccaggtcacatgtgctgcttaaaattcagggctaagcattttgggtgattttaaactaggtcgattcctcgggacccacagtctcaccacgtctcctccagaggacggcagagggtacaggtggtggcctggccggttggcgatctcccgacagctggatccggcaatgtgaagcttttgtttgggtttccccgcttctttttagttttgctttatttttttccttttcttttcttttttttttttcctctttcctttttttaaatttaaaccattgagacttcagaagagcaggacacaatgctgtggacaggcaccaatttctttaaagaaattcaatgtgggcaaggcatatgtgtaaatttcacttttactttttataaggggttagggagctatttttggttttgtccttcactttccctctgtcttccttctttatacttttctcagttctacttatgacacctcacttccctagagaaggcctgcctccccatagggaatctgggggtttcttctggaacggggcgtgaggacacaaggaggcctctgggccacgcctccctaccagatgcaggaactcctggactccttggtgggctggccctggctagcccttgggcctcggagatgatcagaggtgaagaaccgcctggaagaggaaggccagggtttggccaggagaactaagaaggtctcaactccaggctttgttgtgtttaagctattgagagccccaggccacaccaggacttgcagtggtgggaatccattcctcttctgccctgtgttgcagggaactaggaggtaagggtggagggcgaccatctcgctcttgctggcggtggagcagccatccctgcctttctgttgggaaaaactgttgtgccaaactcttgtgtggaacacagctgggtcttcagcaggcatctgtcactgccgtgaggtcagcgcttctcacctaactgcctcctggattgtcatcttcccagatgtgtcccatagtgtccaggtgtcacagagacggcctgaggccctaagatctggttgtgactttgccatgataacagggtgtcctgaactggctgccgttgtcgtgttctcacagtgaagggcgtgccctgtgtgccggggtccatggtgtcatatgcagtgacacacactgtcaagcgccatttccctcacccctggagacttactgttaggtgcctgccctcagtatagacgtatccaatgggaaaacagcggacctgcccagagcagggaggtgtcgtggaactgggtagaccccctgcagcgttaggggcccatttgtgggctcgccaccttcaggcttccccagccatgacacttcagccccgccacccatgcctgtctgctgcagccatccttgcactctccagcgacactctcgcacctccctaggggaagcttccctccccctgggctgctgctctgagcccatctgttctccccctgcaagaaggggcaatgctcttgtgttgtccctctgtctggacgcgcctggccactccgaaggcttttcaccccattatggccaaatagtatagggccactggggagggggaagggaatcattttgtgttcatttttgttttctgtttcacctaaaccagcataggattgataggggagacggttggcgggcatttccgtttctatgtgaccaaggcagcaggggcttttacctgctaagcggcaatcctttggccctgagaatttgggagagaacagtgcatcaggccaggctcagcaatatgtttgctcacattctttcagccttctgtcacccccctcaacaccaaactttcttccttgtgagcagaaggttggctgctgttagcaggatcccacagtgataaccaggcccttcccttcctaagccaaaacccattgtgactgcctgtctctcctgtctctgacttctcaggcagcctcctgagtgcactgagttgtatccgagagggtgggaacagcagcatcccctaattgcagtacacggttccttttccgcccgccaccctgcctttccttgggggcagctgtctctctgtacatgagcaaatgggcaaaaacagtccccaaacccagcacccccctctccctggctgcagcccacactgtaacatccctagtgaggctccagcctaatgagccccttattttcttttttttccctccccaggtctagtagctctaactaaaaagttcttggagccatcgtgctccccctttgttatttttcttgctatcagagtagcaagaaacagcacccctgtaggtgacaggtgggcagcctggtaggggtcgccagcctccatgccccctcatcttccagttcttgcttagtggcacgacctctttccatagcataaatgcaggccagcgttttagccccaagtgcctgcccttgcttcttacccctcccctgctttctcaaacacttgcccacctcaggcactcagcgggctccgccgtggtgagagaactggccgtggctcagccccgggtagcacctgtagtttcagtgccactctccactgtccccttgtggaccagcttccactcactgtcacgtcccccctcctgcgtcttcactgggtctcaggctgccagcagctctctggtgcatcgtctcaacaccaccaagtttgtaggacctgcccaagttctagtagtattcaaaacttcaaacggcagtcatttgttctcctcggctctgtggcaaggatagccctttggagggggactcttgacctcggctgttagggatctgaacttggttttcccgtcagaagaatcagcaggacagatcgtagtgccttattccattgtcctcccctggccaggcctcctggctcagctggaagtgcatggcttctttctccctatctgtgtcctctgtcacttgctctttcactctctctctcattcccagagagccacgggggagggatcaccctcacccccaacaccctcttcctgagggctgtagccaggtccgcatctccccaccaccaccagggcactcactcgcagctatagcccaggacagaaaaactgtgctttggacaggtgcacactctctgcctcttacctctagccaggaggatgcctcagtctgttcattcgagactggccccgtctgaaccttctctgggcactggggactaaggttgcaggccttagcctcgtctcgtcccagaggcattggatcaggagaatgggaatttttttcctcccacctggacatagtttgcccctgtggctgcctttctgagggagtatactaaatgtttacttaagaaacaccctgtttacagccagaggagaaacacccaacactgagtggagatttgactctggacagggcctggcctccttagtggcactgccggggggccccagagcgaatgagggcagagatgcccggggcaggggcaaacgccctccgctccctctgctcccaaccctgtggtgctaggaccactccccgccttccctacggcctcctcgccctgcacattccccacctccacattcccctcctccaagatctcagctccttaacatatcagttgtctcctagcctagaaaaccagtgtttggagcaataagatgattatttttgcttgaatctttttctaagagaaggaaaagagctggcattgtgggaattttctttttatgctgttagctgtttaccttcttagaagacatcctaataggatggatgtctgggttttagccttggggtatcttttggaaacttagaaaagcaggagtcaggctgccaccccctaaggagggaccctaacgttctgcccttgcctggttccatatggctccttccagccctgcccaccaagtgcagctcccactttccatcctgcccatacgcccctcttcccccgacatctgggggcgctggtggcacttactctaggttggtctcagactatccctccccttggctggttttccctcctaggcctgtctggcagcccccagacagacgtagctcctgggagtctcggccctggcaaccttggaagagccaagctgacattgtttagctcttcaggccactgggttttggaggcagaagtccagagatactggctctgccaagctgtcgtactgggctgtggcacagccttcgagacaacacgggtgtatctctgatcctgccctacctaggcttcaaggggcttctgtctggagaaatgccctcaaagggtaaccagtaggtgtggcattgaattggccagtgttagcatctacagccatcaccgagatgagtccactgccgttgcctgcccgagggccccctaaggttatagacggtatcagcagggaggccgtcccgctggttttctaggagagcccacaggaggaagggagcctcttcaggggcactggaatcttttgtgccaggggcttcttttcatcagagccggggagtacattgcagtgacttcttaaacatttgtgtgggacagacgagcgtgagggaggttttaagccaggcacaaagttagtttccaatactagttaataaatctatttttcttcatttcctttttttgcacagaagctggtaatctaggacctacgtgtgaacaactttatatgaatattttttgtacttggtttacttgggttggtatgatacattatatttaagttccttgaacactgtggatcccctaatgtgtatgaatgactgaggctttgtaaattaagggacgtttgtgtgaataaagttatttgatggggtcaaagaagccatatgtgatttg

SEQ ID NO: 27697 - DNA, 6685 bp, Homo sapiens
  source 1..6685: mol_type = unassigned DNA
gacaatcacccagtcagtatttattaggcgcctactgcggacggttggtcttcacgcagatcaggcgagaagggatagtgatgcgcgggccgctgcggagacccggagcccgccgcggatcacgggaatttcgcgcctattttttgttggctgggtgttctcgccagtgattgggtcccggcaaggcgtgccggtgcgctcggctgcggctgctccgtcgacctttgcaggaccgggcggtgcagggctcactcggctggcgtcccgggggatgggccaccaggagtctccgctggcccgggcgccggcgggaggtgcagcttatgtaaagaggttatgtaaagggctcagctggcgcgaacacgtggaaagccacgggagcctaggagcccaggcttccccagcgagcgccgcggcagcagaaggatccgctacacgccgggctcgggccgccacctcccgcgctgctcggtcccggaggcagcccgggcccggagcggaccatccccaggcaggggctccaggggggaaacgggccgcccggaagtggaggtgcgcgggccaggtcacaatccaaggtccggctcctccgcgtcccagggccggacggagggatgaggcagggggggcccgggcagcgccgttgctgctccccccgccgcccgcagccatggaaacggggaaggacggcgcccgcagaggtacacaaagcccggagcggaaaaggcgaagcccagtgccgcgggcgcccagcacgaagctgaggccggcggcggcggcccgggccatggatccggtggcggccgaggccccgggcgaggccttcctggcgcggcgacggcctgagggcggtggcgggtccgcgcggccgcgttacagcctgttggcggagatcgggcgcggcagctacggcgtggtttatgaggcagtggccgggcgcagcggggcccgggtggcggtcaagaagatccgctgcgacgcccccgagaacgtggagctggcgctggctgaattctgggccctcaccagcctcaagcggcgccaccagaacgtcgtgcagtttgaggagtgcgtcctgcagcgcaatgggttagcccagcgcatgagtcacggcaacaagagctcgcagctttacctgcgcctggtggagacctcgctgaaaggagaaaggatcctgggttatgctgaggagccctgctatctctggtttgtcatggagttctgtgaaggtggagacctgaatcagtatgtcctgtcccggaggccagacccagccaccaacaaaagtttcatgctacagctgacgagcgccattgccttcctgcacaaaaaccatattgtgcacagggacctgaagccagacaacatcctcatcacagagcggtctggcacccccatcctcaaagtggccgactttggactaagcaaggtctgtgctgggctggcaccccgaggcaaagagggcaatcaagacaacaaaaatgtgaatgtgaataagtactggctgtcctcagcctgcggttcggacttctacatggctcctgaagtctgggagggacactacacagccaaggcggacatctttgccctgggcattatcatctgggcaatgatagaaagaatcacttttattgactctgagaccaagaaggagctcctggggacctacattaaacaggggactgagatcgtccctgttggtgaggcgctgctagaaaacccaaagatggagttgcacatcccccaaaaacgcaggacttccatgtctgaggggatcaagcagctcttgaaagatatgttagctgctaacccacaggaccggcctgatgcctttgaacttgaaaccagaatggaccaggtcacatgtgctgcttaaaattcagggctaagcattttgggtgattttaaactaggtcgattcctcgggacccacagtctcaccacgtctcctccagaggacggcagagggtacaggtggtggcctggccggttggcgatctcccgacagctggatccggcaatgtgaagcttttgtttgggtttccccgcttctttttagttttgctttatttttttccttttcttttcttttttttttttcctctttcctttttttaaatttaaaccattgagacttcagaagagcaggacacaatgctgtggacaggcaccaatttctttaaagaaattcaatgtgggcaaggcatatgtgtaaatttcacttttactttttataaggggttagggagctatttttggttttgtccttcactttccctctgtcttccttctttatacttttctcagttctacttatgacacctcacttccctagagaaggcctgcctccccatagggaatctgggggtttcttctggaacggggcgtgaggacacaaggaggcctctgggccacgcctccctaccagatgcaggaactcctggactccttggtgggctggccctggctagcccttgggcctcggagatgatcagaggtgaagaaccgcctggaagaggaaggccagggtttggccaggagaactaagaaggtctcaactccaggctttgttgtgtttaagctattgagagccccaggccacaccaggacttgcagtggtgggaatccattcctcttctgccctgtgttgcagggaactaggaggtaagggtggagggcgaccatctcgctcttgctggcggtggagcagccatccctgcctttctgttgggaaaaactgttgtgccaaactcttgtgtggaacacagctgggtcttcagcaggcatctgtcactgccgtgaggtcagcgcttctcacctaactgcctcctggattgtcatcttcccagatgtgtcccatagtgtccaggtgtcacagagacggcctgaggccctaagatctggttgtgactttgccatgataacagggtgtcctgaactggctgccgttgtcgtgttctcacagtgaagggcgtgccctgtgtgccggggtccatggtgtcatatgcagtgacacacactgtcaagcgccatttccctcacccctggagacttactgttaggtgcctgccctcagtatagacgtatccaatgggaaaacagcggacctgcccagagcagggaggtgtcgtggaactgggtagaccccctgcagcgttaggggcccatttgtgggctcgccaccttcaggcttccccagccatgacacttcagccccgccacccatgcctgtctgctgcagccatccttgcactctccagcgacactctcgcacctccctaggggaagcttccctccccctgggctgctgctctgagcccatctgttctccccctgcaagaaggggcaatgctcttgtgttgtccctctgtctggacgcgcctggccactccgaaggcttttcaccccattatggccaaatagtatagggccactggggagggggaagggaatcattttgtgttcatttttgttttctgtttcacctaaaccagcataggattgataggggagacggttggcgggcatttccgtttctatgtgaccaaggcagcaggggcttttacctgctaagcggcaatcctttggccctgagaatttgggagagaacagtgcatcaggccaggctcagcaatatgtttgctcacattctttcagccttctgtcacccccctcaacaccaaactttcttccttgtgagcagaaggttggctgctgttagcaggatcccacagtgataaccaggcccttcccttcctaagccaaaacccattgtgactgcctgtctctcctgtctctgacttctcaggcagcctcctgagtgcactgagttgtatccgagagggtgggaacagcagcatcccctaattgcagtacacggttccttttccgcccgccaccctgcctttccttgggggcagctgtctctctgtacatgagcaaatgggcaaaaacagtccccaaacccagcacccccctctccctggctgcagcccacactgtaacatccctagtgaggctccagcctaatgagccccttattttcttttttttccctccccaggtctagtagctctaactaaaaagttcttggagccatcgtgctccccctttgttatttttcttgctatcagagtagcaagaaacagcacccctgtaggtgacaggtgggcagcctggtaggggtcgccagcctccatgccccctcatcttccagttcttgcttagtggcacgacctctttccatagcataaatgcaggccagcgttttagccccaagtgcctgcccttgcttcttacccctcccctgctttctcaaacacttgcccacctcaggcactcagcgggctccgccgtggtgagagaactggccgtggctcagccccgggtagcacctgtagtttcagtgccactctccactgtccccttgtggaccagcttccactcactgtcacgtcccccctcctgcgtcttcactgggtctcaggctgccagcagctctctggtgcatcgtctcaacaccaccaagtttgtaggacctgcccaagttctagtagtattcaaaacttcaaacggcagtcatttgttctcctcggctctgtggcaaggatagccctttggagggggactcttgacctcggctgttagggatctgaacttggttttcccgtcagaagaatcagcaggacagatcgtagtgccttattccattgtcctcccctggccaggcctcctggctcagctggaagtgcatggcttctttctccctatctgtgtcctctgtcacttgctctttcactctctctctcattcccagagagccacgggggagggatcaccctcacccccaacaccctcttcctgagggctgtagccaggtccgcatctccccaccaccaccagggcactcactcgcagctatagcccaggacagaaaaactgtgctttggacaggtgcacactctctgcctcttacctctagccaggaggatgcctcagtctgttcattcgagactggccccgtctgaaccttctctgggcactggggactaaggttgcaggccttagcctcgtctcgtcccagaggcattggatcaggagaatgggaatttttttcctcccacctggacatagtttgcccctgtggctgcctttctgagggagtatactaaatgtttacttaagaaacaccctgtttacagccagaggagaaacacccaacactgagtggagatttgactctggacagggcctggcctccttagtggcactgccggggggccccagagcgaatgagggcagagatgcccggggcaggggcaaacgccctccgctccctctgctcccaaccctgtggtgctaggaccactccccgccttccctacggcctcctcgccctgcacattccccacctccacattcccctcctccaagatctcagctccttaacatatcagttgtctcctagcctagaaaaccagtgtttggagcaataagatgattatttttgcttgaatctttttctaagagaaggaaaagagctggcattgtgggaattttctttttatgctgttagctgtttaccttcttagaagacatcctaataggatggatgtctgggttttagccttggggtatcttttggaaacttagaaaagcaggagtcaggctgccaccccctaaggagggaccctaacgttctgcccttgcctggttccatatggctccttccagccctgcccaccaagtgcagctcccactttccatcctgcccatacgcccctcttcccccgacatctgggggcgctggtggcacttactctaggttggtctcagactatccctccccttggctggttttccctcctaggcctgtctggcagcccccagacagacgtagctcctgggagtctcggccctggcaaccttggaagagccaagctgacattgtttagctcttcaggccactgggttttggaggcagaagtccagagatactggctctgccaagctgtcgtactgggctgtggcacagccttcgagacaacacgggtgtatctctgatcctgccctacctaggcttcaaggggcttctgtctggagaaatgccctcaaagggtaaccagtaggtgtggcattgaattggccagtgttagcatctacagccatcaccgagatgagtccactgccgttgcctgcccgagggccccctaaggttatagacggtatcagcagggaggccgtcccgctggttttctaggagagcccacaggaggaagggagcctcttcaggggcactggaatcttttgtgccaggggcttcttttcatcagagccggggagtacattgcagtgacttcttaaacatttgtgtgggacagacgagcgtgagggaggttttaagccaggcacaaagttagtttccaatactagttaataaatctatttttcttcatttcctttttttgcacagaagctggtaatctaggacctacgtgtgaacaactttatatgaatattttttgtacttggtttacttgggttggtatgatacattatatttaagttccttgaacactgtggatcccctaatgtgtatgaatgactgaggctttgtaaattaagggacgtttgtgtgaataaagttatttgatggggtcaaagaagccatatgtgatttgaaaaa

SEQ ID NO: 27698 - DNA, 1197 bp, Homo sapiens
  source 1..1197: mol_type = unassigned DNA
acaaagcccggagcggaaaaggcgaagcccagtgccgcgggcgcccagcacgaagctgaggccggcggcggcggcccgggccatggatccggtggcggccgaggccccgggcgaggccttcctggcgcggcgacggcctgagggcggtggcgggtccgcgcggccgcgttacagcctgttggcggagatcgggcgcggcagctacggcgtggtttatgaggcagtggccgggcgcagcggggcccgggtggcggtcaagaagatccgctgcgacgcccccgagaacgtggagctggcgctggctgaattctgggccctcaccagcctcaagcggcgccaccagaacgtcgtgcagtttgaggagtgcgtcctgcagcgcaatgggttagcccagcgcatgagtcacggcaacaagagctcgcagctttacctgcgcctggtggagacctcgctgaaaggtcgattcctcgggacccacagtctcaccacgtctcctccagaggacggcagagggtacaggtggtggcctggccggttggcgatctcccgacagctggatccggcaatgtgaagcttttgtttgggtttccccgcttctttttagttttgctttatttttttccttttcttttcttttttttttttcctctttcctttttttaaatttaaaccattgagacttcagaagagcaggacacaatgctgtggacaggcaccaatttctttaaagaaattcaatgtgggcaaggcatatgtgtaaatttcacttttactttttataaggggttagggagctatttttggttttgtccttcactttccctctgtcttccttctttatacttttctcagttctacttatgacacctcacttccctagagaaggcctgcctccccatagggaatctgggggtttcttctggaacggggcgtgaggacacaaggaggcctctgggccacgcctccctaccagatgcaggaactcctggactccttggtgggctggccctggctagcccttgggcctcggagatgatcagaggtgaagaaccgcctggaagaggaaggccagggtttggccaggagaactaagaaggtctcaactccaggctttgttgtgtttaagctattgagagccccaggccacaccaggacttgcagtggtgggaatccattcctcttctgccctgtgttgca

SEQ ID NO: 27699 - DNA, 4933 bp, Homo sapiens
  source 1..4933: mol_type = unassigned DNA
aaaactaagaggggtgggcagctagcgtcgtttctaggcaaccgcagactccgggtccttagccgggcctgatggccctgaggcagttcggatgtgtcccaggaagtgcccatgtgtggtccgccgtccattccacacctctgagcgcctttgtcctctgaacttctcaccagttctagcgagtaaaattgcgtcccagatgttgtggaactgtccctggatctatagctcttcaccgtctctactttcttccttctaagagatcctgaaacctctgtcatggaaaagtaccacgtgttggagatgattggagaaggctcttttgggagggtgtacaagggtcgaagaaaatacagtgctcaggtcgtggccctgaagttcatcccaaaattggggcgctcagagaaggagctgaggaatttgcaacgagagattgaaataatgcggggtctgcggcatcccaacattgtgcatatgcttgacagctttgaaactgataaagaggtggtggtggtgacagactatgctgagggagagctctttcagatcctagaagatgacggaaaacttcctgaagaccaggttcaggccattgctgcccagttggtgtcagccctgtactatctgcattcccaccgcatcctacaccgagatatgaagcctcagaacatcctcctcgccaagggtggtggcatcaagctctgtgactttggatttgcccgggctatgagcaccaatacaatggtgctgacatccatcaaaggcacaccactctatatgtctccagagctggtggaggagcgaccatacgaccacacagcggacctctggtctgttggctgcatactatatgaactggcagtaggcacccctcccttctatgctacaagcatctttcagctggtcagcctcattctcaaggaccctgtgcgctggccctcaaccatcagtccctgctttaagaacttcctgcagggactgctcaccaaagacccacggcagcgactgtcctggccagacctcttatatcacccctttattgctggtcatgtcaccataataactgagccagcaggcccagatttggggaccccattcaccagccgcctacccccagaacttcaggtcctaaaggacgaacaggcccatcggttggcccccaagggtaatcagtctcgcatcttgactcaggcctataaacgcatggctgaggaggccatgcagaagaaacatcagaacacaggacctgcccttgagcaagaggacaagaccagcaaggtggctcctggcacagcccctctgcccagactcggggccactcctcaggaatcaagcctcctggccgggatcttagcctcagaattgaagagcagctgggctaaatcagggactggagaggtgccctctgcacctcgggaaaaccggaccaccccagattgtgaacgagcattcccagaggagaggccagaggtgctgggccagcggagcactgatgtagtggacctggaaaatgaggagccagacagtgacaatgagtggcagcacctgctagagaccactgagcctgtgcctattcaactgaaggctcctctcaccttgctgtgtaatcctgacttctgccagcgcatccagagtcagctgcatgaagctggagggcagatcctgaaaggcatcttggagggtgcttcccacatcctgcctgcattccgggtcctgagcagtcttctctccagctgcagtgattctgttgccttgtattccttctgccgggaggcagggcttcctgggctgctgctgagtctactcaggcacagtcaggagagcaacagcctccagcagcaatcttggtatgggaccttcttacaggacctgatggctgtgattcaggcctactttgcctgtaccttcaatctggagaggagccagacaagtgacagcctgcaggtgtttcaggaggctgccaacctttttctggacctgttggggaaactgctggcccaaccagatgactctgagcagactttgcggagggacagccttatgtgctttactgtcctgtgcgaagccatggatgggaacagccgggccatctccaaagccttttactccagcttgctgacgacacagcaggttgtcttggatgggctccttcatggcttgacagttccacagctccctgtccacactccccaaggagccccgcaagtgagccagccactgcgagagcagagtgaggatatacctggagccatttcctctgccctggcagccatatgcactgctcctgtgggactgcccgactgctgggatgccaaggagcaggtctgttggcatttggcaaatcagctaactgaagacagcagccagctcaggccatccctcatctctggcctgcagcatcccatcctgtgcctgcaccttctcaaggttctatactcctgctgccttgtcagtgagggcctgtgccgtcttctggggcaggagcccctggccttggaatccctgtttatgttgattcagggcaaggtaaaagtagtagattgggaagagtctactgaagtgacactctacttcctctcccttcttgtctttcggctccaaaacctgccttgtggaatggagaagctaggcagtgacgttgctactctctttacccattcgcatgtcgtctctcttgtgagtgcagcagcctgtctattgggacagcttggtcagcaaggggtgacctttgacctccagcccatggaatggatggctgcagccacacatgccttgtctgcccctgcagaggttcggttgactccaccaggtagttgtggattctatgatggcctccttatccttctgttgcagctcctcactgagcaggggaaggctagcctaatcagggatatgtccagttcagaaatgtggaccgttttgtggcaccgcttctccatggtcctgaggctccccgaggaggcatctgcacaggaaggggagctttcgctatccagtccaccaagccctgagccagactggacactgatttctccccagggcatggcagccctgctgagcctggccatggccacctttacccaggagccccagttatgcctgagctgcctgtcccagcatggaagtatcctcatgtccatcctgaagcatctgctttgccccagcttcctgaatcaactgcgccaggcgcctcatgggtctgagtttctccctgtcgtggtgctctctgtctgccagctcctttgcttcccctttgcgctggacatggatgctgacctccttataggtgtcttggccgacctcagggactcagaagttgcagcccatctgctgcaggtctgctgctaccatcttccgttgatgcaagtggagctgcccatcagccttctcacacgcctggccctcatggatcccacctctctcaaccagtttgtgaacacagtgtctgcctcccctagaaccatcgtctcgtttctctcagttgccctcctgagtgaccagccactgttgacctccgaccttctctctctgctggcccatactgccagggtcctgtctcccagccacttgtcctttatccaagagcttctggctggctctgatgaatcctatcggcccctgcgcagcctcctgggccacccagagaattctgtgcgggcacacacttataggctcctgggacacttgctccaacacagcatggccctgcgtggggcactgcagagccagtctggactgctcagccttctgctgcttgggcttggagacaaggatcctgttgtgcggtgcagtgccagctttgctgtgggcaatgcagcctaccaggctggtcctctgggacctgccctggcagctgcagtgcccagtatgacccagctgcttggagatcctcaggctggtatccggcgcaatgttgcatcagctctgggcaacttgggacctgaaggtttgggagaggagctgttacagtgcgaagtaccccagcggctcctagaaatggcatgtggagacccccagccaaatgtgaaggaggctgccctcattgccctccggagcctgcaacaggagcctggcatccatcaggtactggtgtccctgggtgccagtgagaaactatccttgctctctctggggaatcagtcactgccacacagcagtcctaggcctgcctctgccaaacactgcaggaaactcattcacctcctgaggccagcccatagcatgtgattccagattcctgcggtccagcctccaactttggttgccagctctttcttattctactacacaagccgccaactcaactgagagctaaagagactagaaaagagataagctgccaactcaactgagaacaagaaactagaagagatttatatataaagcttcttccttctcccagatgcaggatgttttcaaccagtaaattttattgctgttggtgccagagaagagtcctttcttctctacatccaggggccttttctccaataatgtgcctttaactctagggacctgcctcacggaccttagggaaaaacctcaacctgaaagatctcttcctttctggagctcctttaatcttcccagcaggtttttgccttagacgtgctggccccaggacagtgatgaagacagagcctgtctcagctctaggctgtggggatcaatgccatcagtccctgttattgagggattatcccttagccaacattcctatctgtgggtgggcgtggagagtgtatctttttttggggtgtgtgtgtatatgtgtgtgtgtatgtgtgtgtgtgtttaatagttctgtttgtaaactcttttaataaaagttgtgcctcaccatacttgaagctcccaggacaagggttgagaggctcaacccctctttcagcttctatgtggtgttggaggtgctggtatcgtgttcacacaa

SEQ ID NO: 27700 - DNA, 4821 bp, Homo sapiens
  source 1..4821: mol_type = unassigned DNA
gcagactccgggtccttagccgggcctgatggccctgaggcagttcggatgtgtcccaggaagtgcccatgtgtggtccgccgtccattccacacctctgagcgcctttgtcctctgaacttctcaccagttctagcgagtaaaattgcgtcccagatgttgtggaactgtccctggatctatagctcttcaccgtctctactttcttccttctaagagatcctgaaacctctgtcatggaaaagtaccacgtgttggagatgattggagaaggctcttttgggagggtgtacaagggtcgaagaaaatacagtgctcaggtcgtggccctgaagttcatcccaaaattggggcgctcagagaaggagctgaggaatttgcaacgagagattgaaataatgcggggtctgcggcatcccaacattgtgcatatgcttgacagctttgaaactgataaagaggtggtggtggtgacagactatgctgagggagagctctttcagatcctagaagatgacggaaaacttcctgaagaccaggttcaggccattgctgcccagttggtgtcagccctgtactatctgcattcccaccgcatcctacaccgagatatgaagcctcagaacatcctcctcgccaagggtggtggcatcaagctctgtgactttggatttgcccgggctatgagcaccaatacaatggtgctgacatccatcaaaggcacaccactctatatgtctccagagctggtggaggagcgaccatacgaccacacagcggacctctggtctgttggctgcatactatatgaactggcagtaggcacccctcccttctatgctacaagcatctttcagctggtcagcctcattctcaaggaccctgtgcgctggccctcaaccatcagtccctgctttaagaacttcctgcagggactgctcaccaaagacccacggcagcgactgtcctggccagacctcttatatcacccctttattgctggtcatgtcaccataataactgagccagcaggcccagatttggggaccccattcaccagccgcctacccccagaacttcaggtcctaaaggacgaacaggcccatcggttggcccccaagggtaatcagtctcgcatcttgactcaggcctataaacgcatggctgaggaggccatgcagaagaaacatcagaacacaggacctgcccttgagcaagaggacaagaccagcaaggtggctcctggcacagcccctctgcccagactcggggccactcctcaggaatcaagcctcctggccgggatcttagcctcagaattgaagagcagctgggctaaatcagggactggagaggtgccctctgcacctcgggaaaaccggaccaccccagattgtgaacgagcattcccagaggagaggccagaggtgctgggccagcggagcactgatgtagtggacctggaaaatgaggagccagacagtgacaatgagtggcagcacctgctagagaccactgagcctgtgcctattcaactgaaggctcctctcaccttgctgtgtaatcctgacttctgccagcgcatccagagtcagctgcatgaagctggagggcagatcctgaaaggcatcttggagggtgcttcccacatcctgcctgcattccgggtcctgagcagtcttctctccagctgcagtgattctgttgccttgtattccttctgccgggaggcagggcttcctgggctgctgctgagtctactcaggcacagtcaggagagcaacagcctccagcagcaatcttggtatgggaccttcttacaggacctgatggctgtgattcaggcctactttgcctgtaccttcaatctggagaggagccagacaagtgacagcctgcaggtgtttcaggaggctgccaacctttttctggacctgttggggaaactgctggcccaaccagatgactctgagcagactttgcggagggacagccttatgtgctttactgtcctgtgcgaagccatggatgggaacagccgggccatctccaaagccttttactccagcttgctgacgacacagcaggttgtcttggatgggctccttcatggcttgacagttccacagctccctgtccacactccccaaggagccccgcaagtgagccagccactgcgagagcagagtgaggatatacctggagccatttcctctgccctggcagccatatgcactgctcctgtgggactgcccgactgctgggatgccaaggagcaggtctgttggcatttggcaaatcagctaactgaagacagcagccagctcaggccatccctcatctctggcctgcagcatcccatcctgtgcctgcaccttctcaaggttctatactcctgctgccttgtcagtgagggcctgtgccgtcttctggggcaggagcccctggccttggaatccctgtttatgttgattcagggcaaggtaaaagtagtagattgggaagagtctactgaagtgacactctacttcctctcccttcttgtctttcggctccaaaacctgccttgtggaatggagaagctaggcagtgacgttgctactctctttacccattcgcatgtcgtctctcttgtgagtgcagcagcctgtctattgggacagcttggtcagcaaggggtgacctttgacctccagcccatggaatggatggctgcagccacacatgccttgtctgcccctgcagagctcctcactgagcaggggaaggctagcctaatcagggatatgtccagttcagaaatgtggaccgttttgtggcaccgcttctccatggtcctgaggctccccgaggaggcatctgcacaggaaggggagctttcgctatccagtccaccaagccctgagccagactggacactgatttctccccagggcatggcagccctgctgagcctggccatggccacctttacccaggagccccagttatgcctgagctgcctgtcccagcatggaagtatcctcatgtccatcctgaagcatctgctttgccccagcttcctgaatcaactgcgccaggcgcctcatgggtctgagtttctccctgtcgtggtgctctctgtctgccagctcctttgcttcccctttgcgctggacatggatgctgacctccttataggtgtcttggccgacctcagggactcagaagttgcagcccatctgctgcaggtctgctgctaccatcttccgttgatgcaagtggagctgcccatcagccttctcacacgcctggccctcatggatcccacctctctcaaccagtttgtgaacacagtgtctgcctcccctagaaccatcgtctcgtttctctcagttgccctcctgagtgaccagccactgttgacctccgaccttctctctctgctggcccatactgccagggtcctgtctcccagccacttgtcctttatccaagagcttctggctggctctgatgaatcctatcggcccctgcgcagcctcctgggccacccagagaattctgtgcgggcacacacttataggctcctgggacacttgctccaacacagcatggccctgcgtggggcactgcagagccagtctggactgctcagccttctgctgcttgggcttggagacaaggatcctgttgtgcggtgcagtgccagctttgctgtgggcaatgcagcctaccaggctggtcctctgggacctgccctggcagctgcagtgcccagtatgacccagctgcttggagatcctcaggctggtatccggcgcaatgttgcatcagctctgggcaacttgggacctgaaggtttgggagaggagctgttacagtgcgaagtaccccagcggctcctagaaatggcatgtggagacccccagccaaatgtgaaggaggctgccctcattgccctccggagcctgcaacaggagcctggcatccatcaggtactggtgtccctgggtgccagtgagaaactatccttgctctctctggggaatcagtcactgccacacagcagtcctaggcctgcctctgccaaacactgcaggaaactcattcacctcctgaggccagcccatagcatgtgattccagattcctgcggtccagcctccaactttggttgccagctctttcttattctactacacaagccgccaactcaactgagagctaaagagactagaaaagagataagctgccaactcaactgagaacaagaaactagaagagatttatatataaagcttcttccttctcccagatgcaggatgttttcaaccagtaaattttattgctgttggtgccagagaagagtcctttcttctctacatccaggggccttttctccaataatgtgcctttaactctagggacctgcctcacggaccttagggaaaaacctcaacctgaaagatctcttcctttctggagctcctttaatcttcccagcaggtttttgccttagacgtgctggccccaggacagtgatgaagacagagcctgtctcagctctaggctgtggggatcaatgccatcagtccctgttattgagggattatcccttagccaacattcctatctgtgggtgggcgtggagagtgtatctttttttggggtgtgtgtgtatatgtgtgtgtgtatgtgtgtgtgtgtttaatagttctgtttgtaaactcttttaataaaagttgtgcctcaccatacttgaagctcccaggacaagggttgagaggctcaacccctctttcagcttctatgtggtgttggaggtgctggtatcgtgttc

SEQ ID NO: 27701 - DNA, 4853 bp, Homo sapiens
  source 1..4853: mol_type = unassigned DNA
gtgggcagctagcgtcgtttctaggcaaccgcagactccgggtccttagccgggcctgatggccctgaggcagttcggatgtgtcccaggaagtgcccatgtgtggtccgccgtccattccacacctctgagcgcctttgtcctctgaacttctcaccagttctagcgagtaaaattgcgtcccagatgttgtggaactgtccctggatctatagctcttcaccgtctctactttcttccttctaagagatcctgaaacctctgtcatggaaaagtaccacgtgttggagatgattggagaaggctcttttgggagggtgtacaagggtcgaagaaaatacagtgctcaggtcgtggccctgaagttcatcccaaaattggggcgctcagagaaggagctgaggaatttgcaacgagagattgaaataatgcggggtctgcggcatcccaacattgtgcatatgcttgacagctttgaaactgataaagaggtggtggtggtgacagactatgctgagggagagctctttcagatcctagaagatgacggaaaacttcctgaagaccaggttcaggccattgctgcccagttggtgtcagccctgtactatctgcattcccaccgcatcctacaccgagatatgaagcctcagaacatcctcctcgccaagggtggtggcatcaagctctgtgactttggatttgcccgggctatgagcaccaatacaatggtgctgacatccatcaaaggcacaccactctatatgtctccagagctggtggaggagcgaccatacgaccacacagcggacctctggtctgttggctgcatactatatgaactggcagtaggcacccctcccttctatgctacaagcatctttcagctggtcagcctcattctcaaggaccctgtgcgctggccctcaaccatcagtccctgctttaagaacttcctgcagggactgctcaccaaagacccacggcagcgactgtcctggccagacctcttatatcacccctttattgctggtcatgtcaccataataactgagccagcaggcccagatttggggaccccattcaccagccgcctacccccagaacttcaggtcctaaaggacgaacaggcccatcggttggcccccaagggtaatcagtctcgcatcttgactcaggcctataaacgcatggctgaggaggccatgcagaagaaacatcagaacacaggacctgcccttgagcaagaggacaagaccagcaaggtggctcctggcacagcccctctgcccagactcggggccactcctcaggaatcaagcctcctggccgggatcttagcctcagaattgaagagcagctgggctaaatcagggactggagaggtgccctctgcacctcgggaaaaccggaccaccccagattgtgaacgagcattcccagaggagaggccagaggtgctgggccagcggagcactgatgtagtggacctggaaaatgaggagccagacagtgacaatgagtggcagcacctgctagagaccactgagcctgtgcctattcaactgaaggctcctctcaccttgctgtgtaatcctgacttctgccagcgcatccagagtcagctgcatgaagctggagggcagatcctgaaaggcatcttggagggtgcttcccacatcctgcctgcattccgggtcctgagcagtcttctctccagctgcagtgattctgttgccttgtattccttctgccgggaggcagggcttcctgggctgctgctgagtctactcaggcacagtcaggagagcaacagcctccagcagcaatcttggtatgggaccttcttacaggacctgatggctgtgattcaggcctactttgcctgtaccttcaatctggagaggagccagacaagtgacagcctgcaggtgtttcaggaggctgccaacctttttctggacctgttggggaaactgctggcccaaccagatgactctgagcagactttgcggagggacagccttatgtgctttactgtcctgtgcgaagccatggatgggaacagccgggccatctccaaagccttttactccagcttgctgacgacacagcaggttgtcttggatgggctccttcatggcttgacagttccacagctccctgtccacactccccaaggagccccgcaagtgagccagccactgcgagagcagagtgaggatatacctggagccatttcctctgccctggcagccatatgcactgctcctgtgggactgcccgactgctgggatgccaaggagcaggtctgttggcatttggcaaatcagctaactgaagacagcagccagctcaggccatccctcatctctggcctgcagcatcccatcctgtgcctgcaccttctcaaggttctatactcctgctgccttgtcagtgagggcctgtgccgtcttctggggcaggagcccctggccttggaatccctgtttatgttgattcagggcaaggtaaaagtagtagattgggaagagtctactgaagtgacactctacttcctctcccttcttgtctttcggctccaaaacctgccttgtggaatggagaagctaggcagtgacgttgctactctctttacccattcgcatgtcgtctctcttgtgagtgcagcagcctgtctattgggacagcttggtcagcaaggggtgacctttgacctccagcccatggaatggatggctgcagccacacatgccttgtctgcccctgcagagatgagttgtgagcaggggaaggctagcctaatcagggatatgtccagttcagaaatgtggaccgttttgtggcaccgcttctccatggtcctgaggctccccgaggaggcatctgcacaggaaggggagctttcgctatccagtccaccaagccctgagccagactggacactgatttctccccagggcatggcagccctgctgagcctggccatggccacctttacccaggagccccagttatgcctgagctgcctgtcccagcatggaagtatcctcatgtccatcctgaagcatctgctttgccccagcttcctgaatcaactgcgccaggcgcctcatgggtctgagtttctccctgtcgtggtgctctctgtctgccagctcctttgcttcccctttgcgctggacatggatgctgacctccttataggtgtcttggccgacctcagggactcagaagttgcagcccatctgctgcaggtctgctgctaccatcttccgttgatgcaagtggagctgcccatcagccttctcacacgcctggccctcatggatcccacctctctcaaccagtttgtgaacacagtgtctgcctcccctagaaccatcgtctcgtttctctcagttgccctcctgagtgaccagccactgttgacctccgaccttctctctctgctggcccatactgccagggtcctgtctcccagccacttgtcctttatccaagagcttctggctggctctgatgaatcctatcggcccctgcgcagcctcctgggccacccagagaattctgtgcgggcacacacttataggctcctgggacacttgctccaacacagcatggccctgcgtggggcactgcagagccagtctggactgctcagccttctgctgcttgggcttggagacaaggatcctgttgtgcggtgcagtgccagctttgctgtgggcaatgcagcctaccaggctggtcctctgggacctgccctggcagctgcagtgcccagtatgacccagctgcttggagatcctcaggctggtatccggcgcaatgttgcatcagctctgggcaacttgggacctgaaggtttgggagaggagctgttacagtgcgaagtaccccagcggctcctagaaatggcatgtggagacccccagccaaatgtgaaggaggctgccctcattgccctccggagcctgcaacaggagcctggcatccatcaggtactggtgtccctgggtgccagtgagaaactatccttgctctctctggggaatcagtcactgccacacagcagtcctaggcctgcctctgccaaacactgcaggaaactcattcacctcctgaggccagcccatagcatgtgattccagattcctgcggtccagcctccaactttggttgccagctctttcttattctactacacaagccgccaactcaactgagagctaaagagactagaaaagagataagctgccaactcaactgagaacaagaaactagaagagatttatatataaagcttcttccttctcccagatgcaggatgttttcaaccagtaaattttattgctgttggtgccagagaagagtcctttcttctctacatccaggggccttttctccaataatgtgcctttaactctagggacctgcctcacggaccttagggaaaaacctcaacctgaaagatctcttcctttctggagctcctttaatcttcccagcaggtttttgccttagacgtgctggccccaggacagtgatgaagacagagcctgtctcagctctaggctgtggggatcaatgccatcagtccctgttattgagggattatcccttagccaacattcctatctgtgggtgggcgtggagagtgtatctttttttggggtgtgtgtgtatatgtgtgtgtgtatgtgtgtgtgtgtttaatagttctgtttgtaaactcttttaataaaagttgtgcctcaccatacttgaagctcccaggacaagggttgagaggctcaacccctctttcagcttctatgtggtgttggaggtgctggtatcgtgttcac

SEQ ID NO: 27702 - DNA, 878 bp, Homo sapiens
  source 1..878: mol_type = unassigned DNA
agcttggagctcctaggctggggagatcctgaaacctctgtcatggaaaagtaccacgtgttggagatgattggagaaggctcttttgggagggtgtacaagggtcgaagaaaatacagtgctcaggtcgtggccctgaagttcatcccaaaattggggcgctcagagaaggagctgaggaatttgcaacgagagattgaaataatgcggggtctgcggcatcccaacattgtgcatatgcttgacagctttgaaactgataaagaggtggtggtggtgacagactatgctgagggagagctctttcagatcctagaagatgacggaaaacttcctgaagaccaggttcaggccattgctgcccagttggtgtcagccctgtactatctgcattcccaccgcatcctacaccgagatatgaagcctcagaacatcctcctcgccaagggtggtggcatcaagctctgtgactttggatttgcccgggctatgagcaccaatacaatggtgctgacatccatcaaaggcacaccactctatatgtctccagagctggtggaggagcgaccatacgaccacacagcggacctctggtctgttggctgcatactatatgaactggcagtaggcacccctcccttctatgctacaagcatctttcagctggtcagcctcattctcaaggaccctgtgcgctggccctcaaccatcagtccctgctttaagaacttcctgcagggactgctcaccaaagacccacggcagcgactgtcctggccagacctcttatatcacccctttattgctggtcatgtcaccataataactgagccagcaggcccagatttggggaccccattcaccagccgcctaccccc

SEQ ID NO: 27703 - DNA, 4721 bp, Homo sapiens
  source 1..4721: mol_type = unassigned DNA
agaagagatggggctaaacgccagggaatccgtcccttggcctgaggagcttggagctcctaggctgggggcgtcccagatgttgtggaactgtccctggatctatagctcttcaccgtctctactttcttccttctaagagatcctgaaacctctgtcatggaaaagtaccacgtgttggagatgattggagaaggctcttttgggagggtgtacaagggtcgaagaaaatacagtgctcaggtcgtggccctgaagttcatcccaaaattggggcgctcagagaaggagctgaggaatttgcaacgagagattgaaataatgcggggtctgcggcatcccaacattgtgcatatgcttgacagctttgaaactgataaagaggtggtggtggtgacagactatgctgagggagagctctttcagatcctagaagatgacggaaaacttcctgaagaccaggttcaggccattgctgcccagttggtgtcagccctgtactatctgcattcccaccgcatcctacaccgagatatgaagcctcagaacatcctcctcgccaagggtggtggcatcaagctctgtgactttggatttgcccgggctatgagcaccaatacaatggtgctgacatccatcaaaggcacaccactctatatgtctccagagctggtggaggagcgaccatacgaccacacagcggacctctggtctgttggctgcatactatatgaactggcagtaggcacccctcccttctatgctacaagcatctttcagctggtcagcctcattctcaaggaccctgtgcgctggccctcaaccatcagtccctgctttaagaacttcctgcagggactgctcaccaaagacccacggcagcgactgtcctggccagacctcttatatcacccctttattgctggtcatgtcaccataataactgagccagcaggcccagatttggggaccccattcaccagccgcctacccccagaacttcaggtcctaaaggacgaacaggcccatcggttggcccccaagggtaatcagtctcgcatcttgactcaggcctataaacgcatggctgaggaggccatgcagaagaaacatcagaacacaggacctgcccttgagcaagaggacaagaccagcaaggtggctcctggcacagcccctctgcccagactcggggccactcctcaggaatcaagcctcctggccgggatcttagcctcagaattgaagagcagctgggctaaatcagggactggagaggtgccctctgcacctcgggaaaaccggaccaccccagattgtgaacgagcattcccagaggagaggccagaggtgctgggccagcggagcactgatgtagtggacctggaaaatgaggagccagacagtgacaatgagtggcagcacctgctagagaccactgagcctgtgcctattcaactgaaggctcctctcaccttgctgtgtaatcctgacttctgccagcgcatccagagtcagctgcatgaagctggagggcagatcctgaaaggcatcttggagggtgcttcccacatcctgcctgcattccgggtcctgagcagtcttctctccagctgcagtgattctgttgccttgtattccttctgccgggaggcagggcttcctgggctgctgctgagtctactcaggcacagtcaggagagcaacagcctccagcagcaatcttggtatgggaccttcttacaggacctgatggctgtgattcaggcctactttgcctgtaccttcaatctggagaggagccagacaagtgacagcctgcaggtgtttcaggaggctgccaacctttttctggacctgttggggaaactgctggcccaaccagatgactctgagcagactttgcggagggacagccttatgtgctttactgtcctgtgcgaagccatggatgggaacagccgggccatctccaaagccttttactccagcttgctgacgacacagcaggttgtcttggatgggctccttcatggcttgacagttccacagctccctgtccacactccccaaggagccccgcaagtgagccagccactgcgagagcagagtgaggatatacctggagccatttcctctgccctggcagccatatgcactgctcctgtgggactgcccgactgctgggatgccaaggagcaggtctgttggcatttggcaaatcagctaactgaagacagcagccagctcaggccatccctcatctctggcctgcagcatcccatcctgtgcctgcaccttctcaaggttctatactcctgctgccttgtcagtgagggcctgtgccgtcttctggggcaggagcccctggccttggaatccctgtttatgttgattcagggcaaggtaaaagtagtagattgggaagagtctactgaagtgacactctacttcctctcccttcttgtctttcggctccaaaacctgccttgtggaatggagaagctaggcagtgacgttgctactctctttacccattcgcatgtcgtctctcttgtgagtgcagcagcctgtctattgggacagcttggtcagcaaggggtgacctttgacctccagcccatggaatggatggctgcagccacacatgccttgtctgcccctgcagaggttcggttgactccaccaggtagttgtggattctatgatggcctccttatccttctgttgcagctcctcactgagcaggggaaggctagcctaatcagggatatgtccagttcagaaatgtggaccgttttgtggcaccgcttctccatggtcctgaggctccccgaggaggcatctgcacaggaaggggagctttcgctatccagtccaccaagccctgagccagactggacactgatttctccccagggcatggcagccctgctgagcctggccatggccacctttacccaggagccccagttatgcctgagctgcctgtcccagcatggaagtatcctcatgtccatcctgaagcatctgctttgccccagcttcctgaatcaactgcgccaggcgcctcatgggtctgagtttctccctgtcgtggtgctctctgtctgccagctcctttgcttcccctttgcgctggacatggatgctgacctccttataggtgtcttggccgacctcagggactcagaagttgcagcccatctgctgcaggtctgctgctaccatcttccgttgatgcaagtggagctgcccatcagccttctcacacgcctggccctcatggatcccacctctctcaaccagtttgtgaacacagtgtctgcctcccctagaaccatcgtctcgtttctctcagttgccctcctgagtgaccagccactgttgacctccgaccttctctctctgctggcccatactgccagggtcctgtctcccagccacttgtcctttatccaagagcttctggctggctctgatgaatcctatcggcccctgcgcagcctcctgggccacccagagaattctgtgcgggcacacacttataggctcctgggacacttgctccaacacagcatggccctgcgtggggcactgcagagccagtctggactgctcagccttctgctgcttgggcttggagacaaggatcctgttgtgcggtgcagtgccagctttgctgtgggcaatgcagcctaccaggctggtcctctgggacctgccctggcagctgcagtgcccagtatgacccagctgcttggagatcctcaggctggtatccggcgcaatgttgcatcagctctgggcaacttgggacctgaaggtttgggagaggagctgttacagtgcgaagtaccccagcggctcctagaaatggcatgtggagacccccagccaaatgtgaaggaggctgccctcattgccctccggagcctgcaacaggagcctggcatccatcaggtactggtgtccctgggtgccagtgagaaactatccttgctctctctggggaatcagtcactgccacacagcagtcctaggcctgcctctgccaaacactgcaggaaactcattcacctcctgaggccagcccatagcatgtgattccagattcctgcggtccagcctccaactttggttgccagctctttcttattctactacacaagccgccaactcaactgagagctaaagagactagaaaagagataagctgccaactcaactgagaacaagaaactagaagagatttatatataaagcttcttccttctcccagatgcaggatgttttcaaccagtaaattttattgctgttggtgccagagaagagtcctttcttctctacatccaggggccttttctccaataatgtgcctttaactctagggacctgcctcacggaccttagggaaaaacctcaacctgaaagatctcttcctttctggagctcctttaatcttcccagcaggtttttgccttagacgtgctggccccaggacagtgatgaagacagagcctgtctcagctctaggctgtggggatcaatgccatcagtccctgttattgagggattatcccttagccaacattcctatctgtgggtgggcgtggagagtgtatctttttttggggtgtgtgtgtatatgtgtgtgtgtatgtgtgtgtgtgtttaatagttctgtttgtaaactcttttaataaaagttgtgcctcacc

SEQ ID NO: 27704 - DNA, 3576 bp, Homo sapiens
  source 1..3576: mol_type = unassigned DNA
ctcggccccgggctgccgcgccagcccgtctccgcggcgggggaccgggctgccttggcccctcagcgctcgcgtcttttccggcagttggaacgcttcctgttgtcctcacccgtaaccgcctgttgccccctgtctcagagtccctcacgcgtcccctcccgtctttggctcgttggctgccgccgccggggcttcgccagccttcaagtcgagactactggccgaaggggcgtctgcggctctccgccgtccccagccctgcctctccctgggctctgcagccatggcaatgacaggctcaacaccttgctcatccatgagtaaccacacaaaggaaagggtgacaatgaccaaagtgacactggagaatttttatagcaaccttatcgctcaacatgaagaacgagaaatgagacaaaagaagttagaaaaggtgatggaagaagaaggcctaaaagatgaggagaaacgactccggagatcagcacatgctcggaaggaaacagagtttcttcgtttgaagagaacaagacttggattggaagattttgagtccttaaaagtaataggcagaggagcatttggtgaggtacggcttgttcagaagaaagatacgggacatgtgtatgcaatgaaaatactccgtaaagcagatatgcttgaaaaagagcaggttggccacattcgtgcggagcgtgacattctagtggaggcagacagtttgtgggttgtgaaaatgttctatagttttcaggataagctaaacctctacctaatcatggagttcctgcctggaggggacatgatgaccttgttgatgaaaaaagacactctgacagaagaggagactcagttttatatagcagaaacagtattagccatagactctattcaccaacttggattcatccacagagacatcaaaccagacaaccttcttttggacagcaagggccatgtgaaactttctgactttggtctttgcacaggactgaaaaaagcacataggacagaattttataggaatctgaaccacagcctccccagtgatttcactttccagaacatgaattccaaaaggaaagcagaaacctggaaaagaaatagacgtcagctagccttctccacagtaggcactcctgactacattgctcctgaggtgttcatgcagaccgggtacaacaagctctgtgattggtggtcgcttggggtgatcatgtatgagatgctcatcggctacccacctttctgttctgagacccctcaagagacatataagaaggtgatgaactggaaagaaactttgacttttcctccagaagttcccatctctgagaaagccaaggatctaattttgaggttctgctgtgaatgggaacatagaattggagctcctggagttgaggaaataaaaagtaactctttttttgaaggcgttgactgggaacatatcagagagagacctgctgcaatatctattgaaatcaaaagcattgatgatacctcaaacttcgatgagtttccagaatctgatattcttaagccaacagtggccacaagtaatcatcctgagactgactacaagaacaaagactgggtcttcatcaattacacgtacaagcgctttgagggcctgactgcaaggggggcaataccttcctacatgaaagcagcaaaatagtactcttgccacggaatcctatgtggagcagagttctttgtataacatcatgcttttcctctcacactcttgaagagcttccaagaagttgatggaacccaccaatatgtcatagtaaagtctcctgaaatgtggtagtaagaggattttcttccataatgcatctgaaaaactgtaaacaaagacaaccatttctactacgtcggccataaacagctatcctgctttggaagagaagcatcatgagccaatttgataggtgttttaaaaataacttgagttttcctaagttcatcagaatgaaggggaaaaacagccatcatccaacattattgagattgtcgtgtatagtcatcgaatatcagccagttcctgtaattttgtgacacgctctctgccaagcccaccaagtatttcctttatagctaaaagttccatagtactaaggaaataaagcaataaagacagtctcagcagccaggattctggctgaaggaaatgatccgccaccctgagggtggtgatggtagtttctacccatacctcagcctcaggcgagtggcttatagcctccattcatggtgcactttatttatggtactaagataaagactgtcaatccattgatttatctcctcctgtcccccatctaaaatacccatgctgcttttctgagtgttgatgggggttaccagcttgatccactgttgctcttagaaggcccagaaagtctttgggcattgccaagaaatcccggattatgtggaaaaccctcactttctcttcacggctgtaccagaaaatccctaagacagatcttgccgtggactagcaatacctgcaagtgctgccaatgggaactcaatttattcctgggaacctaacgaggagagcccaggcctaggcaggaggcctggaaccctcttggctaaggtgctgttcctgttcctgcaaggtctccagaacccctttggaaatggtgaaggaaccagcccaatagaagtacagagccagctgacaagtccttgtaaagctcactcctcagtccttggcacagccatgttttgtcttctctcttggtatttcttctctcccaactttagccattttgccttggaatcatgattacaattttttcctttgcagatgccttcctgggggatactcctccccaccctaaagggtcgcctgcaacttaggcggattgggtctctctgctgtggcgttctctcttgagagaccctctgaattttagcacaaagtgccttctgtttcacagctgccaccacctttagaggaatttcgtcagaaaaatgtggaggctccatattaatgcattattttttaaaaagttttgataactcttaaagcatcatttgcacctatgtgggaactttgcctgttgcaaagtattgtggccgagctgcagctgggagcctgctttctgccagtcttgaggttctgaagatcagctttgaaaggaaagtatgtcctagcttagccattcagaagagaaaaatggaatatcagagttacagttgtcagtgaaactactttggattttaacctcttagaggaagaaaaaaggttagggaagtgtcaactctggatgaaggtgatgtgtttgcctctcagtctttcattcatagcctgctagtgaaaaggaagtaaatgagattcttttgtgtgactttgtagtctctttgtattaccaaatagttggggtgttgactcctgtgtgttttgcaagaatgtgtggtaagcctgggtaaagagaaggaactgcggtgttgggagagtctttgtgttggggagtggcaggggatgatttgtttcaggggaaaatgcccacattttaacttttaaacttctgaataaactgtgtaaaaaca

SEQ ID NO: 27705 - DNA, 2038 bp, Homo sapiens
  source 1..2038: mol_type = unassigned DNA
cgggaggatggagcagtgagcgggtctgggcggctgctggcagcgccatggagacggtacagctgaggaacccgccgcgccggcagctgaaaaagttggatgaagatagtttaaccaaacaaccagaagaagtatttgatgtcttagagaaacttggagaagggtcctatggcagcgtatacaaagctattcataaagagaccggccagattgttgctattaagcaagttcctgtggaatcagacctccaggagataatcaaagaaatctctataatgcagcaatgtgacagccctcatgtagtcaaatattatggcagttattttaagaacacagacttatggatcgttatggagtactgtggggctggttctgtatctgatatcattcgattacgaaataaaacgttaacagaagatgaaatagctacaatattacaatcaactcttaagggacttgaataccttcattttatgagaaaaatacaccgagatatcaaggcaggaaatattttgctaaatacagaaggacatgcaaaacttgcagattttggggtagcaggtcaacttacagataccatggccaagcggaatacagtgataggaacaccattttggatggctccagaagtgattcaggaaattggatacaactgtgtagcagacatctggtccctgggaataactgccatagaaatggctgaaggaaagcccccttatgctgatatccatccaatgagggcaatcttcatgattcctacaaatcctcctcccacattccgaaaaccagagctatggtcagataactttacagattttgtgaaacagtgtcttgtaaagagccctgagcagagggccacagccactcagctcctgcagcacccatttgtcaggagtgccaaaggagtgtcaatactgcgagacttaattaatgaagccatggatgtgaaactgaaacgccaggaatcccagcagcgggaagtggaccaggacgatgaagaaaactcagaagaggatgaaatggattctggcacgatggttcgagcagtgggtgatgagatgggcactgtccgagtagccagcaccatgactgatggagccaatactatgattgagcacgatgacacgttgccatcacaactgggcaccatggtgatcaatgcagaggatgaggaagaggaaggaactatgaaaagaagggatgagaccatgcagcctgcgaaaccatcctttcttgaatattttgaacaaaaagaaaaggaaaaccagatcaacagctttggcaagagtgtacctggtccactgaaaaattcttcagattggaaaataccacaggatggagactacgagtttaaaactagccaagaacagcagtctggaaaagacatatgtatccaaaattgccagggaaacctgctgtgtagatacgctttctgagaaaccacatgcttaagagttggacagtggaggaccttcagaagaggctcttggccctggaccccatgatggagcaggagattgaagagatccggcagaagtaccagtccaagcggcagcccatcctggatgccatagaggctaagaagagacggcaacaaaacttctgagcaaggccaggctgtgagggccccagctccacccaggctttgggtgaattctggatggcttgcctcatgtttgttagccagcacttctgctctgtcgtctctccacagcacctttgtgaactcaggaatgtgcgccagtgggaagggctctcttgacagtcagcgtgccatcttgatgtgtgtatgtacattggtcaggtatattatctcaaaggatttatattggcgcttttaactcagagttttaaaccccaggaacagagactcctagttgagtgatagctgggaaagttttacattgtctgtttttcttctcccaatagctttcaattgttctttctggaagacttttaaaaaaatataaatatgcatatatatatataaattataaatagattccccacgcagtgtggtggcatctctgtacaggta

SEQ ID NO: 27706 - DNA, 6342 bp, Homo sapiens
  source 1..6342: mol_type = unassigned DNA
ggaaagcggaagtgtgggagggtctgcggggcgggctcaggaggtccgcgggaggatggagcagtgagcgggtctgggcggctgctggcagcgccatggagacggtacagctgaggaacccgccgcgccggcagctgaaaaagttggatgaagatagtttaaccaaacaaccagaagaagtatttgatgtcttagagaaacttggagaagggtcctatggcagcgtatacaaagctattcataaagagaccggccagattgttgctattaagcaagttcctgtggaatcagacctccaggagataatcaaagaaatctctataatgcagcaatgtgacagccctcatgtagtcaaatattatggcagttattttaagaacacagacttatggatcgttatggagtactgtggggctggttctgtatctgatatcattcgattacgaaataaaacgttaacagaagatgaaatagctacaatattacaatcaactcttaagggacttgaataccttcattttatgagaaaaatacaccgagatatcaaggcaggaaatattttgctaaatacagaaggacatgcaaaacttgcagattttggggtagcaggtcaacttacagataccatggccaagcggaatacagtgataggaacaccattttggatggctccagaagtgattcaggaaattggatacaactgtgtagcagacatctggtccctgggaataactgccatagaaatggctgaaggaaagcccccttatgctgatatccatccaatgagggcaatcttcatgattcctacaaatcctcctcccacattccgaaaaccagagctatggtcagataactttacagattttgtgaaacagtgtcttgtaaagagccctgagcagagggccacagccactcagctcctgcagcacccatttgtcaggagtgccaaaggagtgtcaatactgcgagacttaattaatgaagccatggatgtgaaactgaaacgccaggaatcccagcagcgggaagtggaccaggacgatgaagaaaactcagaagaggatgaaatggattctggcacgatggttcgagcagtgggtgatgagatgggcactgtccgagtagccagcaccatgactgatggagccaatactatgattgagcacgatgacacgttgccatcacaactgggcaccatggtgatcaatgcagaggatgaggaagaggaaggaactatgaaaagaagggatgagaccatgcagcctgcgaaaccatcctttcttgaatattttgaacaaaaagaaaaggaaaaccagatcaacagctttggcaagagtgtacctggtccactgaaaaattcttcagattggaaaataccacaggatggagactacgagtttcttaagagttggacagtggaggaccttcagaagaggctcttggccctggaccccatgatggagcaggagattgaagagatccggcagaagtaccagtccaagcggcagcccatcctggatgccatagaggctaagaagagacggcaacaaaacttctgagcaaggccaggctgtgagggccccagctccacccaggctttgggtgaattctggatggcttgcctcatgtttgttagccagcacttctgctctgtcgtctctccacagcacctttgtgaactcaggaatgtgcgccagtgggaagggctctcttgacagtcagcgtgccatcttgatgtgtgtatgtacattggtcaggtatattatctcaaaggatttatattggcgcttttaactcagagttttaaaccccaggaacagagactcctagttgagtgatagctgggaaagttttacattgtctgtttttcttctcccaatagctttcaattgttctttctggaagacttttaaaaaaatataaatatgcatatatatatataaattataaatagattccccacgcagtgtggtggcatctctgtacaggtacagttttaaacggtttgcctcttttctgtaagattatggtactgtggaacatgagggcagaggacaccgggaggctgttagggggtcactgaatcccaggagccaacctccccctttgcagggctgcatttaaaaattaggtttgggacagttcttgtaccgtggtttcagccttgtgtggtcatcactggcttctggagctattggtgatgtccaagggaaagctttgagagtttatgtttactctttgagtcccaggagaagcctggcaccctctttgcaaattggcctttgctctttcaatgcctttcatccatctccactctctcaactgcctaaagtcacagcacagatactgcccagtgccttaagaggagacatgatctctaccagggactctcagcaaacacgggactgtgttcagtccacaaaggaaaagcgtttttgaagctctcattgttcatgtaaaaatcatacacgtggcatgttgctccacattccttacacacaggggtagaggggattgcttttgtgacccacgttcaaatatgtgactgttttcttttctcttttactgctaagcagcctggaaaggataaatgaatattagactaagatttgttttccaggaggctcaatctgaacacacagaatgtcagagctggaagggactatagagatcatctgatctgatcctcttgtacggatgatcgcaaaactgaggtgtagagaggggaatggccaaaatcacaaagcaagttagcgttaagagctgagactagaattcagggtcctcactcccaggccaccgaaccatgcagccccttctttgggggaagagacctgtgtcagtcttggttaattgttccagggaaccttgctaacagaaacttgctcttgccttggctcttcagtagatgacctggctgtaaagagattccctggacgagccagatcattcagtttcagcgagtccttgagctccacaacatctaccagatatagcagacaagcacccatggaggcaggtttcgggcctgaagcagatcagagggctttgcaaaagacagcatagagccatcttcctgcaactttacctctttccctcagatggggagccatgactgggttgcacctcaggatactgtaatttgactccataattgcttttgctcctgaaacctgggaatcaatggaaaggcagggaatgtgcctcttctgtggccagattctgttatttgcaattaaagcaagtttttaaaaaatgcaagaggcagttgttagtcttcagggcttggcaactgaaatagctatgtggcggatacggaaaacagaggacaatttgaggatcttgctggaataataaatgacagctaccatttgttgagcacctattatatatcaggcactgagctgggtaggctctaaacttcacaataaccctgtgacttaactactttatctccattttgtagttgaagaaataagttcagagagaaagattccttcccaaggtcatgcagctagtaaatgatagaatcaggattcatagcatcactatagggggtcaatatttacacaaaaaaggaaagtcacaagcctgtttaaaatgaagtgaccaccttttcttgcatagactaaataactcgaactggcatttttaggttggaaagacagctgaattagtagttaagtctgatagccaagtaagttttaaaaaccaaagcatccaggatgcacacccctgcaccatttgctgtgcgaattaatagttctgtctctctctctctttcttttttctttttattctttgagatggattttcgctcttgtcgcccaggctggagtacaatggcacgatcttggctcactgcaacctccgcctcccgggttcaagcgattcttctgctgggattacagcatatgccaccatgcccagattatttttttgtatttgtagtagagacggggtttcaccatgtcagtcaggctggtcttgaactcctgacctcaggtgatccacccgcctcagcctcccacactgctgggattacaggcatgagccaccgctcctggcctctctttcttttttaaacaaagaactttgcacttggccagagaggaggagaaagcccattttctcccttcctaagctagatccaaataaaagaaagttcagttttcccccataactattcttgggtcatgaactttgatctggagtttgttttgtttcaggaatgtgtgcacccagcttgctgatccaacaaagtctattgcttaccagtctagcttgatgaagccttttggccagaagtcaatttgttttggatcagagaaatttcctgacaaggtatatttgttttctagtgacagaaaggcaaaggaacaagtcctagttgttgttgttgttgttgaatactaaatttaagatatgtcagcttgctttcaatgagccttgggcttctgttattgcttgagcatttggaactcgagcttccagagaaatttgaggtcctcgcttgttctctgccttcaagaaacaatgacctgattctgtctttaaaaaaaaaaatctcagaattctttttttgtttgtgtttttttttttttttgagacagagtctcactctgttgcccaggctggagtgcagtggcgccatctcggctcactgcaacctccgcctcccaggttcaagcaattctcctgcctcagcctcccaggtagctgccactacaggtgctgcaccaccacgcccggctaatttttgtatttttagtagagacagggtttcaccatattagccaggtgggtcttgaactcctgaccttgtgatccacccgcctcggcctcccaaagtgctgggattacaggcgtgagccaccttgcctggccaaaaatctcagaattctttaagactgttttaattgctccatcagtaattttgaagcactttcctttttttttttttttcccctttttgtccctttccccaagccaccaattggatggatgaatgtttgacggggaagaggaagggtaggaggatgcatggatgagtggatgagtggatcgatggatgtattgataaatagatagaaccagtcatctgaagcaacttaagaattgtagccttgactccttgagactgtagatttcgatccaggaaacatttatttagcacctgccagatgccagaaatttataccatttaaaactcagtaagtcttttaaatatcaggaaggagagaagcgacatcatgatacatcctatgggtattaaaaagccaatagaatattatgaataattttatgctaataaatttaacaacttcaacatcataaacaaattccttgaaaaataaaaagtaccaaaattcattcaagaagaaatagataccagcctgagcaacatggcaaaatcccatctctacaaaacatcaaaaaaaaaaaaaattagtcgggcatggtggtgcacacctgtaatcccagcttgtcaggaggctgaagtgggaggatcacctgagcccagggaggtcaaggatgcagtgagccatggtctcaccactgcactctagcctgggtgacagaatgagaccccgtctcaaaaaaaaagaagaagtagataatctgaatagccctatatctatagaaacttaatagtgctgggagatataggtattattatcctcattttacagatgtgaaaattgaggctcagagaagtaaagtctattgctcaaggtcatgtggctagaatatggcagagccatgattcagatccaggtcttctgattcttattccagtgtcctttctagcataccatgttgcctctaaagattgcagctccttatttactagaaaattgttcctgcccaatctacatctccacctcaccccatcttttcttaagcactatgtttgtgtttttatcagtattatattcattgtctttggaatacatgttcttgtttgtgtttggaaaaaaaatctcttttaccagcttgcactcggaccaacttggaaaaaaaaaagcttaaatgtttttgctatgtacagtttaaaaatgtgaagtttgtagctttaactttttgtaagaaaatctaataacactggcttaagtgctgacttgaaatgctattttgtaaggtttggatgtaagtaatcaattgaggtcagcagtttgtatgagacatagcttcctccattgcccccactccttttttcttttttaagtttgagatgcttcctgtgtttttatgttagaattgttgttctccttcttttcttcttcctatacctcatcacgtttgttttaaataaactgtcctttggaccacaaaccctta

SEQ ID NO: 27707 - DNA, 1457 bp, Homo sapiens
  source 1..1457: mol_type = unassigned DNA
ggggcgggctcaggaggtccgcgggaggatggagcagtgagcgggtctgggcggctgctggcagcgccatggagacggtacagctgaggaacccgccgcgccggcagctgaaaaagttggatgaagatagtttaaccaaacaaccagaagaagtatttgatgtcttagagaaacttggagaagggtcctatggcagcgtatacaaagctattcataaagagaccggccagattgttgctattaagcaagttcctgtggaatcagacctccaggagataatcaaagaaatctctataatgcagcaatgtgacagccctcatgtagtcaaatattatggcagttattttaagaacacagacttatggatcgttatggagtactgtggggctggttctgtatctgatatcattcgattacgaaataaaacgttaacagaagatgaaatagctacaatattacaatcaactcttaagggacttgaataccttcattttatgagaaaaatacaccgagatatcaaggcaggaaatattttgctaaatacagaaggacatgcaaaacttgcagattttggggtagcaggtcaacttacagataccatggccaagcggaatacagtgataggaacaccattttggatggctccagaagtgattcaggaaattggatacaactgtgtagcagacatctggtccctgggaataactgccatagaaatggctgaaggaaagcccccttatgctgatatccatccaatgagggcaatcttcatgattcctacaaatcctcctcccacattccgaaaaccagagctatggtcagataactttacagattttgtgaaacagtgtcttgtaaagagccctgagcagagggccacagccactcagctcctgcagcacccatttgtcaggagtgccaaaggagtgtcaatactgcgagacttaattaatgaagccatggatgtgaaactgaaacgccaggaatcccagcagcgggaagtggaccaggacgatgaagaaaactcagaagaggatgaaatggattctggcacgatggttcgagcagtgggtgatgagatgggcactgtccgagtagccagcaccatgactgatggagccaatactatgattgagcacgatgacacgttgccatcacaactgggcaccatggtgatcaatgcagaggatgaggaagaggaaggaactatgaaaagaagggatgagaccatgcagcctgcgaaaccatcctttcttgaatattttgaacaaaaagaaaaggaaaaccagatcaacagctttggcaagagtgtacctggtccactgaaaaattcttcagattggaaaataccacaggatggagactacgagtttaaaactagccaagaacagcagtctggaaaagacatatgtatccaaaattgccagggaaacctgctgtgtagatacgctttctga

SEQ ID NO: 27708 - DNA, 5217 bp, Homo sapiens
  source 1..5217: mol_type = unassigned DNA
aggatggagcagtgagcgggtctgggcggctgctggcagcgccatggagacggtacagctgaggaacccgccgcgccggcagctgaaaaagttggatgaagatagtttaaccaaacaaccagaagaagtatttgatgtcttagagaaacttggagaagggtcctatggcagcgtatacaaagctattcataaagagaccggccagattgttgctattaagcaagttcctgtggaatcagacctccaggagataatcaaagaaatctctataatgcagcaatgtgacagccctcatgtagtcaaatattatggcagttattttaagaacacagacttatggatcgttatggagtactgtggggctggttctgtatctgatatcattcgattacgaaataaaacggataccatggccaagcggaatacagtgataggaacaccattttggatggctccagaagtgattcaggaaattggatacaactgtgtagcagacatctggtccctgggaataactgccatagaaatggctgaaggaaagcccccttatgctgatatccatccaatgagggcaatcttcatgattcctacaaatcctcctcccacattccgaaaaccagagctatggtcagataactttacagattttgtgaaacagtgtcttgtaaagagccctgagcagagggccacagccactcagctcctgcagcacccatttgtcaggagtgccaaaggagtgtcaatactgcgagacttaattaatgaagccatggatgtgaaactgaaacgccaggaatcccagcagcgggaagtggaccaggacgatgaagaaaactcagaagaggatgaaatggattctggcacgatggttcgagcagtgggtgatgagatgggcactgtccgagtagccagcaccatgactgatggagccaatactatgattgagcacgatgacacgttgccatcacaactgggcaccatggtgatcaatgcagaggatgaggaagaggaaggaactatgaaaagaagggatgagaccatgcagcctgcgaaaccatcctttcttgaatattttgaacaaaaagaaaaggaaaaccagatcaacagctttggcaagagtgtacctggtccactgaaaaattcttcagattggaaaataccacaggatggagactacgagtttcttaagagttggacagtggaggaccttcagaagaggctcttggccctggaccccatgatggagcaggagattgaagagatccggcagaagtaccagtccaagcggcagcccatcctggatgccatagaggctaagaagagacggcaacaaaacttctgagcaaggccaggctgtgagggccccagctccacccaggctttgggtgaattctggatggcttgcctcatgtttgttagccagcacttctgctctgtcgtctctccacagcacctttgtgaactcaggaatgtgcgccagtgggaagggctctcttgacagtcagcgtgccatcttgatgtgtgtatgtacattggtcaggtatattatctcaaaggatttatattggcgcttttaactcagagttttaaaccccaggaacagagactcctagttgagtgatagctgggaaagttttacattgtctgtttttcttctcccaatagctttcaattgttctttctggaagacttttaaaaaaatataaatatgcatatatatatataaattataaatagattccccacgcagtgtggtggcatctctgtacaggtacagttttaaacggtttgcctcttttctgtaagattatggtactgtggaacatgagggcagaggacaccgggaggctgttagggggtcactgaatcccaggagccaacctccccctttgcagggctgcatttaaaaattaggtttgggacagttcttgtaccgtggtttcagccttgtgtggtcatcactggcttctggagctattggtgatgtccaagggaaagctttgagagtttatgtttactctttgagtcccaggagaagcctggcaccctctttgcaaattggcctttgctctttcaatgcctttcatccatctccactctctcaactgcctaaagtcacagcacagatactgcccagtgccttaagaggagacatgatctctaccagggactctcagcaaacacgggactgtgttcagtccacaaaggaaaagcgtttttgaagctctcattgttcatgtaaaaatcatacacgtggcatgttgctccacattccttacacacaggggtagaggggattgcttttgtgacccacgttcaaatatgtgactgttttcttttctcttttactgctaagcagcctggaaaggataaatgaatattagactaagatttgttttccaggaggctcaatctgaacacacagaatgtcagagctggaagggactatagagatcatctgatctgatcctcttgtacggatgatcgcaaaactgaggtgtagagaggggaatggccaaaatcacaaagcaagttagcgttaagagctgagactagaattcagggtcctcactcccaggccaccgaaccatgcagccccttctttgggggaagagacctgtgtcagtcttggttaattgttccagggaaccttgctaacagaaacttgctcttgccttggctcttcagtagatgacctggctgtaaagagattccctggacgagccagatcattcagtttcagcgagtccttgagctccacaacatctaccagatatagcagacaagcacccatggaggcaggtttcgggcctgaagcagatcagagggctttgcaaaagacagcatagagccatcttcctgcaactttacctctttccctcagatggggagccatgactgggttgcacctcaggatactgtaatttgactccataattgcttttgctcctgaaacctgggaatcaatggaaaggcagggaatgtgcctcttctgtggccagattctgttatttgcaattaaagcaagtttttaaaaaatgcaagaggcagttgttagtcttcagggcttggcaactgaaatagctatgtggcggatacggaaaacagaggacaatttgaggatcttgctggaataataaatgacagctaccatttgttgagcacctattatatatcaggcactgagctgggtaggctctaaacttcacaataaccctgtgacttaactactttatctccattttgtagttgaagaaataagttcagagagaaagattccttcccaaggtcatgcagctagtaaatgatagaatcaggattcatagcatcactatagggggtcaatatttacacaaaaaaggaaagtcacaagcctgtttaaaatgaagtgaccaccttttcttgcatagactaaataactcgaactggcatttttaggttggaaagacagctgaattagtagttaagtctgatagccaagtaagttttaaaaaccaaagcatccaggatgcacacccctgcaccatttgctgtgcgaattaatagttctgtctctctctctctttcttttttctttttattctttgagatggattttcgctcttgtcgcccaggctggagtacaatggcacgatcttggctcactgcaacctccgcctcccgggttcaagcgattcttctgctgggattacagcatatgccaccatgcccagattatttttttgtatttgtagtagagacggggtttcaccatgtcagtcaggctggtcttgaactcctgacctcaggtgatccacccgcctcagcctcccacactgctgggattacaggcatgagccaccgctcctggcctctctttcttttttaaacaaagaactttgcacttggccagagaggaggagaaagcccattttctcccttcctaagctagatccaaataaaagaaagttcagttttcccccataactattcttgggtcatgaactttgatctggagtttgttttgtttcaggaatgtgtgcacccagcttgctgatccaacaaagtctattgcttaccagtctagcttgatgaagccttttggccagaagtcaatttgttttggatcagagaaatttcctgacaaggtatatttgttttctagtgacagaaaggcaaaggaacaagtcctagttgttgttgttgttgttgaatactaaatttaagatatgtcagcttgctttcaatgagccttgggcttctgttattgcttgagcatttggaactcgagcttccagagaaatttgaggtcctcgcttgttctctgccttcaagaaacaatgacctgattctgtctttaaaaaaaaaaatctcagaattctttttttgtttgtgtttttttttttttttgagacagagtctcactctgttgcccaggctggagtgcagtggcgccatctcggctcactgcaacctccgcctcccaggttcaagcaattctcctgcctcagcctcccaggtagctgccactacaggtgctgcaccaccacgcccggctaatttttgtatttttagtagagacagggtttcaccatattagccaggtgggtcttgaactcctgaccttgtgatccacccgcctcggcctcccaaagtgctgggattacaggcgtgagccaccttgcctggccaaaaatctcagaattctttaagactgttttaattgctccatcagtaattttgaagcactttcctttttttttttttttcccctttttgtccctttccccaagccaccaattggatggatgaatgtttgacggggaagaggaagggtaggaggatgcatggatgagtggatgagtggatcgatggatgtattgataaatagatagaaccagtcatctgaagcaacttaagaattgtagccttgactccttgagactgtagatttcgatccaggaaacatttatttagcacctgccagatgccagaaatttataccatttaaaactcagtaagtcttttaaatatcaggaaggagagaagcgacatcatgatacatcctatgggtattaaaaagccaatagaatattatgaataattttatgctaataaatttaacaacttcaacatcataaacaaattccttgaaaaataaaaagtaccaaaattcattcaagaagaaatagataccagcctgagcaacatggcaaaatcccatctctacaaaacatc

SEQ ID NO: 27709 - DNA, 4837 bp, Homo sapiens
  source 1..4837: mol_type = unassigned DNA
agctgagaatgaagcggagagcatcagacagaggagctggggaaacgtcggccagggccaaggctctaggaagtgggatttctggaaataatgcaaagagagctggaccattcatccttggtccccgtctgggcaactcaccggtgccaagcatagtgcagtgtttggcgaggaaagatggcacggatgacttctatcagctgaagatcctgaccctggaggagaggggggaccaaggcatagagagccaggaagagcggcagggcaagatgctgctgcacaccgagtactcactgctgtctctcctgcacacgcaggatggcgtggtgcaccaccacggcctcttccaggaccgcacctgtgaaatcgttgaggacacagaatccagccggatggttaagaagatgaagaagcgcatctgcctcgtcctggactgcctctgtgctcatgacttcagcgataagaccgctgacctcatcaacctgcagcactacgtcatcaaggagaagaggctcagcgagagggagactgtggtaatcttctacgacgtggtccgcgtggtggaggccctgcaccagaaaaatatcgtgcacagagacctgaagctggggaacatggtgctcaacaagaggacacatcggataaccatcaccaacttctgcctcgggaagcatctggtgagcgagggggacctgctgaaggaccagagagggagccctgcctacatcagtcccgacgtgctcagcggccggccgtaccgtggcaagcccagtgacatgtgggccctgggcgtggtgctcttcaccatgctgtatggccagttccccttctacgacagcatcccgcaggagctcttccgcaagatcaaggctgccgagtataccattcctgaggatggacgggtttctgagaacaccgtgtgtctcatccggaagctgctggtccttgacccccagcagcgcctggccgccgccgacgtcctggaggccctcagtgccatcattgcatcatggcagtccctgtcatctctgagtgggcctttgcaagtggttcctgacattgatgaccaaatgagcaatgcggatagctcccaggaggtgagttggggagggcagatgggccattacccagccccaagggacaggcttctgggggcaggcagggcaagggcagaggtggcagctacccgcaggccacagagtttccttggtcttcttccccagccttggggtgggaaagggagacttcagtcctcagcctgagctgcctggggcctgccttgggcttggtgtagctggagatctttggccagagagacctgtgagacagccgagctggagccagtgcccaagtggcccaggccagccctctcagcttcctcctgctgcccaagtcacatttctctgccccctgactcagagttctctctcacccttcctgcttttcatttttcagatgattcatttctccctatttctttcctccccattccctgcactggagaaagtgttgggcctagggtgggggcagagacttgggcaccaggcagcagagggcaggtgatcttagggtgccccctggagggcagggcttggccgagcaacagcattgctgggccctggatattggaaggaccttccctccctggcccaccttggagctccacagtgagcagtgtgcaggtaggaccaggaggggccgtgcctgggagagcctcccagagcctcctggcccccgaggaaagagagttccaatccctacccacctccagcttccaccctttagctgtttggctaaaatcatcatcactagcccgcagtgagtgcctaccccgagggcacctcattcagccctcactgcgggcctgcgtggcctgtgttcttagccccatgttacagaagaggaaacagggttagagaggactttcccaaagccacacagcttagaagtagtggagctaagccttgaacccaagtctcatccggaagccctgctgtctcctgtggtgactggcacggggacaccacttcagcttctgttaccatctgcctagaccatcccagggagctcagcatggggccctgcgtatgtggctcctccaggtgctgcgcccccagcccagggcttgctcgtacctcttgacgtgcattagccgcctcagggctcagagaacctttgcgaggggccagacagctaaggcttctgaggtaaagtgacctctcacgcagccagtgagttaggaagcatgagtctgcgtcagtcccgggtccgcagggcggcctgcaaggggagttgaggttggctggagggggtcagggacccaccctcagcgccactcccacccccggccttgaggcctgagggtgtggtgcctggaagggtgactgcaggagccaggctgccagcactcttgcctgccctcctgtctgctgcgctgccttcatctgggtttatctttgtctccttcccaccctccccgcctcaaaggcgaaggtgacggaggagtgctcccagtacgagtttgagaactacatgcgtcagcagctgctgctggccgaggagaagagctccatccatgacgcccggagctgggtacccaagcggcagttcggcagcgcaccaccggtgcgacggctgggccacgacgcacagcccatgacctccttggacacggccatcctggcgcagcgctacctgcggaaataacagcctcagccggggccaccagcactgctgccacttcttccagccccagccaaaggcgtggctgtcagggctgggccctgtagtgctggactctcccgggccacaatagggacagggcagggacagggacagcccaggtcacacgtggggtcagcagaggtaccacgaagctaccttttgggatgattgctcgattgtttggtttttaaatctgagaagcctagataactaatctgcttttaatcacgatgttttaatctacctctgtctctttaaccatgctgtctctggactgagcaagagggaggagggagcctgctcaccccactccagggccttccccagcggccaccaactgacctggggcgctgctccccacagtccaaataagctgaaagtgcagctcgctgcaggccccagagcgagcttcccctcctccctgctctcccaggcccctgccacagcctctttccgtccctctctttctgatccaggcccctcagtccaagctttggaaaaccttcacctcatcttaaaccgaactcaaatatatttatttttttaccataccaacttctctcccatctctaggtggctcagtccatggccactccctgcccccagcctggctggacagcaaggaatccacagcccacacgtgagctccctcctcacccccaggcagggaagcccctcctgccagtccctgtcccctttcagcccaccagtccctctctgctgccggtgatgggaggcctttctagacctggctctttctctcccgtctcagtggcttctctgaggtgctgtacacgcgcgttaacctgttcccttctctatccttccccgtggtactgagctcacgtggactcccagtgcgaaggggcccatgggttgggctgcaggcctggccgtgagcgggggctgcctgcacgctcccctagcctactcttgtgtttaggggatggtgggaacatatcccagtgcccttgcctcataatagatgtggtgactctcccggtagaccctagcaagggtcctccatggtggtgagggactcaggagaattgtagggattgggggaccctgcctgcctggcttgagaacagccctgctgcccttttgagccgagattttgaagtggatgcccgtcttgccagaaatgctgttctcaccagaatgccccctccccttgcccttactggacttggccctgcctgatgccaagcaaagacccttccccagaggcctaccccccatatgtcctcagagaggctgagtgtcccctccaggcagtcatgggccctgaggcccctcctgcctggccctgctccccagtggggaggtgactgtgtttcccagagtgtgagccgctctcctccccctaaaaagctgactcactgtgagtgaccttgggcaagttcccaaacctccttgtgcctcagtttccccatctggaaaaaatggggccacctcttgccagcagtagcagggctgcccacgcccctttctccccatgccccatccagcacttgggcgactcatgcctctgcctcagtgggcctgtgggagcctactggagcccagcacttactccccctgagcagcgagcctgcgtctgtctcagctgtccagcgctgagggccagggtcttgtgctgtggggctgggggatgccctcttttctatatttatttcatagaaagtctcctgcgggagcggaaatgcagtccggcctagggctcccagcccttgactgtcctcctgtgagggcctgaagctgggccagggcccgtcgcagcggagccccctctcagcagcccaccgggtccctccaggctgctgcccgtgcgtggtctttctcctccttttcaaagcaatagccgccgggtctgcaaagccctgtcagacagactgggcccttccaaggtcaagccatgtgtctgatgacattcctggtgaagcaaaggagaggaggatgggtcagccctcactgggtgtcacacactgagagaagtcctattgtaaagaaacggaaaaagtcacaaaaaagtttgtataaagacatatttttgtactacatggggactcttcctgcatgtcagcaataaaacttcctgatctggaaccac

SEQ ID NO: 27710 - DNA, 3846 bp, Homo sapiens
  source 1..3846: mol_type = unassigned DNA
ggcggcggcggcggcggcggcggctcgggtggctgcgctgggaggcggcggtgagaggctcgcacgcctccagcccggccccggccccccgggagggagagccgagcagccccggctctgggctacggactatgggcgaatagctctgaccacccggcgaagtgcacacacccagaagctatgtccttcggcagtaaaagttttacagcacaatatatgtgctctgctctcctcccgcaatcctgctccaagagatcttaagctggaggcaccaggtctgaattccagactcctccccaccacccacacttcacctccaactggagcatgaccacagacccattcagggaggctggcggactcttcatcctggacagtcccttactgtatgtcaagtagagctgagaatgaagcggagagcatcagacagaggagctggggaaacgtcggccagggccaaggctctaggaagtgggatttctggaaataatgcaaagagagctggaccattcatccttggtccccgtctgggcaactcaccggtgccaagcatagtgcagtgtttggcgaggaaagatggcacggatgacttctatcagctgaagatcctgaccctggaggagaggggggaccaaggcatagagagccaggaagagcggcagggcaagatgctgctgcacaccgagtactcactgctgtctctcctgcacacgcaggatggcgtggtgcaccaccacggcctcttccaggaccgcacctgtgaaatcgttgaggacacagaatccagccggatggttaagaagatgaagaagcgcatctgcctcgtcctggactgcctctgtgctcatgacttcagcgataagaccgctgacctcatcaacctgcagcactacgtcatcaaggagaagaggctcagcgagagggagactgtggtaatcttctacgacgtggtccgcgtggtggaggccctgcaccagaaaaatatcgtgcacagagacctgaagctggggaacatggtgctcaacaagaggacacatcggataaccatcaccaacttctgcctcgggaagcatctggtgagcgagggggacctgctgaaggaccagagagggagccctgcctacatcagtcccgacgtgctcagcggccggccgtaccgtggcaagcccagtgacatgtgggccctgggcgtggtgctcttcaccatgctgtatggccagttccccttctacgacagcatcccgcaggagctcttccgcaagatcaaggctgccgagtataccattcctgaggatggacgggtttctgagaacaccgtgtgtctcatccggaagctgctggtccttgacccccagcagcgcctggccgccgccgacgtcctggaggccctcagtgccatcattgcatcatggcagtccctgtcatctctgagtgggcctttgcaagtggttcctgacattgatgaccaaatgagcaatgcggatagctcccaggaggcgaaggtgacggaggagtgctcccagtacgagtttgagaactacatgcgtcagcagctgctgctggccgaggagaagagctccatccatgacgcccggagctgggtacccaagcggcagttcggcagcgcaccaccggtgcgacggctgggccacgacgcacagcccatgacctccttggacacggccatcctggcgcagcgctacctgcggaaataacagcctcagccggggccaccagcactgctgccacttcttccagccccagccaaaggcgtggctgtcagggctgggccctgtagtgctggactctcccgggccacaatagggacagggcagggacagggacagcccaggtcacacgtggggtcagcagaggtaccacgaagctaccttttgggatgattgctcgattgtttggtttttaaatctgagaagcctagataactaatctgcttttaatcacgatgttttaatctacctctgtctctttaaccatgctgtctctggactgagcaagagggaggagggagcctgctcaccccactccagggccttccccagcggccaccaactgacctggggcgctgctccccacagtccaaataagctgaaagtgcagctcgctgcaggccccagagcgagcttcccctcctccctgctctcccaggcccctgccacagcctctttccgtccctctctttctgatccaggcccctcagtccaagctttggaaaaccttcacctcatcttaaaccgaactcaaatatatttatttttttaccataccaacttctctcccatctctaggtggctcagtccatggccactccctgcccccagcctggctggacagcaaggaatccacagcccacacgtgagctccctcctcacccccaggcagggaagcccctcctgccagtccctgtcccctttcagcccaccagtccctctctgctgccggtgatgggaggcctttctagacctggctctttctctcccgtctcagtggcttctctgaggtgctgtacacgcgcgttaacctgttcccttctctatccttccccgtggtactgagctcacgtggactcccagtgcgaaggggcccatgggttgggctgcaggcctggccgtgagcgggggctgcctgcacgctcccctagcctactcttgtgtttaggggatggtgggaacatatcccagtgcccttgcctcataatagatgtggtgactctcccggtagaccctagcaagggtcctccatggtggtgagggactcaggagaattgtagggattgggggaccctgcctgcctggcttgagaacagccctgctgcccttttgagccgagattttgaagtggatgcccgtcttgccagaaatgctgttctcaccagaatgccccctccccttgcccttactggacttggccctgcctgatgccaagcaaagacccttccccagaggcctaccccccatatgtcctcagagaggctgagtgtcccctccaggcagtcatgggccctgaggcccctcctgcctggccctgctccccagtggggaggtgactgtgtttcccagagtgtgagccgctctcctccccctaaaaagctgactcactgtgagtgaccttgggcaagttcccaaacctccttgtgcctcagtttccccatctggaaaaaatggggccacctcttgccagcagtagcagggctgcccacgcccctttctccccatgccccatccagcacttgggcgactcatgcctctgcctcagtgggcctgtgggagcctactggagcccagcacttactccccctgagcagcgagcctgcgtctgtctcagctgtccagcgctgagggccagggtcttgtgctgtggggctgggggatgccctcttttctatatttatttcatagaaagtctcctgcgggagcggaaatgcagtccggcctagggctcccagcccttgactgtcctcctgtgagggcctgaagctgggccagggcccgtcgcagcggagccccctctcagcagcccaccgggtccctccaggctgctgcccgtgcgtggtctttctcctccttttcaaagcaatagccgccgggtctgcaaagccctgtcagacagactgggcccttccaaggtcaagccatgtgtctgatgacattcctggtgaagcaaaggagaggaggatgggtcagccctcactgggtgtcacacactgagagaagtcctattgtaaagaaacggaaaaagtcacaaaaaagtttgtataaagacatatttttgtactacatggggactcttcctgcatgtcagcaataaaacttcctgatctggaaccac

SEQ ID NO: 27711 - DNA, 3628 bp, Homo sapiens
  source 1..3628: mol_type = unassigned DNA
gggaggcggcggcggcggcggcggcggctcgggtggctgcgctgggaggcggcggtgagaggctcgcacgcctccagcccggccccggccccccgggagggagagccgagcagccccggctctgggctacggactatgggcgaatagctctgaccacccggcgaagagctgagaatgaagcggagagcatcagacagaggagctggggaaacgtcggccagggccaaggctctaggaagtgggatttctggaaataatgcaaagagagctggaccattcatccttgctctctgtgccgtaggtccccgtctgggcaactcaccggtgccaagcatagtgcagtgtttggcgaggaaagatggcacggatgacttctatcagctgaagatcctgaccctggaggagaggggggaccaaggcatagagagccaggaagagcggcagggcaagatgctgctgcacaccgagtactcactgctgtctctcctgcacacgcaggatggcgtggtgcaccaccacggcctcttccaggaccgcacctgtgaaatcgttgaggacacagaatccagccggatggttaagaagatgaagaagcgcatctgcctcgtcctggactgcctctgtgctcatgacttcagcgataagaccgctgacctcatcaacctgcagcactacgtcatcaaggagaagaggctcagcgagagggagactgtggtaatcttctacgacgtggtccgcgtggtggaggccctgcaccagaaaaatatcgtgcacagagacctgaagctggggaacatggtgctcaacaagaggacacatcggataaccatcaccaacttctgcctcgggaagcatctggtgagcgagggggacctgctgaaggaccagagagggagccctgcctacatcagtcccgacgtgctcagcggccggccgtaccgtggcaagcccagtgacatgtgggccctgggcgtggtgctcttcaccatgctgtatggccagttccccttctacgacagcatcccgcaggagctcttccgcaagatcaaggctgccgagtataccattcctgaggatggacgggtttctgagaacaccgtgtgtctcatccggaagctgctggtccttgacccccagcagcgcctggccgccgccgacgtcctggaggccctcagtgccatcattgcatcatggcagtccctgtcatctctgagtgggcctttgcaagtggttcctgacattgatgaccaaatgagcaatgcggatagctcccaggaggcgaaggtgacggaggagtgctcccagtacgagtttgagaactacatgcgtcagcagctgctgctggccgaggagaagagctccatccatgacgcccggagctgggtacccaagcggcagttcggcagcgcaccaccggtgcgacggctgggccacgacgcacagcccatgacctccttggacacggccatcctggcgcagcgctacctgcggaaataacagcctcagccggggccaccagcactgctgccacttcttccagccccagccaaaggcgtggctgtcagggctgggccctgtagtgctggactctcccgggccacaatagggacagggcagggacagggacagcccaggtcacacgtggggtcagcagaggtaccacgaagctaccttttgggatgattgctcgattgtttggtttttaaatctgagaagcctagataactaatctgcttttaatcacgatgttttaatctacctctgtctctttaaccatgctgtctctggactgagcaagagggaggagggagcctgctcaccccactccagggccttccccagcggccaccaactgacctggggcgctgctccccacagtccaaataagctgaaagtgcagctcgctgcaggccccagagcgagcttcccctcctccctgctctcccaggcccctgccacagcctctttccgtccctctctttctgatccaggcccctcagtccaagctttggaaaaccttcacctcatcttaaaccgaactcaaatatatttatttttttaccataccaacttctctcccatctctaggtggctcagtccatggccactccctgcccccagcctggctggacagcaaggaatccacagcccacacgtgagctccctcctcacccccaggcagggaagcccctcctgccagtccctgtcccctttcagcccaccagtccctctctgctgccggtgatgggaggcctttctagacctggctctttctctcccgtctcagtggcttctctgaggtgctgtacacgcgcgttaacctgttcccttctctatccttccccgtggtactgagctcacgtggactcccagtgcgaaggggcccatgggttgggctgcaggcctggccgtgagcgggggctgcctgcacgctcccctagcctactcttgtgtttaggggatggtgggaacatatcccagtgcccttgcctcataatagatgtggtgactctcccggtagaccctagcaagggtcctccatggtggtgagggactcaggagaattgtagggattgggggaccctgcctgcctggcttgagaacagccctgctgcccttttgagccgagattttgaagtggatgcccgtcttgccagaaatgctgttctcaccagaatgccccctccccttgcccttactggacttggccctgcctgatgccaagcaaagacccttccccagaggcctaccccccatatgtcctcagagaggctgagtgtcccctccaggcagtcatgggccctgaggcccctcctgcctggccctgctccccagtggggaggtgactgtgtttcccagagtgtgagccgctctcctccccctaaaaagctgactcactgtgagtgaccttgggcaagttcccaaacctccttgtgcctcagtttccccatctggaaaaaatggggccacctcttgccagcagtagcagggctgcccacgcccctttctccccatgccccatccagcacttgggcgactcatgcctctgcctcagtgggcctgtgggagcctactggagcccagcacttactccccctgagcagcgagcctgcgtctgtctcagctgtccagcgctgagggccagggtcttgtgctgtggggctgggggatgccctcttttctatatttatttcatagaaagtctcctgcgggagcggaaatgcagtccggcctagggctcccagcccttgactgtcctcctgtgagggcctgaagctgggccagggcccgtcgcagcggagccccctctcagcagcccaccgggtccctccaggctgctgcccgtgcgtggtctttctcctccttttcaaagcaatagccgccgggtctgcaaagccctgtcagacagactgggcccttccaaggtcaagccatgtgtctgatgacattcctggtgaagcaaaggagaggaggatgggtcagccctcactgggtgtcacacactgagagaagtcctattgtaaagaaacggaaaaagtcacaaaaaagtttgtataaagacatatttttgtactacatggggactcttcctgcatgtcagcaataaaacttcctgatctggaaccac

SEQ ID NO: 27712 - DNA, 3621 bp, Homo sapiens
  source 1..3621: mol_type = unassigned DNA
gccatggagggaggcggcggcggcggcggcggcggctcgggtggctgcgctgggaggcggcggtgagaggctcgcacgcctccagcccggccccggccccccgggagggagagccgagcagccccggctctgggctacggactatgggcgaatagctctgaccacccggcgaagagctgagaatgaagcggagagcatcagacagaggagctggggaaacgtcggccagggccaaggctctaggaagtgggatttctggaaataatgcaaagagagctggaccattcatccttggtccccgtctgggcaactcaccggtgccaagcatagtgcagtgtttggcgaggaaagatggcacggatgacttctatcagctgaagatcctgaccctggaggagaggggggaccaaggcatagagagccaggaagagcggcagggcaagatgctgctgcacaccgagtactcactgctgtctctcctgcacacgcaggatggcgtggtgcaccaccacggcctcttccaggaccgcacctgtgaaatcgttgaggacacagaatccagccggatggttaagaagatgaagaagcgcatctgcctcgtcctggactgcctctgtgctcatgacttcagcgataagaccgctgacctcatcaacctgcagcactacgtcatcaaggagaagaggctcagcgagagggagactgtggtaatcttctacgacgtggtccgcgtggtggaggccctgcaccagaaaaatatcgtgcacagagacctgaagctggggaacatggtgctcaacaagaggacacatcggataaccatcaccaacttctgcctcgggaagcatctggtgagcgagggggacctgctgaaggaccagagagggagccctgcctacatcagtcccgacgtgctcagcggccggccgtaccgtggcaagcccagtgacatgtgggccctgggcgtggtgctcttcaccatgctgtatggccagttccccttctacgacagcatcccgcaggagctcttccgcaagatcaaggctgccgagtataccattcctgaggatggacgggtttctgagaacaccgtgtgtctcatccggaagctgctggtccttgacccccagcagcgcctggccgccgccgacgtcctggaggccctcagtgccatcattgcatcatggcagtccctgtcatctctgagtgggcctttgcaagtggttcctgacattgatgaccaaatgagcaatgcggatagctcccaggaggcgaaggtgacggaggagtgctcccagtacgagtttgagaactacatgcgtcagcagctgctgctggccgaggagaagagctccatccatgacgcccggagctgggtacccaagcggcagttcggcagcgcaccaccggtgcgacggctgggccacgacgcacagcccatgacctccttggacacggccatcctggcgcagcgctacctgcggaaataacagcctcagccggggccaccagcactgctgccacttcttccagccccagccaaaggcgtggctgtcagggctgggccctgtagtgctggactctcccgggccacaatagggacagggcagggacagggacagcccaggtcacacgtggggtcagcagaggtaccacgaagctaccttttgggatgattgctcgattgtttggtttttaaatctgagaagcctagataactaatctgcttttaatcacgatgttttaatctacctctgtctctttaaccatgctgtctctggactgagcaagagggaggagggagcctgctcaccccactccagggccttccccagcggccaccaactgacctggggcgctgctccccacagtccaaataagctgaaagtgcagctcgctgcaggccccagagcgagcttcccctcctccctgctctcccaggcccctgccacagcctctttccgtccctctctttctgatccaggcccctcagtccaagctttggaaaaccttcacctcatcttaaaccgaactcaaatatatttatttttttaccataccaacttctctcccatctctaggtggctcagtccatggccactccctgcccccagcctggctggacagcaaggaatccacagcccacacgtgagctccctcctcacccccaggcagggaagcccctcctgccagtccctgtcccctttcagcccaccagtccctctctgctgccggtgatgggaggcctttctagacctggctctttctctcccgtctcagtggcttctctgaggtgctgtacacgcgcgttaacctgttcccttctctatccttccccgtggtactgagctcacgtggactcccagtgcgaaggggcccatgggttgggctgcaggcctggccgtgagcgggggctgcctgcacgctcccctagcctactcttgtgtttaggggatggtgggaacatatcccagtgcccttgcctcataatagatgtggtgactctcccggtagaccctagcaagggtcctccatggtggtgagggactcaggagaattgtagggattgggggaccctgcctgcctggcttgagaacagccctgctgcccttttgagccgagattttgaagtggatgcccgtcttgccagaaatgctgttctcaccagaatgccccctccccttgcccttactggacttggccctgcctgatgccaagcaaagacccttccccagaggcctaccccccatatgtcctcagagaggctgagtgtcccctccaggcagtcatgggccctgaggcccctcctgcctggccctgctccccagtggggaggtgactgtgtttcccagagtgtgagccgctctcctccccctaaaaagctgactcactgtgagtgaccttgggcaagttcccaaacctccttgtgcctcagtttccccatctggaaaaaatggggccacctcttgccagcagtagcagggctgcccacgcccctttctccccatgccccatccagcacttgggcgactcatgcctctgcctcagtgggcctgtgggagcctactggagcccagcacttactccccctgagcagcgagcctgcgtctgtctcagctgtccagcgctgagggccagggtcttgtgctgtggggctgggggatgccctcttttctatatttatttcatagaaagtctcctgcgggagcggaaatgcagtccggcctagggctcccagcccttgactgtcctcctgtgagggcctgaagctgggccagggcccgtcgcagcggagccccctctcagcagcccaccgggtccctccaggctgctgcccgtgcgtggtctttctcctccttttcaaagcaatagccgccgggtctgcaaagccctgtcagacagactgggcccttccaaggtcaagccatgtgtctgatgacattcctggtgaagcaaaggagaggaggatgggtcagccctcactgggtgtcacacactgagagaagtcctattgtaaagaaacggaaaaagtcacaaaaaagtttgtataaagacatatttttgtactacatggggactcttcctgcatgtcagcaataaaacttcctgatctggaaccac

SEQ ID NO: 27713 - DNA, 1442 bp, Homo sapiens
  source 1..1442: mol_type = unassigned DNA
acttcctgccgatgccggtgtggacgctgtgaatcgtggctggcccggttctccgcttctccccatcccctactttcctccctccctccctttccctccctcgtcgactgttgcttgctggtcgcagactccctgacccctccctcacccctccctaacctcggtgccaccggattgcccttcttttcctgttgcccagcccagccctagtgtcagggcgggggcctggagcagcccgaggcactgcagcagaagagagaaaagacaacgacgaccctcagctcgccagtccggtcgctggcttcgccgccgccatggcaatgagacagacgccgctcacctgctctggccacacgcgacccgtggttgatttggccttcagtggcatcacgccttatgggtatttcttaatcagcgcttgcaaaggagctggtcagcatttgcctagactctcgggacaacacgatggtaaacctatgctacgccagggagatacaggagactggattggaacatttttgggtcataaaggtgctgtttggggtgcaacactgaataaggatgccaccaaagcagctacagcagctgcagatttcacagccaaagtgtgggatgctgtctcaggagatgaattgatgaccctggctcataaacacattgtcaagactgtggatttcacgcaggatagtaattatttgttaaccgggggacaggataaactgttacgcatatatgacttgaacaaacctgaagcagaacctaaggaaattagtggtcatacttctggtataaaaaaagctctgtggtgcagtgaggataaacagattctttctgctgatgacaaaactgttcgactttgggatcatgctactatgacagaagtgaaatctctaaattttaatatgtctgttagtagtatggaatatattcctgagggagagattttggttataacttatggacgatctattgcttttcatagtgcagtaagtttggacccaattaaatcctttgaagctcctgcaaccatcaattctgcatctcttcatcctgagaaagaatttcttgttgcaggcggtgaagattttaaactttataagtatgattataatagtggagaagaattagaatcctacaagggacactttggtcctattcactgtgtgagatttagtcctgatggagaactctatgccagtggttcagaagatggaacattgagactatggcaaactgtggtaggaaaaacgtatggcctttggaaatgtgtgcttcctgaagaagatagtggtgagctggcaaagccaaagattggttttccagagacaacagaagaggagctagaagaaattgcttcagagaattcagattgcatctttccttcagctcctgatgttaaggcctgagcgtcaatcatatgtgcagttagtatacaactgact

SEQ ID NO: 27714 - DNA, 1866 bp, Homo sapiens
  source 1..1866: mol_type = unassigned DNA
cttcctgccgatgccggtgtggacgctgtgaatcgtggctggcccggttctccgcttctccccatcccctactttcctccctccctccctttccctccctcgtcgactgttgcttgctggtcgcagactccctgacccctccctcacccctccctaacctcggtgccaccggattgcccttcttttcctgttgcccagcccagccctagtgtcagggcgggggcctggagcagcccgaggcactgcagcagaagagagaaaagacaacgacgaccctcagctcgccagtccggtcgctggcttcgccgccgccatggcaatgagacagacgccgctcacctgctctggccacacgcgacccgtggttgatttggccttcagtggcatcacgccttatgggtatttcttaatcagcgcttgcaaagatggtaaacctatgctacgccagggagatacaggagactggattggaacatttttgggtcataaaggtgctgtttggggtgcaacactgaataaggatgccaccaaagcagctacagcagctgcagatttcacagccaaagtgtgggatgctgtctcaggagatgaattgatgaccctggctcataaacacattgtcaagactgtggatttcacgcaggatagtaattatttgttaaccgggggacaggataaactgttacgcatatatgacttgaacaaacctgaagcagaacctaaggaaattagtggtcatacttctggtataaaaaaagctctgtggtgcagtgaggataaacagattctttctgctgatgacaaaactgttcgactttgggatcatgctactatgacagaagtgaaatctctaaattttaatatgtctgttagtagtatggaatatattcctgagggagagattttggttataacttatggacgatctattgcttttcatagtgcagtaagtttggacccaattaaatcctttgaagctcctgcaaccatcaattctgcatctcttcatcctgagaaagaatttcttgttgcaggcggtgaagattttaaactttataagtatgattataatagtggagaagaattagaatcctacaagggacactttggtcctattcactgtgtgagatttagtcctgatggagaactctatgccagtggttcagaagatggaacattgagactatggcaaactgtggtaggaaaaacgtatggcctttggaaatgtgtgcttcctgaagaagatagtggtgagctggcaaagccaaagattggttttccagagacaacagaagaggagctagaagaaattgcttcagagaattcagattgcatctttccttcagctcctgatgttaaggcctgagcgtcaatcatatgtgcagttagtatacaactgactaaaacaagcaagcagagaaaagcatcagccttccagagttactgtctgcttaaggcagaaacagcagtaaataatgaggaaaatgaattagctccagtgctggaacaactaactaacttggtgttacctgtaagtgaaaactcaagtgtcagatgaagggaggtggagttatcctcttatagtacagtggcctgttatctttttaatgaatatatacaagccaacatccaatttctattattacaattagggttcttgtagctgtttatgttaatatggagaagaaaactatattggctgattttttctgatcttaaagcagaatgccttttctttttttgcttcagttgtaaagaagagggaatacatgataaagtaactggtttgatttctcgttcattgtacactgcctctgaacatctaattgtttttagttgtctaaataaaatgcctctaaaacaaaa

SEQ ID NO: 27715 - DNA, 1364 bp, Homo sapiens
  source 1..1364: mol_type = unassigned DNA
gtcacttcctgccgatgccggtgtggacgctgtgaatcgtggctggcccggttctccgcttctccccatcccctactttcctccctccctccctttccctccctcgtcgactgttgcttgctggtcgcagactccctgacccctccctcacccctccctaacctcggtgccaccggattgcccttcttttcctgttgcccagcccagccctagtgtcagggcgggggcctggagcagcccgaggcactgcagcagaagagagaaaagacaacgacgaccctcagctcgccagtccggtcgctggcttcgccgccgccatggcaatgagacagacgccgctcacctgctctggccacacgcgacccgtggttgatttggccttcagtggcatcacgccttatgggtatttcttaatcagcgcttgcaaagcaaagtgtgggatgctgtctcaggagatgaattgatgaccctggctcataaacacattgtcaagactgtggatttcacgcaggatagtaattatttgttaaccgggggacaggataaactgttacgcatatatgacttgaacaaacctgaagcagaacctaaggaaattagtggtcatacttctggtataaaaaaagctctgtggtgcagtgaggataaacagattctttctgctgatgacaaaactgttcgactttgggatcatgctactatgacagaagtgaaatctctaaattttaatatgtctgttagtagtatggaatatattcctgagggagagattttggttataacttatggacgatctattgcttttcatagtgcagtaagtttggacccaattaaatcctttgaagctcctgcaaccatcaattctgcatctcttcatcctgagaaagaatttcttgttgcaggcggtgaagattttaaactttataagtatgattataatagtggagaagaattagaatcctacaagggacactttggtcctattcactgtgtgagatttagtcctgatggagaactctatgccagtggttcagaagatggaacattgagactatggcaaactgtggtaggaaaaacgtatggcctttggaaatgtgtgcttcctgaagaagatagtggtgagctggcaaagccaaagattggttttccagagacaacagaagaggagctagaagaaattgcttcagagaattcagattgcatctttccttcagctcctgatgttaaggcctgagcgtcaatcatatgtgcagttagtatacaactgactaaaacaagcaagcagagaaaagcatcagccttccagagttactgtctgcttaaggcagaaacagcagtaaataatgaggaaaatgaattagctc

SEQ ID NO: 27716 - DNA, 2198 bp, Homo sapiens
  source 1..2198: mol_type = unassigned DNA
aggaagcaggcgggcgctccccggccacaggcctgttgttctcggaagggagaaagctggacatttccccacgtaactcccagctctgggcctagagtgcgtgcatggcgaagtccccggagaactctaccctggaggagattctggggcagtatcaacggagtctccggggaggaactctctggaatgaaaaataaaatacaagtagttgtgcttgaaaacgaagggctccagcaacagctaaaatctcaaagacaagaggagacactgagggaacaaacacttctggatgcatccggaaacatgcacaattcttggattacaacaggtgaagattctggggtgggcgaaacctccaaaagaccattttcccatgacaatgcagattttggcaaagctgcatctgctggtgagcagctagaactggagaagctaaaacttacttatgaggaaaagtgtgaaattgaggaatcccaattgaagtttttgaggaacgacttagctgaatatcagagaacttgtgaagatcttaaagagcaactaaagcataaagaatttcttctggctgctaatacttgtaaccgtgttggtggtctttgtttgaaatgtgctcagcatgaagctgttctttcccaaacccatactaatgttcatatgcagaccatcgaaagactggttaaagaaagagatgacttgatgtctgcactagtttccgtaaggagcagcttggcagatacgcagcaaagagaagcaagtgcttatgaacaggtgaaacaagttttgcaaatatctgaggaagccaattttgaaaaaaccaaggctttaatccagtgtgaccagttgaggaaggagctggagaggcaggcggagcgacttgaaaaagaacttgcatctcagcaagagaaaagggccattgagaaagacatgatgaaaaaggaaataacgaaagaaagggagtacatgggatcaaagatgttgatcttgtctcagaatattgcccaactggaggcccaggtggaaaaggttacaaaggaaaagatttcagctattaatcaactggaggaaattcaaagccagctggcttctcgggaaatggatgtcacaaaggtgtgtggagaaatgcgctatcagctgaataaaaccaacatggagaaggatgaggcagaaaaggagcacagagagttcagagcaaaaactaacagggatcttgaaattaaagatcaggaaatagagaaattgagaatagaactggatgaaagcaaacaacacttggaacaggagcagcagaaggcagccctggccagagaggagtgcctgagactaacagaactgctgggcgaatctgagcaccaactgcacctcaccagacaggaaaaagatagcattcagcagagctttagcaaggaagcaaaggcccaagcccttcaggcccagcaaagagagcaggagctgacacagaagatacagcaaatggaggcccagcatgacaaaactgaaaatgaacagtatttgttgctgacctcccagaatacatttttgacaaagttaaaggaagaatgctgtacattagccaagaaactggaacaaatctctcaaaaaaccagatctgaaatagctcaactcagtcaagaaaaaaggtatacatatgataaattgggaaagttacagagaagaaatgaagaattggaggaacagtgtgtccagcatgggagagtacatgagacgatgaagcaaaggctaaggcagctggataagcacagccaggccacagcccagcagctggtgcagctcctcagcaagcagaaccagcttctcctggagaggcagagcctgtcggaagaggtggaccggctgcggacccagttacccagcatgccacaatctgattgctgacctggatggaacagagtgaaataaatgatttacaaagagatatttacattcatctggtttagacttaatatgccacaacgcaccacgaccttcccagggtgacaccgcctcagcctgcagtggggctggtcctcatcaacgcgggcgctgtccccgcacgcagtcgggctggagctggagtctgactctagctgagcagagctcctggtgtatgttttcagaaatggcttgaagttatgtgtttaaatctgctcattcgtatgctaggttatacatatgattttcaataaatgaactttttaaag

SEQ ID NO: 27717 - DNA, 2470 bp, Homo sapiens
  source 1..2470: mol_type = unassigned DNA
agcccccaagagctctgtgcgggattctaggctcccctgtgacagccgcggcaggaagcaggcgggcgctccccggccacaggcctgttgttctcggaagggagaaagctggacatttccccacgtaactcccagctctgggcctagagtgcgtgcatggcgaagtccccggagaactctaccctggaggagattctggggcagtatcaacggagtctccgggaacatgccagcagaagcattcaccaactgacatgtgccctgaaagaaggcgatgtcactattggagaagatgcaccaaatctttcttttagcaccagtgtgggaaatgaggacgccaggacagcctggcccgaattacaacagagccatgctgttaatcagctcaaagatttgttgcgccaacaagcagataaggaaagtgaagtatctccgtcaagaagaagaaaaatgtcccccttgaggtcattagaacatgaggaaaccaatatgcctactatgcacgaccttgttcatactattaatgaccagtctcaatatattcatcatttagaggcagaagttaagttctgcaaggaggaactctctggaatgaaaaataaaatacaagtagttgtgcttgaaaacgaagggctccagcaacagctaaaatctcaaagacaagaggagacactgagggaacaaacacttctggatgcatccgagaagctaaaacttacttatgaggaaaagtgtgaaattgaggaatcccaattgaagtttttgaggaacgacttagctgaatatcagagaacttgtgaagatcttaaagagcaactaaagcataaagaatttcttctggctgctaatacttgtaaccgtgttggtggtctttgtttgaaatgtgctcagcatgaagctgttctttcccaaacccatactaatgttcatatgcagaccatcgaaagactggttaaagaaagagatgacttgatgtctgcactagtttccgtaaggagcagcttggcagatacgcagcaaagagaagcaagtgcttatgaacaggtgaaacaagttttgcaaatatctgaggaagccaattttgaaaaaaccaaggctttaatccagtgtgaccagttgaggaaggagctggagaggcaggcggagcgacttgaaaaagaacttgcatctcagcaagagaaaagggccattgagaaagacatgatgaaaaaggaaataacgaaagaaagggagtacatgggatcaaagatgttgatcttgtctcagaatattgcccaactggaggcccaggtggaaaaggttacaaaggaaaagatttcagctattaatcaactggaggaaattcaaagccagctggcttctcgggaaatggatgtcacaaaggtgtgtggagaaatgcgctatcagctgaataaaaccaacatggagaaggatgaggcagaaaaggagcacagagagttcagagcaaaaactaacagggatcttgaaattaaagatcaggaaatagagaaattgagaatagaactggatgaaagcaaacaacacttggaacaggagcagcagaaggcagccctggccagagaggagtgcctgagactaacagaactgctgggcgaatctgagcaccaactgcacctcaccagacaggaaaaagatagcattcagcagagctttagcaaggaagcaaaggcccaagcccttcaggcccagcaaagagagcaggagctgacacagaagatacagcaaatggaggcccagcatgacaaaactgaaaatgaacagtatttgttgctgacctcccagaatacatttttgacaaagttaaaggaagaatgctgtacattagccaagaaactggaacaaatctctcaaaaaaccagatctgaaatagctcaactcagtcaagaaaaaaggtatacatatgataaattgggaaagttacagagaagaaatgaagaattggaggaacagtgtgtccagcatgggagagtacatgagacgatgaagcaaaggctaaggcagctggataagcacagccaggccacagcccagcagctggtgcagctcctcagcaagcagaaccagcttctcctggagaggcagagcctgtcggaagaggtggaccggctgcggacccagttacccagcatgccacaatctgattgctgacctggatggaacagagtgaaataaatgatttacaaagagatatttacattcatctggtttagacttaatatgccacaacgcaccacgaccttcccagggtgacaccgcctcagcctgcagtggggctggtcctcatcaacgcgggcgctgtccccgcacgcagtcgggctggagctggagtctgactctagctgagcagagctcctggtgtatgttttcagaaatggcttgaagttatgtgtttaaatctgctcattcgtatgctaggttatacatatgattttcaataaatgaacttttt

SEQ ID NO: 27718 - DNA, 2567 bp, Homo sapiens
  source 1..2567: mol_type = unassigned DNA
gtgacagccgcggcaggaagcaggcgggcgctccccggccacaggcctgttgttctcggaagggagaaagctggacatttccccacgtaactcccagctctgggcctagagtgcgtgcatggcgaagtccccggagaactctaccctggaggagattctggggcagtatcaacggagtctccgggaacatgccagcagaagcattcaccaactgacatgtgccctgaaagaaggcgatgtcactattggagaagatgcaccaaatctttcttttagcaccagtgtgggaaatgaggacgccaggacagcctggcccgaattacaacagagccatgctgttaatcagctcaaagatttgttgcgccaacaagcagataaggaaagtgaagtatctccgtcaagaagaagaaaaatgtcccccttgaggtcattagaacatgaggaaaccaatatgcctactatgcacgaccttgttcatactattaatgaccagtctcaatatattcatcatttagaggcagaagttaagttctgcaaggaggaactctctggaatgaaaaataaaatacaagtagttgtgcttgaaaacgaagggctccagcaacagctaaaatctcaaagacaagaggagacactgagggaacaaacacttctggatgcatccggaaacatgcacaattcttggattacaacaggtgaagattctggggtgggcgaaacctccaaaagaccattttcccatgacaatgcagattttggcaaagctgcatctgctggtgagcagctagaactggagaagctaaaacttacttatgaggaaaagtgtgaaattgaggaatcccaattgaagtttttgaggaacgacttagctgaatatcagagaacttgtgaagatcttaaagagcaactaaagcataaagaatttcttctggctgctaatacttgtaaccgtgttggtggtctttgtttgaaatgtgctcagcatgaagctgttctttcccaaacccatactaatgttcatatgcagaccatcgaaagactggttaaagaaagagatgacttgatgtctgcactagtttccgtaaggagcagcttggcagatacgcagcaaagagaagcaagtgcttatgaacaggtgaaacaagttttgcaaatatctgaggaagccaattttgaaaaaaccaaggctttaatccagtgtgaccagttgaggaaggagctggagaggcaggcggagcgacttgaaaaagaacttgcatctcagcaagagaaaagggccattgagaaagacatgatgaaaaaggaaataacgaaagaaagggagtacatgggatcaaagatgttgatcttgtctcagaatattgcccaactggaggcccaggtggaaaaggttacaaaggaaaagatttcagctattaatcaactggaggaaattcaaagccagctggcttctcgggaaatggatgtcacaaaggtgtgtggagaaatgcgctatcagctgaataaaaccaacatggagaaggatgaggcagaaaaggagcacagagagttcagagcaaaaactaacagggatcttgaaattaaagatcaggaaatagagaaattgagaatagaactggatgaaagcaaacaacacttggaacaggagcagcagaaggcagccctggccagagaggagtgcctgagactaacagaactgctgggcgaatctgagcaccaactgcacctcaccagacaggaaaaagatagcattcagcagagctttagcaaggaagcaaaggcccaagcccttcaggcccagcaaagagagcaggagctgacacagaagatacagcaaatggaggcccagcatgacaaaactgaaaatgaacagtatttgttgctgacctcccagaatacatttttgacaaagttaaaggaagaatgctgtacattagccaagaaactggaacaaatctctcaaaaaaccagatctgaaatagctcaactcagtcaagaaaaaaggtatacatatgataaattgggaaagttacagagaagaaatgaagaattggaggaacagtgtgtccagcatgggagagtacatgagacgatgaagcaaaggctaaggcagctggataagcacagccaggccacagcccagcagctggtgcagctcctcagcaagcagaaccagcttctcctggagaggcagagcctgtcggaagaggtggaccggctgcggacccagttacccagcatgccacaatctgattgctgacctggatggaacagagtgaaataaatgatttacaaagagatatttacattcatctggtttagacttaatatgccacaacgcaccacgaccttcccagggtgacaccgcctcagcctgcagtggggctggtcctcatcaacgcgggcgctgtccccgcacgcagtcgggctggagctggagtctgactctagctgagcagagctcctggtgtatgttttcagaaatggcttgaagttatgtgtttaaatctgctcattcgtatgctaggttatacatatgattttcaataaatgaactttttaaagac

SEQ ID NO: 27719 - DNA, 1239 bp, Homo sapiens
  source 1..1239: mol_type = unassigned DNA
agcccccaagagctctgtgcgggattctaggctcccctgtgacagccgcggcaggaagcaggcgggcgctccccggccacaggcctgttgttctcggaagggagaaagctggacatttccccacgtaactcccagctctgggcctagagtgcgtgcatggcgaagtccccggagaactctaccctggaggagattctggggcagtatcaacggagtctccgggaacatgccagcagaagcattcaccaactgacatgtgccctgaaagaaggcgatgtcactattggagaagatgcaccaaatctttcttttagcaccagtgtgggaaatgaggacgccaggacagcctggcccgaattacaacagagccatgctgttaatcagctcaaagatttgttgcgccaacaagcagataaggaaagtgaagtatctccgtcaagaagaagaaaaatgtcccccttgaggtcattagaacatgaggaaaccaatatgcctactatgcacgaccttgttcatactattaatgaccagtctcaatatattcatcatttagaggcagaagttaagttctgcaaggaggaactctctggaatgaaaaataaaatacaagtagttgtgcttgaaaacgaagggctccagcaacagctaaaatctcaaagacaagaggagacactgagggaacaaacacttctggatgcatccggaaacatgcacaattcttggattacaacaggtgaagattctggggtgggcgaaacctccaaaagaccattttcccatgacaatgcagattttggcaaagctgcatctgctggtgagcagctagaactggagaagctaaaacttacttatgaggaaaagtgtgaaattgaggaatcccaattgaagtttttgaggaacgacttagctgaatatcagagaacttgtgaagatcttaaagagcaactaaagcataaagaatttcttctggctgctaatacttgtaaccgtgttggtggtctttgtttgaaatgtgctcagcatgaagctgttctttcccaaacccatactaatgttcatatgcagaccatcgaaagactggttaaagaaagagatgacttgatgtctgcactagtttccgtaaggagcagcttggcagatacgcagcaaagagaagcaagtgcttatgaacaggtgaaacaagttttgcaaatatctgaggaagccaattttgaaaaaaccaagcacccttcacaatag

SEQ ID NO: 27720 - DNA, 1551 bp, Homo sapiens
  source 1..1551: mol_type = unassigned DNA
cttctggatgcatccgagaagctaaaacttacttatgaggaaaagtgtgaaattgaggaatcccaattgaagtttttgaggaacgacttagctgaatatcagagaacttgtgaagatcttaaagagcaactaaagcataaagaatttcttctggctgctaatacttgtaaccgtgttggtggtctttgtttgaaatgtgctcagcatgaagctgttctttcccaaacccatactaatgttcatatgcagaccatcgaaagactggttaaagaaagagatgacttgatgtctgcactagtttccgtaaggagcagcttggcagatacgcagcaaagagaagcaagtgcttatgaacaggtgaaacaagttttgcaaatatctgaggaagccaattttgaaaaaaccaaggctttaatccagtgtgaccagttgaggaaggagctggagaggcaggcggagcgacttgaaaaagaacttgcatctcagcaagagaaaagggccattgagaaagacatgatgaaaaaggaaataacgaaagaaagggagtacatgggatcaaagatgttgatcttgtctcagaatattgcccaactggaggcccaggtggaaaaggttacaaaggaaaagatttcagctattaatcaactggaggaaattcaaagccagctggcttctcgggaaatggatgtcacaaaggtgtgtggagaaatgcgctatcagctgaataaaaccaacatggagaaggatgaggcagaaaaggagcacagagagttcagagcaaaaactaacagggatcttgaaattaaagatcaggaaatagagaaattgagaatagaactggatgaaagcaaacaacacttggaacaggagcagcagaaggcagccctggccagagaggagtgcctgagactaacagaactgctgggcgaatctgagcaccaactgcacctcaccagatctgaaatagctcaactcagtcaagaaaaaaggtatacatatgataaattgggaaagttacagagaagaaatgaagaattggaggaacagtgtgtccagcatgggagagtacatgagacgatgaagcaaaggctaaggcagctggataagcacagccaggccacagcccagcagctggtgcagctcctcagcaagcagaaccagcttctcctggagaggcagagcctgtcggaagaggtggaccggctgcggacccagttacccagcatgccacaatctgattgctgacctggatggaacagagtgaaataaatgatttacaaagagatatttacattcatctggtttagacttaatatgccacaacgcaccacgaccttcccagggtgacaccgcctcagcctgcagtggggctggtcctcatcaacgcgggcgctgtccccgcacgcagtcgggctggagctggagtctgactctagctgagcagagctcctggtgtatgttttcagaaatggcttgaagttatgtgtttaaatctgctcattcgtatgctaggttatacatatgattttcaataaatgaactttttaaaga

SEQ ID NO: 27721 - DNA, 1178 bp, Homo sapiens
  source 1..1178: mol_type = unassigned DNA
gtcaaagcagcagcggcggcggcggcggcggcagcagcagcagcagcaggagaccttctctgatggatgacctctgtgaagcaaatggcacttttgccatcagcttatttaaaatattgggggaagaggacaactcaagaaacgtattcttctctcccatgagcatctcctctgccctggccatggtcttcatgggggcaaagggaagcactgcagcccagatgtcccaggcactttgtttatacaaagacggagatattcaccgaggtttccagtcacttctcagtgaagttaacagaactggcactcagtacttgcttagaactgccaacagactctttggagaaaagacgtgtgatttccttccagactttaaagaatactgtcagaagttctatcaggcagagctggaggagttgtcctttgctgaagacactgaagagtgcaggaagcatataaatgactgggtggcagagaagactgaaggtaagatttcagaggtactggatgctgggacagtcgatcccctgacaaagctggtccttgtgaatgccatttatttcaagggaaagtggaatgagcaatttgacagaaagtacacaaggggaatgctctttaaaaccaacgaggaaaaaaagacagtgcagatgatgtttaaggaagctaagtttaaaatggggtatgcggatgaggtacacacccaggtcctggagctgccctatgtggaagaggagctgagcatggtcattctgcttcccgatgacaacacggacctcgccgtgaaagagtgatggatcttgaagaatttgaagctaactccaggacaggcagaggacaaacaaggatgctgatgaagtcttcttgcattccccatttctcgtctcatgctcccttctcatgcctcccttcatcttcagatgaaacacaattccctctcttttactctgagttgccctctgatttaaccctgaatagtcccctcattagactcagaagcagagttctgagccatgctctttgtcttttgtcaaacaatctctcccactcacagtagtatgtattgcatgaagattaatgtaatgaattggttagaattttctaaactgttaaaaaatgtttttaacatttgaaaggagttaggtacaaattgtttttattaaaaatttctgcctgtctca

SEQ ID NO: 27722 - DNA, 2116 bp, Homo sapiens
  source 1..2116: mol_type = unassigned DNA
gctgaaggttctgggctgcaaagctgaagctttggtttctgctctaaatgaaggacttttccaggacccaaggccacacactggaagtcttgcagctgaagggaggcactccttggcctccgcagccgatcacatgaaggtggtgccaagtctcctgctctccgtcctcctggcacaggtgtggctggtacccggcttggcccccagtcctcagtcgccagagaccccagcccctcagaaccagaccagcagggtagtgcaggctcccaaggaggaagaggaagatgagcaggaggccagcgaggagaaggccagtgaggaagagaaagcctggctgatggccagcaggcagcagcttgccaaggagacttcaaacttcggattcagcctgctgcgaaagatctccatgaggcacgatggcaacatggtcttctctccatttggcatgtccttggccatgacaggcttgatgctgggggccacagggccgactgaaacccagatcaagagagggctccacttgcaggccctgaagcccaccaagcccgggctcctgccttccctctttaagggactcagagagaccctctcccgcaacctggaactgggcctcacacaggggagttttgccttcatccacaaggattttgatgtcaaagagactttcttcaatttatccaagaggtattttgatacagagtgcgtgcctatgaattttcgcaatgcctcacaggccaaaaggctcatgaatcattacattaacaaagagactcgggggaaaattcccaaactgtttgatgagattaatcctgaaaccaaattaattcttgtggattacatcttgttcaaagggaaatggttgaccccatttgaccctgtcttcaccgaagtcgacactttccacctggacaagtacaagaccattaaggtgcccatgatgtacggtgcaggcaagtttgcctccacctttgacaagaattttcgttgtcatgtcctcaaactgccctaccaaggaaatgccaccatgctggtggtcctcatggagaaaatgggtgaccacctcgcccttgaagactacctgaccacagacttggtggagacatggctcagaaacatgaaaaccagaaacatggaagttttctttccgaagttcaagctagatcagaagtatgagatgcatgagctgcttaggcagatgggaatcagaagaatcttctcaccctttgctgaccttagtgaactctcagctactggaagaaatctccaagtatccagggttttacaaagaacagtgattgaagttgatgaaaggggcactgaggcagtggcaggaatcttgtcagaaattactgcttattccatgcctcctgtcatcaaagtggaccggccatttcatttcatgatctatgaagaaacctctggaatgcttctgtttctgggcagggtggtgaatccgactctcctataattcaggacacgcataagcacttcgtgctgtagtagatgctgaatctgaggtatcaaacacacacaggataccagcaatggatggcaggggagagtgttccttttgttcttaactagtttagggtgttctcaaataaatacagtagtccccacttatctgagggggatacattcaaagacccccagcagatgcctgaaacggtggacagtgctgaaccttatatatattttttcctacacatacatacctatgataaagtttaatttataaattaggcacagtaagagattaacaataataacaacattaagtaaaatgagttacttgaatgcaagcactgcaataccataacagtcaaactgattatagagaaggctactaagtgactcatgggcgaggagcatagacagtgtggagacattgggcaaggggagaattcacatcctgggtgggacagagcaggacaatgcaagattccatcccactactcagaatggcatgctgcttaagacttttagattgtttatttctggaatttttcatttaatgtttttggaccatggttgaccatggttaactgagactgcagaaagcaaaaccatggataagggaggactactacaaaagcattaaattgatacatatttt

SEQ ID NO: 27723 - DNA, 2451 bp, Homo sapiens
  source 1..2451: mol_type = unassigned DNA
ctggagtggggtaagaggcgaattatagacacaaggggctcctctgcaggaaggaggccaagggaaagaggcttgaaaggcttgatatttcacccaccaccactcactgccggagtaagcaggtctccccttcccagggctgaggggaggcagggatgtgtgctgtcccagggctgagaagtggcaggtgagctggtgattccttactgcccaggttctgtctaggaaggtgcgtcctcaccatgctggatggtgtcctagtccaggagcaccccctgagctcctggcctagactccaaagggttgggtagatgagcaaagactttacaaagaccttaggcgatatatgtccaggagcacccaggaattactgggctaccactgcagactgcaggacaagctccaagaacaggaaggaagtcttgcagctgaagggaggcactccttggcctccgcagccgatcacatgaaggtggtgccaagtctcctgctctccgtcctcctggcacaggtgtggctggtacccggcttggcccccagtcctcagtcgccagagaccccagcccctcagaaccagaccagcagggtagtgcaggctcccaaggaggaagaggaagatgagcaggaggccagcgaggagaaggccagtgaggaagagaaagcctggctgatggccagcaggcagcagcttgccaaggagacttcaaacttcggattcagcctgctgcgaaagatctccatgaggcacgatggcaacatggtcttctctccatttggcatgtccttggccatgacaggcttgatgctgggggccacagggccgactgaaacccagatcaagagagggctccacttgcaggccctgaagcccaccaagcccgggctcctgccttccctctttaagggactcagagagaccctctcccgcaacctggaactgggcctcacacaggggagttttgccttcatccacaaggattttgatgtcaaagagactttcttcaatttatccaagaggtattttgatacagagtgcgtgcctatgaattttcgcaatgcctcacaggccaaaaggctcatgaatcattacattaacaaagagactcgggggaaaattcccaaactgtttgatgagattaatcctgaaaccaaattaattcttgtggattacatcttgttcaaagggaaatggttgaccccatttgaccctgtcttcaccgaagtcgacactttccacctggacaagtacaagaccattaaggtgcccatgatgtacggtgcaggcaagtttgcctccacctttgacaagaattttcgttgtcatgtcctcaaactgccctaccaaggaaatgccaccatgctggtggtcctcatggagaaaatgggtgaccacctcgcccttgaagactacctgaccacagacttggtggagacatggctcagaaacatgaaaaccagaaacatggaagttttctttccgaagttcaagctagatcagaagtatgagatgcatgagctgcttaggcagatgggaatcagaagaatcttctcaccctttgctgaccttagtgaactctcagctactggaagaaatctccaagtatccagggttttacaaagaacagtgattgaagttgatgaaaggggcactgaggcagtggcaggaatcttgtcagaaattactgcttattccatgcctcctgtcatcaaagtggaccggccatttcatttcatgatctatgaagaaacctctggaatgcttctgtttctgggcagggtggtgaatccgactctcctataattcaggacacgcataagcacttcgtgctgtagtagatgctgaatctgaggtatcaaacacacacaggataccagcaatggatggcaggggagagtgttccttttgttcttaactagtttagggtgttctcaaataaatacagtagtccccacttatctgagggggatacattcaaagacccccagcagatgcctgaaacggtggacagtgctgaaccttatatatattttttcctacacatacatacctatgataaagtttaatttataaattaggcacagtaagagattaacaataataacaacattaagtaaaatgagttacttgaatgcaagcactgcaataccataacagtcaaactgattatagagaaggctactaagtgactcatgggcgaggagcatagacagtgtggagacattgggcaaggggagaattcacatcctgggtgggacagagcaggacaatgcaagattccatcccactactcagaatggcatgctgcttaagacttttagattgtttatttctggaatttttcatttaatgtttttggaccatggttgaccatggttaactgagactgcagaaagcaaaaccatggataagggaggactactacaaaagcattaaattgatacatatttttt

SEQ ID NO: 27724 - DNA, 2000 bp, Homo sapiens
  source 1..2000: mol_type = unassigned DNA
cacaggaagtcttgcagctgaagggaggcactccttggcctccgcagccgatcacatgaaggtggtgccaagtctcctgctctccgtcctcctggcacaggtgtggctggtacccggcttggcccccagtcctcagtcgccagagaccccagcccctcagaaccagaccagcagggtagtgcaggctcccaaggaggaagaggaagatgagcaggaggccagcgaggagaaggccagtgaggaagagaaagcctggctgatggccagcaggcagcagcttgccaaggagacttcaaacttcggattcagcctgctgcgaaagatctccatgaggcacgatggcaacatggtcttctctccatttggcatgtccttggccatgacaggcttgatgctgggggccacagggccgactgaaacccagatcaagagagggctccacttgcaggccctgaagcccaccaagcccgggctcctgccttccctctttaagggactcagagagaccctctcccgcaacctggaactgggcctcacacaggggagttttgccttcatccacaaggattttgatgtcaaagagactttcttcaatttatccaagaggtattttgatacagagtgcgtgcctatgaattttcgcaatgcctcacaggccaaaaggctcatgaatcattacattaacaaagagactcgggggaaaattcccaaactgtttgatgagattaatcctgaaaccaaattaattcttgtggattacatcttgttcaaagggaaatggttgaccccatttgaccctgtcttcaccgaagtcgacactttccacctggacaagtacaagaccattaaggtgcccatgatgtacggtgcaggcaagtttgcctccacctttgacaagaattttcgttgtcatgtcctcaaactgccctaccaaggaaatgccaccatgctggtggtcctcatggagaaaatgggtgaccacctcgcccttgaagactacctgaccacagacttggtggagacatggctcagaaacatgaaaaccagaaacatggaagttttctttccgaagttcaagctagatcagaagtatgagatgcatgagctgcttaggcagatgggaatcagaagaatcttctcaccctttgctgaccttagtgaactctcagctactggaagaaatctccaagtatccagggttttacaaagaacagtgattgaagttgatgaaaggggcactgaggcagtggcaggaatcttgtcagaaattactgcttattccatgcctcctgtcatcaaagtggaccggccatttcatttcatgatctatgaagaaacctctggaatgcttctgtttctgggcagggtggtgaatccgactctcctataattcaggacacgcataagcacttcgtgctgtagtagatgctgaatctgaggtatcaaacacacacaggataccagcaatggatggcaggggagagtgttccttttgttcttaactagtttagggtgttctcaaataaatacagtagtccccacttatctgagggggatacattcaaagacccccagcagatgcctgaaacggtggacagtgctgaaccttatatatattttttcctacacatacatacctatgataaagtttaatttataaattaggcacagtaagagattaacaataataacaacattaagtaaaatgagttacttgaatgcaagcactgcaataccataacagtcaaactgattatagagaaggctactaagtgactcatgggcgaggagcatagacagtgtggagacattgggcaaggggagaattcacatcctgggtgggacagagcaggacaatgcaagattccatcccactactcagaatggcatgctgcttaagacttttagattgtttatttctggaatttttcatttaatgtttttggaccatggttgaccatggttaactgagactgcagaaagcaaaaccatggataagg

SEQ ID NO: 27725 - DNA, 2526 bp, Homo sapiens
  source 1..2526: mol_type = unassigned DNA
gagggctgtgtggctgagcagtgcaaagacctccatcctacactccacagggactgtacatacagattgggagctggagtggggtaagaggcgaattatagacacaaggggctcctctgcaggaaggaggccaagggaaagaggcttgaaaggcttgatatttcacccaccaccactcactgccggagtaagcaggtctccccttcccagggctgaggggaggcagggatgtgtgctgtcccagggctgagaagtggcaggtgagctggtgattccttactgcccaggttctgtctaggaaggtgcgtcctcaccatgctggatggtgtcctagtccaggagcaccccctgagctcctggcctagactccaaagggttgggtagatgagcaaagactttacaaagaccttaggcgatatatgtccaggagcacccaggaattactgggctaccactgcagactgcaggacaagctccaagaacaggaaggaagtcttgcagctgaagggaggcactccttggcctccgcagccgatcacatgaaggtggtgccaagtctcctgctctccgtcctcctggcacaggtgtggctggtacccggcttggcccccagtcctcagtcgccagagaccccagcccctcagaaccagaccagcagggtagtgcaggctcccaaggaggaagaggaagatgagcaggaggccagcgaggagaaggccagtgaggaagagaaagcctggctgatggccagcaggcagcagcttgccaaggagacttcaaacttcggattcagcctgctgcgaaagatctccatgaggcacgatggcaacatggtcttctctccatttggcatgtccttggccatgacaggcttgatgctgggggccacagggccgactgaaacccagatcaagagagggctccacttgcaggccctgaagcccaccaagcccgggctcctgccttccctctttaagggactcagagagaccctctcccgcaacctggaactgggcctcacacaggggagttttgccttcatccacaaggattttgatgtcaaagagactttcttcaatttatccaagaggtattttgatacagagtgcgtgcctatgaattttcgcaatgcctcacaggccaaaaggctcatgaatcattacattaacaaagagactcgggggaaaattcccaaactgtttgatgagattaatcctgaaaccaaattaattcttgtggattacatcttgttcaaagggaaatggttgaccccatttgaccctgtcttcaccgaagtcgacactttccacctggacaagtacaagaccattaaggtgcccatgatgtacggtgcaggcaagtttgcctccacctttgacaagaattttcgttgtcatgtcctcaaactgccctaccaaggaaatgccaccatgctggtggtcctcatggagaaaatgggtgaccacctcgcccttgaagactacctgaccacagacttggtggagacatggctcagaaacatgaaaaccagaaacatggaagttttctttccgaagttcaagctagatcagaagtatgagatgcatgagctgcttaggcagatgggaatcagaagaatcttctcaccctttgctgaccttagtgaactctcagctactggaagaaatctccaagtatccagggttttacaaagaacagtgattgaagttgatgaaaggggcactgaggcagtggcaggaatcttgtcagaaattactgcttattccatgcctcctgtcatcaaagtggaccggccatttcatttcatgatctatgaagaaacctctggaatgcttctgtttctgggcagggtggtgaatccgactctcctataattcaggacacgcataagcacttcgtgctgtagtagatgctgaatctgaggtatcaaacacacacaggataccagcaatggatggcaggggagagtgttccttttgttcttaactagtttagggtgttctcaaataaatacagtagtccccacttatctgagggggatacattcaaagacccccagcagatgcctgaaacggtggacagtgctgaaccttatatatattttttcctacacatacatacctatgataaagtttaatttataaattaggcacagtaagagattaacaataataacaacattaagtaaaatgagttacttgaatgcaagcactgcaataccataacagtcaaactgattatagagaaggctactaagtgactcatgggcgaggagcatagacagtgtggagacattgggcaaggggagaattcacatcctgggtgggacagagcaggacaatgcaagattccatcccactactcagaatggcatgctgcttaagacttttagattgtttatttctggaatttttcatttaatgtttttggaccatggttgaccatggttaactgagactgcagaaagcaaaaccatggataagggaggactactacaaaagcattaaattgatacatattttttaa

SEQ ID NO: 27726 - DNA, 639 bp, Homo sapiens
  source 1..639: mol_type = unassigned DNA
atggagagaatgttacctctcctggctctggggctcttggcggctgggttctgccctgctgtcctctgccaccctaacagcccacttgacgaggagaatctgacccaggagaaccaagaccgagggacacacgtggacctcggattagcctccgccaacgtggacttcgctttcagcctgtacaagcatccccacaggtggtccataaggctgtgcttgatgtatttgaggagggcacagaagcatctgctgccacagcagtcaaaatcaccctcctttctgcattagtggagacaaggaccattgtgcgtttcaacaggcccttcctgatgatcattgtccctacagacacccagaacatcttcttcatgagcaaagtcaccaatcccaagcaagcctagagcttgccatcaagcagtggggctctcagtaaggaacttggaatgcaagctggatgcctgggtctctgggcacagcctggcccctgtgcaccgagtggccatggcatgtgtggccctgtctgcttatccttggaaggtgacagcgattccctgtgtagctctcacatgcacaggggcccatggactcttcagtctggagggtcctgggcctcctgacagcaataaataatttcgttgg

SEQ ID NO: 27727 - DNA, 1589 bp, Homo sapiens
  source 1..1589: mol_type = unassigned DNA
attcatgaaaatccactactccagacagacggctttggaatccaccagctacatccagctccctgaggcagagttgagaatggagagaatgttacctctcctggctctggggctcttggcggctgggttctgccctgctgtcctctgccaccctaacagcccacttgacgaggagaatctgacccaggagaaccaagaccgagggacacacgtggacctcggattagcctccgccaacgtggacttcgctttcagcctgtacaagcagttagtcctgaaggcccctgataagaatgtcatcttctccccactgagcatctccaccgccttggccttcctgtctctgggggcccataataccaccctgacagagattctcaaaggcctcaagttcaacctcacggagacttctgaggcagaaattcaccagagcttccagcacctcctgcgcaccctcaatcagtccagcgatgagctgcagctgagtatgggaaatgccatgtttgtcaaagagcaactcagtctgctggacaggttcacggaggatgccaagaggctgtatggctccgaggcctttgccactgactttcaggactcagctgcagctaagaagctcatcaacgactacgtgaagaatggaactagggggaaaatcacagatctgatcaaggaccttgactcgcagacaatgatggtcctggtgaattacatcttctttaaagccaaatgggagatgccctttgacccccaagatactcatcagtcaaggttctacttgagcaagaaaaagtgggtaatggtgcccatgatgagtttgcatcacctgactataccttacttccgggacgaggagctgtcctgcaccgtggtggagctgaagtacacaggcaatgccagcgcactcttcatcctccctgatcaagacaagatggaggaagtggaagccatgctgctcccagagaccctgaagcggtggagagactctctggagttcagagagataggtgagctctacctgccaaagttttccatctcgagggactataacctgaacgacatacttctccagctgggcattgaggaagccttcaccagcaaggctgacctgtcagggatcacaggggccaggaacctagcagtctcccaggtggtccataaggctgtgcttgatgtatttgaggagggcacagaagcatctgctgccacagcagtcaaaatcaccctcctttctgcattagtggagacaaggaccattgtgcgtttcaacaggcccttcctgatgatcattgtccctacagacacccagaacatcttcttcatgagcaaagtcaccaatcccaagcaagcctagagcttgccatcaagcagtggggctctcagtaaggaacttggaatgcaagctggatgcctgggtctctgggcacagcctggcccctgtgcaccgagtggccatggcatgtgtggccctgtctgcttatccttggaaggtgacagcgattccctgtgtagctctcacatgcacaggggcccatggactcttcagtctggagggtcctgggcctcctgacagcaataaataatttcgttgg

SEQ ID NO: 27728 - DNA, 1581 bp, Homo sapiens
  source 1..1581: mol_type = unassigned DNA
aaaatccactactccagacagacggctttggaatccaccagctacatccagctccctgagagttgagaatggagagaatgttacctctcctggctctggggctcttggcggctgggttctgccctgctgtcctctgccaccctaacagcccacttgacgaggagaatctgacccaggagaaccaagaccgagggacacacgtggacctcggattagcctccgccaacgtggacttcgctttcagcctgtacaagcagttagtcctgaaggcccctgataagaatgtcatcttctccccactgagcatctccaccgccttggccttcctgtctctgggggcccataataccaccctgacagagattctcaaaggcctcaagttcaacctcacggagacttctgaggcagaaattcaccagagcttccagcacctcctgcgcaccctcaatcagtccagcgatgagctgcagctgagtatgggaaatgccatgtttgtcaaagagcaactcagtctgctggacaggttcacggaggatgccaagaggctgtatggctccgaggcctttgccactgactttcaggactcagctgcagctaagaagctcatcaacgactacgtgaagaatggaactagggggaaaatcacagatctgatcaaggaccttgactcgcagacaatgatggtcctggtgaattacatcttctttaaagccaaatgggagatgccctttgacccccaagatactcatcagtcaaggttctacttgagcaagaaaaagtgggtaatggtgcccatgatgagtttgcatcacctgactataccttacttccgggacgaggagctgtcctgcaccgtggtggagctgaagtacacaggcaatgccagcgcactcttcatcctccctgatcaagacaagatggaggaagtggaagccatgctgctcccagagaccctgaagcggtggagagactctctggagttcagagagataggtgagctctacctgccaaagttttccatctcgagggactataacctgaacgacatacttctccagctgggcattgaggaagccttcaccagcaaggctgacctgtcagggatcacaggggccaggaacctagcagtctcccaggtggtccataaggctgtgcttgatgtatttgaggagggcacagaagcatctgctgccacagcagtcaaaatcaccctcctttctgcattagtggagacaaggaccattgtgcgtttcaacaggcccttcctgatgatcattgtccctacagacacccagaacatcttcttcatgagcaaagtcaccaatcccaagcaagcctagagcttgccatcaagcagtggggctctcagtaaggaacttggaatgcaagctggatgcctgggtctctgggcacagcctggcccctgtgcaccgagtggccatggcatgtgtggccctgtctgcttatccttggaaggtgacagcgattccctgtgtagctctcacatgcacaggggcccatggactcttcagtctggagggtcctgggcctcctgacagcaataaataatttcgttggaca

SEQ ID NO: 27729 - DNA, 2660 bp, Homo sapiens
  source 1..2660: mol_type = unassigned DNA
actactccagacagacggctttggaatccaccagctacatccagctccctgaggactgagtgggcggaggctgaaggtgaataatcttgtttgctgcggtcaccggcttggaactcagcccttccagggtctcttgtgcagtagctcatggctcttctctggcttgtagtttcaggaaaggggtagtatgggaggtggtgactgctcggtacgtctaatatgaaccaggtgccttcatcatttatctcacctgagccacttaacaggttgtgcagagacggaaacaggttgagagatgtacagtcacctgcttgccagtacacagcaatcaaaagtggccaaaataaaatcccagtccaagtctgggagactccaaagccctctctgccttctccccactaagaggcccttccaggcttatggtggacacagacaccacgtggcaacctggcaggggcagagaagaacatttgcctttctttggtcttgctgccaaccattatcagggccatcgaggctccagacactgtaccagggactttcatttccctctctcagtcgaccctcactgccacccagcatcacatcgtggaggcctgtggaggccacaccacgtgacatctagaggctgggagagtcactgtggcctctatctctgcccagggctccttcatccctgggttctactttggtggcagttgggagaatgaaggaagggagcccctgctttctaatcccctaggatgagatctgctcaccaagcaggagaggagcaggcattctgattggactgaacctcggaccccccatcagcttacagaccgaggagccaggcaaacctggctgcccactgggctcctttacctgtttgctgtatgatcttgggcaagccccctcaccgctctgtgcccggcttttccactgcaagaaaatggcaacaattatggtacctacctcaaagggtgaaatgaagcagagtgatgtgtgtcgggtgccccagagagcacctacctgagggaggctccaaagctagcaagaggcagcaggacagggaccaggacgcaggctgggtggagggcagtgggaggtggtcggggctccatctggccctctgagacttaaaggagctttgcttttcagagttgagaatggagagaatgttacctctcctggctctggggctcttggcggctgggttctgccctgctgtcctctgccaccctaacagcccacttgacgaggagaatctgacccaggagaaccaagaccgagggacacacgtggacctcggattagcctccgccaacgtggacttcgctttcagcctgtacaagcagttagtcctgaaggcccctgataagaatgtcatcttctccccactgagcatctccaccgccttggccttcctgtctctgggggcccataataccaccctgacagagattctcaaaggcctcaagttcaacctcacggagacttctgaggcagaaattcaccagagcttccagcacctcctgcgcaccctcaatcagtccagcgatgagctgcagctgagtatgggaaatgccatgtttgtcaaagagcaactcagtctgctggacaggttcacggaggatgccaagaggctgtatggctccgaggcctttgccactgactttcaggactcagctgcagctaagaagctcatcaacgactacgtgaagaatggaactagggggaaaatcacagatctgatcaaggaccttgactcgcagacaatgatggtcctggtgaattacatcttctttaaagccaaatgggagatgccctttgacccccaagatactcatcagtcaaggttctacttgagcaagaaaaagtgggtaatggtgcccatgatgagtttgcatcacctgactataccttacttccgggacgaggagctgtcctgcaccgtggtggagctgaagtacacaggcaatgccagcgcactcttcatcctccctgatcaagacaagatggaggaagtggaagccatgctgctcccagagaccctgaagcggtggagagactctctggagttcagagagataggtgagctctacctgccaaagttttccatctcgagggactataacctgaacgacatacttctccagctgggcattgaggaagccttcaccagcaaggctgacctgtcagggatcacaggggccaggaacctagcagtctcccaggtggtccataaggctgtgcttgatgtatttgaggagggcacagaagcatctgctgccacagcagtcaaaatcaccctcctttctgcattagtggagacaaggaccattgtgcgtttcaacaggcccttcctgatgatcattgtccctacagacacccagaacatcttcttcatgagcaaagtcaccaatcccaagcaagcctagagcttgccatcaagcagtggggctctcagtaaggaacttggaatgcaagctggatgcctgggtctctgggcacagcctggcccctgtgcaccgagtggccatggcatgtgtggccctgtctgcttatccttggaaggtgacagcgattccctgtgtagctctcacatgcacaggggcccatggactcttcagtctggagggtcctgggcctcctgacagcaataaataatttcgttggac

SEQ ID NO: 27730 - DNA, 3067 bp, Homo sapiens
  source 1..3067: mol_type = unassigned DNA
tggtgcacaaagctgtggtggaggtggacgagtcgggaaccagagcagcggcagccacggggacaatattcactttcagatattcactgaatggccactgtgtgcctggcactgttccaagtgctgaagaaaaatgaagaaaacaaaaatccctgcccttatagaggagacattataatgtgacaagataacataatgaaaaagaatgaagaataaaatagaaaagtaaaatggattgcatgtcacttgatgacaagtactgtggaatgaggccgtcatctaaatggagcacagaaagtggaacatggcgacatctcagccaaaagacccggcagacaccatcttggccaagggatcgaggttggcatcgccagctgtgagcagtgctgacatcttattatcttcgatatggcgtcatgagcaggctgcctcctcttggtgggatcttcccccaaacccagaacctcagtctaatcacaagaaaatgacagccaatcccaagttcagggacatttggcaaaatagcccaccactcctacttaaaagtgtcgaggtcttgaaaggcaaggaaaccctgggaaatcgtctttggccggaggaaactcagcagacatgacgactaaatgcaatgtagaatcctcggacagaaaaggacattagtaggacagctggtgaaacccaaaggaagaacctgtgtcaggacccccagagcggtgtctccactaagcagaagtctctgtttctctcctggcctctcccagaggggctgctctgaagcatgtggatttgatcaggataatcaagtccgagaacagaacacttggttgtcctggcatttcccaagcagggggaggagttctctgcaggaataaataagcctcagcattcatgaaaatccactactccagacagacggctttggaatccaccagctacatccagctccctgaggcagagttgagaatggagagaatgttacctctcctggctctggggctcttggcggctgggttctgccctgctgtcctctgccaccctaacagcccacttgacgaggagaatctgacccaggagaaccaagaccgagggacacacgtggacctcggattagcctccgccaacgtggacttcgctttcagcctgtacaagcagttagtcctgaaggcccctgataagaatgtcatcttctccccactgagcatctccaccgccttggccttcctgtctctgggggcccataataccaccctgacagagattctcaaaggcctcaagttcaacctcacggagacttctgaggcagaaattcaccagagcttccagcacctcctgcgcaccctcaatcagtccagcgatgagctgcagctgagtatgggaaatgccatgtttgtcaaagagcaactcagtctgctggacaggttcacggaggatgccaagaggctgtatggctccgaggcctttgccactgactttcaggactcagctgcagctaagaagctcatcaacgactacgtgaagaatggaactagggggaaaatcacagatctgatcaaggaccttgactcgcagacaatgatggtcctggtgaattacatcttctttaaagccaaatgggagatgccctttgacccccaagatactcatcagtcaaggttctacttgagcaagaaaaagtgggtaatggtgcccatgatgagtttgcatcacctgactataccttacttccgggacgaggagctgtcctgcaccgtggtggagctgaagtacacaggcaatgccagcgcactcttcatcctccctgatcaagacaagatggaggaagtggaagccatgctgctcccagagaccctgaagcggtggagagactctctggagttcagagagataggtgagctctacctgccaaagttttccatctcgagggactataacctgaacgacatacttctccagctgggcattgaggaagccttcaccagcaaggctgacctgtcagggatcacaggggccaggaacctagcagtctcccaggtggtccataaggctgtgcttgatgtatttgaggagggcacagaagcatctgctgccacagcagtcaaaatcaccctcctttctgcattagtggagacaaggaccattgtgcgtttcaacaggcccttcctgatgatcattgtccctacagacacccagaacatcttcttcatgagcaaagtcaccaatcccaagcaagcctagagcttgccatcaagcagtggggctctcagtaaggaacttggaatgcaagctggatgcctgggtctctgggcacagcctggcccctgtgcaccgagtggccatggcatgtgtggccctgtctgcttatccttggaaggtgacagcgattccctgtgtagctctcacatgcacaggggcccatggactcttcagtctggagggtcctgggcctcctgacagcaataaataatttcgttggacacgttgcttgtgcctttccatgctgactatcagactctgcgcccctgaggctacctgtgccccaaagacaagccccttgagctcccatgcaggctcagctccaccccaagatctgggctccttctgccttcagctgcagcagcctgcccaggactacctaagcttgtggccaagctcacccagacctcaggcccagggttgggaggggaccctgctgctctaaggccaattcctgccccccaggcttctgggtgcccactttcagtttctctccttccacccccagggcccaggctccacctggctctttccagagctcctagccctgaccacatctggcacagcccccggactccttgctcctgcagctgtgcagggctttatcatgcgacatccttcttctgccctttagcacccccaatttgggggaagtagctactttctgggtttccagatggagcccctcaactgcctcaccagttcctagccctggctctgtgaatgatctccctcaacaaccagaatgcagggctgaggacaaatgagccatcagcgcacaactgcaataaagcaatcgtgtagtcaggcattt

SEQ ID NO: 27731 - DNA, 981 bp, Homo sapiens
  source 1..981: mol_type = unassigned DNA
cactactccagacagacggctttggaatccaccagctacatccagctccctgaggcagttgagaatggagagaatgttacctctcctggctctggggctcttggcggctgggttctgccctgctgtcctctgccaccctaacagcccacttgacgaggagaatctgacccaggagaaccaagaccgagggacacacgtggacctcggattagcctccgccaacgtggacttcgctttcagcctgtacaagcagttagtcctgaaggcccctgataagaatgtcatcttctccccactgagcatctccaccgccttggccttcctgtctctgggggcccataataccaccctgacagagattctcaaaggcctcaagttcaacctcacggagacttctgaggcagaaattcaccagagcttccagcacctcctgcgcaccctcaatcagtccagcgatgagctgcagctgagtatgggaaatgccatgtttgtcaaagagcaactcagtctgctggacaggttcacggaggatgccaagaggctgtatggctccgaggcctttgccactgactttcaggactcagctgcagctaagaagctcatcaacgactacgtgaagaatggaactagggggaaaatcacagatctgatcaaggaccttgactcgcagacaatgatggtcctggtgaattacatcttctttaaagccaaatgggagatgccctttgacccccaagatactcatcagtcaaggttctacttgagcaagaaaaagtgggtaatggtgcccatgatgagtttgcatcacctgactataccttacttccgggacgaggagctgtcctgcaccgtggtggagctgaagtacacaggcaatgccagcgcactcttcatcctccctgatcaagacaagatggaggaagtggaagccatgctgctcccagagaccctgaagcggtggagagactctctggagttcag

SEQ ID NO: 27732 - DNA, 1784 bp, Homo sapiens
  source 1..1784: mol_type = unassigned DNA
agagctgagacagccacccagggggtccactccaggacagactgtgccgtgagtaaccccctgagacaatggagacgagagactctagagggagggtgaccaactgttccactttgcccaagactgataattcttctgggatatattttcagtgctaaaaccaggaaagtcccaggcaagctgggacactttgtcactcttgctagaggcctgagagtgcagaggatgcatcttatcgactacctgctcctcctgctggttggactactggccctttctcatggccagctgcacgttgagcatgatggtgagagttgcagtaacagctcccaccagcagattctggagacaggtgagggctcccccagcctcaagatagcccctgccaatgctgactttgccttccgcttctactacctgatcgcttcggagaccccggggaagaacatctttttctccccgctgagcatctcggcggcctacgccatgctttccctgggggcctgctcacacagccgcagccagatccttgagggcctgggcttcaacctcaccgagctgtctgagtccgatgtccataggggcttccagcacctcctgcacactctcaacctccccggccatgggctggaaacacgcgtgggcagtgctctgttcctgagccacaacctgaagttccttgcaaaattcctgaatgacaccatggccgtctatgaggctaaactcttccacaccaacttctacgacactgtgggcacaatccagcttatcaacgaccacgtcaagaaggaaactcgagggaagattgtggatttggtcagtgagctcaagaaggacgtcttgatggtgctggtgaattacatttacttcaaagccctgtgggagaaaccattcatttcctcaaggaccactcccaaagacttctatgttgatgagaacacaacagtccgggtgcccatgatgctgcaggaccaggagcatcactggtatcttcatgacagatacttgccctgctcggtgctacggatggattacaaaggagacgcaaccgtgtttttcattctccctaaccaaggcaaaatgagggagattgaagaggttctgactccagagatgctaatgaggtggaacaacttgttgcggaagaggaatttttacaagaagctagagttgcatcttcccaagttctccatttctggctcctatgtattagatcagattttgcccaggctgggcttcacggatctgttctccaagtgggctgacttatccggcatcaccaaacagcaaaaactggaggcatccaaaagtttccacaaggccaccttggacgtggatgaggctggcaccgaggctgcagcagccaccagcttcgcgatcaaattcttctctgcccagaccaatcgccacatcctgcgattcaaccggcccttccttgtggtgatcttttccaccagcacccagagtgtcctctttctgggcaaggtcgtcgaccccacgaaaccatagccctcccagggctgctcatctgttccaagcaggaggatgtggcaggggagggctgggagtgagtagctctgtgtttagagttggggacaaggatgacaccgaaggtccaggagtccaggacagcaggtgctggccggtggggagcggggaggggcactgagatgggcagggcctggacattccacaccctggtgctgtgcagcctctggcagagcatccgacctcttggagcaagtttctgcctctggaaagggggcgggcccttttcacaacag

SEQ ID NO: 27733 - DNA, 1987 bp, Homo sapiens
  source 1..1987: mol_type = unassigned DNA
aagacagagctgagacagccacccagggggtccactccaggacagactgtgccgtgagtaaccccctgagacaatggagacgagagactctagagggagggtgaccaactgttccactttgcccaagactgataattcttctgggatatattttcagtgctaaaaccaggaaagtcccaggcaagctgggacactttgtcactcttgctagaggtgagaaatactcaggctagaaaggccccgacttagggtccatgggcactggtgggtgactatgcccggagacccagaaaagcctcccccagggacacacagctggtacagggcggcactgactgagggccaaggtcttctggctgccaatccaggcctgagagtgcagaggatgcatcttatcgactacctgctcctcctgctggttggactactggccctttctcatggccagctgcacgttgagcatgatggtgagagttgcagtaacagctcccaccagcagattctggagacaggtgagggctcccccagcctcaagatagcccctgccaatgctgactttgccttccgcttctactacctgatcgcttcggagaccccggggaagaacatctttttctccccgctgagcatctcggcggcctacgccatgctttccctgggggcctgctcacacagccgcagccagatccttgagggcctgggcttcaacctcaccgagctgtctgagtccgatgtccataggggcttccagcacctcctgcacactctcaacctccccggccatgggctggaaacacgcgtgggcagtgctctgttcctgagccacaacctgaagttccttgcaaaattcctgaatgacaccatggccgtctatgaggctaaactcttccacaccaacttctacgacactgtgggcacaatccagcttatcaacgaccacgtcaagaaggaaactcgagggaagattgtggatttggtcagtgagctcaagaaggacgtcttgatggtgctggtgaattacatttacttcaaagccctgtgggagaaaccattcatttcctcaaggaccactcccaaagacttctatgttgatgagaacacaacagtccgggtgcccatgatgctgcaggaccaggagcatcactggtatcttcatgacagatacttgccctgctcggtgctacggatggattacaaaggagacgcaaccgtgtttttcattctccctaaccaaggcaaaatgagggagattgaagaggttctgactccagagatgctaatgaggtggaacaacttgttgcggaagaggaatttttacaagaagctagagttgcatcttcccaagttctccatttctggctcctatgtattagatcagattttgcccaggctgggcttcacggatctgttctccaagtgggctgacttatccggcatcaccaaacagcaaaaactggaggcatccaaaagtttccacaaggccaccttggacgtggatgaggctggcaccgaggctgcagcagccaccagcttcgcgatcaaattcttctctgcccagaccaatcgccacatcctgcgattcaaccggcccttccttgtggtgatcttttccaccagcacccagagtgtcctctttctgggcaaggtcgtcgaccccacgaaaccatagccctcccagggctgctcatctgttccaagcaggaggatgtggcaggggagggctgggagtgagtagctctgtgtttagagttggggacaaggatgacaccgaaggtccaggagtccaggacagcaggtgctggccggtggggagcggggaggggcactgagatgggcagggcctggacattccacaccctggtgctgtgcagcctctggcagagcatccgacctcttggagcaagtttctgcctctggaaagggggcgggcccttttcacaacaggctggttgtaccgagtaaacaacacgatgccatgaagaccctg

SEQ ID NO: 27734 - DNA, 2012 bp, Homo sapiens
  source 1..2012: mol_type = unassigned DNA
ggagggaggtgggcgactgaagctcagagagggagtaaatgagctcaacttcacacagctagtgaggggctggttggagaccagattttccaagtggttccccgggccctcggggagcagcaagggccaggcgaacctccatgcactgcacaaacatgaagaagtgaaccctcttggggttccccaggtgggaagtggggtgtcttcttgggagggggtgaaccaacttctggtgagttttccttgttgaggcaatgctgcacccgtagcctgtttgttaataattacctggtcgggagagagtgggtggtactgagaaggcctggtttgaccagtcctcctgggcttgataagacagagctgagacagccacccagggggtccactccaggacagactgtgccgcctgagagtgcagaggatgcatcttatcgactacctgctcctcctgctggttggactactggccctttctcatggccagctgcacgttgagcatgatggtgagagttgcagtaacagctcccaccagcagattctggagacaggtgagggctcccccagcctcaagatagcccctgccaatgctgactttgccttccgcttctactacctgatcgcttcggagaccccggggaagaacatctttttctccccgctgagcatctcggcggcctacgccatgctttccctgggggcctgctcacacagccgcagccagatccttgagggcctgggcttcaacctcaccgagctgtctgagtccgatgtccataggggcttccagcacctcctgcacactctcaacctccccggccatgggctggaaacacgcgtgggcagtgctctgttcctgagccacaacctgaagttccttgcaaaattcctgaatgacaccatggccgtctatgaggctaaactcttccacaccaacttctacgacactgtgggcacaatccagcttatcaacgaccacgtcaagaaggaaactcgagggaagattgtggatttggtcagtgagctcaagaaggacgtcttgatggtgctggtgaattacatttacttcaaagccctgtgggagaaaccattcatttcctcaaggaccactcccaaagacttctatgttgatgagaacacaacagtccgggtgcccatgatgctgcaggaccaggagcatcactggtatcttcatgacagatacttgccctgctcggtgctacggatggattacaaaggagacgcaaccgtgtttttcattctccctaaccaaggcaaaatgagggagattgaagaggttctgactccagagatgctaatgaggtggaacaacttgttgcggaagaggaatttttacaagaagctagagttgcatcttcccaagttctccatttctggctcctatgtattagatcagattttgcccaggctgggcttcacggatctgttctccaagtgggctgacttatccggcatcaccaaacagcaaaaactggaggcatccaaaagtttccacaaggccaccttggacgtggatgaggctggcaccgaggctgcagcagccaccagcttcgcgatcaaattcttctctgcccagaccaatcgccacatcctgcgattcaaccggcccttccttgtggtgatcttttccaccagcacccagagtgtcctctttctgggcaaggtcgtcgaccccacgaaaccatagccctcccagggctgctcatctgttccaagcaggaggatgtggcaggggagggctgggagtgagtagctctgtgtttagagttggggacaaggatgacaccgaaggtccaggagtccaggacagcaggtgctggccggtggggagcggggaggggcactgagatgggcagggcctggacattccacaccctggtgctgtgcagcctctggcagagcatccgacctcttggagcaagtttctgcctctggaaagggggcgggcccttttcacaacaggctggttgtaccgagtaaacaacacgatgcca

SEQ ID NO: 27735 - DNA, 1534 bp, Homo sapiens
  source 1..1534: mol_type = unassigned DNA
attaaccacccaggaagctggcaaacaaaatttaacaggcagcatccaccgcaggcttactgtacacatgctagggtccaggacagcaggaccaagccagcagaaacagcctgagcccaccgcagactggcctggctatactggacaatgccactcctcctgtacacctgtcttctctggctgcccaccagcggcctctggaccgtccaggccatggatcctaacgctgcttatgtgaacatgagtaaccatcaccggggcctggcttcagccaacgttgactttgccttcagcctgtataagcacctagtggccttgagtcccaaaaagaacattttcatctcccctgtgagcatctccatggccttagctatgctgtccctgggcacctgtggccacacacgggcccagcttctccagggcctgggtttcaacctcactgagaggtctgagactgagatccaccagggtttccagcacctgcaccaactctttgcaaagtcagacaccagcttagaaatgaccatgggcaatgccttgtttcttgatggcagcctggagttgctggagtcattctcagcagacatcaagcactactatgagtcagaggtcttggctatgaatttccaggactgggcaacagccagcagacagatcaacagctatgtcaagaataagacacaggggaaaattgtcgacttgttttcagggctggatagcccagccatcctcgtcctggtcaactatatcttcttcaaaggcacatggacacagccctttgacctggcaagcaccagggaggagaacttctatgtggacgagacaactgtggtgaaggtgcccatgatgttgcagtcgagcaccatcagttaccttcatgactcggagctcccctgccagctggtgcagatgaactacgtgggcaatgggactgtcttcttcatccttccggacaaggggaagatgaacacagtcatcgctgcactgagccgggacacgattaacaggtggtccgcaggcctgaccagcagccaggtggacctgtacattccaaaggtcaccatctctggagtctatgacctcggagatgtgctggaggaaatgggcattgcagacttgttcaccaaccaggcaaatttctcacgcatcacccaggacgcccagctgaagtcatcaaaggtggtccataaagctgtgctgcaactcaatgaggagggtgtggacacagctggctccactggggtcaccctaaacctgacgtccaagcctatcatcttgcgtttcaaccagcccttcatcatcatgatcttcgaccacttcacctggagcagccttttcctggcgagggttatgaacccagtgtaagagaccacccacccagagcctcagcactgtctgactttgggaaccagggatcccacagaaatgttttggagagcgggaggtttcccccaatctcctccaagttcttctccctccaaccagagttgtgtctaactttaggcatcttttaataaatgtcattgcgactctg

SEQ ID NO: 27736 - DNA, 719 bp, Homo sapiens
  source 1..719: mol_type = unassigned DNA
ccacccaggaagctggcaaacaaaatttaacaggcagcatccaccgcaggcttactgtacacatgctagggtccaggacagcaggaccaagccagcagaaacagcctgagcccaccgcagactatgaggaaactgaagtccagcgccctctgtgatgtgctccaggtcacacagccagtgtggaggaaggaactggggcttgaatggggtcttttgcctgcctcctcttgcactacgccccattgactcagagactgccacagcatctaacaagcttttctgatttggcagggcctggctatactggacaatgccactcctcctgtacacctgtcttctctggctgcccaccagcggcctctggaccgtccaggccatggatcctaacgctgcttatgtgaacatgagtaaccatcaccggggcctggcttcagccaacgttgactttgccttcagcctgtataagcacctagtggccttgagtcccaaaaagaacattttcatctcccctgtgagcatctccatggccttagctatgctgtccctgggcacctgtggccacacacgggcccagcttctccagggcctgggtttcaacctcactgagaggtctgagactgagatccaccagggtttccagcacctgcaccaactctttgcaaagtcagacaccagcttagaaatgaccatgggcaatgccttgtttcttgatggcagcc

SEQ ID NO: 27737 - DNA, 2122 bp, Homo sapiens
  source 1..2122: mol_type = unassigned DNA
tcttactacaggagcaaattgccaattctgctccagtgggagaaaacaaggtttcctcaatggactctctagcaacatcaatcaaccagtttgccctggagttgagcaaaaagctagctgaatctgctcagggtaaaaatatcttcttttcttcctggagcatctcaacttccttgaccatagtgtatttgggcgccaaaggtaccactgcagcccaaatggcccaggtgcttcaatttaacagagaccagggagtcaaatgtgaccctgaaagtgaaaaaaaaaggaaaatggaattcaacttgagcaactcggaagaaatacactctgatttccaaacacttatctcagaaatcctcaagcccaacgatgactacttacttaaaacagccaatgcgatatatggagagaaaacgtatgcatttcacaataaatatttagaagacatgaaaacatattttggtgcagaacctcagcctgttaactttgtggaagcttctgatcaaatcagaaaggacatcaactcttgggttgaaagacagaccgagggtaaaatccagaatctcctgcctgatgactctgtggattccacaaccaggatgattctggtgaacgccctatactttaaaggaatctgggaacatcaattcttagtgcaaaacaccacagaaaagccttttagaataaacgagactacaagcaaaccagtgcaaatgatgtttatgaagaaaaagcttcacatttttcacatagaaaagccaaaagcagtgggccttcaactctactacaaaagccgtgacctcagcctgcttatactactgccagaagacattaatgggctggaacagctggaaaaggccatcacctatgagaagctgaatgagtggaccagtgcagacatgatggagttgtatgaagtgcagctacaccttcccaagttcaagctggaagacagttatgatctcaagtcaaccctgagcagtatggggatgagtgatgccttcagccaaagcaaagctgatttctcaggaatgtcttcagcaagaaacctatttttgtccaatgttttccataaggcttttgtggaaataaatgaacaaggtactgaagctgcagctggcagtgggagtgagatagatatacgaattagagtcccatccattgaattcaatgcaaatcacccattcctcttcttcatcaggcacaataaaaccaacaccattcttttttatggaagattatgctccccctaaatcctgcatatctctcaacaaacaagaccatcttacagtgtgaaaaatgtaccatgagatggaaaagcacaattttcacaaaaatgagtttgtagtctaaacctttttcacatttgaatataagtaaatagatcttgaaataatgcattctaatgatcctgtcatatctgtacagctggagagaatgacgatttttatttttaacacgttaacattttgtctaatgtgactttcatttacatttcagaagtactatgctattcaactgaatgccttacaattcttgatcacttgcaatatccatgatacttgttatcatatatttcatatacatcattaaatgaaaaaaaatctttataaaggtgatatgatattgataaatacgaagtttctcaagaatatcgttttgatcaaaaatttagcccggcatggtggtgcacacctgtgttcccagctactcaggaggctgaggtaggaggattgcttgagcccaggaggttgagactgcagtgagccaagatcacaccagtgcactccaacctgggcaacagagcaagaccctgtctcaaaaaaatcattttggtggctcataaattatgattgtaaaactaaaccccctttttctgctatttaaaaaatacttatattgacattagcttaaaaaactagtgaaatccaaatgaaatttgaagtttagctagtagcaatctctcaatgttggtgccctagttttgacaaatgtaccgtggtcatgtaagatgttatcacttggggaaactgtactggagtatatgagaattagctgtattatctctgcacctcttctgccaatctaaaattattccaaaataaaagttttattaaaaata

SEQ ID NO: 27738 - DNA, 3021 bp, Homo sapiens
  source 1..3021: mol_type = unassigned DNA
aaagttccaaggagattttaaggtgcacgcaaggtggaaaaccactgctgaagcagatgtggagaactataaattaaggatcccagctacttaattgacttatgcttcctagttcgttgcccagccaccaccgtctctccaaaaacccgaggtctcgctaaaatcatcatggattcacttggcgccgtcagcactcgacttgggtttgatcttttcaaagagctgaagaaaacaaatgatggcaacatcttcttttcccctgtgggcatcttgactgcaattggcatggtcctcctggggacccgaggagccaccgcttcccagttggaggaggtgtttcactctgaaaaagagacgaagagctcaagaataaaggctgaagaaaaagaggtgattgagaacacagaagcagtacatcaacaattccaaaagtttttgactgaaataagcaaactcactaatgattatgaactgaacataaccaacaggctgtttggagaaaaaacatacctcttccttcaaaaatacttagattatgttgaaaaatattatcatgcatctctggaacctgttgattttgtaaatgcagccgatgaaagtcgaaagaagattaattcctgggttgaaagcaaaacaaatgaaaaaatcaaggacttgttcccagatggctctattagtagctctaccaagctggtgctggtgaacatggtttattttaaagggcaatgggacagggagtttaagaaagaaaatactaaggaagagaaattttggatgaataagataatagataaaataagtcctgagaaattggtagagtggactagtccagggcatatggaagaaagaaaggtgaatctgcacttgccccggtttgaggtggaggacggttacgatctagaggcggtcctggctgccatggggatgggcgatgccttcagtgagcacaaagccgactactcgggaatgtcgtcaggctccgggttgtacgcccagaagttcctgcacagttcctttgtggcagtaactgaggaaggcaccgaggctgcagctgccaccggcataggctttactgtcacatccgccccaggtcatgaaaatgttcactgcaatcatcccttcctgttcttcatcaggcacaatgaatccaacagcatcctcttcttcggcagattttcttctccttaagatgatcgttgccatggcattgctgcttttagcaaaaaacaactaccagtgttactcatatgattatgaaaatcgtccattcttttaaatgttgtctcacttgcatttccagtcttggccatcaaatcaatgatttaatgactccaataatgtgtgtgtttataaccatcctcgaaagtgaaatgtccttttctttgtgccatgcgtaaggtgagtcaaaccaaacctcattgataatctccctttggtttcctttgaaagtaaattggtatcttgtagttttgtgcacacgaaaggagagaaagtctctccagtaaagagtacgaactagtaattttggggggtctctctaattctggtattttgacatgttataatacgcaagtaaaataaaacaatagtttactcagctcatgttactattccccaacagatattgtggcaaatcacacataggaaagagaatttgggaatacagtagcaaaacataaattaaaactcaaatgccaggacaaaataaaacaatataccagatggagaggatgcccgtattttcatcttccattctaacattatccattgttagatgcataagcattttgatattgtgtaataaatgtggtatttgagaagataaatgatgtagttgatcagtattcctcctctatcacctttttagactttgtaaggtaaatatttggactaacttttagaaaagtttccctttttttctccatttacatttttctggtttttttttttttttgagtgaggtacgagtattaccaaatgatattttctgaagatgctttttggaaagctctgaatctatacctaatgctcttaattattggcttgtttcatttttttcctccagtttttaacaagatcacataactggcttatttttaacagctttgtcaaactacaatttacatgccgtaaaatgtacacactgtaattttataattcattgacttttagtaaatttctagcgttatgcatcgccacaatccagttttagaatatttccatgaccctaagaagtttcctcatgtctattaatattcccaatcctaggcaccactgagttgttttctgtctttataagtttttctttctacatcttatataaatggaatcataatacatgtagtattttgtgtctggcgtcttgcacttagcatggtgttcttgaggttcatctgttgtagtatgtattgatacttaatttttttattgccgaatactattccattgcatggaaaagacctattttatttctaggttcaccagttgagggacatttggattgttcccacttcttggctgttaggaataatgttgctctgaacatgtaaataaagatctttgtgttcacatatgttttcatttctgttggggagattcctaggctagaaattgctgggccatatgaaaaatcaatagttagctttgtaagaaacagtcaaactgttttccaacgtgacattttatattcccaccaggaatgtttaaaactagtgtcttcaaatcctcaccaacatccaggattgtgtctttatgattatagccatttttgtaggtacaaagtggcatctcatggtggttttaatttgcatttccataatatctaattaggttgagctttttttatgtgcttattggccatttgtttgactttgtttggtgaaatgtatacaaatcatttgctcatttttaatttgggttgtctgtcttgtcttctcattttattgagttaaatgagttcttaataatctctggcttacaagtccttaatttatcaaatatatgatacgtggacatttcctc

SEQ ID NO: 27739 - DNA, 3114 bp, Homo sapiens
  source 1..3114: mol_type = unassigned DNA
ctataaattaaggatcccagctacttaattgacttatgcttcctagttcgttgcccagccaccaccgtctctccaaaaacccgaggtctcgctaaaatcatcatggattcacttggcgccgtcagcactcgacttgggtttgatcttttcaaagagctgaagaaaacaaatgatggcaacatcttcttttcccctgtgggcatcttgactgcaattggcatggtcctcctggggacccgaggagccaccgcttcccagttggaggaggtgtttcactctgaaaaagagacgaagagctcaagaataaaggctgaagaaaaagaggtgattgagaacacagaagcagtacatcaacaattccaaaagtttttgactgaaataagcaaactcactaatgattatgaactgaacataaccaacaggctgtttggagaaaaaacatacctcttccttcaaaaatacttagattatgttgaaaaatattatcatgcatctctggaacctgttgattttgtaaatgcagccgatgaaagtcgaaagaagattaattcctgggttgaaagcaaaacaaatgaaaaaatcaaggacttgttcccagatggctctattagtagctctaccaagctggtgctggtgaacatggtttattttaaagggcaatgggacagggagtttaagaaagaaaatactaaggaagagaaattttggatgaataagagcacaagtaaatctgtacagatgatgacacagagccattcctttagcttcactttcctggaggacttgcaggccaaaattctagggattccatataaaaacaacgacctaagcatgtttgtgcttctgcccaacgacatcgatggcctggagaagataatagataaaataagtcctgagaaattggtagagtggactagtccagggcatatggaagaaagaaaggtgaatctgcacttgccccggtttgaggtggaggacggttacgatctagaggcggtcctggctgccatggggatgggcgatgccttcagtgagcacaaagccgactactcgggaatgtcgtcaggctccgggttgtacgcccagaagttcctgcacagttcctttgtggcagtaactgaggaaggcaccgaggctgcagctgccaccggcataggctttactgtcacatccgccccaggtcatgaaaatgttcactgcaatcatcccttcctgttcttcatcaggcacaatgaatccaacagcatcctcttcttcggcagattttcttctccttaagatgatcgttgccatggcattgctgcttttagcaaaaaacaactaccagtgttactcatatgattatgaaaatcgtccattcttttaaatgttgtctcacttgcatttccagtcttggccatcaaatcaatgatttaatgactccaataatgtgtgtgtttataaccatcctcgaaagtgaaatgtccttttctttgtgccatgcgtaaggtgagtcaaaccaaacctcattgataatctccctttggtttcctttgaaagtaaattggtatcttgtagttttgtgcacacgaaaggagagaaagtctctccagtaaagagtacgaactagtaattttggggggtctctctaattctggtattttgacatgttataatacgcaagtaaaataaaacaatagtttactcagctcatgttactattccccaacagatattgtggcaaatcacacataggaaagagaatttgggaatacagtagcaaaacataaattaaaactcaaatgccaggacaaaataaaacaatataccagatggagaggatgcccgtattttcatcttccattctaacattatccattgttagatgcataagcattttgatattgtgtaataaatgtggtatttgagaagataaatgatgtagttgatcagtattcctcctctatcacctttttagactttgtaaggtaaatatttggactaacttttagaaaagtttccctttttttctccatttacatttttctggtttttttttttttttgagtgaggtacgagtattaccaaatgatattttctgaagatgctttttggaaagctctgaatctatacctaatgctcttaattattggcttgtttcatttttttcctccagtttttaacaagatcacataactggcttatttttaacagctttgtcaaactacaatttacatgccgtaaaatgtacacactgtaattttataattcattgacttttagtaaatttctagcgttatgcatcgccacaatccagttttagaatatttccatgaccctaagaagtttcctcatgtctattaatattcccaatcctaggcaccactgagttgttttctgtctttataagtttttctttctacatcttatataaatggaatcataatacatgtagtattttgtgtctggcgtcttgcacttagcatggtgttcttgaggttcatctgttgtagtatgtattgatacttaatttttttattgccgaatactattccattgcatggaaaagacctattttatttctaggttcaccagttgagggacatttggattgttcccacttcttggctgttaggaataatgttgctctgaacatgtaaataaagatctttgtgttcacatatgttttcatttctgttggggagattcctaggctagaaattgctgggccatatgaaaaatcaatagttagctttgtaagaaacagtcaaactgttttccaacgtgacattttatattcccaccaggaatgtttaaaactagtgtcttcaaatcctcaccaacatccaggattgtgtctttatgattatagccatttttgtaggtacaaagtggcatctcatggtggttttaatttgcatttccataatatctaattaggttgagctttttttatgtgcttattggccatttgtttgactttgtttggtgaaatgtatacaaatcatttgctcatttttaatttgggttgtctgtcttgtcttctcattttattgagttaaatgagttcttaataatctctggcttacaagtccttaatttatcaaatatatgatacgtggacatttcctcata

SEQ ID NO: 27740 - DNA, 1437 bp, Homo sapiens
  source 1..1437: mol_type = unassigned DNA
actgctgaagcagatgtggagaactataaattaaggatcccagctacttaattgacttatgcttcctagttcgttgcccagccaccaccgtctctccaaaaacccgaggtctcgctaaaatcatcatggattcacttggcgccgtcagcactcgacttgggtttgatcttttcaaagagctgaagaaaacaaatgatggcaacatcttcttttcccctgtgggcatcttgactgcaattggcatggtcctcctggggacccgaggagccaccgcttcccagttggaggaggtgtttcactctgaaaaagagacgaagagctcaagaataaaggctgaagaaaaagaggtggaaaaaatcaaggacttgttcccagatggctctattagtagctctaccaagctggtgctggtgaacatggtttattttaaagggcaatgggacagggagtttaagaaagaaaatactaaggaagagaaattttggatgaataagagcacaagtaaatctgtacagatgatgacacagagccattcctttagcttcactttcctggaggacttgcaggccaaaattctagggattccatataaaaacaacgacctaagcatgtttgtgcttctgcccaacgacatcgatggcctggagaagataatagataaaataagtcctgagaaattggtagagtggactagtccagggcatatggaagaaagaaaggtgaatctgcacttgccccggtttgaggtggaggacggttacgatctagaggcggtcctggctgccatggggatgggcgatgccttcagtgagcacaaagccgactactcgggaatgtcgtcaggctccgggttgtacgcccagaagttcctgcacagttcctttgtggcagtaactgaggaaggcaccgaggctgcagctgccaccggcataggctttactgtcacatccgccccaggtcatgaaaatgttcactgcaatcatcccttcctgttcttcatcaggcacaatgaatccaacagcatcctcttcttcggcagattttcttctccttaagatgatcgttgccatggcattgctgcttttagcaaaaaacaactaccagtgttactcatatgattatgaaaatcgtccattcttttaaatgttgtctcacttgcatttccagtcttggccatcaaatcaatgatttaatgactccaataatgtgtgtgtttataaccatcctcgaaagtgaaatgtccttttctttgtgccatgcgtaaggtgagtcaaaccaaacctcattgataatctccctttggtttcctttgaaagtaaattggtatcttgtagttttgtgcacacgaaaggagagaaagtctctccagtaaagagtacgaactagtaattttggggggtctctctaattctggtattttgacatgttataatacgc

SEQ ID NO: 27741 - DNA, 1777 bp, Homo sapiens
  source 1..1777: mol_type = unassigned DNA
aaatactaaccacagagggagaggcagcaagaggagaggcataaattcaggatctcacccttcattccacagacacacatagcctctctgcccacctctgcttcctctaggaacacaggagttccagatcacatcgagttcaccatgaattcactcagtgaagccaacaccaagttcatgttcgacctgttccaacagttcagaaaatcaaaagagaacaacatcttctattcccctatcagcatcacatcagcattagggatggtcctcttaggagccaaagacaacactgcacaacagattaagaaggttcttcactttgatcaagtcacagagaacaccacaggaaaagctgcaacatatcatgttgataggtcaggaaatgttcatcaccagtttcaaaagcttctgactgaattcaacaaatccactgatgcatatgagctgaagatcgccaacaagctcttcggagaaaaaacgtatctatttttacaggaatatttagatgccatcaagaaattttaccagaccagtgtggaatctgttgattttgcaaatgctccagaagaaagtcgaaagaagattaactcctgggtggaaagtcaaacgaatgaaaaaattaaaaacctaattcctgaaggtaatattggcagcaataccacattggttcttgtgaacgcaatctatttcaaagggcagtgggagaagaaatttaataaagaagatactaaagaggaaaaattttggccaaacaagaatacatacaagtccatacagatgatgaggcaatacacatcttttcattttgcctcgctggaggatgtacaggccaaggtcctggaaataccatacaaaggcaaagatctaagcatgattgtgttgctgccaaatgaaatcgatggtctccagaagcttgaagagaaactcactgctgagaaattgatggaatggacaagtttgcagaatatgagagagacacgtgtcgatttacacttacctcggttcaaagtggaagagagctatgacctcaaggacacgttgagaaccatgggaatggtggatatcttcaatggggatgcagacctctcaggcatgaccgggagccgcggtctcgtgctatctggagtcctacacaaggcctttgtggaggttacagaggagggagcagaagctgcagctgccaccgctgtagtaggattcggatcatcacctacttcaactaatgaagagttccattgtaatcaccctttcctattcttcataaggcaaaataagaccaacagcatcctcttctatggcagattctcatccccgtagatgcaattagtctgtcactccatttggaaaatgttcacctgcagatgttctggtaaactgattgctggcaacaacagattctcttggctcatatttcttttctttctcatcttgatgatgatcgtcatcatcaagaatttaatgattaaaatagcatgcctttctctctttctcttaataagcccacatataaatgtactttttcttccagaaaaattctccttgaggaaaaatgtccaaaataagatgaatcacttaataccgtatcttctaaatttgaaatataattctgtttgtgacctgttttaaatgaaccaaaccaaatcatactttttctttgaatttagcaacctagaaacacacatttctttgaatttaggtgatacctaaatccttcttatgtttctaaattttgtgattctataaaacacatcatcaataaaatagtgacataaaatca

SEQ ID NO: 27742 - DNA, 1749 bp, Homo sapiens
  source 1..1749: mol_type = unassigned DNA
aagaggagaggcataaatttaggatctcacccttcattccacagacacacacagcctctctgcccacctctgcttcctctaggaacacaggagttccagatcacatcgagttcaccatgaattcactcagtgaagccaacaccaagttcatgttcgatctgttccaacagttcagaaaatcaaaagagaacaacatcttctattcccctatcagcatcacatcagcattagggatggtcctcttaggagccaaagacaacactgcacaacaaattagcaaggttcttcactttgatcaagtcacagagaacaccacagaaaaagctgcaacatatcatgttgataggtcaggaaatgttcatcaccagtttcaaaagcttctgactgaattcaacaaatccactgatgcatatgagctgaagatcgccaacaagctcttcggagaaaagacgtatcaatttttacaggaatatttagatgccatcaagaaattttaccagaccagtgtggaatctactgattttgcaaatgctccagaagaaagtcgaaagaagattaactcctgggtggaaagtcaaacgaatgaaaaaattaaaaacctatttcctgatgggactattggcaatgatacgacactggttcttgtgaacgcaatctatttcaaagggcagtgggagaataaatttaaaaaagaaaacactaaagaggaaaaattttggccaaacaagaatacatacaaatctgtacagatgatgaggcaatacaattcctttaattttgccttgctggaggatgtacaggccaaggtcctggaaataccatacaaaggcaaagatctaagcatgattgtgctgctgccaaatgaaatcgatggtctgcagaagcttgaagagaaactcactgctgagaaattgatggaatggacaagtttgcagaatatgagagagacatgtgtcgatttacacttacctcggttcaaaatggaagagagctatgacctcaaggacacgttgagaaccatgggaatggtgaatatcttcaatggggatgcagacctctcaggcatgacctggagccacggtctctcagtatctaaagtcctacacaaggcctttgtggaggtcactgaggagggagtggaagctgcagctgccaccgctgtagtagtagtcgaattatcatctccttcaactaatgaagagttctgttgtaatcaccctttcctattcttcataaggcaaaataagaccaacagcatcctcttctatggcagattctcatccccatagatgcaattagtctgtcactccatttagaaaatgttcacctagaggtgttctggtaaactgattgctggcaacaacagattctcttggctcatatttcttttctatctcatcttgatgatgatagtcatcatcaagaatttaatgattaaaatagcatgcctttctctctttctcttaataagcccacatataaatgtacttttccttccagaaaaatttcccttgaggaaaaatgtccaagataagatgaatcatttaataccgtgtcttctaaatttgaaatataattctgtttctgacctgttttaaatgaaccaaaccaaatcatactttctcttcaaatttagcaacctagaaacacacatttctttgaatttaggtgatacctaaatccttcttatgtttctaaattttgtgattctataaaacacatcatcaataaaataatgacataaaatca

SEQ ID NO: 27743 - DNA, 1562 bp, Homo sapiens
  source 1..1562: mol_type = unassigned DNA
ccttcattccacagacacacacagcctctctgcccacctctgcttcctctaggaacacaggagttccagatcacatcgagttcaccatgaattcactcagtgaagccaacaccaagttcatgttcgatctgttccaacagttcagaaaatcaaaagagaacaacatcttctattcccctatcagcatcacatcagcattagggatggtcctcttaggagccaaagacaacactgcacaacaaattagcaaggttcttcactttgatcaagtcacagagaacaccacagaaaaagctgcaacatatcatgttgataggtcaggaaatgttcatcaccagtttcaaaagcttctgactgaattcaacaaatccactgatgcatatgagctgaagatcgccaacaagctcttcggagaaaagacgtatcaatttttacaggaatatttagatgccatcaagaaattttaccagaccagtgtggaatctactgattttgcaaatgctccagaagaaagtcgaaagaagattaactcctgggtggaaagtcaaacgaatgaaaaaattaaaaacctatttcctgatgggactattggcaatgatacgacactggttcttgtgaacgcaatctatttcaaagggcagtgggagaataaatttaaaaaagaaaacactaaagaggaaaaattttggccaaacaagcttgaagagaaactcactgctgagaaattgatggaatggacaagtttgcagaatatgagagagacatgtgtcgatttacacttacctcggttcaaaatggaagagagctatgacctcaaggacacgttgagaaccatgggaatggtgaatatcttcaatggggatgcagacctctcaggcatgacctggagccacggtctctcagtatctaaagtcctacacaaggcctttgtggaggtcactgaggagggagtggaagctgcagctgccaccgctgtagtagtagtcgaattatcatctccttcaactaatgaagagttctgttgtaatcaccctttcctattcttcataaggcaaaataagaccaacagcatcctcttctatggcagattctcatccccatagatgcaattagtctgtcactccatttagaaaatgttcacctagaggtgttctggtaaactgattgctggcaacaacagattctcttggctcatatttcttttctatctcatcttgatgatgatagtcatcatcaagaatttaatgattaaaatagcatgcctttctctctttctcttaataagcccacatataaatgtacttttccttccagaaaaatttcccttgaggaaaaatgtccaagataagatgaatcatttaataccgtgtcttctaaatttgaaatataattctgtttctgacctgttttaaatgaaccaaaccaaatcatactttctcttcaaatttagcaacctagaaacacacatttctttgaatttaggtgatacctaaatccttcttatgtttctaaattttgtgattctataaaacacatcatcaataaaataatgacataaaatc

SEQ ID NO: 27744 - DNA, 2783 bp, Homo sapiens
  source 1..2783: mol_type = unassigned DNA
gaacatgttggaggccttttggaagctgtgcagacaacagtaacttcagcctgaatcatttctttcaattgtggacaagctgccaagaggcttgagtaggagaggagtgccgccgaggcggggcggggcggggcgtggagctgggctggcagtgggcgtggcggtgctgcccaggtgagccaccgctgcttctgcccagacacggtcgcctccacatccaggtctttgtgctcctcgcttgcctgttccttttccacgcattttccaggataactgtgactccaggcccgcaatggatgccctgcaactagcaaattcggcttttgccgttgatctgttcaaacaactatgtgaaaaggagccactgggcaatgtcctcttctctccaatctgtctctccacctctctgtcacttgctcaagtgggtgctaaaggtgacactgcaaatgaaattggacaggttcttcattttgaaaatgtcaaagatgtaccctttggatttcaaacagtaacatcggatgtaaacaaacttagttccttttactcactgaaactaatcaagcggctctacgtagacaaatctctgaatctttctacagagttcatcagctctacgaagagaccgtatgcaaaggaattggaaactgttgacttcaaagataaattggaagaaacgaaaggtcagatcaacaactcaattaaggatctcacagatggccactttgagaacattttagctgacaacagtgtgaacgaccagaccaaaatccttgtggttaatgctgcctactttgttggcaagtggatgaagaaattttctgaatcagaaacaaaagaatgtcctttcagagtcaacaagacagacaccaaaccagtgcagatgatgaacatggaggccacgttctgtatgggaaacattgacagtatcaattgtaagatcatagagcttccttttcaaaataagcatctcagcatgttcatcctactacccaaggatgtggaggatgagtccacaggcttggagaagattgaaaaacaactcaactcagagtcactgtcacagtggactaatcccagcaccatggccaatgccaaggtcaaactctccattccaaaatttaaggtggaaaagatgattgatcccaaggcttgtctggaaaatctagggctgaaacatatcttcagtgaagacacatctgatttctctggaatgtcagagaccaagggagtggccctatcaaatgttatccacaaagtgtgcttagaaataactgaagatggtggggattccatagaggtgccaggagcacggatcctgcagcacaaggatgaattgaatgctgaccatccctttatttacatcatcaggcacaacaaaactcgaaacattattttctttggcaaattctgttctccttaagtggcatagcccatgttaagtcctccctgacttttctgtggatgccgatttctgtaaactctgcatccagagattcattttctagatacaataaattgctaatgttgctggatcaggaagccgccagtacttgtcatatgtagccttcacacagatagaccttttttttttttccaattctatcttttgtttccttttttcccataagacaatgacatacgcttttaatgaaaaggaatcacgttagaggaaaaatatttattcattatttgtcaaattgtccggggtagttggcagaaatacagtcttccacaaagaaaattcctataaggaagatttggaagctcttcttcccagcactatgctttccttctttgggatagagaatgttccagacattctcgcttccctgaaagactgaagaaagtgtagtgcatgggacccacgaaactgccctggctccagtgaaacttgggcacatgctcaggctactataggtccagaagtccttatgttaagccctggcaggcaggtgtttattaaaattctgaattttggggattttcaaaagataatattttacatacactgtatgttatagaacttcatggatcagatctggggcagcaccctataaatcaacaccttaatatgctgcaacaaaatgtagaatattcagacaaaatggatacataaagactaagtagcccataaggggtcaaaatttgctgccaaatgcgtatgccaccaacttacaaaaacacttcgttcgcagagcttttcagattgtggaatgttggataaggaattatagacctctagtagctgaaatgcaagaccccaagaggaagttcagatcttaatataaattcactttcatttttgatagctgtcccatctggtcatttggttggcactagactggtggcaggggcttctagctgacttgcacagggattctcacaatagccgatatcagaatttgtgttgaaggaacttgtctcttcatctaatatgatagcgggaaaaggagaggaaactactgcctttagaaaatataagtaaagtgattaaagtgctcacgttaccttgacacatagtttttcagtctatgggtttagttactttagatggcaagcatgtaacttatattaatagtaatttgtaaagttggttggataagctatccgtgttgcaggttcatggattacttctctataaaaaatatgtatttaccaaaaattttgtgacattccttctcccatctcttccttgacctgcattgtaaataggttcttcttgttctgagattcaatattgaatttttcctatgctattgacaataaaatattattgaactaca

SEQ ID NO: 27745 - DNA, 560 bp, Homo sapiens
  source 1..560: mol_type = unassigned DNA
atggtgaacaaaatggacttaggtccattttggggctgttttcaaagacgggctgttgggttgagtactgtcgcctctcatcccccatgttggcagtatttccagctcccaaccctttgagcaccaggaacactgcagagggagtaaaatcacttaaccatacaaggcccgcaatggatgccctgcaactagcaaattcggcttttgccgttgatctgttcaaacaactatgtgaaaaggagccactgggcaatgtcctcttctctccaatctgtctctccacctctctgtcacttgctcaagtgggtgctaaaggtgacactgcaaatgaaattggacaggttcttcattttgaaaatgtcaaagatgtaccctttggatttcaaacagtaacatcggatgtaaacaaacttagttccttttactcactgaaactaatcaagcggctctacgtagacaaatctctgaatctttctacagagttcatcagctctacgaagagaccgtatgcaaaggaattggaaactgttgacttcaaagataaattggaagaaacgaaa

SEQ ID NO: 27746 - DNA, 1604 bp, Homo sapiens
  source 1..1604: mol_type = unassigned DNA
gcactccccagtggatggccgtgtatcaggagccggcccttttctggaaacaggccagcattcagtctccacagaggcaccataaacacgctggtggggccctgtactgtggtcaaagtcaaggcctccgggcaggactcgcggcccctccggctggcgggtggggttgacccgcacgtcccgccccgcctctcccttcgcgctccggacgggcgacggtagctcgagacccgggactccgcccgcctccccgcgagtatttgaggtccggggcggctccggcgcctctgcccgccgttctgctcgctcgctccccgctctggagtctgccatcatggatgttctcgcagaagcaaatggcacctttgccttaaaccttttgaaaacgctgggtaaagacaactcgaagaatgtgtttttctcacccatgagcatgtcctgtgccctggccatggtctacatgggggcaaagggaaacaccgctgcacagatggcccagatactttctttcaataaaagtggcggtggtggagacatccaccagggcttccagtctcttctcaccgaagtgaacaagactggcacgcagtacttgcttaggatggccaacaggctctttggggaaaagtcttgtgatttcctctcatcttttagagattcctgccaaaaattctaccaagcagagatggaggagcttgactttatcagcgccgtagagaagtccagaaaacacataaacacctgggtagctgaaaagacagaaggtaaaattgcggagttgctctctccgggctcagtggatccattgacaaggctggttctggtgaatgctgtctatttcagaggaaactgggatgaacagtttgacaaggagaacaccgaggagagactgtttaaagtcagcaagaatgaggagaaacctgtgcaaatgatgtttaagcaatctacttttaagaagacctatataggagaaatatttacccaaatcttggtgcttccatatgttggcaaggaactgaatatgatcatcatgcttccggacgagaccactgacttgagaacggtggagaaagaactcacttacgagaagttcgtagaatggacgaggctggacatgatggatgaagaggaggtggaagtgtccctcccgcggtttaaactagaggaaagctacgacatggagagtgtcctgcgcaacctgggcatgactgatgccttcgagctgggcaaggcagacttctctggaatgtcccagacagacctgtctctgtccaaggtcgtgcacaagtcttttgtggaggtcaatgaggaaggcacggaggctgcagccgccacagctgccatcatgatgatgcggtgtgccagattcgtcccccgcttctgcgccgaccaccccttccttttcttcatccagcacagcaagaccaacgggattctcttctgcggccgcttttcctctccgtgaggacagggcagtcttggtgtgcagcccctctcctctctgtcccctgacactccacagtgtgcctgcaacccaagtggccttatccgtgcagtggtggcagttcagaaataaagggcccatttgtgggatgccgcattca

SEQ ID NO: 27747 - DNA, 684 bp, Homo sapiens
  source 1..684: mol_type = unassigned DNA
ccttaaaccttttgaaaacgctgggtaaagacaactcgaagaatgtgtttttctcacccatgagcatgtcctgtgccctggccatggtctacatgggggcaaagggaaacaccgctgcacagatggcccagatactttctttcaataaaagtggcggtggtggagacatccaccagggcttccagtctcttctcaccgaagtgaacaagactggcacgcagtacttgcttaggatggccaacagggaaagctacgacatggagagtgtcctgcgcaacctgggcatgactgatgccttcgagctgggcaaggcagacttctctggaatgtcccagacagacctgtctctgtccaaggtcgtgcacaagtcttttgtggaggtcaatgaggaaggcacggaggctgcagccgccacagctgccatcatgatgatgcggtgtgccagattcgtcccccgcttctgcgccgaccaccccttccttttcttcatccagcacagcaagaccaacgggattctcttctgcggccgcttttcctctccgtgaggacagggcagtcttggtgtgcagcccctctcctctctgtcccctgacactccacagtgtgcctgcaacccaagtggccttatccgtgcagtggtggcagttcagaaataaagggcccatttgtgggatgccgcattca

SEQ ID NO: 27748 - DNA, 3265 bp, Homo sapiens
  source 1..3265: mol_type = unassigned DNA
tattagaaattagtaatcttaaaatatgtttggaaaggcttggcaagccaggagtgcccagtgccccaagtattctgtgtaatgaataaagaagagtttgaaaacaaaatatttaaacaagcacagcaaacaagctttatcaggtgtatgagttattgtcttggtttcccgtggctgctgtaacaaatgaccatggattcgtggctaaactgcacatgtttattttctcagagttctgaggttggaggttggaaatgggttccgcagggccaggctcctccagaggatcctccttgcctttccagctactgcagctgtggtccttgcgtttcttggcttgaggcccttcatcttcaaggccagtggagtggcattttgctttattctttgcattgctttttcccgtgagatctccccctccctccctcttagaaggatacctgtgattacatttagggtcaactggaacaatccaggataatctcccatctcaagagcctgaatctaatcgtgctgcacagtcccttttgccatgtaaggggcattcacaggtcccagggattatgacccaggtatctttggagcacttgctcagccaaccccagctccaaatgtaaaggcatgcacagtggagagccgcttaattcagcatctcctcacagggcctccagtaggcacctccttccctctcccatctgctccaggaaatgtctgctccagcttctccccttccttgttccgtgggttcccactcactgctcaagtgagtcactgggactgtcttagaatgctggcattctctgactgggacatattcatttggtaaacatctgagaactgtgtcagagcaggcaggccccgcatccctgcattcctgcatcccctccttcccagcctgactgcctgtggggcccttagctgccccttgtcctctcacctgattctgcagattcttcttcttgagcagcagctcagaaagcgcatccgccctgcgtttcaagcccagctacttcttagcttcacttccgtcaacttcaccttccctgtagtgcagtggggcattgatggtaggtctctctaagggcttggtggactttaacatgtgattctgtgattccgacttgcctgaagataccccagctcccccctcccgactatccagctgcattcctgctctggaccctgctggggctgccacacccactgcacggcagggctagagagatgtgcagcctgaccctacccctgagcctgtctgtgaaggtggagatgggcatgcacccacagcccatgaggcaaggtggtgtcctgagtgtgctgtgagttcaggcgcaggaaggcctggcttgttgcagcaggatgtccccaagcgtggtccaaaattggggctttgccacctgcagggatttcctagaaggagatccaagggtcaggaggcatttgaaaggctttcacgcatctttgtatgtggcttgattgatccttttttaaggctcttgctacccagaaatgggattctctctctcattataaaaacatttggccatcttttcttgtgtaactgtcagtgaatgtatcattttgaatatttttcaaattaaaacagtacatttaagcccgcaaaacacaccaaagaatacaaacatagaagcaaaagccagtgccccttctgtaattccaccccaaggaagagactccaggaaagggtgcctccttcccactttctccacgtgcgggcaggcgtgcagggaggagtcctcacaaaacagggcggcgtttcacatagaactctttcattttccacacttaacattagaaacacacaaaataatgtggagggtcctaaaaagaaacagccagagttctgtgtgtgtttctgcttgcccactgaaccacagcatcggcggtgactgtcggtaaggcgcgtgagatgcagtcgcgtggaagctgtgcttaagtgatactgattttaaatcttgttccaggtctgccatcatggatgttctcgcagaagcaaatggcacctttgccttaaaccttttgaaaacgctgggtaaagacaactcgaagaatgtgtttttctcacccatgagcatgtcctgtgccctggccatggtctacatgggggcaaagggaaacaccgctgcacagatggcccagatactttctttcaataaaagtggcggtggtggagacatccaccagggcttccagtctcttctcaccgaagtgaacaagactggcacgcagtacttgcttaggatggccaacaggctctttggggaaaagtcttgtgatttcctctcatcttttagagattcctgccaaaaattctaccaagcagagatggaggagcttgactttatcagcgccgtagagaagtccagaaaacacataaacacctgggtagctgaaaagacagaaggtaaaattgcggagttgctctctccgggctcagtggatccattgacaaggctggttctggtgaatgctgtctatttcagaggaaactgggatgaacagtttgacaaggagaacaccgaggagagactgtttaaagtcagcaagaatgaggagaaacctgtgcaaatgatgtttaagcaatctacttttaagaagacctatataggagaaatatttacccaaatcttggtgcttccatatgttggcaaggaactgaatatgatcatcatgcttccggacgagaccactgacttgagaacggtggagaaagaactcacttacgagaagttcgtagaatggacgaggctggacatgatggatgaagaggaggtggaagtgtccctcccgcggtttaaactagaggaaagctacgacatggagagtgtcctgcgcaacctgggcatgactgatgccttcgagctgggcaaggcagacttctctggaatgtcccagacagacctgtctctgtccaaggtcgtgcacaagtcttttgtggaggtcaatgaggaaggcacggaggctgcagccgccacagctgccatcatgatgatgcggtgtgccagattcgtcccccgcttctgcgccgaccaccccttccttttcttcatccagcacagcaagaccaacgggattctcttctgcggccgcttttcctctccgtgaggacagggcagtcttggtgtgcagcccctctcctctctgtcccctgacactccacagtgtgcctgcaacccaagtggccttatccgtgcagtggtggcagttcagaaataaagggcccatttgtgggatgccgcattca

SEQ ID NO: 27749 - DNA, 1495 bp, Homo sapiens
  source 1..1495: mol_type = unassigned DNA
gattctccgggatattaccggagacggagtgttttattattagcctttcttaggtggacatttccatttgaattaaaagtcctttaggctgggcgtggtgcatggctgtaatctcagcaccttgggaggctgaggcaggaagatcacttgaggccaggcgttggagagcagcctgggcaaggtggcaagaaccttgtctctacaaaaaaaaaagcgtctgccatcatggatgttctcgcagaagcaaatggcacctttgccttaaaccttttgaaaacgctgggtaaagacaactcgaagaatgtgtttttctcacccatgagcatgtcctgtgccctggccatggtctacatgggggcaaagggaaacaccgctgcacagatggcccagatactttctttcaataaaagtggcggtggtggagacatccaccagggcttccagtctcttctcaccgaagtgaacaagactggcacgcagtacttgcttaggatggccaacaggctctttggggaaaagtcttgtgatttcctctcatcttttagagattcctgccaaaaattctaccaagcagagatggaggagcttgactttatcagcgccgtagagaagtccagaaaacacataaacacctgggtagctgaaaagacagaaggtaaaattgcggagttgctctctccgggctcagtggatccattgacaaggctggttctggtgaatgctgtctatttcagaggaaactgggatgaacagtttgacaaggagaacaccgaggagagactgtttaaagtcagcaagaatgaggagaaacctgtgcaaatgatgtttaagcaatctacttttaagaagacctatataggagaaatatttacccaaatcttggtgcttccatatgttggcaaggaactgaatatgatcatcatgcttccggacgagaccactgacttgagaacggtggagaaagaactcacttacgagaagttcgtagaatggacgaggctggacatgatggatgaagaggaggtggaagtgtccctcccgcggtttaaactagaggaaagctacgacatggagagtgtcctgcgcaacctgggcatgactgatgccttcgagctgggcaaggcagacttctctggaatgtcccagacagacctgtctctgtccaaggtcgtgcacaagtcttttgtggaggtcaatgaggaaggcacggaggctgcagccgccacagctgccatcatgatgatgcggtgtgccagattcgtcccccgcttctgcgccgaccaccccttccttttcttcatccagcacagcaagaccaacgggattctcttctgcggccgcttttcctctccgtgaggacagggcagtcttggtgtgcagcccctctcctctctgtcccctgacactccacagtgtgcctgcaacccaagtggccttatccgtgcagtggtggcagttcagaaataaagggcccatttgtgggatgccgcattca

SEQ ID NO: 27750 - DNA, 1370 bp, Homo sapiens
  source 1..1370: mol_type = unassigned DNA
gacccgaggaccccgggcgcccaggcccagcgcccacggaagaggcggccggcgcgggatgggggcggcgcagagcctcccgggccacaggtctgccatcatggatgttctcgcagaagcaaatggcacctttgccttaaaccttttgaaaacgctgggtaaagacaactcgaagaatgtgtttttctcacccatgagcatgtcctgtgccctggccatggtctacatgggggcaaagggaaacaccgctgcacagatggcccagatactttctttcaataaaagtggcggtggtggagacatccaccagggcttccagtctcttctcaccgaagtgaacaagactggcacgcagtacttgcttaggatggccaacaggctctttggggaaaagtcttgtgatttcctctcatcttttagagattcctgccaaaaattctaccaagcagagatggaggagcttgactttatcagcgccgtagagaagtccagaaaacacataaacacctgggtagctgaaaagacagaaggtaaaattgcggagttgctctctccgggctcagtggatccattgacaaggctggttctggtgaatgctgtctatttcagaggaaactgggatgaacagtttgacaaggagaacaccgaggagagactgtttaaagtcagcaagaatgaggagaaacctgtgcaaatgatgtttaagcaatctacttttaagaagacctatataggagaaatatttacccaaatcttggtgcttccatatgttggcaaggaactgaatatgatcatcatgcttccggacgagaccactgacttgagaacggtggagaaagaactcacttacgagaagttcgtagaatggacgaggctggacatgatggatgaagaggaggtggaagtgtccctcccgcggtttaaactagaggaaagctacgacatggagagtgtcctgcgcaacctgggcatgactgatgccttcgagctgggcaaggcagacttctctggaatgtcccagacagacctgtctctgtccaaggtcgtgcacaagtcttttgtggaggtcaatgaggaaggcacggaggctgcagccgccacagctgccatcatgatgatgcggtgtgccagattcgtcccccgcttctgcgccgaccaccccttccttttcttcatccagcacagcaagaccaacgggattctcttctgcggccgcttttcctctccgtgaggacagggcagtcttggtgtgcagcccctctcctctctgtcccctgacactccacagtgtgcctgcaacccaagtggccttatccgtgcagtggtggcagttcagaaataaagggcccatttgtgggatgccgcattca

SEQ ID NO: 27751 - DNA, 1338 bp, Homo sapiens
  source 1..1338: mol_type = unassigned DNA
gtccggcttgggttcccttccggagcctcgcagcggcagagaacggcgacgcggccgggtctgccatcatggatgttctcgcagaagcaaatggcacctttgccttaaaccttttgaaaacgctgggtaaagacaactcgaagaatgtgtttttctcacccatgagcatgtcctgtgccctggccatggtctacatgggggcaaagggaaacaccgctgcacagatggcccagatactttctttcaataaaagtggcggtggtggagacatccaccagggcttccagtctcttctcaccgaagtgaacaagactggcacgcagtacttgcttaggatggccaacaggctctttggggaaaagtcttgtgatttcctctcatcttttagagattcctgccaaaaattctaccaagcagagatggaggagcttgactttatcagcgccgtagagaagtccagaaaacacataaacacctgggtagctgaaaagacagaaggtaaaattgcggagttgctctctccgggctcagtggatccattgacaaggctggttctggtgaatgctgtctatttcagaggaaactgggatgaacagtttgacaaggagaacaccgaggagagactgtttaaagtcagcaagaatgaggagaaacctgtgcaaatgatgtttaagcaatctacttttaagaagacctatataggagaaatatttacccaaatcttggtgcttccatatgttggcaaggaactgaatatgatcatcatgcttccggacgagaccactgacttgagaacggtggagaaagaactcacttacgagaagttcgtagaatggacgaggctggacatgatggatgaagaggaggtggaagtgtccctcccgcggtttaaactagaggaaagctacgacatggagagtgtcctgcgcaacctgggcatgactgatgccttcgagctgggcaaggcagacttctctggaatgtcccagacagacctgtctctgtccaaggtcgtgcacaagtcttttgtggaggtcaatgaggaaggcacggaggctgcagccgccacagctgccatcatgatgatgcggtgtgccagattcgtcccccgcttctgcgccgaccaccccttccttttcttcatccagcacagcaagaccaacgggattctcttctgcggccgcttttcctctccgtgaggacagggcagtcttggtgtgcagcccctctcctctctgtcccctgacactccacagtgtgcctgcaacccaagtggccttatccgtgcagtggtggcagttcagaaataaagggcccatttgtgggatgccgcattca

SEQ ID NO: 27752 - DNA, 1375 bp, Homo sapiens
  source 1..1375: mol_type = unassigned DNA
ggcggctccggcgcctctgcccgccgttctgctcgctcgctccccgctctggagtacgtgtctggcttgggagccgctcggacacgctggcttgggtctgccatcatggatgttctcgcagaagcaaatggcacctttgccttaaaccttttgaaaacgctgggtaaagacaactcgaagaatgtgtttttctcacccatgagcatgtcctgtgccctggccatggtctacatgggggcaaagggaaacaccgctgcacagatggcccagatactttctttcaataaaagtggcggtggtggagacatccaccagggcttccagtctcttctcaccgaagtgaacaagactggcacgcagtacttgcttaggatggccaacaggctctttggggaaaagtcttgtgatttcctctcatcttttagagattcctgccaaaaattctaccaagcagagatggaggagcttgactttatcagcgccgtagagaagtccagaaaacacataaacacctgggtagctgaaaagacagaaggtaaaattgcggagttgctctctccgggctcagtggatccattgacaaggctggttctggtgaatgctgtctatttcagaggaaactgggatgaacagtttgacaaggagaacaccgaggagagactgtttaaagtcagcaagaatgaggagaaacctgtgcaaatgatgtttaagcaatctacttttaagaagacctatataggagaaatatttacccaaatcttggtgcttccatatgttggcaaggaactgaatatgatcatcatgcttccggacgagaccactgacttgagaacggtggagaaagaactcacttacgagaagttcgtagaatggacgaggctggacatgatggatgaagaggaggtggaagtgtccctcccgcggtttaaactagaggaaagctacgacatggagagtgtcctgcgcaacctgggcatgactgatgccttcgagctgggcaaggcagacttctctggaatgtcccagacagacctgtctctgtccaaggtcgtgcacaagtcttttgtggaggtcaatgaggaaggcacggaggctgcagccgccacagctgccatcatgatgatgcggtgtgccagattcgtcccccgcttctgcgccgaccaccccttccttttcttcatccagcacagcaagaccaacgggattctcttctgcggccgcttttcctctccgtgaggacagggcagtcttggtgtgcagcccctctcctctctgtcccctgacactccacagtgtgcctgcaacccaagtggccttatccgtgcagtggtggcagttcagaaataaagggcccatttgtgggatgccgcattca

SEQ ID NO: 27753 - DNA, 1357 bp, Homo sapiens
  source 1..1357: mol_type = unassigned DNA
actgcagcctctgcctcccgggttcaagtgattctcctgcctcagcttccccagcaactgagattacaggcacgcgccattacactcggctaatttttgtatttttagtagagacggggttttgccatgttggccaggctggtctggaactcctgacctccagtgatccgcctgcctcggcctcccagtgttgggattactggcgtgagccccgcgcccgcccctggctggcttctttgccgcaagctgtttcatcagcaaagtctttgtgacctgtatctagtctgctcatttttaaatgcgtgttctgcactccccagtggatggccgtgtatcaggagccggcccttttctggaaacaggccagcattcagtctccacagaggcaccataaacacgctggtggggccctgtactgtggtcaaagtcaaggcctccgggcaggactcgcggcccctccggctggcgggtggggttgacccgcacgtcccgccccgcctctcccttcgcgctccggacgggcgacggtagctcgagacccgggactccgcccgcctccccgcgagtatttgaggtccggggcggctccggcgcctctgcccgccgttctgctcgctcgctccccgctctggaaacaccaccgatagccacaccgaagagttctcccatttgctggttcccggacaaaaaagctgctgatcccttgagcacactgcagtgaagctcccagctgacatgtcctgtccatgtaaacagaacttcctccatgtctgccatcatggatgttctcgcagaagcaaatggcacctttgccttaaaccttttgaaaacgctgggtaaagacaactcgaagaatgtgtttttctcacccatgagcatgtcctgtgccctggccatggtctacatgggggcaaagggaaacaccgctgcacagatggcccagatactttctttcaataaaagtggcggtggtggagacatccaccagggcttccagtctcttctcaccgaagtgaacaagactggcacgcagtacttgcttaggatggccaacagggaaagctacgacatggagagtgtcctgcgcaacctgggcatgactgatgccttcgagctgggcaaggcagacttctctggaatgtcccagacagacctgtctctgtccaaggtcgtgcacaagtcttttgtggaggtcaatgaggaaggcacggaggctgcagccgccacagctgccatcatgatgatgcggtgtgccagattcgtcccccgcttctgcgccgaccaccccttccttttcttcatccagcacagcaagaccaacgggattctcttctgcggccgcttttcctctccgtga

SEQ ID NO: 27754 - DNA, 1973 bp, Homo sapiens
  source 1..1973: mol_type = unassigned DNA
gagtgagaagtcttaggaggtaggaggcaggaggaactgaagcccagctgtgaaggccgcagactgcagtgagaggaggctgcactccattttgcaatggcctcccttgctgcagcaaatgcagagttttgcttcaacctgttcagagagatggatgacaatcaaggaaatggaaatgtgttcttttcctctctgagcctcttcgctgccctggccctggtccgcttgggcgctcaagatgactccctctctcagattgataagttgcttcatgttaacactgcctcaggatatggaaactcttctaatagtcagtcagggctccagtctcaactgaaaagagttttttctgatataaatgcatcccacaaggattatgatctcagcattgtgaatgggctttttgctgaaaaagtgtatggctttcataaggactacattgagtgtgccgaaaaattatacgatgccaaagtggagcgagttgactttacgaatcatttagaagacactagacgtaatattaataagtgggttgaaaatgaaacacatggcaaaatcaagaacgtgattggtgaaggtggcataagctcatctgctgtaatggtgctggtgaatgctgtgtacttcaaaggcaagtggcaatcagccttcaccaagagcgaaaccataaattgccatttcaaatctcccaagtgctctgggaaggcagtcgccatgatgcatcaggaacggaagttcaatttgtctgttattgaggacccatcaatgaagattcttgagctcagatacaatggtggcataaacatgtacgttctgctgcctgagaatgacctctctgaaattgaaaacaaactgacctttcagaatctaatggaatggaccaatccaaggcgaatgacctctaagtatgttgaggtattttttcctcagttcaagatagagaagaattatgaaatgaaacaatatttgagagccctagggctgaaagatatctttgatgaatccaaagcagatctctctgggattgcttcggggggtcgtctgtatatatcaaggatgatgcacaaatcttacatagaggtcactgaggagggcaccgaggctactgctgccacaggaagtaatattgtagaaaagcaactccctcagtccacgctgtttagagctgaccacccattcctatttgttatcaggaaggatgacatcatcttattcagtggcaaagtttcttgcccttgaaaatccaattggtttctgttatagcagtccccacaacatcaaagaaccaccacaagtcaatagatttgagtttaattggaaaaatgtggtgtttcctttgagtttatttcttcctaacattggtcagcagatgacactggtgacttgacccttcctagacacctggttgattgtcctgatccctgctcttagcattctaccaccatgtgtctcacccatttctaatttcattgtctttcttcccacgctcatttctatcattctcccccatgacccgtctggaaattatggagagtgctcaactggtaaggagaacgtagaagtagccctagggatcctttttgaaactctacagttatcgcagatattctagcttcattgtaagcaatctaggaaataagccctgctgctttctagaaataagtgtgaaggataaattttctttgttgacctatgaagattttagagtttaccttcatatgtttgattttaaatcagtgtataatctagatggtaaaaaatgtgaaattgggattagggaccaaccaaaatatttcattaatgctttcaattgacaaattttggtctttctttgataagacaatatgtacatagttttttcaaatattaaagatcttttaactgttggcagttgttatctacagaatcatatctcatatgctgtgtagtttataagttttttctctatttatcagaataaagaaatacaacat

SEQ ID NO: 27755 - DNA, 2203 bp, Homo sapiens
  source 1..2203: mol_type = unassigned DNA
gtctactcatcaataagcagctgcctgtgcagagtgcaggctgcacctttggacagcctttaaaactgaattctcagaattttagaacaaatttttgtctagaaatgctgactttggttcattaggtagtggtaaaacaggctcccttcgaagctctccttcatcaccttcctaagtgcatgggggaaaatacctagggctcaacagtcttgagaagtgtggaaacattttctttgtgagtgagaacagatcacctagagaaaggagaccagattcccatcactgcttctgggtatcagatgctagcgctgcactccattttgcaatggcctcccttgctgcagcaaatgcagagttttgcttcaacctgttcagagagatggatgacaatcaaggaaatggaaatgtgttcttttcctctctgagcctcttcgctgccctggccctggtccgcttgggcgctcaagatgactccctctctcagattgataagttgcttcatgttaacactgcctcaggatatggaaactcttctaatagtcagtcagggctccagtctcaactgaaaagagttttttctgatataaatgcatcccacaaggattatgatctcagcattgtgaatgggctttttgctgaaaaagtgtatggctttcataaggactacattgagtgtgccgaaaaattatacgatgccaaagtggagcgagttgactttacgaatcatttagaagacactagacgtaatattaataagtgggttgaaaatgaaacacatggcaaaatcaagaacgtgattggtgaaggtggcataagctcatctgctgtaatggtgctggtgaatgctgtgtacttcaaaggcaagtggcaatcagccttcaccaagagcgaaaccataaattgccatttcaaatctcccaagtgctctgggaaggcagtcgccatgatgcatcaggaacggaagttcaatttgtctgttattgaggacccatcaatgaagattcttgagctcagatacaatggtggcataaacatgtacgttctgctgcctgagaatgacctctctgaaattgaaaacaaactgacctttcagaatctaatggaatggaccaatccaaggcgaatgacctctaagtatgttgaggtattttttcctcagttcaagatagagaagaattatgaaatgaaacaatatttgagagccctagggctgaaagatatctttgatgaatccaaagcagatctctctgggattgcttcggggggtcgtctgtatatatcaaggatgatgcacaaatcttacatagaggtcactgaggagggcaccgaggctactgctgccacaggaagtaatattgtagaaaagcaactccctcagtccacgctgtttagagctgaccacccattcctatttgttatcaggaaggatgacatcatcttattcagtggcaaagtttcttgcccttgaaaatccaattggtttctgttatagcagtccccacaacatcaaagaaccaccacaagtcaatagatttgagtttaattggaaaaatgtggtgtttcctttgagtttatttcttcctaacattggtcagcagatgacactggtgacttgacccttcctagacacctggttgattgtcctgatccctgctcttagcattctaccaccatgtgtctcacccatttctaatttcattgtctttcttcccacgctcatttctatcattctcccccatgacccgtctggaaattatggagagtgctcaactggtaaggagaacgtagaagtagccctagggatcctttttgaaactctacagttatcgcagatattctagcttcattgtaagcaatctaggaaataagccctgctgctttctagaaataagtgtgaaggataaattttctttgttgacctatgaagattttagagtttaccttcatatgtttgattttaaatcagtgtataatctagatggtaaaaaatgtgaaattgggattagggaccaaccaaaatatttcattaatgctttcaattgacaaattttggtctttctttgataagacaatatgtacatagttttttcaaatattaaagatcttttaactgttggcagttgttatctacagaatcatatctcatatgctgtgtagtttataagttttttctctatttatcagaataaagaaatacaacata

SEQ ID NO: 27756 - DNA, 587 bp, Homo sapiens
  source 1..587: mol_type = unassigned DNA
tcagtgctgtcaccagtgctgctgctgtcatcaacctctcccttgggagttgagccaaagggaagtcttgggaattttccctgaaccttggtataggtgtgctgggaggagtgagaagtcttaggaggtaggaggcaggaggaactgaagcccagctgtgaaggccgcagactgcagtgagaggaggctgcactccattttgcaatggcctcccttgctgcagcaaatgcagagttttgcttcaacctgttcagagagatggatgacaatcaaggaaatggaaatgtgttcttttcctctctgagcctcttcgctgccctggccctggtccgcttgggcgctcaagatgactccctctctcagattgataagttgcttcatgttaacactgcctcaggatatggaaactcttctaatagtcagtcagggctccagtctcaactgaaaagagttttttctgatataaatgcatcccacaaggattatgatctcagcattgtgaatgggctttttgctgaaaaagtgtatggctttcataaggactacattgagtgtgccgaaaaattatacgatgccaaagtggagcg

SEQ ID NO: 27757 - DNA, 560 bp, Homo sapiens
  source 1..560: mol_type = unassigned DNA
attaaactcatcacacaacatccagatcggataatggtcctcttgtctgcttctccaccttacagcttgtctatgactgatttaagtggtgtcatgggagaatggcatgggaatcggatgccagctgaaaaatttgtgttccatctttgaagagataagctgcactccattttgcaatggcctcccttgctgcagcaaatgcagagttttgcttcaacctgttcagagagatggatgacaatcaaggaaatggaaatgtgttcttttcctctctgagcctcttcgctgccctggccctggtccgcttgggcgctcaagatgactccctctctcagattgataagttgcttcatgttaacactgcctcaggatatggaaactcttctaatagtcagtcagggctccagtctcaactgaaaagagttttttctgatataaatgcatcccacaaggattatgatctcagcattgtgaatgggctttttgctgaaaaagtgtatggctttcataaggactacattgagtgtgccgaaaaattatacgatgccaaagtggagcga

SEQ ID NO: 27758 - DNA, 561 bp, Homo sapiens
  source 1..561: mol_type = unassigned DNA
tttcagactcacccaaccagcggccaacttcctctatgaagacagtaaggctgcactccattttgcaatggcctcccttgctgcagcaaatgcagagttttgcttcaacctgttcagagagatggatgacaatcaaggaaatggaaatgtgttcttttcctctctgagcctcttcgctgccctggccctggtccgcttgggcgctcaagatgactccctctctcagattgataagttgcttcatgttaacactgcctcaggatatggaaactcttctaatagtcagtcagggctccagtctcaactgaaaagagttttttctgatataaatgcatcccacaaggattatgatctcagcattgtgaatgggctttttgctgaaaaagtgtatggctttcataaggactacattgagtgtgccgaaaaattatacgatgccaaagtggagcgagttgactttacgaatcatttagaagacactagacgtaatattaataagtgggttgaaaatgaaacacatggcaaaatcaagaacgtgattggtgaaggtggcataagctc

SEQ ID NO: 27759 - DNA, 1446 bp, Homo sapiens
  source 1..1446: mol_type = unassigned DNA
aataagcagctgcctgtgcagagtgcaggctgcacctttggacagcctttaaaactgaattctcagaattttagaacaaatttttgtctagaaatgctgactttggttcattaggtagtggtaaaacaggctcccttcgaagctctccttcatcaccttcctaagtgcatgggggaaaatacctagggctcaacagtcttgagaagtgtggaaacattttctttgtgagtgagaacagatcacctagagaaaggagaccagattcccatcactgcttctgggtatcagatgctagcgctgcactccattttgcaatggcctcccttgctgcagcaaatgcagagttttgcttcaacctgttcagagagatggatgacaatcaaggaaatggaaatgtgttcttttcctctctgagcctcttcgctgccctggccctggtccgcttgggcgctcaagatgactccctctctcagattgataagtcagggctccagtctcaactgaaaagagttttttctgatataaatgcatcccacaaggattatgatctcagcattgtgaatgggctttttgctgaaaaagtgtatggctttcataaggactacattgagtgtgccgaaaaattatacgatgccaaagtggagcgagttgactttacgaatcatttagaagacactagacgtaatattaataagtgggttgaaaatgaaacacatggcaaaatcaagaacgtgattggtgaaggtggcataagctcatctgctgtaatggtgctggtgaatgctgtgtacttcaaaggcaagtggcaatcagccttcaccaagagcgaaaccataaattgccatttcaaatctcccaagtgctctgggaaggcagtcgccatgatgcatcaggaacggaagttcaatttgtctgttattgaggacccatcaatgaagattcttgagctcagatacaatggtggcataaacatgtacgttctgctgcctgagaatgacctctctgaaattgaaaacaaactgacctttcagaatctaatggaatggaccaatccaaggcgaatgacctctaagtatgttgaggtattttttcctcagttcaagatagagaagaattatgaaatgaaacaatatttgagagccctagggctgaaagatatctttgatgaatccaaagcagatctctctgggattgcttcggggggtcgtctgtatatatcaaggatgatgcacaaatcttacatagaggtcactgaggagggcaccgaggctactgctgccacaggaagtaatattgtagaaaagcaactccctcagtccacgctgtttagagctgaccacccattcctatttgttatcaggaaggatgacatcatcttattcagtggcaaagtttcttgcccttgaaaatccaattggtttctgttatagcagtccccacaacatc

SEQ ID NO: 27760 - DNA, 1507 bp, Homo sapiens
  source 1..1507: mol_type = unassigned DNA
cagactcacccaaccagcggccaacttcctctatgaagacagtaaggctgcactccattttgcaatggcctcccttgctgcagcaaatgcagagttttgcttcaacctgttcagagagatggatgacaatcaaggaaatggaaatgtgttcttttcctctctgagcctcttcgctgccctggccctggtccgcttgggcgctcaagatgactccctctctcagattgataagttgcttcatgttaacactgcctcaggatatggaaactcttctaatagtcagtcagggctccagtctcaactgaaaagagttttttctgatataaatgcatcccacaaggattatgatctcagcattgtgaatgggctttttgctgaaaaagtgtatggctttcataaggactacattgagtgtgccgaaaaattatacgatgccaaagtggagcgagttgactttacgaatcatttagaagacactagacgtaatattaataagtgggttgaaaatgaaacacatggcaaaatcaagaacgtgattggtgaaggtggcataagctcatctgctgtaatggtgctggtgaatgctgtgtacttcaaaggcaagtggcaatcagccttcaccaagagcgaaaccataaattgccatttcaaatctcccaagtgctctgggaaggcagtcgccatgatgcatcaggaacggaagttcaatttgtctgttattgaggacccatcaatgaagattcttgagctcagatacaatggtggcataaacatgtacgttctgctgcctgagaatgacctctctgaaattgaaaacaaactgacctttcagaatctaatggaatggaccaatccaaggcgaatgacctctaagtatgttgaggtattttttcctcagttcaagatagagaagaattatgaaatgaaacaatatttgagagccctagggctgaaagatatctttgatgaatccaaagcagatctctctgggattgcttcggggggtcgtctgtatatatcaaggatgatgcacaaatcttacatagaggtcactgaggagggcaccgaggctactgctgccacaggaagtaatattgtagaaaagcaactccctcagtccacgctgtttagagctgaccacccattcctatttgttatcaggaaggatgacatcatcttattcagtggcaaagtttcttgcccttgaaaatccaattggtttctgttatagcagtccccacaacatcaaagaaccaccacaagtcaatagatttgagtttaattggaaaaatgtggtgtttcctttgagtttatttcttcctaacattggtcagcagatgacactggtgacttgacccttcctagacacctggttgattgtcctgatccctgctcttagcattctaccaccatgtgtctcacccatttctaatttcattgtctttcttcccacgctcatttctatcattctcccccatgacccgtctggaaattatggagagtgctc

SEQ ID NO: 27761 - DNA, 3387 bp, Homo sapiens
  source 1..3387: mol_type = unassigned DNA
caagccagagcaatcgaacggttctgagtcatctgccggaagccttgccctcaatcaaggcggacgtgaagcatctacaaaggaggaatagtcaaagcagcagcggcggcggcggcggcggcagcagcagcagcagcaggaggtgggggcctctgccagaccttctctgatggatgacctctgtgaagcaaatggcacttttgccatcagcttatttaaaatattgggggaagaggacaactcaagaaacgtattcttctctcccatgagcatctcctctgccctggccatggtcttcatgggggcaaagggaagcactgcagcccagatgtcccaggcactttgtttatacaaagacggagatattcaccgaggtttccagtcacttctcagtgaagttaacagaactggcactcagtacttgcttagaactgccaacagactctttggagaaaagacgtgtgatttccttccagactttaaagaatactgtcagaagttctatcaggcagagctggaggagttgtcctttgctgaagacactgaagagtgcaggaagcatataaatgactgggtggcagagaagactgaaggtaagatttcagaggtactggatgctgggacagtcgatcccctgacaaagctggtccttgtgaatgccatttatttcaagggaaagtggaatgagcaatttgacagaaagtacacaaggggaatgctctttaaaaccaacgaggaaaaaaagacagtgcagatgatgtttaaggaagctaagtttaaaatggggtatgcggatgaggtacacacccaggtcctggagctgccctatgtggaagaggagctgagcatggtcattctgcttcccgatgacaacacggacctcgccgtggtggaaaaagcacttacatatgagaaattcaaagcctggacaaattcagaaaagttgacaaaaagtaaggttcaagttttccttcccagattaaagctggaggagagttatgacttggagcctttccttcgaagattaggaatgatcgatgcttttgacgaagccaaggcagacttttctggaatgtcaactgagaagaatgtgcctctgtccaaggttgcccacaagtgcttcgtggaggtcaatgaggaaggcacagaggctgccgcagccactgctgtggtcaggaattcccggtgcagcagaatggagccaagattctgtgcagaccacccttttcttttcttcatcaggcaccacaaaaccaactgcatcttgttctgtggcaggttctcttctccgtaaagaggagcaattgctgtacataccctcctttccttctacctatcttgccttaattaacattccctgtgacctagttggtgcagtggcttgaatgccaaaataaagcgtgtgcactggatagtgtgtgaaagtctttgctgaaagttccagagccattgagaataactgaggccgcagatgcatgaaatttgggcctgggaaggctatgctggttttggagtgtttggggtgcctgccattgcctctgccttcacctaagtctgtgcccattgtttcaggggatcttatggagcatctcagggcttcaggagccagccctcttccatccgcccggctctgcccaccaccactgccaggctgaacaggggactagtgcccaggtgacactgcacacaaagccaagggcaaaccctatagagtaaagctgcagccaccctgtgtctcatgtgcagctgaaatagtgatctgcttctgtcactgtcacatagacagccctgcatgccccctgtctcacacagtttgtaatgaagacagctccttctcatctttccataagcctgagatacaagttcagggactcagcaatgcactttaggactgagctaggaggcaaatatctgaagcttgctatgctgttctttccattccttttccctctgaaacacacaaaataccaaaggaacttacgcaacacaccactgagtcctctaactaatcatatgtgctcagacacagctcaagcacaccccttagttaagaaagaacctccatatacattaatttttttctgcctaaaaataaaattgcgttgtggcagcaatttggaaactacagcaaagtctccaaaaaaattgaagtcacccacaattccaacacacagcaatcactgctgttaatagtgatatacatccttccctattatgtgtatgcaaatagaaatttataagcattttactacaagttaatcatatccttcagtagcttatttcttcccttatgaaaaacctcccttaagatctttccaggtcatcaatttgatgtgcatagtattccactgtgtggctggatttctataattgaatctaattttagacagtttgagtaattaaaattatttctattaacaaataatagattgctaataatatatattatgctgttttggatatactaaatatttgctcacatccttaatatattttttaaaattcctaacaatagtactgttgagataaaagttgagcacattttgagacttcttccaaattggtccctagaaagttacactggtttgtactctcacttatgtcactgtttataccaccactgactgctgcctgctttattatttctttaatgagttggactgaacagtggttaatcctgactctgtttttgactgacagttaacagttacatgaaccattcatattacagctcttacttaaatttgaccaagccaggatatatctgttaggccacattcatttagggatcatgttttccaaagcaggtttgggcaaaattaatccacaggactgaaaggtatacatctgtgagttttgttctcacttccacctctaatttgaagaacactttaattgacacagaatacatttcacatatttaacctctacaataagttctgacacattttccatgaaacaaaccatcgctatattcaagataatgaacctatctatcatactcccaaattccttcttgcatctttgtaatttctcactcttccttctccctctccccgtcccatcccaaccactgatctgctcaggcaactaccaatcttctttctgtcactatagattaatttgcatttttaaagaaatttacatacatggaaccatacatcatctatgctttgtagtatgactcctgtcactcagtacaattattttgagattcatttatgttattgtatgtatcaatagttcatcccttttattggtaagtaacatttttttgtataggtataccatgatttgttgatgaacaaatttacctgttgatgaacatttacgttgttaccaagatttttgctattgaaaataaagtttttatgaatatttatatat

SEQ ID NO: 27762 - DNA, 3477 bp, Homo sapiens
  source 1..3477: mol_type = unassigned DNA
caatgtgtacactttttataaaaaccaccctccaaggaccaggcactggccctctctccggtgcccacagacatccacacaggcccaaagaatcagggattgcacaagccagagcaatcgaacggttctgagtcatctgccggaagccttgccctcaatcaaggcggacgtgaagcatctacaaaggaggaatagtcaaagcagcagcggcggcggcggcggcggcagcagcagcagcagcaggagaccttctctgatggatgacctctgtgaagcaaatggcacttttgccatcagcttatttaaaatattgggggaagaggacaactcaagaaacgtattcttctctcccatgagcatctcctctgccctggccatggtcttcatgggggcaaagggaagcactgcagcccagatgtcccaggcactttgtttatacaaagacggagatattcaccgaggtttccagtcacttctcagtgaagttaacagaactggcactcagtacttgcttagaactgccaacagactctttggagaaaagacgtgtgatttccttccagactttaaagaatactgtcagaagttctatcaggcagagctggaggagttgtcctttgctgaagacactgaagagtgcaggaagcatataaatgactgggtggcagagaagactgaaggtaagatttcagaggtactggatgctgggacagtcgatcccctgacaaagctggtccttgtgaatgccatttatttcaagggaaagtggaatgagcaatttgacagaaagtacacaaggggaatgctctttaaaaccaacgaggaaaaaaagacagtgcagatgatgtttaaggaagctaagtttaaaatggggtatgcggatgaggtacacacccaggtcctggagctgccctatgtggaagaggagctgagcatggtcattctgcttcccgatgacaacacggacctcgccgtggtggaaaaagcacttacatatgagaaattcaaagcctggacaaattcagaaaagttgacaaaaagtaaggttcaagttttccttcccagattaaagctggaggagagttatgacttggagcctttccttcgaagattaggaatgatcgatgcttttgacgaagccaaggcagacttttctggaatgtcaactgagaagaatgtgcctctgtccaaggttgcccacaagtgcttcgtggaggtcaatgaggaaggcacagaggctgccgcagccactgctgtggtcaggaattcccggtgcagcagaatggagccaagattctgtgcagaccacccttttcttttcttcatcaggcaccacaaaaccaactgcatcttgttctgtggcaggttctcttctccgtaaagaggagcaattgctgtacataccctcctttccttctacctatcttgccttaattaacattccctgtgacctagttggtgcagtggcttgaatgccaaaataaagcgtgtgcactggatagtgtgtgaaagtctttgctgaaagttccagagccattgagaataactgaggccgcagatgcatgaaatttgggcctgggaaggctatgctggttttggagtgtttggggtgcctgccattgcctctgccttcacctaagtctgtgcccattgtttcaggggatcttatggagcatctcagggcttcaggagccagccctcttccatccgcccggctctgcccaccaccactgccaggctgaacaggggactagtgcccaggtgacactgcacacaaagccaagggcaaaccctatagagtaaagctgcagccaccctgtgtctcatgtgcagctgaaatagtgatctgcttctgtcactgtcacatagacagccctgcatgccccctgtctcacacagtttgtaatgaagacagctccttctcatctttccataagcctgagatacaagttcagggactcagcaatgcactttaggactgagctaggaggcaaatatctgaagcttgctatgctgttctttccattccttttccctctgaaacacacaaaataccaaaggaacttacgcaacacaccactgagtcctctaactaatcatatgtgctcagacacagctcaagcacaccccttagttaagaaagaacctccatatacattaatttttttctgcctaaaaataaaattgcgttgtggcagcaatttggaaactacagcaaagtctccaaaaaaattgaagtcacccacaattccaacacacagcaatcactgctgttaatagtgatatacatccttccctattatgtgtatgcaaatagaaatttataagcattttactacaagttaatcatatccttcagtagcttatttcttcccttatgaaaaacctcccttaagatctttccaggtcatcaatttgatgtgcatagtattccactgtgtggctggatttctataattgaatctaattttagacagtttgagtaattaaaattatttctattaacaaataatagattgctaataatatatattatgctgttttggatatactaaatatttgctcacatccttaatatattttttaaaattcctaacaatagtactgttgagataaaagttgagcacattttgagacttcttccaaattggtccctagaaagttacactggtttgtactctcacttatgtcactgtttataccaccactgactgctgcctgctttattatttctttaatgagttggactgaacagtggttaatcctgactctgtttttgactgacagttaacagttacatgaaccattcatattacagctcttacttaaatttgaccaagccaggatatatctgttaggccacattcatttagggatcatgttttccaaagcaggtttgggcaaaattaatccacaggactgaaaggtatacatctgtgagttttgttctcacttccacctctaatttgaagaacactttaattgacacagaatacatttcacatatttaacctctacaataagttctgacacattttccatgaaacaaaccatcgctatattcaagataatgaacctatctatcatactcccaaattccttcttgcatctttgtaatttctcactcttccttctccctctccccgtcccatcccaaccactgatctgctcaggcaactaccaatcttctttctgtcactatagattaatttgcatttttaaagaaatttacatacatggaaccatacatcatctatgctttgtagtatgactcctgtcactcagtacaattattttgagattcatttatgttattgtatgtatcaatagttcatcccttttattggtaagtaacatttttttgtataggtataccatgatttgttgatgaacaaatttacctgttgatgaacatttacgttgttaccaagatttttgctattgaaaataaagtttttatgaatatttatatatata

SEQ ID NO: 27763 - DNA, 564 bp, Homo sapiens
  source 1..564: mol_type = unassigned DNA
aggcttgcgatttgctgcgctgtgatttgctgccggatgggagcggggggtgacgcgagcaaccttctctgatggatgacctctgtgaagcaaatggcacttttgccatcagcttatttaaaatattgggggaagaggacaactcaagaaacgtattcttctctcccatgagcatctcctctgccctggccatggtcttcatgggggcaaagggaagcactgcagcccagatgtcccaggcactttgtttatacaaagacggagatattcaccgaggtttccagtcacttctcagtgaagttaacagaactggcactcagtacttgcttagaactgccaacagactctttggagaaaagacgtgtgatttccttccagactttaaagaatactgtcagaagttctatcaggcagagctggaggagttgtcctttgctgaagacactgaagagtgcaggaagcatataaatgactgggtggcagagaagactgaaggtaagatttcagaggtactggatgctgggacagtcgatcccctgacaaagctggtccttgtgaatgcca

SEQ ID NO: 27764 - DNA, 580 bp, Homo sapiens
  source 1..580: mol_type = unassigned DNA
gtgcgtgagagaggggaagggaggaaggccagagcaggaatcagagcgaggcaaaggcgggcaggaactaggagaatgacggcgggaggcggccgggaaagagagtcgcggggctgtgggggtcgccctggcaccagccggggtcccaagccccaccgcgagacccggcgaaggccgagggccgggtcccgagaacagaccttctctgatggatgacctctgtgaagcaaatggcacttttgccatcagcttatttaaaatattgggggaagaggacaactcaagaaacgtattcttctctcccatgagcatctcctctgccctggccatggtcttcatgggggcaaagggaagcactgcagcccagatgtcccaggcactttgtttatacaaagacggagatattcaccgaggtttccagtcacttctcagtgaagttaacagaactggcactcagtacttgcttagaactgccaacagactctttggagaaaagacgtgtgatttccttccagactttaaagaatactgtcagaagttctatcaggcagagctggaggagttgtcctttgctgaagac

SEQ ID NO: 27765 - DNA, 1324 bp, Homo sapiens
  source 1..1324: mol_type = unassigned DNA
aatcaaggcggacgtgaagcatctacaaaggaggaatagtcaaagcagcagcggcggcggcggcggcggcagcagcagcagcagcaggaggcactttgtttatacaaagacggagatattcaccgaggtttccagtcacttctcagtgaagttaacagaactggcactcagtacttgcttagaactgccaacagactctttggagaaaagacgtgtgatttccttccagactttaaagaatactgtcagaagttctatcaggcagagctggaggagttgtcctttgctgaagacactgaagagtgcaggaagcatataaatgactgggtggcagagaagactgaaggtaagatttcagaggtactggatgctgggacagtcgatcccctgacaaagctggtccttgtgaatgccatttatttcaagggaaagtggaatgagcaatttgacagaaagtacacaaggggaatgctctttaaaaccaacgaggaaaaaaagacagtgcagatgatgtttaaggaagctaagtttaaaatggggtatgcggatgaggtacacacccaggtcctggagctgccctatgtggaagaggagctgagcatggtcattctgcttcccgatgacaacacggacctcgccgtggtggaaaaagcacttacatatgagaaattcaaagcctggacaaattcagaaaagttgacaaaaagtaaggttcaagttttccttcccagattaaagctggaggagagttatgacttggagcctttccttcgaagattaggaatgatcgatgcttttgacgaagccaaggcagacttttctggaatgtcaactgagaagaatgtgcctctgtccaaggttgcccacaagtgcttcgtggaggtcaatgaggaaggcacagaggctgccgcagccactgctgtggtcaggaattcccggtgcagcagaatggagccaagattctgtgcagaccacccttttcttttcttcatcaggcaccacaaaaccaactgcatcttgttctgtggcaggttctcttctccgtaaagaggagcaattgctgtacataccctcctttccttctacctatcttgccttaattaacattccctgtgacctagttggtgcagtggcttgaatgccaaaataaagcgtgtgcactggatagtgtgtgaaagtctttgctgaaagttccagagccattgagaataactgaggccgcagatgcatgaaatttgggcctgggaaggctatgctggttttggagtgtttggggtgcctgccattgcctctgccttcacctaagtctgtgcccattgtttca

SEQ ID NO: 27766 - DNA, 4118 bp, Homo sapiens
  source 1..4118: mol_type = unassigned DNA
ccgggtcctgcgcctcgggggtcggcgtccaggctcggagcgcggcacggagacggcggcagcgctggactaggtggcaggccctgcatcatggaaactctttctaatgcaagtggtacttttgccatacgccttttaaagatactgtgtcaagataacccttcgcacaacgtgttctgttctcctgtgagcatctcctctgccctggccatggttctcctaggggcaaagggaaacaccgcaacccagatggcccaggcactgtctttaaacacagaggaagacattcatcgggctttccagtcgcttctcactgaagtgaacaaggctggcacacagtacctgctgagaacggccaacaggctctttggagagaaaacttgtcagttcctctcaacgtttaaggaatcctgtcttcaattctaccatgctgagctgaaggagctttcctttatcagagctgcagaagagtccaggaaacacatcaacacctgggtctcaaaaaagaccgaaggtaaaattgaagagttgttgccgggtagctcaattgatgcagaaaccaggctggttcttgtcaatgccatctacttcaaaggaaagtggaatgaaccgtttgacgaaacatacacaagggaaatgccctttaaaataaaccaggaggagcaaaggccagtgcagatgatgtatcaggaggccacgtttaagctcgcccacgtgggcgaggtgcgcgcgcagctgctggagctgccctacgccaggaaggagctgagcctgctggtgctgctgcctgacgacggcgtggagctcagcacggtggaaaaaagtctcacttttgagaaactcacagcctggaccaagccagactgtatgaagagtactgaggttgaagttctccttccaaaatttaaactacaagaggattatgacatggaatctgtgcttcggcatttgggaattgttgatgccttccaacagggcaaggctgacttgtcggcaatgtcagcggagagagacctgtgtctgtccaagttcgtgcacaagagttttgtggaggtgaatgaagaaggcaccgaggcagcggcagcgtcgagctgctttgtagttgcagagtgctgcatggaatctggccccaggttctgtgctgaccaccctttccttttcttcatcaggcacaacagagccaacagcattctgttctgtggcaggttctcatcgccataaagggtgcacttaccgtgcactcggccatttccctcttcctgtgtccccagatccccactacagctccaagaggatgggcctagaaagccaagtgcaaagatgagggcagattctttacctgtctgccctcatgatttgccagcatgaattcatgatgctccacactcgcttatgctacttaatcagaatcttgagaaaatagaccataatgattccctgttgtattaaaattgcagtccaaatcccataggatggcaagcaaagttcttctagaattccacatgcaattcactctggcgaccctgtgctttcctgacactgcgaatacattccttaacccgctgcctcagtggtaataaatggtgctagatattgctactattttatagatttcctggtgcttagccttataaaaaaggttgtaaaatgtacatttatattttatcttttttttttttttttttctgagacgcagtctggctctctgtcgcccaggctggagtgcagtggctcgatctcggctcactgcaagctccgcctcccgggttcacgccattctcctgcctcagcctcccgagtagctgggactacaggcgcccgccaccacgcccggctaattttttgtatttttagtagagacggggtttcaccgtgttagccaggatggtgtcgatctcctgacctcgtgatccacccgcctcggcctcccaaagtgctgggattacaggcttgagccaccgcgcccggctatattttatcttttatctttttctttgacatttaccaatcaccaagcatgcaccaaacactgctttaggcactggggacacaaaggggacagagccatcctcctttgacacctggtcttcagttctgtgcccaacgtatatagttttgacaatgaccaggttggactgtttaatgtctttcaacttaccacgtaatcctcttgtagggatcacatctttctttatgatattgtatttctctacctctaacagtaaaaattccattcaacccttaaagctcacttcaaattcttctttgagaagtttttcctttctccgcaaccagatgtacatatttgaactctctttgtacttggagggcacttctttcgtggtagttcttttatttttattaatctctgtatccttagatagtcctccaacaaccaaaggttgggactctgtcttacatatctgggtgcccctcatagtgcagtaataagtaagttgattatatacgagctatgtaacttatattttttaatggttggatatcactgagtttttttttttaagaatttttttattgaggtaaacttcacataacataaaattaactattttaaagtgagaagttcagtgccacttagtattgttaacaatgttgcataaccaccacctttatttaaagttccaaaaaaaatgttctcctctaaaaggaaaccccatcccattaagcagatactctccattccttccttcctccagcccccagcaaccaccaatctgctttctgtctctatggatttatctattcttgctattttatataaattgaattgtatgagaccttttgtgtctggcttctttcacttagtacaagtttttgagatttatttacatagtagcatgtatcaacacttcatttttatggccaaataaaattgtattatgtgtttatagcacaatttatttatccactcattcattgatggactttgggttgtttctgacttttggctattgggaatagtgctgctatgaatgtttgtgtacctgtatttgtttgaatgcctattttgcattctcttgggtatatatctaggagtggaactgctgggtcatatgttaattctatgtttagctttttgaggaacagacaaactgttttccacagcagttgaaccattccacattcccaccagcaatgtatgagaattccaatttctgtccacttcctcaccaacacttattattttccttttcctttttttaaaaaaaataagttatggccatcttagtgggtgtgaagtggtatctcattgtgttttttatttgcatttcctatgtaatgagctagaaactaaagtacaaactagatgggacatccagtccctttgatagataatgctgagtaaaaaatgagatgaaagacatttgtttgtttttagaacacgagtgacagtttgttaaaaagctttagaggaggaatgaaaacaaagtgaagtacacttagaaaagggccaagtggacatcttggatgtcaagtgcctagttcagtatcttttttttttttttttttttttttgagacagtgcctcactctgtcacccaggctggagtgtagtggcatgatctgggctcactgcaacctcctcctcctggattcaagcaattctcttgcttcagcctcccaagtagctgagactacaagcacccaccatcacacccagctaattttgtatttttcagtagagacggggtttcgccacattggccgtgttggtcttgaactcctggcctcaagcgatccgcctacctcagcctcccaaagtgctaggattacaggcataagccactgagcccagccctagttcagtatcttttatgtaaattacaaacatctgcaacattatgtatcatatgcagatacttattgcatttcttttattagtggtgaaagtgttctatgcatttattggctcttgaatttcctcatctatgaattgtcattcatacacctacttttctgcttcgtttttacatatgtctttgcctattaaagatattatccctctgttttatattttctctcattcttgtattgccttttaaattttgttatgatgtttcattaataaacagtgttttgttttcctctataatcaa

SEQ ID NO: 27767 - DNA, 2437 bp, Homo sapiens
  source 1..2437: mol_type = unassigned DNA
atgtgtgcatgctaacacagtaaccgtcatatactcaaagtgtcagctctaagaactggagatgaggagctgcaagccactctacagttatcaaaggcacagctgagggggtttgtgctgaccaagctggttgcctggtgtttggattgggacttatttactttggaaaatatgcagcaacagcccagcaccaaagttcacatcaaaatcccactgatgaccttggctgctttcatctctgaagcgccacttctcagaaacacagagctttagctccgccaaaatgaaacactcattaaacgcacttctcattttcctcatcataacatctgcgtggggtgggagcaaaggcccgctggatcagctagagaaaggaggggaaactgctcagtctgcagatccccagtgggagcagttaaataacaaaaacctgagcatgcctcttctccctgccgacttccacaaggaaaacaccgtcaccaacgactggattccagagggggaggaggacgacgactatctggacctggagaagatattcagtgaagacgacgactacatcgacatcgtcgacagtctgtcagtttccccgacagactctgatgtgagtgctgggaacatcctccagctttttcatggcaagagccggatccagcgtcttaacatcctcaacgccaagttcgctttcaacctctaccgagtgctgaaagaccaggtcaacactttcgataacatcttcatagcacccgttggcatttctactgcgatgggtatgatttccttaggtctgaagggagagacccatgaacaagtgcactcgattttgcattttaaagactttgttaatgccagcagcaagtatgaaatcacgaccattcataatctcttccgtaagctgactcatcgcctcttcaggaggaattttgggtacacactgcggtcagtcaatgacctttatatccagaagcagtttccaatcctgcttgacttcaaaactaaagtaagagagtattactttgctgaggcccagatagctgacttctcagaccctgccttcatatcaaaaaccaacaaccacatcatgaagctcaccaagggcctcataaaagatgctctggagaatatagaccctgctacccagatgatgattctcaactgcatctacttcaaaggatcctgggtgaataaattcccagtggaaatgacacacaaccacaacttccggctgaatgagagagaggtagttaaggtttccatgatgcagaccaaggggaacttcctcgcagcaaatgaccaggagctggactgcgacatcctccagctggaatacgtggggggcatcagcatgctaattgtggtcccacacaagatgtctgggatgaagaccctcgaagcgcaactgacaccccgggtggtggagagatggcaaaaaagcatgacaaacagaactcgagaagtgcttctgccgaaattcaagctggagaagaactacaatctagtggagtccctgaagttgatggggatcaggatgctgtttgacaaaaatggcaacatggcaggcatctcagaccaaaggatcgccatcgacctgttcaagcaccaaggcacgatcacagtgaacgaggaaggcacccaagccaccactgtgaccacggtggggttcatgccgctgtccacccaagtccgcttcactgtcgaccgcccctttcttttcctcatctacgagcatcgcaccagctgcctgctcttcatgggaagagtggccaaccccagcaggtcctagaggtggaggtctaggtgtctgaagtgccttgggggcaccctcattttgtttccattccaacaacgagaacagagatgttctggcatcatttacgtagtttacgctaccaatctgaattcgaggcccatatgagaggagcttagaaacgaccaagaagagaggcttgttggaatcaattctgcacaatagcccatgctgtaagctcatagaagtcactgtaactgtagtgtgtctgctgttacctagagggtctcacctccccactcttcacagcaaacctgagcagcgcgtcctaagcacctcccgctccggtgaccccatccttgcacacctgactctgtcactcaagcctttctccaccaggcccctcatctgaataccaagcacagaaatgagtggtgtgactaattccttacctctcccaaggagggtacacaactagcaccattcttgatgtccagggaagaagccacctcaagacatatgaggggtgccctgggctaatgttagggcttaattttctcaaagcctgacctttcaaatccatgatgaatgccatcagtccctcctgctgttgcctccctgtgacctggaggacagtgtgtgccatgtctcccatactagagataaataaatgtagccacatttactgtg

SEQ ID NO: 27768 - DNA, 1798 bp, Homo sapiens
  source 1..1798: mol_type = unassigned DNA
taatgctgtgagggcctcttcctgggtcaaagccacagggaacctgccatgtggatgctgcagcggggtgtggatcagccaggccgcctttcactgtgttctgttttccctcccagctttagctccgccaaaatgaaacactcattaaacgcacttctcattttcctcatcataacatctgcgtggggtgggagcaaaggcccgctggatcagctagagaaaggaggggaaactgctcagtctgcagatccccagtgggagcagttaaataacaaaaacctgagcatgcctcttctccctgccgacttccacaaggaaaacaccgtcaccaacgactggattccagagggggaggaggacgacgactatctggacctggagaagatattcagtgaagacgacgactacatcgacatcgtcgacagtctgtcagtttccccgacagactctgatgtgagtgctgggaacatcctccagctttttcatggcaagagccggatccagcgtcttaacatcctcaacgccaagttcgctttcaacctctaccgagtgctgaaagaccaggtcaacactttcgataacatcttcatagcacccgttggcatttctactgcgatgggtatgatttccttaggtctgaagggagagacccatgaacaagtgcactcgattttgcattttaaagactttgttaatgccagcagcaagtatgaaatcacgaccattcataatctcttccgtaagctgactcatcgcctcttcaggaggaattttgggtacacactgcggtcagtcaatgacctttatatccagaagcagtttccaatcctgcttgacttcaaaactaaagtaagagagtattactttgctgaggcccagatagctgacttctcagaccctgccttcatatcaaaaaccaacaaccacatcatgaagctcaccaagggcctcataaaagatgctctggagaatatagaccctgctacccagatgatgattctcaactgcatctacttcaaaggatcctgggtgaataaattcccagtggaaatgacacacaaccacaacttccggctgaatgagagagaggtagttaaggtttccatgatgcagaccaaggggaacttcctcgcagcaaatgaccaggagctggactgcgacatcctccagctggaatacgtggggggcatcagcatgctaattgtggtcccacacaagatgtctgggatgaagaccctcgaagcgcaactgacaccccgggtggtggagagatggcaaaaaagcatgacaaacagaactcgagaagtgcttctgccgaaattcaagctggagaagaactacaatctagtggagtccctgaagttgatggggatcaggatgctgtttgacaaaaatggcaacatggcaggcatctcagaccaaaggatcgccatcgacctgttcaagcaccaaggcacgatcacagtgaacgaggaaggcacccaagccaccactgtgaccacggtggggttcatgccgctgtccacccaagtccgcttcactgtcgaccgcccctttcttttcctcatctacgagcatcgcaccagctgcctgctcttcatgggaagagtggccaaccccagcaggtcctagaggtggaggtctaggtgtctgaagtgccttgggggcaccctcattttgtttccattccaacaacgagaacagagatgttctggcatcatttacgtagtttacgctaccaatctgaattcgaggcccatatgagaggagcttagaaacgaccaagaagagaggcttg

SEQ ID NO: 27769 - DNA, 2195 bp, Homo sapiens
  source 1..2195: mol_type = unassigned DNA
cgataaagcccccgccgccgcggcagccagcttgcgctgtggggctgcccgggctgcgcggcgtctgcaggcgccaccgctgcctctttccggctgtgaccctcctcgccgccgccgcttggctgcgtcctccgactccccgcgccgccgagaccaggctcccgctccggttgcggccgcaccgccctccgcggccgccccctggggatccagcgagcgcggtcgtccttggtggaaggaaccatgaactggcatctccccctcttcctcttggcctctgtgacgctgccttccatctgctcccacttcaatcctctgtctctcgaggaactaggctccaacacggggatccaggttttcaatcagattgtgaagtcgaggcctcatgacaacatcgtgatctctccccatgggattgcgtcggtcctggggatgcttcagctgggggcggacggcaggaccaagaagcagctcgccatggtgatgagatacggcgtaaatggagttggtaaaatattaaagaagatcaacaaggccatcgtctccaagaagaataaagacattgtgacagtggctaacgccgtgtttgttaagaatgcctctgaaattgaagtgccttttgttacaaggaacaaagatgtgttccagtgtgaggtccggaatgtgaactttgaggatccagcctctgcctgtgattccatcaatgcatgggttaaaaatgaaaccagggatatgattgacaatctgctgtccccagatcttattgatggtgtgctcaccagactggtcctcgtcaacgcagtgtatttcaagggtctgtggaaatcacggttccaacccgagaacacaaagaaacgcactttcgtggcagccgacgggaaatcctatcaagtgccaatgctggcccagctctccgtgttccggtgtgggtcgacaagtgcccccaatgatttatggtacaacttcattgaactgccctaccacggggaaagcatcagcatgctgattgcactgccgactgagagctccactccgctgtctgccatcatcccacacatcagcaccaagaccatagacagctggatgagcatcatggtgcccaagagggtgcaggtgatcctgcccaagttcacagctgtagcacaaacagatttgaaggagccgctgaaagttcttggcattactgacatgtttgattcatcaaaggcaaattttgcaaaaataacaacagggtcagaaaacctccatgtttctcatatcttgcaaaaagcaaaaattgaagtcagtgaagatggaaccaaagcttcagcagcaacaactgcaattctcattgcaagatcatcgcctccctggtttatagtagacagaccttttctgtttttcatccgacataatcctacaggtgctgtgttattcatggggcagataaacaaaccctgaagagtatacaaaagaaaccatgcaaagcaacgactactttgctacgaagaaagactcctttcctgcatctttcatagttctgttaaatatttttgtacatcgcttctttttcaaaactagttcttaggaacagactcgatgcaagtgtttctgttctgggaggtattggagggaaaaaacaagcaggatggctggaacactgtactgaggaatgaatagaaaggcttccagatgtctaaaagattctttaaactactgaactgttacctaggttaacaaccctgttgagtatttgctgtttgtccagttcaggaatttttgttttgttttgtctatatgtgcggcttttcagaagaaatttaatcagtgtgacagaaaaaaaaatgttttatggtagcttttactttttatgaaaaaaaaattatttgccttttaaattcttttcccccatccccctccaaagtcttgatagcaagcgttattttggtggtagaaacggtgaaatctctagcctctttgtgtttttgttgttgttgttgttgttgttttatataatgcatgtattcactaaaataaaatttaaaaaactcctgtcttgctagacaaggttgctgttgtgcagtgtgcctgtcactactggtctgtactccttggatttgcatttttgtattttgtacaaagtaaaaataaactgttatgagtagtaaaaataaagctatttctctgctatttgaaaatacaatagaagaaactga

SEQ ID NO: 27770 - DNA, 2161 bp, Homo sapiens
  source 1..2161: mol_type = unassigned DNA
ttgcgctgtggggctgcccgggctgcgcggcgtctgcaggcgccaccgctgcctctttccggctgtgaccctcctcgccgccgccgcttggctgcgtcctccgactccccgcgccgccgagaccaggctcccgctccggttgcggccgcaccgccctccgcggccgccccctggggatccagcgagcgcggtcgtccttggtggaaggaaccatgaactggcatctccccctcttcctcttggcctctgtgacgctgccttccatctgctcccacttcaatcctctgtctctcgaggaactaggctccaacacggggatccaggttttcaatcagattgtgaagtcgaggcctcatgacaacatcgtgatctctccccatgggattgcgtcggtcctggggatgcttcagctgggggcggacggcaggaccaagaagcagctcgccatggtgatgagatacggcgtaaatggagttggtaaaatattaaagaagatcaacaaggccatcgtctccaagaagaataaagacattgtgacagtggctaacgccgtgtttgttaagaatgcctctgaaattgaagtgccttttgttacaaggaacaaagatgtgttccagtgtgaggtccggaatgtgaactttgaggatccagcctctgcctgtgattccatcaatgcatgggttaaaaatgaaaccagggatatgattgacaatctgctgtccccagatcttattgatggtgtgctcaccagactggtcctcgtcaacgcagtgtatttcaagggtctgtggaaatcacggttccaacccgagaacacaaagaaacgcactttcgtggcagccgacgggaaatcctatcaagtgccaatgctggcccagctctccgtgttccggtgtgggtcgacaagtgcccccaatgatttatggtacaacttcattgaactgccctaccacggggaaagcatcagcatgctgattgcactgccgactgagagctccactccgctgtctgccatcatcccacacatcagcaccaagaccatagacagctggatgagcatcatggtgcccaagagggtgcaggtgatcctgcccaagttcacagctgtagcacaaacagatttgaaggagccgctgaaagttcttggcattactgacatgtttgattcatcaaaggcaaattttgcaaaaataacaaggtcagaaaacctccatgtttctcatatcttgcaaaaagcaaaaattgaagtcagtgaagatggaaccaaagcttcagcagcaacaactgcaattctcattgcaagatcatcgcctccctggtttatagtagacagaccttttctgtttttcatccgacataatcctacaggtgctgtgttattcatggggcagataaacaaaccctgaagagtatacaaaagaaaccatgcaaagcaacgactactttgctacgaagaaagactcctttcctgcatctttcatagttctgttaaatatttttgtacatcgcttctttttcaaaactagttcttaggaacagactcgatgcaagtgtttctgttctgggaggtattggagggaaaaaacaagcaggatggctggaacactgtactgaggaatgaatagaaaggcttccagatgtctaaaagattctttaaactactgaactgttacctaggttaacaaccctgttgagtatttgctgtttgtccagttcaggaatttttgttttgttttgtctatatgtgcggcttttcagaagaaatttaatcagtgtgacagaaaaaaaaatgttttatggtagcttttactttttatgaaaaaaaaattatttgccttttaaattcttttcccccatccccctccaaagtcttgatagcaagcgttattttggtggtagaaacggtgaaatctctagcctctttgtgtttttgttgttgttgttgttgttgttttatataatgcatgtattcactaaaataaaatttaaaaaactcctgtcttgctagacaaggttgctgttgtgcagtgtgcctgtcactactggtctgtactccttggatttgcatttttgtattttgtacaaagtaaaaataaactgttatgagtagtaaaaataaagctatttctctgctatttgaaaatacaatagaagaaactga

SEQ ID NO: 27771 - DNA, 2569 bp, Homo sapiens
  source 1..2569: mol_type = unassigned DNA
aatccttggttaggaggaaagggagtggagaggaccgtgctgcctggcgttccccagctgcctttctttctgttttccccccaacggaatctctatgtggtctcctagagcctcgtgcctgcctctcagctagatgctgatatcattcccactcatgtagttgggaaggaagggtgtggcagagataaagggtccacggtcacgcagtatgtggggggtcacacagcctgtatgccaaagtggcacaccctgtgaatatgtagggtcgcacagcctttatgtgtcagtgccagagcctggacccgggtctgtagatgtgtgaaccgtgagctgataccatggatattcaaagatttacatcccatcaatgtttataccttcttgagaagaaatttgtgtcaaagcacactcctcctttcaagactacctcctcgccgtgctgcgtgatagccctagtatcacaaccaaaacacatgatacagaaagaggccagtatctgtgtggcttcaggctcttgtgcgttggccatgaagcaaaggaaggctgttgcatgaaataacctccttctgactccacccttgcatttgtgagatgtaaacagcagtgttaccaagaggtcttccagggaacacgttgcaggtcgtccttggtggaaggaaccatgaactggcatctccccctcttcctcttggcctctgtgacgctgccttccatctgctcccacttcaatcctctgtctctcgaggaactaggctccaacacggggatccaggttttcaatcagattgtgaagtcgaggcctcatgacaacatcgtgatctctccccatgggattgcgtcggtcctggggatgcttcagctgggggcggacggcaggaccaagaagcagctcgccatggtgatgagatacggcgtaaatggagttggtaaaatattaaagaagatcaacaaggccatcgtctccaagaagaataaagacattgtgacagtggctaacgccgtgtttgttaagaatgcctctgaaattgaagtgccttttgttacaaggaacaaagatgtgttccagtgtgaggtccggaatgtgaactttgaggatccagcctctgcctgtgattccatcaatgcatgggttaaaaatgaaaccagggatatgattgacaatctgctgtccccagatcttattgatggtgtgctcaccagactggtcctcgtcaacgcagtgtatttcaagggtctgtggaaatcacggttccaacccgagaacacaaagaaacgcactttcgtggcagccgacgggaaatcctatcaagtgccaatgctggcccagctctccgtgttccggtgtgggtcgacaagtgcccccaatgatttatggtacaacttcattgaactgccctaccacggggaaagcatcagcatgctgattgcactgccgactgagagctccactccgctgtctgccatcatcccacacatcagcaccaagaccatagacagctggatgagcatcatggtgcccaagagggtgcaggtgatcctgcccaagttcacagctgtagcacaaacagatttgaaggagccgctgaaagttcttggcattactgacatgtttgattcatcaaaggcaaattttgcaaaaataacaaggtcagaaaacctccatgtttctcatatcttgcaaaaagcaaaaattgaagtcagtgaagatggaaccaaagcttcagcagcaacaactgcaattctcattgcaagatcatcgcctccctggtttatagtagacagaccttttctgtttttcatccgacataatcctacaggtgctgtgttattcatggggcagataaacaaaccctgaagagtatacaaaagaaaccatgcaaagcaacgactactttgctacgaagaaagactcctttcctgcatctttcatagttctgttaaatatttttgtacatcgcttctttttcaaaactagttcttaggaacagactcgatgcaagtgtttctgttctgggaggtattggagggaaaaaacaagcaggatggctggaacactgtactgaggaatgaatagaaaggcttccagatgtctaaaagattctttaaactactgaactgttacctaggttaacaaccctgttgagtatttgctgtttgtccagttcaggaatttttgttttgttttgtctatatgtgcggcttttcagaagaaatttaatcagtgtgacagaaaaaaaaatgttttatggtagcttttactttttatgaaaaaaaaattatttgccttttaaattcttttcccccatccccctccaaagtcttgatagcaagcgttattttggtggtagaaacggtgaaatctctagcctctttgtgtttttgttgttgttgttgttgttgttttatataatgcatgtattcactaaaataaaatttaaaaaactcctgtcttgctagacaaggttgctgttgtgcagtgtgcctgtcactactggtctgtactccttggatttgcatttttgtattttgtacaaagtaaaaataaactgttatgagtagtaaaaataaa

SEQ ID NO: 27772 - DNA, 581 bp, Homo sapiens
  source 1..581: mol_type = unassigned DNA
atcacagaacaagtgtgccatgacttttcaaacatgcctaattgaactctgtttgcgatttaacttctttttcaaaggtttatagttacctttatttcaaaatttgtcattttaaaatatgtgtttcctccttttcctccactgtatagtaattaagagtgtggaggatttggaggccagcgggctttggtttgaatctagaggctacatattggagggtatgagccaaagccaaatttctaaacatctccaagcccatccgtgagttgggcctaaaggtgtttaggcttaagggccacccctgaagtgttgtgaggatgaagcgaagagtatatcttaggcgctaagcacagtggcaggaatggagctgactttcgggacacgaggtggctgtggttgtggcattgggtaatatttgtcacagaagtacaggtcgtccttggtggaaggaaccatgaactggcatctccccctcttcctcttggcctctgtgacgctgccttccatctgctcccacttcaatcctctgtctctcgaggaactaggctccaacacggggatccaggttttcaatcagattg

SEQ ID NO: 27773 - DNA, 988 bp, Homo sapiens
  source 1..988: mol_type = unassigned DNA
agcccaggttcatctacatcctgttgagaagtttggcagctggaggtggacatgcacacactacactgaacctcctgcaacaagcactgcggaagggaccatttggatgttgctgccatacttttcagcggctgaaaaggtcgtccttggtggaaggaaccatgaactggcatctccccctcttcctcttggcctctgtgacgctgccttccatctgctcccacttcaatcctctgtctctcgaggaactaggctccaacacggggatccaggttttcaatcagattgtgaagtcgaggcctcatgacaacatcgtgatctctccccatgggattgcgtcggtcctggggatgcttcagctgggggcggacggcaggaccaagaagcagctcgccatggtgatgagatacggcgtaaatggagttggtaaaatattaaagaagatcaacaaggccatcgtctccaagaagaataaagacattgtgacagtggctaacgccgtgtttgttaagaatgcctctgaaattgaagtgccttttgttacaaggaacaaagatgtgttccagtgtgaggtccggaatgtgaactttgaggatccagcctctgcctgtgattccatcaatgcatgggttaaaaatgaaaccagggatatgattgacaatctgctgtccccagatcttattgatggtgtgctcaccagactggtcctcgtcaacgcagtgtatttcaagggtctgtggaaatcacggttccaacccgagaacacaaagaaacgcactttcgtggcagccgacgggaaatcctatcaagtgccaatgctggcccagctctccgtgttccggtgtgggtcgacaagtgcccccaatgatttatggtacaacttcattgaactgccctaccacggggaaagcatcagcatgctgattgcactgccgactgagagctccactccgctgtctgccatcatcccacacatcagcaccaagac

SEQ ID NO: 27774 - DNA, 1716 bp, Homo sapiens
  source 1..1716: mol_type = unassigned DNA
agtgatacccgcagctgggagcaccggggccggcgtggctcctgcccggccatccgagccggccctgaccctgaacctgaggtttccagctgctcgccggcaacccctaccccggacttaggctgcgcgccgccggatggggagagactggcgcactcttacttgttacctctgcctgggcagagggaggtgacgcgcggtgtggggaaagcctttaacttggcctctggcagccgatttaacccgagcgagcaggtctttgctattttcatcatctgtagaaacgggagttgcgaggcggatgagtgactgcaggtcgtccttggtggaaggaaccatgaactggcatctccccctcttcctcttggcctctgtgacgctgccttccatctgctcccacttcaatcctctgtctctcgaggaactaggctccaacacggggatccaggttttcaatcagattgtgaagtcgaggcctcatgacaacatcgtgatctctccccatgggattgcgtcggtcctggggatgcttcagctgggggcggacggcaggaccaagaagcagctcgccatggtgatgagatacggcgtaaatggagttggtaaaatattaaagaagatcaacaaggccatcgtctccaagaagaataaagacattgtgacagtggctaacgccgtgtttgttaagaatgcctctgaaattgaagtgccttttgttacaaggaacaaagatgtgttccagtgtgaggtccggaatgtgaactttgaggatccagcctctgcctgtgattccatcaatgcatgggttaaaaatgaaaccagggatatgattgacaatctgctgtccccagatcttattgatggtgtgctcaccagactggtcctcgtcaacgcagtgtatttcaagggtctgtggaaatcacggttccaacccgagaacacaaagaaacgcactttcgtggcagccgacgggaaatcctatcaagtgccaatgctggcccagctctccgtgttccggtgtgggtcgacaagtgcccccaatgatttatggtacaacttcattgaactgccctaccacggggaaagcatcagcatgctgattgcactgccgactgagagctccactccgctgtctgccatcatcccacacatcagcaccaagaccatagacagctggatgagcatcatggtgcccaagagggtgcaggtgatcctgcccaagttcacagctgtagcacaaacagatttgaaggagccgctgaaagttcttggcattactgacatgtttgattcatcaaaggcaaattttgcaaaaataacaaggtcagaaaacctccatgtttctcatatcttgcaaaaagcaaaaattgaagtcagtgaagatggaaccaaagcttcagcagcaacaactgcaattctcattgcaagatcatcgcctccctggtttatagtagacagaccttttctgtttttcatccgacataatcctacaggtgctgtgttattcatggggcagataaacaaaccctgaagagtatacaaaagaaaccatgcaaagcaacgactactttgctacgaagaaagactcctttcctgcatctttcatagttctgttaaatatttttgtacatcgcttctttttcaaaactagttcttaggaacagactcgatgcaagtgtttctgttctgggaggtattggagggaaaaaacaagca

SEQ ID NO: 27775 - DNA, 546 bp, Homo sapiens
  source 1..546: mol_type = unassigned DNA
gataaagcccccgccgccgcggcagccagcttgcgctgtggggctgcccgggctgcgcggcgtctgcaggcgccaccgctgcctctttccggctgtgaccctcctcgccgccgccgcttggctgcgtcctccgactccccgcgccgccgagaccaggctcccgctccggttgcggccgcaccgccctccgcggccgccccctggggatccagcgagcgcgggaccatttggatgttgctgccatacttttcagcggctgaaaaggtcgtccttggtggaaggaaccatgaactggcatctccccctcttcctcttggcctctgtgacgctgccttccatctgctcccacttcaatcctctgtctctcgaggaactaggctccaacacggggatccaggttttcaatcagattgtgaagtcgaggcctcatgacaacatcgtgatctctccccatgggattgcgtcggtcctggggatgcttcagctgggggcggacggcaggaccaagaagcagctcgccatggtgatgagatacggcgtaaatgg

SEQ ID NO: 27776 - DNA, 1539 bp, Homo sapiens
  source 1..1539: mol_type = unassigned DNA
agtgcaggtcgctttaagaaaggagtagctgtaatctgaagcctgctggacgctggattagaaggcagcaaaaaaagctctgtgctggctggagccccctcagtgtgcaggcttagagggactaggctgggtgtggagctgcagcgtatccacaggccccaggatgcaggccctggtgctactcctctgcattggagccctcctcgggcacagcagctgccagaaccctgccagccccccggaggagggctccccagaccccgacagcacaggggcgctggtggaggaggaggatcctttcttcaaagtccccgtgaacaagctggcagcggctgtctccaacttcggctatgacctgtaccgggtgcgatccagcacgagccccacgaccaacgtgctcctgtctcctctcagtgtggccacggccctctcggccctctcgctgggagcggagcagcgaacagaatccatcattcaccgggctctctactatgacttgatcagcagcccagacatccatggtacctataaggagctccttgacacggtcactgccccccagaagaacctcaagagtgcctcccggatcgtctttgagaagaagctgcgcataaaatccagctttgtggcacctctggaaaagtcatatgggaccaggcccagagtcctgacgggcaaccctcgcttggacctgcaagagatcaacaactgggtgcaggcgcagatgaaagggaagctcgccaggtccacaaaggaaattcccgatgagatcagcattctccttctcggtgtggcgcacttcaaggggcagtgggtaacaaagtttgactccagaaagacttccctcgaggatttctacttggatgaagagaggaccgtgagggtccccatgatgtcggaccctaaggctgttttacgctatggcttggattcagatctcagctgcaagattgcccagctgcccttgaccggaagcatgagtatcatcttcttcctgcccctgaaagtgacccagaatttgaccttgatagaggagagcctcacctccgagttcattcatgacatagaccgagaactgaagaccgtgcaggcggtcctcactgtccccaagctgaagctgagttatgaaggcgaagtcaccaagtccctgcaggagatgaagctgcaatccttgtttgattcaccagactttagcaagatcacaggcaaacccatcaagctgactcaggtggaacaccgggctggctttgagtggaacgaggatggggcgggaaccacccccagcccagggctgcagcctgcccacctcaccttcccgctggactatcaccttaaccagcctttcatcttcgtactgagggacacagacacaggggcccttctcttcattggcaagattctggaccccaggggcccctaatatcccagtttaatattccaataccctagaagaaaacccgagggacagcagattccacaggacacgaaggctgcccctgtaaggtttcaatgcatacaataaaagagctttatccctaa

SEQ ID NO: 27777 - DNA, 1907 bp, Homo sapiens
  source 1..1907: mol_type = unassigned DNA
agtttcccgggagagacgaaagcaggaacgagagcggagcggagcacagtccgccgagcacaagctccagcatcccgtcaggggttgcaggtgtgtgggaggtaagcgtgggtccttcttcggggcgtctgcactgccctggagaaaacgtcttccaataggaattacatcaagacacagctaaaagagtccgcgttgggttaggaaaccggtgcaaaacctctcgggtgaaagatttacatttttcgactttaagggcaaaaaagcaaaaggaagcttgactctgggtataaagggcgtggttagtgtttttggtttgagttgcaccagtaaaactgttctgggagatctgaagattgagaaaaatcctgctaattgaggacgaggtggatgttatctggtggatgttataggcttgaaactgttacaatatggctttccttggactcttctctttgctggttctgcaaagtatggctacaggggccactttccctgaggaagccattgctgacttgtcagtgaatatgtataatcgtcttagagccactggtgaagatgaaaatattctcttctctccattgagtattgctcttgcaatgggaatgatggaacttggggcccaaggatctacccagaaagaaatccgccactcaatgggatatgacagcctaaaaaatggtgaagaattttctttcttgaaggagttttcaaacatggtaactgctaaagagagccaatatgtgatgaaaattgccaattccttgtttgtgcaaaatggatttcatgtcaatgaggagtttttgcaaatgatgaaaaaatattttaatgcagcagtaaatcatgtggacttcagtcaaaatgtagccgtggccaactacatcaataagtgggtggagaataacacaaacaatctggtgaaagatttggtatccccaagggattttgatgctgccacttatctggccctcattaatgctgtctatttcaaggggaactggaagtcgcagtttaggcctgaaaatactagaaccttttctttcactaaagatgatgaaagtgaagtccaaattccaatgatgtatcagcaaggagaattttattatggggaatttagtgatggctccaatgaagctggtggtatctaccaagtcctagaaataccatatgaaggagatgaaataagcatgatgctggtgctgtccagacaggaagttcctcttgctactctggagccattagtcaaagcacagctggttgaagaatgggcaaactctgtgaagaagcaaaaagtagaagtatacctgcccaggttcacagtggaacaggaaattgatttaaaagatgttttgaaggctcttggaataactgaaattttcatcaaagatgcaaatttgacaggcctctctgataataaggagatttttctttccaaagcaattcacaagtccttcctagaggttaatgaagaaggctcagaagctgctgctgtctcaggaatgattgcaattagtaggatggctgtgctgtatcctcaagttattgtcgaccatccatttttctttcttatcagaaacaggagaactggtacaattctattcatgggacgagtcatgcatcctgaaacaatgaacacaagtggacatgatttcgaagaactttaagttactttatttgaataacaaggaaaacagtaactaagcacattatgtttgcaactggtatatatttaggatttgtgttttacagtatatcttaagataatatttaaaatagttccagataaaaacaatatatgtaaattataagtaacttgtcaaggaatgttatcagtattaagctaatggtcctgttatgtcattgtgtttgtgtgctgttgtttaaaataaaagtacctattgaacatg

SEQ ID NO: 27778 - DNA, 1890 bp, Homo sapiens
  source 1..1890: mol_type = unassigned DNA
gaaggataggctgagccggggctcccagcagagacgcctgggtggggcaggaggccgctccaggtgtgagccacagaggaggggagagggacccccacgggagtggaagtggcagagcagctgcagaagtgcagggagcggaaaggtaccagggcagctgctttccgctgcctccggtccgggcagctgcagaaacagcagggggaggagcaacagctgccaaattcgccaactagaggagggagaggcggagcttgggtccctgtagaagccagaggcgcagtctggactgtagtttcccgggagagacgaaagcaggaacgagagcggagcggagcacagtccgccgagcacaagctccagcatcccgtcaggggttgcaggtgtgtgggaggcttgaaactgttacaatatggctttccttggactcttctctttgctggttctgcaaagtatggctacaggggccactttccctgaggaagccattgctgacttgtcagtgaatatgtataatcgtcttagagccactggtgaagatgaaaatattctcttctctccattgagtattgctcttgcaatgggaatgatggaacttggggcccaaggatctacccagaaagaaatccgccactcaatgggatatgacagcctaaaaaatggtgaagaattttctttcttgaaggagttttcaaacatggtaactgctaaagagagccaatatgtgatgaaaattgccaattccttgtttgtgcaaaatggatttcatgtcaatgaggagtttttgcaaatgatgaaaaaatattttaatgcagcagtaaatcatgtggacttcagtcaaaatgtagccgtggccaactacatcaataagtgggtggagaataacacaaacaatctggtgaaagatttggtatccccaagggattttgatgctgccacttatctggccctcattaatgctgtctatttcaaggggaactggaagtcgcagtttaggcctgaaaatactagaaccttttctttcactaaagatgatgaaagtgaagtccaaattccaatgatgtatcagcaaggagaattttattatggggaatttagtgatggctccaatgaagctggtggtatctaccaagtcctagaaataccatatgaaggagatgaaataagcatgatgctggtgctgtccagacaggaagttcctcttgctactctggagccattagtcaaagcacagctggttgaagaatgggcaaactctgtgaagaagcaaaaagtagaagtatacctgcccaggttcacagtggaacaggaaattgatttaaaagatgttttgaaggctcttggaataactgaaattttcatcaaagatgcaaatttgacaggcctctctgataataaggagatttttctttccaaagcaattcacaagtccttcctagaggttaatgaagaaggctcagaagctgctgctgtctcaggaatgattgcaattagtaggatggctgtgctgtatcctcaagttattgtcgaccatccatttttctttcttatcagaaacaggagaactggtacaattctattcatgggacgagtcatgcatcctgaaacaatgaacacaagtggacatgatttcgaagaactttaagttactttatttgaataacaaggaaaacagtaactaagcacattatgtttgcaactggtatatatttaggatttgtgttttacagtatatcttaagataatatttaaaatagttccagataaaaacaatatatgtaaattataagtaacttgtcaaggaatgttatcagtattaagctaatggtcctgttatgtcattgtgtttgtgtgctgttgtttaaaataaaagtacctattgaacatgtg

SEQ ID NO: 27779 - DNA, 842 bp, Homo sapiens
  source 1..842: mol_type = unassigned DNA
tttcccgggagagacgaaagcaggaacgagagcggagcggagcacagtccgccgagcacaagctccagcatcccgtcaggggttgcaggcttgaaactgttacaatatggctttccttggactcttctctttgctggttctgcaaagtatggctacaggggccactttccctgaggaagccattgctgacttgtcagtgaatatgtataatcgtcttagagccactggtgaagatgaaaatattctcttctctccattgagtattgctcttgcaatgggaatgatggaacttggggcccaaggatctacccagaaagaaatccgccactcaatgggatatgacagcctaaaaaatggtgaagaattttctttcttgaaggagttttcaaacatggtaactgctaaagagagccaatatgtgatgaaaattgccaattccttgtttgtgcaaaatggatttcatgtcaatgaggagtttttgcaaatgatgaaaaaatattttaatgcagcagtaaatcatgtggacttcagtcaaaatgtagccgtggccaactacatcaataagtgggtggagaataacacaaacaatctggtgaaagatttggtatccccaagggattttgatgctgccacttatctggccctcattaatgctgtctatttcaaggggaactggaagtcgcagtttaggcctgaaaatactagaaccttttctttcactaaagatgatgaaagtgaagtccaaattccaatgatgtatcagcaaggagaattttattatggggaatttagtgatggctccaatgaagctggtggtatctaccaagtcctagaaataccat

SEQ ID NO: 27780 - DNA, 582 bp, Homo sapiens
  source 1..582: mol_type = unassigned DNA
gaggggcctgtggtggggatcctggggctgtcgggctgagtatgccgtgtgggtggagaggaagcctcggggaaatcgcccaggcttgaaactgttacaatatggctttccttggactcttctctttgctggttctgcaaagtatggctacaggggccactttccctgaggaagccattgctgacttgtcagtgaatatgtataatcgtcttagagccactggtgaagatgaaaatattctcttctctccattgagtattgctcttgcaatgggaatgatggaacttggggcccaaggatctacccagaaagaaatccgccactcaatgggatatgacagcctaaaaaatggtgaagaattttctttcttgaaggagttttcaaacatggtaactgctaaagagagccaatatgtgatgaaaattgccaattccttgtttgtgcaaaatggatttcatgtcaatgaggagtttttgcaaatgatgaaaaaatattttaatgcagcagtaaatcatgtggacttcagtcaaaatgtagccgtggccaactacatcaataagtgggtggagaataacacaaaca

SEQ ID NO: 27781 - DNA, 1406 bp, Homo sapiens
  source 1..1406: mol_type = unassigned DNA
cgcggctcggctccggggcggggctggtgggccagaggccagacggagaggccccgccgaggtgagcgaggctccaaccggtcactggtgggtcctggcactggcgggtcgcaacgctgtgggcgttccaggaggtggtcgtggcgaacctggcagctgcgggcatcatggtgggaggcttgaagaggaaacactctgatttggaagaggaggaggagaggtgggagtggagtccagcaggccttcagagctaccagcaagccctgctccgcatctccctagacaaagtccagcgcagcctgggcccccgagcacccagcctccgcaggcatgtcctcatccataacaccctccaacagctgcaggctgcacttcgcctggctcccgcccctgccctgccccccgagcccctcttcctgggcgaggaggatttctccctgtcagccaccattggctctatcctcagggagctggacacctccatggatgggactgagccccctcagaatccagtgactccccttggcctccagaatgaagtgccaccccagcctgatccagtcttcttagaagctctgagctcccggtacttgggggactctggcctggatgacttctttctggacattgacacatctgcggtagaaaaggagcctgcacgggccccaccagagcctcctcacaacctcttctgtgccccaggttcttgggagtggaatgaactggatcacatcatggaaatcattctggggtcctaaaactgtgatagaggggatcgatccttcctcatgtcatcttcggtggcctggatccctgaatgcaactctgggtgtgtgtttttgtgggggctcgaagcagtgactatggcctcctttgttcccatttcagggttccacaaactgtcttgcatgtgtgtgtgtgtctggttaccccgaccttctgtgaaggtgggtcttcctgaattaatttatctattccaaatgccttaacgagactctgtttctgggagtctgattttccacttacacatttcttccacctttcctgctagttcccactcccctgtgaccactggggcctcagggaagataaagaaagctgggcctgtcgaaggatgacagggatgtgctgccaggttgctatagaaacccaggctctgcctcttgcaccttgagggggtgggaggggctggtgtcctccctccaggctgaaccccacttcctcggcaggaccccagtctcagcagcctcctgatttcataaccaggccggaccacgtgcaatagggtggaaaccaaactgctccatgccgggttatttaaaagaaaggcagagtttgtggtggcttttttttttttttttggattgtttgtaatttttttaaataaaagtattttggaaggaggg

SEQ ID NO: 27782 - DNA, 1523 bp, Homo sapiens
  source 1..1523: mol_type = unassigned DNA
tttacagatgaggaaactgaggccctgagaattgactcattcagatcacttcccatgatcacgcagctgagcagtttccaatacagaattcagatttggggttccctacttccaatccaggtctctgtgctccacacttgtctttcgtgctccatgtttgaagaaattaatattgtggaagaacagttttaaggcttagaggaacttgagttaggatccgtacttggcagatgaggaaattgattctcatggatgtaaattcactgtttgaggccacaacagggcatcatggtgggaggcttgaagaggaaacactctgatttggaagaggaggaggagaggtgggagtggagtccagcaggccttcagagctaccagcaagccctgctccgcatctccctagacaaagtccagcgcagcctgggcccccgagcacccagcctccgcaggcatgtcctcatccataacaccctccaacagctgcaggctgcacttcgcctggctcccgcccctgccctgccccccgagcccctcttcctgggcgaggaggatttctccctgtcagccaccattggctctatcctcagggagctggacacctccatggatgggactgagccccctcagaatccagtgactccccttggcctccagaatgaagtgccaccccagcctgatccagtcttcttagaagctctgagctcccggtacttgggggactctggcctggatgacttctttctggacattgacacatctgcggtagaaaaggagcctgcacgggccccaccagagcctcctcacaacctcttctgtgccccaggttcttgggagtggaatgaactggatcacatcatggaaatcattctggggtcctaaaactgtgatagaggggatcgatccttcctcatgtcatcttcggtggcctggatccctgaatgcaactctgggtgtgtgtttttgtgggggctcgaagcagtgactatggcctcctttgttcccatttcagggttccacaaactgtcttgcatgtgtgtgtgtgtctggttaccccgaccttctgtgaaggtgggtcttcctgaattaatttatctattccaaatgccttaacgagactctgtttctgggagtctgattttccacttacacatttcttccacctttcctgctagttcccactcccctgtgaccactggggcctcagggaagataaagaaagctgggcctgtcgaaggatgacagggatgtgctgccaggttgctatagaaacccaggctctgcctcttgcaccttgagggggtgggaggggctggtgtcctccctccaggctgaaccccacttcctcggcaggaccccagtctcagcagcctcctgatttcataaccaggccggaccacgtgcaatagggtggaaaccaaactgctccatgccgggttatttaaaagaaaggcagagtttgtggtggcttttttttttttttttggattgtttgtaatttttttaaataaaagtattttggaagg

SEQ ID NO: 27783 - DNA, 615 bp, Homo sapiens
  source 1..615: mol_type = unassigned DNA
tccccagggaccacatccagcttttcttcgctcccaagaaaccagcagggaaggctcagtataaatagcagccaccgctccctggcaggcagggacccgcagctcagctacagcacagatcagcaccatgaagcttctcacgggcctggttttctgctccttggtcctgggtgtcagcagccgaagcttcttttcgttccttggcgaggcttttgatggggctcgggacatgtggagagcctactctgacatgagagaagccaattacatcggctcagacaaatacttccatgctcgggggaactatgatgctgccaaaaggggacctgggggtgcctgggctgcagaagtgatcaccgatgccagagagaatatccagagattctttggccatggtgcggaggactcgctggctgatcaggctgccaatgaatggggcaggagtggcaaagaccccaatcacttccgacctgctggcctgcctgagaaatactgagcttcctcttcactctgctctcaggagatctggctgtgaggccctcagggcagggatacaaagcggggagagggtacacaatgggtatctaataaatacttaagaggtggaatttgtgg

SEQ ID NO: 27784 - DNA, 675 bp, Homo sapiens
  source 1..675: mol_type = unassigned DNA
agggacccgcagctcagctacagcacagatcaggtgaggagcacaccaaggagtgatttttaaaacttactctgttttctctttcccaacaagattatcatttcctttaaaaaaaatagttatcctggggcatacagccataccattctgaaggtgtcttatctcctctgatctagagagcaccatgaagcttctcacgggcctggttttctgctccttggtcctgggtgtcagcagccgaagcttcttttcgttccttggcgaggcttttgatggggctcgggacatgtggagagcctactctgacatgagagaagccaattacatcggctcagacaaatacttccatgctcgggggaactatgatgctgccaaaaggggacctgggggtgcctgggctgcagaagtgatcaccgatgccagagagaatatccagagattctttggccatggtgcggaggactcgctggctgatcaggctgccaatgaatggggcaggagtggcaaagaccccaatcacttccgacctgctggcctgcctgagaaatactgagcttcctcttcactctgctctcaggagatctggctgtgaggccctcagggcagggatacaaagcggggagagggtacacaatgggtatctaataaatacttaagaggtggaatttgtggaaa

SEQ ID NO: 27785 - DNA, 583 bp, Homo sapiens
  source 1..583: mol_type = unassigned DNA
aggcagggacccgcagctcagctacagcacagatcagttatcctggggcatacagccataccattctgaaggtgtcttatctcctctgatctagagagcaccatgaagcttctcacgggcctggttttctgctccttggtcctgggtgtcagcagccgaagcttcttttcgttccttggcgaggcttttgatggggctcgggacatgtggagagcctactctgacatgagagaagccaattacatcggctcagacaaatacttccatgctcgggggaactatgatgctgccaaaaggggacctgggggtgcctgggctgcagaagtgatcaccgatgccagagagaatatccagagattctttggccatggtgcggaggactcgctggctgatcaggctgccaatgaatggggcaggagtggcaaagaccccaatcacttccgacctgctggcctgcctgagaaatactgagcttcctcttcactctgctctcaggagatctggctgtgaggccctcagggcagggatacaaagcggggagagggtacacaatgggtatctaataaatacttaagaggtggaa

SEQ ID NO: 27786 - DNA, 563 bp, Homo sapiens
  source 1..563: mol_type = unassigned DNA
tggcagacagggacccgcagctcagctacagcacagatcagcaccatgaagcttctcacgggcctggttttctgctccttggtcctgagtgtcagcagccgaagcttcttttcgttccttggcgaggcttttgatggggctcgggacatgtggagagcctactctgacatgagagaagccaattacatcggctcagacaaatacttccatgctcgggggaactatgatgctgccaaaaggggacctgggggtgcctgggctgcagaagtgatcagcaatgccagagagaatatccagagactcacaggccgtggtgcggaggactcgctggccgatcaggctgccaataaatggggcaggagtggcagagaccccaatcacttccgacctgctggcctgcctgagaaatactgagcttcctcttcactctgctctcaggagacctggctatgaggccctcggggcagggatacaaagttagtgaggtctatgtccagagaagctgagatatggcatataataggcatctaataaatgcttaagaggtggaatttgttgaaaca

SEQ ID NO: 27787 - DNA, 1022 bp, Homo sapiens
  source 1..1022: mol_type = unassigned DNA
tggcagacagggacccgcagctcagctacagcacagatcagcaccatgaagcttctcacgggcctggttttctgctccttggtcctgagtgtcagcagccgaagcttcttttcgttccttggcgaggcttttgatggggctcgggacatgtggagagcctactctgacatgagagaagccaattacatcggctcagacaaatacttccatgctcgggggaactatgatgctgccaaaaggggacctgggggtgcctgggctgcagaagtgatcagtttattttcagctgaactgtagagagtgaaggaagaagccttttttcttcactcctacatgacccaggcattgatccaggcaatgaagattcagtgtaaataaccaccactaacaagaccatggcctttggaacctgtgctaagaggcatggatgagctccctcagcatgtggatggagactgaagagaggtctgaaggctcagtgtggtgtctccattctctaagaagtttggaggagaagctggatacagcaaaacagactgagaaggagcagctgttgggaaaggaggaaaactaggaaagcatggtgttccagaatccctgatggagatattgattagtagtatcagattctgcttagcagttgaggagttcacctttggcttaagcaacatggagtcattgactatctcgtgaaggtggttgcaggagaaggtctggagaactaaatggagcagtgataagagagaatgggagatggtatgataggactcctggacaccccagacatcaatcaaaacaccacagacaagaaggtgtggatacaaaaactagcagttagaagaaataatagaaaatgaactccaactacttctgaaaaaaaagtaatgagggcaattaatacattgaagaaagcctcaataagtacaacagtgtagtactgacttatatatagaaaaaacctgatcagtggaaccaaatcctcagaattagacataagtgcatatgagaattttgtatgtgat

SEQ ID NO: 27788 - DNA, 687 bp, Homo sapiens
  source 1..687: mol_type = unassigned DNA
agggacccgcagctcagctacagcacagatcaggtgaggagcacaccaaggagtgatttttaaaacttactctgttttctctttcccaacaagattatcatttcctttaaaaaaaatagttatcctggggcatacagccataccattctgaaggtgtcttatctcctctgatctagagagcaccatgaagcttctcacgggcctggttttctgctccttggtcctgagtgtcagcagccgaagcttcttttcgttccttggcgaggcttttgatggggctcgggacatgtggagagcctactctgacatgagagaagccaattacatcggctcagacaaatacttccatgctcgggggaactatgatgctgccaaaaggggacctgggggtgcctgggctgcagaagtgatcagcaatgccagagagaatatccagagactcacaggccgtggtgcggaggactcgctggccgatcaggctgccaataaatggggcaggagtggcagagaccccaatcacttccgacctgctggcctgcctgagaaatactgagcttcctcttcactctgctctcaggagacctggctatgaggccctcggggcagggatacaaagttagtgaggtctatgtccagagaagctgagatatggcatataataggcatctaataaatgcttaagaggtg

SEQ ID NO: 27789 - DNA, 610 bp, Homo sapiens
  source 1..610: mol_type = unassigned DNA
agacagggacccgcagctcagctacagcacagatcagttatcctggggcatacagccataccattctgaaggtgtcttatctcctctgatctagagagcaccatgaagcttctcacgggcctggttttctgctccttggtcctgagtgtcagcagccgaagcttcttttcgttccttggcgaggcttttgatggggctcgggacatgtggagagcctactctgacatgagagaagccaattacatcggctcagacaaatacttccatgctcgggggaactatgatgctgccaaaaggggacctgggggtgcctgggctgcagaagtgatcagcaatgccagagagaatatccagagactcacaggccgtggtgcggaggactcgctggccgatcaggctgccaataaatggggcaggagtggcagagaccccaatcacttccgacctgctggcctgcctgagaaatactgagcttcctcttcactctgctctcaggagacctggctatgaggccctcggggcagggatacaaagttagtgaggtctatgtccagagaagctgagatatggcatataataggcatctaataaatgcttaagaggtggaatt

SEQ ID NO: 27790 - DNA, 727 bp, Homo sapiens
  source 1..727: mol_type = unassigned DNA
aatttttaaaatacccaaagaattgagcaaaaaggactttggcaaggcaggttgttggatttaaaaccgttctcccattaatgccaaagccagcagaggtaccaactatagctccacggccagaagataccagcagctctgcctttactgaaatttcatctggagaaaggtccacagcacaatgaggcttttcacaggcattgttttctgctccttggtcatgggagtcaccagtgaaagctggcgttcgtttttcaaggaggctctccaaggggttggggacatgggcagagcctattgggacataatgatatccaatcaccaaaattcaaacagatatctctatgctcggggaaactatgatgctgcccaaagaggacctgggggtgtctgggctgctaaactcatcagccgttccagggtctatcttcagggattaatagactgctatttatttggaaacagcagcactgtattggaggactcgaagtccaacgagaaagctgaggaatggggccggagtggcaaagaccccgaccgcttcagacctgacggcctgcctaagaaatactgagcttcctgctcctctgctctcagggaaactgggctgtgagccacacacttctccccccagacagggacacagggtcactgagctttgtgtccccaggaactggtatagggcacctagaggtgttcaataaatgtttgtcaaattgaatttgtt

SEQ ID NO: 27791 - DNA, 3229 bp, Homo sapiens
  source 1..3229: mol_type = unassigned DNA
ggggaacaggaaagaaaagctaaacctgcaacaaagtgtcctgtgcccagaacgcggttaggaagtgtgtgcatacgtctgaaccctaaatggttctcagttctgtaaacttctcctcccactgggtggagtagggcctttaagagcagctggaatgcagttcccctgatcagcgtagccagttgttgcctgtctgaacctctgccagtcctggagactggtgccctgagctccaaccagcgggcctcatcctacaccctcaccaccgcaacttctcacccgagcaagaagcagctcccagagagaaagaacgttcccacctgcctagccatgggagaggacgctgcacaggccgaaaagttccagcaccctgggtctgacatgcggcaggaaaagccctcgagccccagcccgatgccttcctccacaccaagccccagcctgaacctagggaacacagaggaggccatccgggacaactcacaggtgaacgcagtcacggtgctcacgctcctggacaagctggtgaacatgctagacgctgtgcaggagaaccagcacaagatggagcagcgacagatcagtttggagggctccgtgaagggcatccagaatgacctcaccaagctctccaagtaccaggcctccaccagcaacacggtgagcaagctgctggagaagtcccgcaaggtcagcgcccacacgcgcgcggtcaaagagcgcatggataggcagtgcgcacaggtgaagcggctggagaacaaccacgcccagctcctccgacgcaaccatttcaaagtgctcatcttccaggaggaaaatgagatccctgccagcgtgtttgtgaaacagcccgtttccggtgccgtggaagggaaggaggagcttccggatgaaaacaaatccctggaggaaaccctgcacaccgtggacctctcctcagatgatgatttgccccacgatgaggaggccctggaagacagtgccgaggaaaaggtggaagaaagtagggcagagaaaataaaaagatccagcctgaagaaagtggatagcctcaagaaagcattttctcgccagaacatcgagaaaaagatgaacaagctggggacaaagatcgtatctgtagagaggagagagaagattaagaaatctctcacgtcaaatcaccagaaaatatcctcaggaaaaagctcccccttcaaggtttctcccctcactttcgggcggaagaaagtccgagagggagaaagccatgcagaaaatgagaccaagtcagaagacctgcctagcagtgagcagatgccaaatgaccaggaagaggagtcctttgcagagggtcattccgaagcgtccctcgccagcgctctggtggaaggggaaattgcagaggaggctgctgagaaggcgacctccagggggagtaactcggggatggacagcaacatcgacttgactattgtggaagatgaagaggaggagtcagtggccctggaacaggcacagaaggtacgctatgagggtagctacgcgctaacatccgaggaggcggagcgctccgatggggaccccgtgcagcccgccgtgctccaggtgcaccagacctcctgagcttagagccaccgtgccatcctgtgctgtgctcaagcgggcagccagggctgaagaacaaactcttgcacatctccagcacgactcacccactcctgcgttcctgtccaggcagtaatcattgaccatatagtcatagtaagacacacgagaccaggctttaccatgaaagcgacctgtcacggactccacttttaatttgctcttaggttctatctctgtagaatgtctccaagattgaagaagaaactgagcagttgaaaaatgctaatctctttgacttagtcagaaaaaaacagaggataattaagatactagtcatgaaaagtgattcattcttttttgtcattccataagcttgctgaatagtgtaccggtaatatattgtatttccaccgtactctgtgaatctaattattattctttaagtgttgatatataatatacataaatatgtaagctaaacatataactatatgttttaagaagaaaacatctacgaaaggtaaaaagagatgatcagttggttgtttacttgctagaaaccattgttttattgcaaacgaaggaaaaatgaagagattataaaagtcagctaatgaagtaagatacgtagtaaagtcaggactattcaaaaagtaagaaagaaaatttggaaaatgagagaaacaggaaacaaagaatgccgaaaagaatgaaaacagagaaaaaatgtatgtgcttgaaagtaaaatacttacaatagtagcttaactatttcactctttaaataaaaatactaaagaagttcgtatatcctggaataacatgtcatcttcaaaatatttttattttctaatatttttaataataaacattttatagtgttaaagctgtatttttcttaataaataaaggacattacaaatatttctttaaggaagttcaaaaggatgttgtcttgttaacactggaacgaatataaatcttcaaaatacaattaatatatactgttttgtggaaacttagctcatactattctttaatgctcttcaaatttaaactaacccttacattccatgtgatgtgatgtaggcttataagatgctaaaatctataggttttggaagtgaaagattctattttttctttttttgtacataatgggaatttcattccagattatattttatttacatattaatttcacagaatattaatatttcttaacttcttaaagcatgctagcgttttatgtatatgtacacatatattcagacagggtaattttatctgctgcctaacattgtactaaaatattgctttatctgtttttaattacaaaatgctaatgatttcttaaattatagtttaaagacaattggcccaggaagcaaatcccctgcctttagtatgaaccactataagtaaccttacaaatagagttaatccaagacaatattaacaaactgtgctttgtctttaataaaagggataggattaacaaacatattgatggcataacctattcagctatgtccttatttttgcaataatgtaacctcaaatattggattgttgaaccaacaatggctgtgttaaagaagattaaataaaccgaaaaataaaaagcatgaaacaa

SEQ ID NO: 27792 - DNA, 2855 bp, Homo sapiens
  source 1..2855: mol_type = unassigned DNA
gtggcgacgcagccgcggtctgagagaccggttcacgtgcaggcagcggcggatcatattccttcatctaccatggctcagccgggaactctgaacctcaataacgaggttgtgaagatgagaaaagaagtgaagagaattcgagttttagttatccgaaaacttgtcaggagtgttggccgactgaagtcaaaaaagggtactgaagatgcactgttaaaaaaccaaagacgggcgcaaagattgcttgaagaaatccatgccatgaaggaattgaaacctgacatagtaactaaatctgctcttggtgatgatatcaactttgaaaaaatcttcaaaaagccagattctactgcaactgaaagagcaattgccagactagcagtacatcctcttctgaagaaaaagatagatgtgctaaaagctgctgtacaagcctttaaagaagcaagacaaaatgttgctgaagttgagtcatcaaagaatgcttcagaggacaatcattctgagaatactttgtattcaaatgataatggaagtaatttacagcgtgaagcaactgtcatcagtgagcaaaaagtcaaagaaaccaaaatattggcgaagaaaccaatacataattcaaaggaaaaaatagcaaagatggaacatggacctaaagcagtgactattgcaaattctccatcaaagccttcagaaaaggattctgtagtttcccttgagtcccagaagacacctgctgacccaaaactgaaaactctaagtcaaaccaaaaaaaacaaaggatctgatagctcactctctggtaacagtgatggcggagaagaattttgtgaagaggagaaggaatattttgatgatagcacagaagaaaggttttacaagcagtcttccatgtctgaagatagtgatagcggtgacgacttcttcattgggaaagtcagacggacacgaaagaaggaaagtagttgtcattcttcagttaaggaacaaaaaccactagaaaaagtgtttcttaaagaagatacaggtgaaactcatggggatacaagaaatgacaaaatcaagccaagtacagaaaccagaaagttagaatcagtgtttttccactctttatctggatctaaaagctctagaagaaatttcaaagaacaggctccaaaaacaagatccctagattttccacagaatgagcctcagatcaagaatcagtttaataagaagctatcaggaagacttgaaaatacaaaacagcaattgcagctgcctcttcatccttcatgggaagcaagcagaaggcgaaaagaacagcaatctaatattgctgtgtttcaggggaaaaaaattacgtttgatgattgattagtgcctctttctgcaaacttttccatctaaaaaaaaaaatgttttttttaagacaggatctcattctgttgcccagactagagtacaatattgcaatcacagctcactgcagcctcaaactcctgggctcaagtgatcctcccacctctgcctcccaaagggctgggactgcaggtgcatgcactaccatgcccagctttctcaccccaggctctgcagctattacttaaactcgtatttgaataagtctcttggggagaattatagaatgtttgtttttgtatttttttttaaagtaaattcaacttacgcttatataagcctttcacaaatccaatatgtacttaaattgatttttaataatatccctcagactgtttcccttatgaagtaatttggggattttagtgatctcatattttctctttagtgcttatcatgaaatgtgcttcactggttcagctctgttgtttccttaaacataaatgtcaatatatatttaaaataataatggaaacataggaaatcagctatttaaaccagatcacccttgttaaaaatcattcttgttagcaaactaaaatagtaacttttattatggatgtacagataaatattaattttattatagttttaagtacttgtgatcatgtactttttgattctaaaatagttgtctaggacaattttgggattcttaattatattttagttaagaaaattgtttaaatatagcaatacaaccaataatttgttttatgtttcactgcatataaatatttccattaaatcaagaatgtatattatctagtttttactatacttattttaaaatttttgaggaatcatagattctaatttttaagaacaaattctgaaggtggtaggattaaaagaatatttccactgatggctaagcaaagaagttgtaagatgactcactgaggaagggactgctttatacatcacagtactgctatttaaaaggaaaacagaaatttttaaatcccttcaaatgtttcacttttgctatgctgggaaaaattttgaagttcttggtaaactgaataatgctaatccatgtttcctgcacattagttcctttaatggcagggaaggccatctggttaacctgtattcacaaactctcaagagtttctacttatttcaggagcttaagaatttagataactcagccgggcgtggtgactcatgcctataatcccagcactttgggaggctgaggcgggtagatcgctagaggcaaggagttcaaaaccagcctgggcaacatggtgaaaccctgtctctactaaaaatacagaaaattatccaggcgtggtggccggcatctgtaattccagctactcagaaggctgaggcataagaattgcttgaacctgggaggtggaggttgcagtgagccaagattgcaccactgcactccagcctgggtgacagagtatgactgtctcaaaaaaaaaaaaaaa

SEQ ID NO: 27793 - DNA, 2401 bp, Homo sapiens
  source 1..2401: mol_type = unassigned DNA
ttttttataaggccgagcgcgcggcctggcgcagcatacgccgagccggtctttgagcgctaacgtctttctgtctccccgcggtggtgatgacggtgaaaactgaggctgctaagggcaccctcacttactccaggatgaggggcatggtggcaattctcatcgctttcatgaagcagaggaggatgggtctgaacgactttattcagaagattgccaataactcctatgcatgcaaacaccctgaagttcagtccatcttgaagatctcccaacctcaggagcctgagcttatgaatgccaacccttctcctccaccaagtccttctcagcaaatcaaccttggcccgtcgtccaatcctcatgctaaaccatctgactttcacttcttgaaagtgatcggaaagggcagttttggaaaggttcttctagcaagacacaaggcagaagaagtgttctatgcagtcaaagttttacagaagaaagcaatcctgaaaaagaaagaggagaagcatattatgtcggagcggaatgttctgttgaagaatgtgaagcaccctttcctggtgggccttcacttctctttccagactgctgacaaattgtactttgtcctagactacattaatggtggagagttgttctaccatctccagagggaacgctgcttcctggaaccacgggctcgtttctatgctgctgaaatagccagtgccttgggctacctgcattcactgaacatcgtttatagagacttaaaaccagagaatattttgctagattcacagggacacattgtccttactgacttcggactctgcaaggagaacattgaacacaacagcacaacatccaccttctgtggcacgccggagtatctcgcacctgaggtgcttcataagcagccttatgacaggactgtggactggtggtgcctgggagctgtcttgtatgagatgctgtatggcctgccgcctttttatagccgaaacacagctgaaatgtacgacaacattctgaacaagcctctccagctgaaaccaaatattacaaattccgcaagacacctcctggagggcctcctgcagaaggacaggacaaagcggctcggggccaaggatgacttcatggagattaagagtcatgtcttcttctccttaattaactgggatgatctcattaataagaagattactcccccttttaacccaaatgtgagtgggcccaacgacctacggcactttgaccccgagtttaccgaagagcctgtccccaactccattggcaagtcccctgacagcgtcctcgtcacagccagcgtcaaggaagctgccgaggctttcctaggcttttcctatgcgcctcccacggactctttcctctgaaccctgttagggcttggttttaaaggattttatgtgtgtttccgaatgttttagttagccttttggtggagccgccagctgacaggacatcttacaagagaatttgcacatctctggaagcttagcaatcttattgcacactgttcgctggaagctttttgaagagcacattctcctcagtgagctcatgaggttttcatttttattcttccttccaacgtggtgctatctctgaaacgagcgttagagtgccgccttagacggaggcaggagtttcgttagaaagcggacgctgttctaaaaaaggtctcctgcagatctgtctgggctgtgatgacgaatattatgaaatgtgccttttctgaagagattgtgttagctccaaagcttttcctatcgcagtgtttcagttctttattttcccttgtggatatgctgtgtgaaccgtcgtgtgagtgtggtatgcctgatcacagatggattttgttataagcatcaatgtgacacttgcaggacactacaacgtgggacattgtttgtttcttccatatttggaagataaatttatgtgtagacttttttgtaagatacggttaataactaaaatttattgaaatggtcttgcaatgactcgtattcagatgcttaaagaaagcattgctgctacaaatatttctatttttagaaagggtttttatggaccaatgccccagttgtcagtcagagccgttggtgtttttcattgtttaaaatgtcacctgtaaaatgggcattatttatgtttttttttttgcattcctgataattgtatgtattgtataaagaacgtctgtacattgggttataacactagtatatttaaacttacaggcttatttgtaatgtaaaccaccattttaatgtactgtaattaacatggttataatacgtacaatccttccctcatcccatcacacaactttttttgtgtgtgataaactgattttggtttgcaataaaaccttgaaaaatattta

SEQ ID NO: 27794 - DNA, 2414 bp, Homo sapiens
  source 1..2414: mol_type = unassigned DNA
cagcatacgccgagccggtctttgagcgctaacgtctttctgtctccccgcggtggtgatgacggtgaaaactgaggctgctaagggcaccctcacttactccaggatgaggggcatggtggcaattctcatcggtgagtgcaggaatcttgcgggacttctgctccaggagacgcaaagtggaaattttttgaaagtcccggatcagattagtgtgtgtggcgccggacgttatgaagccgtctaaacgtttctttatttctcctccttcatccacagctttcatgaagcagaggaggatgggtctgaacgactttattcagaagattgccaataactcctatgcatgcaaacaccctgaagttcagtccatcttgaagatctcccaacctcaggagcctgagcttatgaatgccaacccttctcctccaccaagtccttctcagcaaatcaaccttggcccgtcgtccaatcctcatgctaaaccatctgactttcacttcttgaaagtgatcggaaagggcagttttggaaaggttcttctagcaagacacaaggcagaagaagtgttctatgcagtcaaagttttacagaagaaagcaatcctgaaaaagaaagaggagaagcatattatgtcggagcggaatgttctgttgaagaatgtgaagcaccctttcctggtgggccttcacttctctttccagactgctgacaaattgtactttgtcctagactacattaatggtggagagttgttctaccatctccagagggaacgctgcttcctggaaccacgggctcgtttctatgctgctgaaatagccagtgccttgggctacctgcattcactgaacatcgtttatagagacttaaaaccagagaatattttgctagattcacagggacacattgtccttactgacttcggactctgcaaggagaacattgaacacaacagcacaacatccaccttctgtggcacgccggagtatctcgcacctgaggtgcttcataagcagccttatgacaggactgtggactggtggtgcctgggagctgtcttgtatgagatgctgtatggcctgccgcctttttatagccgaaacacagctgaaatgtacgacaacattctgaacaagcctctccagctgaaaccaaatattacaaattccgcaagacacctcctggagggcctcctgcagaaggacaggacaaagcggctcggggccaaggatgacttcatggagattaagagtcatgtcttcttctccttaattaactgggatgatctcattaataagaagattactcccccttttaacccaaatgtgagtgggcccaacgacctacggcactttgaccccgagtttaccgaagagcctgtccccaactccattggcaagtcccctgacagcgtcctcgtcacagccagcgtcaaggaagctgccgaggctttcctaggcttttcctatgcgcctcccacggactctttcctctgaaccctgttagggcttggttttaaaggattttatgtgtgtttccgaatgttttagttagccttttggtggagccgccagctgacaggacatcttacaagagaatttgcacatctctggaagcttagcaatcttattgcacactgttcgctggaagctttttgaagagcacattctcctcagtgagctcatgaggttttcatttttattcttccttccaacgtggtgctatctctgaaacgagcgttagagtgccgccttagacggaggcaggagtttcgttagaaagcggacgctgttctaaaaaaggtctcctgcagatctgtctgggctgtgatgacgaatattatgaaatgtgccttttctgaagagattgtgttagctccaaagcttttcctatcgcagtgtttcagttctttattttcccttgtggatatgctgtgtgaaccgtcgtgtgagtgtggtatgcctgatcacagatggattttgttataagcatcaatgtgacacttgcaggacactacaacgtgggacattgtttgtttcttccatatttggaagataaatttatgtgtagacttttttgtaagatacggttaataactaaaatttattgaaatggtcttgcaatgactcgtattcagatgcttaaagaaagcattgctgctacaaatatttctatttttagaaagggtttttatggaccaatgccccagttgtcagtcagagccgttggtgtttttcattgtttaaaatgtcacctgtaaaatgggcattatttatgtttttttttttgcattcctgataattgtatgtattgtataaagaacgtctgtacattgggttataacactagtatatttaaacttacaggcttatttgtaatgtaaaccaccattttaatgtactgtaattaac

SEQ ID NO: 27795 - DNA, 3201 bp, Homo sapiens
  source 1..3201: mol_type = unassigned DNA
agatattcatgaaccgttgcttcttccagcctcgccttctcgctccctctgcctttctggcgctgttctccctccctccctctggcttctgctctttcttactccttctctcagctgcttaactacagctcccactggaacttgcacaatcaaaaacaactctcctctctcaagccgcctccaggagcgcatcacctggagaagagcgactcgctccccgcgccggccgcggaagagcagccaggtagctgggggcggggaggcgtacccttctcccgctcggtaagagccacagcatctccccggagattggccgtatcccaccgtccggcccccagggtcctgcagcggtgatgcatatgtttcggagcaatgatggaaggagaaaagccgctgtcggtggcaactgaaagtggggagaggttgctgcagtagctggtgctgcagaatgcgcgagtgaagaactgagccccgctagattctccatcccgctcagtcttcattaactgtctgcaggaggtaaaccggggaaacagatatgcactaaccaggcgggtgccaacctggatctataactgtgaattccccacggtggaaaatggtaaacaaagacatgaatggattcccagtcaagaaatgctcagccttccaattttttaagaagcgggtacgaaggtggatcaagagcccaatggtcagtgtggacaagcatcagagtcccagcctgaagtacaccggctcctccatggtgcacatccctccaggggagccagacttcgagtcttccttgtgtcaaacatgcctgggtgaacatgctttccaaagaggggttctccctcaggagaacgagtcatgttcatgggaaactcaatctgggtgtgaagtgagagagccatgtaatcatgccaacatcctgaccaagcccgatccaagaaccttctggactaatgatgatccagctttcatgaagcagaggaggatgggtctgaacgactttattcagaagattgccaataactcctatgcatgcaaacaccctgaagttcagtccatcttgaagatctcccaacctcaggagcctgagcttatgaatgccaacccttctcctccaccaagtccttctcagcaaatcaaccttggcccgtcgtccaatcctcatgctaaaccatctgactttcacttcttgaaagtgatcggaaagggcagttttggaaaggttcttctagcaagacacaaggcagaagaagtgttctatgcagtcaaagttttacagaagaaagcaatcctgaaaaagaaagaggagaagcatattatgtcggagcggaatgttctgttgaagaatgtgaagcaccctttcctggtgggccttcacttctctttccagactgctgacaaattgtactttgtcctagactacattaatggtggagagttgttctaccatctccagagggaacgctgcttcctggaaccacgggctcgtttctatgctgctgaaatagccagtgccttgggctacctgcattcactgaacatcgtttatagagacttaaaaccagagaatattttgctagattcacagggacacattgtccttactgacttcggactctgcaaggagaacattgaacacaacagcacaacatccaccttctgtggcacgccggagtatctcgcacctgaggtgcttcataagcagccttatgacaggactgtggactggtggtgcctgggagctgtcttgtatgagatgctgtatggcctgccgcctttttatagccgaaacacagctgaaatgtacgacaacattctgaacaagcctctccagctgaaaccaaatattacaaattccgcaagacacctcctggagggcctcctgcagaaggacaggacaaagcggctcggggccaaggatgacttcatggagattaagagtcatgtcttcttctccttaattaactgggatgatctcattaataagaagattactcccccttttaacccaaatgtgagtgggcccaacgacctacggcactttgaccccgagtttaccgaagagcctgtccccaactccattggcaagtcccctgacagcgtcctcgtcacagccagcgtcaaggaagctgccgaggctttcctaggcttttcctatgcgcctcccacggactctttcctctgaaccctgttagggcttggttttaaaggattttatgtgtgtttccgaatgttttagttagccttttggtggagccgccagctgacaggacatcttacaagagaatttgcacatctctggaagcttagcaatcttattgcacactgttcgctggaagctttttgaagagcacattctcctcagtgagctcatgaggttttcatttttattcttccttccaacgtggtgctatctctgaaacgagcgttagagtgccgccttagacggaggcaggagtttcgttagaaagcggacgctgttctaaaaaaggtctcctgcagatctgtctgggctgtgatgacgaatattatgaaatgtgccttttctgaagagattgtgttagctccaaagcttttcctatcgcagtgtttcagttctttattttcccttgtggatatgctgtgtgaaccgtcgtgtgagtgtggtatgcctgatcacagatggattttgttataagcatcaatgtgacacttgcaggacactacaacgtgggacattgtttgtttcttccatatttggaagataaatttatgtgtagacttttttgtaagatacggttaataactaaaatttattgaaatggtcttgcaatgactcgtattcagatgcttaaagaaagcattgctgctacaaatatttctatttttagaaagggtttttatggaccaatgccccagttgtcagtcagagccgttggtgtttttcattgtttaaaatgtcacctgtaaaatgggcattatttatgtttttttttttgcattcctgataattgtatgtattgtataaagaacgtctgtacattgggttataacactagtatatttaaacttacaggcttatttgtaatgtaaaccaccattttaatgtactgtaattaacatggttataatacgtacaatccttccctcatcccatcacacaactttttttgtgtgtgataaactgattttggtttgcaataaaaccttgaaaaatatttacatata

SEQ ID NO: 27796 - DNA, 2686 bp, Homo sapiens
  source 1..2686: mol_type = unassigned DNA
gcagattgtacttcttcctttagtgcagagacgacttttatttccgccccctcccctccacattcctgacctctccctcccccttttccctctttctttccttccttcctcctcttccaagttctgggatttttcagccttgcttggttttggccaaaagcacaaaaaaggcgttttcggaagcgacccgaccgtgcacaagggccatttgtttgttttgggactcggggcaggaaatcttgcccggcctgagtcacggcggctccttcaaggaaacgtcagtgctcgccggtcgctctcgtctgccgcgcgccccgccgcccgctgcccatgggggagatgcagggcgcgctggccagagcccggctcgagtccctgctgcggccccgccacaaaaagagggccgaggcgcagaaaaggagcgagtccttcctgctgagcggactggctttcatgaagcagaggaggatgggtctgaacgactttattcagaagattgccaataactcctatgcatgcaaacaccctgaagttcagtccatcttgaagatctcccaacctcaggagcctgagcttatgaatgccaacccttctcctccaccaagtccttctcagcaaatcaaccttggcccgtcgtccaatcctcatgctaaaccatctgactttcacttcttgaaagtgatcggaaagggcagttttggaaaggttcttctagcaagacacaaggcagaagaagtgttctatgcagtcaaagttttacagaagaaagcaatcctgaaaaagaaagaggagaagcatattatgtcggagcggaatgttctgttgaagaatgtgaagcaccctttcctggtgggccttcacttctctttccagactgctgacaaattgtactttgtcctagactacattaatggtggagagttgttctaccatctccagagggaacgctgcttcctggaaccacgggctcgtttctatgctgctgaaatagccagtgccttgggctacctgcattcactgaacatcgtttatagagacttaaaaccagagaatattttgctagattcacagggacacattgtccttactgacttcggactctgcaaggagaacattgaacacaacagcacaacatccaccttctgtggcacgccggagtatctcgcacctgaggtgcttcataagcagccttatgacaggactgtggactggtggtgcctgggagctgtcttgtatgagatgctgtatggcctgccgcctttttatagccgaaacacagctgaaatgtacgacaacattctgaacaagcctctccagctgaaaccaaatattacaaattccgcaagacacctcctggagggcctcctgcagaaggacaggacaaagcggctcggggccaaggatgacttcatggagattaagagtcatgtcttcttctccttaattaactgggatgatctcattaataagaagattactcccccttttaacccaaatgtgagtgggcccaacgacctacggcactttgaccccgagtttaccgaagagcctgtccccaactccattggcaagtcccctgacagcgtcctcgtcacagccagcgtcaaggaagctgccgaggctttcctaggcttttcctatgcgcctcccacggactctttcctctgaaccctgttagggcttggttttaaaggattttatgtgtgtttccgaatgttttagttagccttttggtggagccgccagctgacaggacatcttacaagagaatttgcacatctctggaagcttagcaatcttattgcacactgttcgctggaagctttttgaagagcacattctcctcagtgagctcatgaggttttcatttttattcttccttccaacgtggtgctatctctgaaacgagcgttagagtgccgccttagacggaggcaggagtttcgttagaaagcggacgctgttctaaaaaaggtctcctgcagatctgtctgggctgtgatgacgaatattatgaaatgtgccttttctgaagagattgtgttagctccaaagcttttcctatcgcagtgtttcagttctttattttcccttgtggatatgctgtgtgaaccgtcgtgtgagtgtggtatgcctgatcacagatggattttgttataagcatcaatgtgacacttgcaggacactacaacgtgggacattgtttgtttcttccatatttggaagataaatttatgtgtagacttttttgtaagatacggttaataactaaaatttattgaaatggtcttgcaatgactcgtattcagatgcttaaagaaagcattgctgctacaaatatttctatttttagaaagggtttttatggaccaatgccccagttgtcagtcagagccgttggtgtttttcattgtttaaaatgtcacctgtaaaatgggcattatttatgtttttttttttgcattcctgataattgtatgtattgtataaagaacgtctgtacattgggttataacactagtatatttaaacttacaggcttatttgtaatgtaaaccaccattttaatgtactgtaattaacatggttataatacgtacaatccttccctcatcccatcacacaactttttttgtgtgtgataaactgattttggtttgcaataaaaccttgaaaaatatttaca

SEQ ID NO: 27797 - DNA, 553 bp, Homo sapiens
  source 1..553: mol_type = unassigned DNA
aatcaaaaacaactctcctctctcaagccgcctccaggagcgcatcacctggagaagagcgactcgctccccgcgccggccgcggaagagcagccaggtacgaaggtggatcaagagcccaatggtcagtgtggacaagcatcagagtcccagcctgaagtacaccggctcctccatggtgcacatccctccaggggagccagacttcgagtcttccttgtgtcaaacatgcctgggtgaacatgctttccaaagaggggttctccctcaggagaacgagtcatgttcatgggaaactcaatctgggtgtgaagtgagagagccatgtaatcatgccaacatcctgaccaagcccgatccaagaaccttctggactaatgatgatccagctttcatgaagcagaggaggatgggtctgaacgactttattcagaagattgccaataactcctatgcatgcaaacaccctgaagttcagtccatcttgaagatctcccaacctcaggagcctgagcttatgaatgccaacccttctcctccaccaagtccttct

SEQ ID NO: 27798 - DNA, 1850 bp, Homo sapiens
  source 1..1850: mol_type = unassigned DNA
gctcccttcctgtacttaaattgccttgatataaagtggggttcataacagaacagggatagccgtctctggctcgtgctctcatgtcatctcagagttccagcttatcagaggcatgtagcagggaggcttattccagccataactgggctctacctccagcctccagaagtaatccccaacctgcatatccttgggcaacccgaagaatgaaagaagaagctataaaaccccctttgaaagctttcatgaagcagaggaggatgggtctgaacgactttattcagaagattgccaataactcctatgcatgcaaacaccctgaagttcagtccatcttgaagatctcccaacctcaggagcctgagcttatgaatgccaacccttctcctccaccaagtccttctcagcaaatcaaccttggcccgtcgtccaatcctcatgctaaaccatctgactttcacttcttgaaagtgatcggaaagggcagttttggaaaggttcttctagcaagacacaaggcagaagaagtgttctatgcagtcaaagttttacagaagaaagcaatcctgaaaaagaaagaggagaagcatattatgtcggagcggaatgttctgttgaagaatgtgaagcaccctttcctggtgggccttcacttctctttccagactgctgacaaattgtactttgtcctagactacattaatggtggagagttgttctaccatctccagagggaacgctgcttcctggaaccacgggctcgtttctatgctgctgaaatagccagtgccttgggctacctgcattcactgaacatcgtttatagagacttaaaaccagagaatattttgctagattcacagggacacattgtccttactgacttcggactctgcaaggagaacattgaacacaacagcacaacatccaccttctgtggcacgccggagtatctcgcacctgaggtgcttcataagcagccttatgacaggactgtggactggtggtgcctgggagctgtcttgtatgagatgctgtatggcctgccgcctttttatagccgaaacacagctgaaatgtacgacaacattctgaacaagcctctccagctgaaaccaaatattacaaattccgcaagacacctcctggagggcctcctgcagaaggacaggacaaagcggctcggggccaaggatgacttcatggagattaagagtcatgtcttcttctccttaattaactgggatgatctcattaataagaagattactcccccttttaacccaaatgtgagtgggcccaacgacctacggcactttgaccccgagtttaccgaagagcctgtccccaactccattggcaagtcccctgacagcgtcctcgtcacagccagcgtcaaggaagctgccgaggctttcctaggcttttcctatgcgcctcccacggactctttcctctgaaccctgttagggcttggttttaaaggattttatgtgtgtttccgaatgttttagttagccttttggtggagccgccagctgacaggacatcttacaagagaatttgcacatctctggaagcttagcaatcttattgcacactgttcgctggaagctttttgaagagcacattctcctcagtgagctcatgaggttttcatttttattcttccttccaacgtggtgctatctctgaaacgagcgttagagtgccgccttagacggaggcaggagtttcgttagaaagcggacgctgttctaaaaaaggtctcctgcagatctgtctgggctgtgatgacgaatattatgaaatgtgccttttctgaagagattgtgttagctccaaag

SEQ ID NO: 27799 - DNA, 560 bp, Homo sapiens
  source 1..560: mol_type = unassigned DNA
aactgctcttcagtgtgccctgagccggctgtgccttctctccatccgctgctcagatattcatgaaccgttgcttcttccagcctcgccttctcgctccctctgcctttctggcgctgttctccctccctccctctggcttctgctctttcttactccttctctcagctgcttaactacagctcccactggaacttgcacaatcaaaaacaactctcctctctcaagccgcctccaggagcgcatcacctggagaagagcgactcgctccccgcgccggccgcggaagagcagccaggaggtaaaccggggaaacagatatgcactaaccaggcgggtgccaacctggatctataactgtgaattccccacggtggaaaatggtaaacaaagacatgaatggattcccagtcaagaaatgctcagccttccaattttttaagaagcgggtacgaaggtggatcaagagcccaatggtcagtgtggacaagcatcagagtcccagcctgaagtacaccggctcctccatggtgcacatccctccaggggagccagacttc

SEQ ID NO: 27800 - DNA, 2164 bp, Homo sapiens
  source 1..2164: mol_type = unassigned DNA
atgggttcagactttatgccctgaaaagatccttccagccctggccatcttggacttctggagctaccctggctcacaggggtcttgttgccctgggtgtccccagttcttgaaaagaatcagcctgggaggggccacaccctgaccatccccctttatcccttctgagatgtttgttaggaagtctgggtccaggggatatcatttcttgttccatccatgcaggggttgcttacctcgggtaggaaaccctcaggcggtggcaggtgcacaggtaggggaggatggagagggcagtggtgcctgaagccctggatgggcggagctgaccccccaacaccaactctctcatgcctgctcctccctgtccccccagagctgcctgatcattgctacagaatgaactctagcccagctgggaccccaagtccacagccctccagggccaatgggaacatcaacctggggccttcagccaacccaaatgcccagcccacggacttcgacttcctcaaagtcatcggcaaagggaactacgggaaggtcctactggccaagcgcaagtctgatggggcgttctatgcagtgaaggtactacagaaaaagtccatcttaaagaagaaagagcagagccacatcatggcagagcgcagtgtgcttctgaagaacgtgcggcaccccttcctcgtgggcctgcgctactccttccagacacctgagaagctctacttcgtgctcgactatgtcaacgggggagagctcttcttccacctgcagcgggagcgccggttcctggagccccgggccaggttctacgctgctgaggtggccagcgccattggctacctgcactccctcaacatcatttacagggatctgaaaccagagaacattctcttggactgccagggacacgtggtgctgacggattttggcctctgcaaggaaggtgtagagcctgaagacaccacatccacattctgtggtacccctgagtacttggcacctgaagtgcttcggaaagagccttatgatcgagcagtggactggtggtgcttgggggcagtcctctacgagatgctccatggcctgccgcccttctacagccaagatgtatcccagatgtatgagaacattctgcaccagccgctacagatccccggaggccggacagtggccgcctgtgacctcctgcaaagccttctccacaaggaccagaggcagcggctgggctccaaagcagactttcttgagattaagaaccatgtattcttcagccccataaactgggatgacctgtaccacaagaggctaactccacccttcaacccaaatgtgacaggacctgctgacttgaagcattttgacccagagttcacccaggaagctgtgtccaagtccattggctgtacccctgacactgtggccagcagctctggggcctcaagtgcattcctgggattttcttatgcgccagaggatgatgacatcttggattgctagaagagaaggacctgtgaaactactgaggccagctggtattagtaaggaattaccttcagctgctaggaagagcgactcaaactaacaatggcttcaacgagaagcaggtttattttttccagcacataaaagaaaaataatgtttcggagtccaggactggcaggacaggtcatcagatactcagaggctgtatctctgccctgccaaccttgacaaatggcttccaatgttaggtttgctacaagatggttactggagctctagctgcctattttgtgtttagggaagggaaaatggaggaaaggggagaagagcaaagggcgcttttaaagagctttcccaaaagctccacccaatgacttctgcttccatctcactaaccacccacccctacctggaatggaggctgggagatgtggcttatttgctgggtacgtgactatccctaataacaaaggggttctgacactaagacattaggggagaatgttgggtaggcagccagcactcttttaccagagggcctcctggtgtttggattttgatctcaatgtgtaaaatgacagagatgtaacaagctcatagggtatcaatatctcttattgttctatgttgatgatatttgtctttgttgtgggtaatactggacatttgttattg

SEQ ID NO: 27801 - DNA, 1891 bp, Homo sapiens
  source 1..1891: mol_type = unassigned DNA
agtcaggattgtgcctccagtcagaaggaccatgaagagagagaagagggcagagccgtgcatggggctgctccccaggacctgagcaggaacctggagttttcagagctgcctgatcattgctacagaatgaactctagcccagctgggaccccaagtccacagccctccagggccaatgggaacatcaacctggggccttcagccaacccaaatgcccagcccacggacttcgacttcctcaaagtcatcggcaaagggaactacgggaaggtcctactggccaagcgcaagtctgatggggcgttctatgcagtgaaggtactacagaaaaagtccatcttaaagaagaaagagagccacatcatggcagagcgcagtgtgcttctgaagaacgtgcggcaccccttcctcgtgggcctgcgctactccttccagacacctgagaagctctacttcgtgctcgactatgtcaacgggggagagctcttcttccacctgcagcgggagcgccggttcctggagccccgggccaggttctacgctgctgaggtggccagcgccattggctacctgcactccctcaacatcatttacagggatctgaaaccagagaacattctcttggactgccagggacacgtggtgctgacggattttggcctctgcaaggaaggtgtagagcctgaagacaccacatccacattctgtggtacccctgagtacttggcacctgaagtgcttcggaaagagccttatgatcgagcagtggactggtggtgcttgggggcagtcctctacgagatgctccatggcctgccgcccttctacagccaagatgtatcccagatgtatgagaacattctgcaccagccgctacagatccccggaggccggacagtggccgcctgtgacctcctgcaaagccttctccacaaggaccagaggcagcggctgggctccaaagcagactttcttgagattaagaaccatgtattcttcagccccataaactgggatgacctgtaccacaagaggctaactccacccttcaacccaaatgtgacaggacctgctgacttgaagcattttgacccagagttcacccaggaagctgtgtccaagtccattggctgtacccctgacactgtggccagcagctctggggcctcaagtgcattcctgggattttcttatgcgccagaggatgatgacatcttggattgctagaagagaaggacctgtgaaactactgaggccagctggtattagtaaggaattaccttcagctgctaggaagagcgactcaaactaacaatggcttcaacgagaagcaggtttattttttccagcacataaaagaaaaataatgtttcggagtccaggactggcaggacaggtcatcagatactcagaggctgtatctctgccctgccaaccttgacaaatggcttccaatgttaggtttgctacaagatggttactggagctctagctgcctattttgtgtttagggaagggaaaatggaggaaaggggagaagagcaaagggcgcttttaaagagctttcccaaaagctccacccaatgacttctgcttccatctcactaaccacccacccctacctggaatggaggctgggagatgtggcttatttgctgggtacgtgactatccctaataacaaaggggttctgacactaagacattaggggagaatgttgggtaggcagccagcactcttttaccagagggcctcctggtgtttggattttgatctcaatgtgtaaaatgacagagatgtaacaagctcatagggtatcaatatctcttattgttctatgttgatgatatttgtctttgttgtgggtaatactggacatttgttattg

SEQ ID NO: 27802 - DNA, 1906 bp, Homo sapiens
  source 1..1906: mol_type = unassigned DNA
ggttgcttgacaagtcaggattgtgcctccagtcagaaggaccatgaagagagagaagagggcagagccgtgcatggggctgctccccaggacctgagcaggaacctggagttttcagagctgcctgatcattgctacagaatgaactctagcccagctgggaccccaagtccacagccctccagggccaatgggaacatcaacctggggccttcagccaacccaaatgcccagcccacggacttcgacttcctcaaagtcatcggcaaagggaactacgggaaggtcctactggccaagcgcaagtctgatggggcgttctatgcagtgaaggtactacagaaaaagtccatcttaaagaagaaagagcagagccacatcatggcagagcgcagtgtgcttctgaagaacgtgcggcaccccttcctcgtgggcctgcgctactccttccagacacctgagaagctctacttcgtgctcgactatgtcaacgggggagagctcttcttccacctgcagcgggagcgccggttcctggagccccgggccaggttctacgctgctgaggtggccagcgccattggctacctgcactccctcaacatcatttacagggatctgaaaccagagaacattctcttggactgccagggacacgtggtgctgacggattttggcctctgcaaggaaggtgtagagcctgaagacaccacatccacattctgtggtacccctgagtacttggcacctgaagtgcttcggaaagagccttatgatcgagcagtggactggtggtgcttgggggcagtcctctacgagatgctccatggcctgccgcccttctacagccaagatgtatcccagatgtatgagaacattctgcaccagccgctacagatccccggaggccggacagtggccgcctgtgacctcctgcaaagccttctccacaaggaccagaggcagcggctgggctccaaagcagactttcttgagattaagaaccatgtattcttcagccccataaactgggatgacctgtaccacaagaggctaactccacccttcaacccaaatgtgacaggacctgctgacttgaagcattttgacccagagttcacccaggaagctgtgtccaagtccattggctgtacccctgacactgtggccagcagctctggggcctcaagtgcattcctgggattttcttatgcgccagaggatgatgacatcttggattgctagaagagaaggacctgtgaaactactgaggccagctggtattagtaaggaattaccttcagctgctaggaagagcgactcaaactaacaatggcttcaacgagaagcaggtttattttttccagcacataaaagaaaaataatgtttcggagtccaggactggcaggacaggtcatcagatactcagaggctgtatctctgccctgccaaccttgacaaatggcttccaatgttaggtttgctacaagatggttactggagctctagctgcctattttgtgtttagggaagggaaaatggaggaaaggggagaagagcaaagggcgcttttaaagagctttcccaaaagctccacccaatgacttctgcttccatctcactaaccacccacccctacctggaatggaggctgggagatgtggcttatttgctgggtacgtgactatccctaataacaaaggggttctgacactaagacattaggggagaatgttgggtaggcagccagcactcttttaccagagggcctcctggtgtttggattttgatctcaatgtgtaaaatgacagagatgtaacaagctcatagggtatcaatatctcttattgttctatgttgatgatatttgtctttgttgtgggtaatactggacatttgttattg

SEQ ID NO: 27803 - DNA, 2225 bp, Homo sapiens
  source 1..2225: mol_type = unassigned DNA
agggctgggaggttgaacttgagccggtttgggagccaggagcgagtgggtgacaggtcattcctgactgggaaggttgcttgacaagtcaggattgtgcctccagtcagaaggaccatgaagagagagaagagggcagagccgtgcatggggctgctccccaggacctgagcaggaacctggagttttcagggtgagatggtgttccccagggaacagaagtctccagtcccatcttaagctctgccggatcccgcgtgacatcagctagccccctcgcggctgccgggagctgtgagctctgtgctggggccaggccggcaccaggcacagacacttaggcccttgttgggagaacagagagaggctctcttgtccactgcctgtcttcggttccaactgctggttctcctagaggcctctcctcagactcgcagagctgcctgatcattgctacagaatgaactctagcccagctgggaccccaagtccacagccctccagggccaatgggaacatcaacctggggccttcagccaacccaaatgcccagcccacggacttcgacttcctcaaagtcatcggcaaagggaactacgggaaggtcctactggccaagcgcaagtctgatggggcgttctatgcagtgaaggtactacagaaaaagtccatcttaaagaagaaagagcagagccacatcatggcagagcgcagtgtgcttctgaagaacgtgcggcaccccttcctcgtgggcctgcgctactccttccagacacctgagaagctctacttcgtgctcgactatgtcaacgggggagagctcttcttccacctgcagcgggagcgccggttcctggagccccgggccaggttctacgctgctgaggtggccagcgccattggctacctgcactccctcaacatcatttacagggatctgaaaccagagaacattctcttggactgccagggacacgtggtgctgacggattttggcctctgcaaggaaggtgtagagcctgaagacaccacatccacattctgtggtacccctgagtacttggcacctgaagtgcttcggaaagagccttatgatcgagcagtggactggtggtgcttgggggcagtcctctacgagatgctccatggcctgccgcccttctacagccaagatgtatcccagatgtatgagaacattctgcaccagccgctacagatccccggaggccggacagtggccgcctgtgacctcctgcaaagccttctccacaaggaccagaggcagcggctgggctccaaagcagactttcttgagattaagaaccatgtattcttcagccccataaactgggatgacctgtaccacaagaggctaactccacccttcaacccaaatgtgacaggacctgctgacttgaagcattttgacccagagttcacccaggaagctgtgtccaagtccattggctgtacccctgacactgtggccagcagctctggggcctcaagtgcattcctgggattttcttatgcgccagaggatgatgacatcttggattgctagaagagaaggacctgtgaaactactgaggccagctggtattagtaaggaattaccttcagctgctaggaagagcgactcaaactaacaatggcttcaacgagaagcaggtttattttttccagcacataaaagaaaaataatgtttcggagtccaggactggcaggacaggtcatcagatactcagaggctgtatctctgccctgccaaccttgacaaatggcttccaatgttaggtttgctacaagatggttactggagctctagctgcctattttgtgtttagggaagggaaaatggaggaaaggggagaagagcaaagggcgcttttaaagagctttcccaaaagctccacccaatgacttctgcttccatctcactaaccacccacccctacctggaatggaggctgggagatgtggcttatttgctgggtacgtgactatccctaataacaaaggggttctgacactaagacattaggggagaatgttgggtaggcagccagcactcttttaccagagggcctcctggtgtttggattttgatctcaatgtgtaaaatgacagagatgtaacaagctcatagggtatcaatatctcttattgttctatgttgatgatatttgtctttgttgtgggtaatactggacatttgttattg

SEQ ID NO: 27804 - DNA, 676 bp, Homo sapiens
  source 1..676: mol_type = unassigned DNA
actgcctgtcttcggttccaactgctggttctcctagaggcctctcctcagactcgcagagctgcctgatcattgctacagaatgaactctagcccagctgggaccccaagtccacagccctccagggccaatgggaacatcaacctggggccttcagccaacccaaatgcccagcccacggacttcgacttcctcaaagtcatcggcaaagggaactacgggaaggtcctactggccaagcgcaagtctgatggggcgttctatgcagtgaaggtactacagaaaaagtccatcttaaagaagaaagagagccacatcatggcagagcgcagtgtgcttctgaagaacgtgcggcaccccttcctcgtgggcctgcgctactccttccagacacctgagaagctctacttcgtgctcgactatgtcaacgggggagagctcttcttccacctgcagcgggagcgccggttcctggagccccgggccaggttctacgctgctgaggtggccagcgccattggctacctgcactccctcaacatcatttacagggatctgaaaccagagaacattctcttggactgccagggacacgtggtgctgacggattttggcctctgcaaggaaggtgtagagcctgaagacaccacatccacattctgtggtacccctgag

SEQ ID NO: 27805 - DNA, 1759 bp, Homo sapiens
  source 1..1759: mol_type = unassigned DNA
gtcttcggttccaactgctggttctcctagaggcctctcctcagactcgcagagctgcctgatcattgctacagaatgaactctagcccagctgggaccccaagtccacagccctccagggccaatgggaacatcaacctggggccttcagccaacccaaatgcccagcccacggacttcgacttcctcaaagtcatcggcaaagggaactacgggaaggtcctactggccaagcgcaagtctgatggggcgttctatgcagtgaaggtactacagaaaaagtccatcttaaagaagaaagagcagagccacatcatggcagagcgcagtgtgcttctgaagaacgtgcggcaccccttcctcgtgggcctgcgctactccttccagacacctgagaagctctacttcgtgctcgactatgtcaacgggggagagctcttcttccacctgcagcgggagcgccggttcctggagccccgggccaggttctacgctgctgaggtggccagcgccattggctacctgcactccctcaacatcatttacagggatctgaaaccagagaacattctcttggactgccagggacacgtggtgctgacggattttggcctctgcaaggaaggtgtagagcctgaagacaccacatccacattctgtggtacccctgagtacttggcacctgaagtgcttcggaaagagccttatgatcgagcagtggactggtggtgcttgggggcagtcctctacgagatgctccatggcctgccgcccttctacagccaagatgtatcccagatgtatgagaacattctgcaccagccgctacagatccccggaggccggacagtggccgcctgtgacctcctgcaaagccttctccacaaggaccagaggcagcggctgggctccaaagcagactttcttgagattaagaaccatgtattcttcagccccataaactgggatgacctgtaccacaagaggctaactccacccttcaacccaaatgtgacaggacctgctgacttgaagcattttgacccagagttcacccaggaagctgtgtccaagtccattggctgtacccctgacactgtggccagcagctctggggcctcaagtgcattcctgggattttcttatgcgccagaggatgatgacatcttggattgctagaagagaaggacctgtgaaactactgaggccagctggtattagtaaggaattaccttcagctgctaggaagagcgactcaaactaacaatggcttcaacgagaagcaggtttattttttccagcacataaaagaaaaataatgtttcggagtccaggactggcaggacaggtcatcagatactcagaggctgtatctctgccctgccaaccttgacaaatggcttccaatgttaggtttgctacaagatggttactggagctctagctgcctattttgtgtttagggaagggaaaatggaggaaaggggagaagagcaaagggcgcttttaaagagctttcccaaaagctccacccaatgacttctgcttccatctcactaaccacccacccctacctggaatggaggctgggagatgtggcttatttgctgggtacgtgactatccctaataacaaaggggttctgacactaagacattaggggagaatgttgggtaggcagccagcactcttttaccagagggcctcctggtgtttggattttgatctcaatgtgtaaaatgacagagatgtaacaagc

SEQ ID NO: 27806 - DNA, 1798 bp, Homo sapiens
  source 1..1798: mol_type = unassigned DNA
atgcaggggttgcttacctcgggtaggaaaccctcaggcggtggcaggtgcacagagctgcctgatcattgctacagaatgaactctagcccagctgggaccccaagtccacagccctccagggccaatgggaacatcaacctggggccttcagccaacccaaatgcccagcccacggacttcgacttcctcaaagtcatcggcaaagggaactacgggaaggtcctactggccaagcgcaagtctgatggggcgttctatgcagtgaaggtactacagaaaaagtccatcttaaagaagaaagagcagagccacatcatggcagagcgcagtgtgcttctgaagaacgtgcggcaccccttcctcgtgggcctgcgctactccttccagacacctgagaagctctacttcgtgctcgactatgtcaacgggggagagctcttcttccacctgcagcgggagcgccggttcctggagccccgggccaggttctacgctgctgaggtggccagcgccattggctacctgcactccctcaacatcatttacagggatctgaaaccagagaacattctcttggactgccagggacacgtggtgctgacggattttggcctctgcaaggaaggtgtagagcctgaagacaccacatccacattctgtggtacccctgagtacttggcacctgaagtgcttcggaaagagccttatgatcgagcagtggactggtggtgcttgggggcagtcctctacgagatgctccatggcctgccgcccttctacagccaagatgtatcccagatgtatgagaacattctgcaccagccgctacagatccccggaggccggacagtggccgcctgtgacctcctgcaaagccttctccacaaggaccagaggcagcggctgggctccaaagcagactttcttgagattaagaaccatgtattcttcagccccataaactgggatgacctgtaccacaagaggctaactccacccttcaacccaaatgtgacaggacctgctgacttgaagcattttgacccagagttcacccaggaagctgtgtccaagtccattggctgtacccctgacactgtggccagcagctctggggcctcaagtgcattcctgggattttcttatgcgccagaggatgatgacatcttggattgctagaagagaaggacctgtgaaactactgaggccagctggtattagtaaggaattaccttcagctgctaggaagagcgactcaaactaacaatggcttcaacgagaagcaggtttattttttccagcacataaaagaaaaataatgtttcggagtccaggactggcaggacaggtcatcagatactcagaggctgtatctctgccctgccaaccttgacaaatggcttccaatgttaggtttgctacaagatggttactggagctctagctgcctattttgtgtttagggaagggaaaatggaggaaaggggagaagagcaaagggcgcttttaaagagctttcccaaaagctccacccaatgacttctgcttccatctcactaaccacccacccctacctggaatggaggctgggagatgtggcttatttgctgggtacgtgactatccctaataacaaaggggttctgacactaagacattaggggagaatgttgggtaggcagccagcactcttttaccagagggcctcctggtgtttggattttgatctcaatgtgtaaaatgacagagatgtaacaagctcatagggtatcaatatctcttattgttctatgttg

SEQ ID NO: 27807 - DNA, 4220 bp, Homo sapiens
  source 1..4220: mol_type = unassigned DNA
gggatccggcgccttccccggctgtcctcggcctcccgcgcgctccgcgggaggagccgccagcggccgtgacgcgtcaaggaggaaacgccggcgcccggcggccctgccgggaaggaggaagcgcagtgcgttcggctccgcgcccgccgcgccgggagcagcaccgcggggccaggttgcatgatggaatttgaacattacttcaagaggttttgtattttggattagttaattgggtttgtcctctgctgactgtttcttcggatgcattttttggtgtgctcttgagggattaaatgcaaagagatcacaccatggactacaaggaaagctgcccaagtgtaagcattcccagctccgatgaacacagagagaaaaagaagaggtttactgtttataaagttctggtttcagtgggaagaagtgaatggtttgtcttcaggagatatgcagagtttgataaactttataacactttaaaaaaacagtttcctgctatggccctgaagattcctgccaagagaatatttggtgataattttgatccagattttattaaacaaagacgagcaggactaaacgaattcattcagaacctagttaggtatccagaactttataaccatccagatgtcagagcattccttcaaatggacagtccaaaacaccagtcagatccatctgaagatgaggatgaaagaagttctcagaagctacactctacctcacagaacatcaacctgggaccgtctggaaatcctcatgccaaaccaactgactttgatttcttaaaagttattggaaaaggcagctttggcaaggttcttcttgcaaaacggaaactggatggaaaattttatgctgtcaaagtgttacagaaaaaaatagttctcaacagaaaagagcaaaaacatattatggctgaacgtaatgtgctcttgaaaaatgtgaaacatccgtttttggttggattgcattattccttccaaacaactgaaaagctttattttgttctggattttgttaatggaggggagctttttttccacttacaaagagaacggtcctttcctgagcacagagctaggttttacgctgctgaaattgctagtgcattgggttacttacattccatcaaaatagtatacagagacttgaaaccagaaaatattcttttggattcagtaggacatgttgtcttaacagattttgggctttgtaaagaaggaattgctatttctgacaccactaccacattttgtgggacaccagagtatcttgcacctgaagtaattagaaaacagccctatgacaatactgtagattggtggtgccttggggctgttctgtatgaaatgctgtatggattgcctcctttttattgccgagatgttgctgaaatgtatgacaatatccttcacaaacccctaagtttgaggccaggagtgagtcttacagcctggtccattctggaagaactcctagaaaaagacaggcaaaatcgacttggtgccaaggaagactttcttgaaattcagaatcatcctttttttgaatcactcagctgggctgaccttgtacaaaagaagattccaccaccatttaatcctaatgtggctggaccagatgatatcagaaactttgacacagcatttacagaagaaacagttccatattctgtgtgtgtatcttctgactattctatagtgaatgccagtgtattggaggcagatgatgcattcgttggtttctcttatgcacctccttcagaagacttatttttgtgagcagtttgccattcagaaaccattgagcaaaataagtctatagatgggactgaaacttctatttgtgtgaatatattcaaatatgtataactagtgcctcatttttatatgtaatgatgaaaactatgaaaaaatgtattttcttctatgtgcaagaaaaatagggcatttcaaagagctgttttgattaaaatttatattcttgtttaataagcttatttttaaacaatttaaaagctattattcttagcattaacctatttttaaagaaaccttttttgctattgactgttttttccctctaagtttacactaacatctacccaagatagactgttttttaacagtcaatttcagttcagctaacatatattaatacctttgtaactctttgctatggcttttgttatcacaccaaaactatgcaattggtacatggttgtttaagaagaaaccgtatttttccatgataaatcactgtttgaaatatttggttcatggtatgatcgaaatgtaaaagcataattaacacattggctgctagttaacaattggaataactttattctgcagatcatttaagaagtaacaggccgggcgcggtggctcacgcctgtaatcccagcactttgggaggctgaggcgggcagatcacctgaggtcaggagttggagaccagcctgaccaacatggacaaaccccgtctctactaaaaatacaaaattggcagggtgtggtggcacatgcctataatcccagctacttgggaggctaaggcaggagaatcgcttgaacccgggaggcggaggttgcagtgagccgagatcgcaccattgcactcctgcctgggcaacaagagtgaaactccatctccaaaaaaaaaaagaaaaagtaacaaaaggaaattatttgtttttgaaataccagttcaactttgtggattatttttcctctgaaggaaaagaaaaggcttaatggttaggatttttaagtattcccaaagatctgaagggtaataaaatgtactggattttttaaggtggtaccaaaaatgaatgtctgtcatatatttatattacaaatacattatatttatgttctattcatcttttgaatgtttagtatgctattaagtcattctgaatctttgtatttgcttttgcaaataggtatttcaaagctcttttcctaactggttaagtaaaataaaaaattgagctttctagaatatttgcctaattgggaattaaaaagtaaaataataggccaggcatggtggctcatgcctataagcaccctgggaggccgaggcaggcagattatttgagctcaggagtttgagaccatcctgggcaacatggcgaaaccctatctctacaaaaaatacaaaaattagccagacatggtggcacatgcctttagtcccagctactctggaggctgaagttggaggatggcttgagcccacgagatggaagttgcagtgaactgaaattgtgccactgcacttttcagcctgggtgccacagcgagaccctagttaagagaaaaaaaaagtaaaaacaaattgtgggtcaaagtaaatgtatacagttttattacaatgtaacaaaagttgaaaatcaggcagatgtgtattcagtatccaattcaatatatcttagaaaaagcacaggaaacagaccttaaaattgtaacctaccaactaacttacatgcttataaaagtaaaggagaataactggccgggcacggtggctcatgcctataaaattccagcactttgggaggccaaggcaggaggatcacttgagcctatgagttcaagaccagcctaggcaatgtagtgacacctcatttctatttattttaaaaaaaagagagagtaactacagaagaactttaaaaaataaaaaataagcttaccttggattcttggcttagagtagaggttttttttaagttatggaggaaacatttttgtaaaagtttaatgacccactttagatgctccaagaacaagcatcccttccatgtatgtcttgagaaagaaatcacagaagcatttctcaccaatactctttggcttaaaatgttcagcagaattgggcagtgggggtgacttttcttatattaataatatttacatccaatacactgaatcttcctttagaggtaagactttaatatctatactgtaaatatttggtttatttggcactactgtaagttttgtttttcacaaagctcttattatgaagcaaaataaaaattctagtttcttgtatgattttttgtactcattcattcctgttaagctgccaaaaattaaagtgcaatattgtatatttttaagaacaaatttaaaatagaattttgatgtttctcagatcacaagaaatacaaatctatatagtataataaaatcagc

SEQ ID NO: 27808 - DNA, 4055 bp, Homo sapiens
  source 1..4055: mol_type = unassigned DNA
aggttgcatgatggaatttgaacattacttcaagaggttttgtattttggattagttaattgggtttgtcctctgctgactgtttcttcggatgcattttttggtgtgctcttgagggattaaatgcaaagagatcacaccatggactacaaggaaagctgcccaagtgtaagcattcccagctccgatgaacacagagagaaaaagaagaggtttactgtttataaagttctggtttcagtgggaagaagtgaatggtttgtcttcaggagatatgcagagtttgataaactttataacactttaaaaaaacagtttcctgctatggccctgaagattcctgccaagagaatatttggtgataattttgatccagattttattaaacaaagacgagcaggactaaacgaattcattcagaacctagttaggtatccagaactttataaccatccagatgtcagagcattccttcaaatggacagtccaaaacaccagtcagatccatctgaagatgaggatgaaagaagttctcagaagctacactctacctcacagaacatcaacctgggaccgtctggaaatcctcatgccaaaccaactgactttgatttcttaaaagttattggaaaaggcagctttggcaaggttcttcttgcaaaacggaaactggatggaaaattttatgctgtcaaagtgttacagaaaaaaatagttctcaacagaaaagagcaaaaacatattatggctgaacgtaatgtgctcttgaaaaatgtgaaacatccgtttttggttggattgcattattccttccaaacaactgaaaagctttattttgttctggattttgttaatggaggggagctttttttccacttacaaagagaacggtcctttcctgagcacagagctaggttttacgctgctgaaattgctagtgcattgggttacttacattccatcaaaatagtatacagagacttgaaaccagaaaatattcttttggattcagtaggacatgttgtcttaacagattttgggctttgtaaagaaggaattgctatttctgacaccactaccacattttgtgggacaccagagtatcttgcacctgaagtaattagaaaacagccctatgacaatactgtagattggtggtgccttggggctgttctgtatgaaatgctgtatggattgcctcctttttattgccgagatgttgctgaaatgtatgacaatatccttcacaaacccctaagtttgaggccaggagtgagtcttacagcctggtccattctggaagaactcctagaaaaagacaggcaaaatcgacttggtgccaaggaagactttcttgaaattcagaatcatcctttttttgaatcactcagctgggctgaccttgtacaaaagaagattccaccaccatttaatcctaatgtggctggaccagatgatatcagaaactttgacacagcatttacagaagaaacagttccatattctgtgtgtgtatcttctgactattctatagtgaatgccagtgtattggaggcagatgatgcattcgttggtttctcttatgcacctccttcagaagacttatttttgtgagcagtttgccattcagaaaccattgagcaaaataagtctatagatgggactgaaacttctatttgtgtgaatatattcaaatatgtataactagtgcctcatttttatatgtaatgatgaaaactatgaaaaaatgtattttcttctatgtgcaagaaaaatagggcatttcaaagagctgttttgattaaaatttatattcttgtttaataagcttatttttaaacaatttaaaagctattattcttagcattaacctatttttaaagaaaccttttttgctattgactgttttttccctctaagtttacactaacatctacccaagatagactgttttttaacagtcaatttcagttcagctaacatatattaatacctttgtaactctttgctatggcttttgttatcacaccaaaactatgcaattggtacatggttgtttaagaagaaaccgtatttttccatgataaatcactgtttgaaatatttggttcatggtatgatcgaaatgtaaaagcataattaacacattggctgctagttaacaattggaataactttattctgcagatcatttaagaagtaacaggccgggcgcggtggctcacgcctgtaatcccagcactttgggaggctgaggcgggcagatcacctgaggtcaggagttggagaccagcctgaccaacatggacaaaccccgtctctactaaaaatacaaaattggcagggtgtggtggcacatgcctataatcccagctacttgggaggctaaggcaggagaatcgcttgaacccgggaggcggaggttgcagtgagccgagatcgcaccattgcactcctgcctgggcaacaagagtgaaactccatctccaaaaaaaaaaagaaaaagtaacaaaaggaaattatttgtttttgaaataccagttcaactttgtggattatttttcctctgaaggaaaagaaaaggcttaatggttaggatttttaagtattcccaaagatctgaagggtaataaaatgtactggattttttaaggtggtaccaaaaatgaatgtctgtcatatatttatattacaaatacattatatttatgttctattcatcttttgaatgtttagtatgctattaagtcattctgaatctttgtatttgcttttgcaaataggtatttcaaagctcttttcctaactggttaagtaaaataaaaaattgagctttctagaatatttgcctaattgggaattaaaaagtaaaataataggccaggcatggtggctcatgcctataagcaccctgggaggccgaggcaggcagattatttgagctcaggagtttgagaccatcctgggcaacatggcgaaaccctatctctacaaaaaatacaaaaattagccagacatggtggcacatgcctttagtcccagctactctggaggctgaagttggaggatggcttgagcccacgagatggaagttgcagtgaactgaaattgtgccactgcacttttcagcctgggtgccacagcgagaccctagttaagagaaaaaaaaagtaaaaacaaattgtgggtcaaagtaaatgtatacagttttattacaatgtaacaaaagttgaaaatcaggcagatgtgtattcagtatccaattcaatatatcttagaaaaagcacaggaaacagaccttaaaattgtaacctaccaactaacttacatgcttataaaagtaaaggagaataactggccgggcacggtggctcatgcctataaaattccagcactttgggaggccaaggcaggaggatcacttgagcctatgagttcaagaccagcctaggcaatgtagtgacacctcatttctatttattttaaaaaaaagagagagtaactacagaagaactttaaaaaataaaaaataagcttaccttggattcttggcttagagtagaggttttttttaagttatggaggaaacatttttgtaaaagtttaatgacccactttagatgctccaagaacaagcatcccttccatgtatgtcttgagaaagaaatcacagaagcatttctcaccaatactctttggcttaaaatgttcagcagaattgggcagtgggggtgacttttcttatattaataatatttacatccaatacactgaatcttcctttagaggtaagactttaatatctatactgtaaatatttggtttatttggcactactgtaagttttgtttttcacaaagctcttattatgaagcaaaataaaaattctagtttcttgtatgattttttgtactcattcattcctgttaagctgccaaaaattaaagtgcaatattgtatatttttaagaacaaatttaaaatagaattttgatgtttctcagatcacaagaaatacaaatctatatagtataataaaatcagcaaaaagatcaa

SEQ ID NO: 27809 - DNA, 4135 bp, Homo sapiens
  source 1..4135: mol_type = unassigned DNA
gggagctggtggcgcggcgcaggtcccggccgagtgtggcgcagcagtggcggcgcttcccattcgccatgcgccgggggtgggtgcccgaaggttgcatgatggaatttgaacattacttcaagaggttttgtattttggattagttaattgggtttgtcctctgctgactgtttcttcggatgcattttttggtgtgctcttgagggattaaatgcaaagagatcacaccatggactacaaggaaagctgcccaagtgtaagcattcccagctccgatgaacacagagagaaaaagaagaggtttactgtttataaagttctggtttcagtgggaagaagtgaatggtttgtcttcaggagatatgcagagtttgataaactttataacactttaaaaaaacagtttcctgctatggccctgaagattcctgccaagagaatatttggtgataattttgatccagattttattaaacaaagacgagcaggactaaacgaattcattcagaacctagttaggtatccagaactttataaccatccagatgtcagagcattccttcaaatggacagtccaaaacaccagtcagatccatctgaagatgaggatgaaagaagttctcagaagctacactctacctcacagaacatcaacctgggaccgtctggaaatcctcatgccaaaccaactgactttgatttcttaaaagttattggaaaaggcagctttggcaaggttcttcttgcaaaacggaaactggatggaaaattttatgctgtcaaagtgttacagaaaaaaatagttctcaacagaaaagagcaaaaacatattatggctgaacgtaatgtgctcttgaaaaatgtgaaacatccgtttttggttggattgcattattccttccaaacaactgaaaagctttattttgttctggattttgttaatggaggggagctttttttccacttacaaagagaacggtcctttcctgagcacagagctaggttttacgctgctgaaattgctagtgcattgggttacttacattccatcaaaatagtatacagagacttgaaaccagaaaatattcttttggattcagtaggacatgttgtcttaacagattttgggctttgtaaagaaggaattgctatttctgacaccactaccacattttgtgggacaccagagtatcttgcacctgaagtaattagaaaacagccctatgacaatactgtagattggtggtgccttggggctgttctgtatgaaatgctgtatggattgcctcctttttattgccgagatgttgctgaaatgtatgacaatatccttcacaaacccctaagtttgaggccaggagtgagtcttacagcctggtccattctggaagaactcctagaaaaagacaggcaaaatcgacttggtgccaaggaagactttcttgaaattcagaatcatcctttttttgaatcactcagctgggctgaccttgtacaaaagaagattccaccaccatttaatcctaatgtggctggaccagatgatatcagaaactttgacacagcatttacagaagaaacagttccatattctgtgtgtgtatcttctgactattctatagtgaatgccagtgtattggaggcagatgatgcattcgttggtttctcttatgcacctccttcagaagacttatttttgtgagcagtttgccattcagaaaccattgagcaaaataagtctatagatgggactgaaacttctatttgtgtgaatatattcaaatatgtataactagtgcctcatttttatatgtaatgatgaaaactatgaaaaaatgtattttcttctatgtgcaagaaaaatagggcatttcaaagagctgttttgattaaaatttatattcttgtttaataagcttatttttaaacaatttaaaagctattattcttagcattaacctatttttaaagaaaccttttttgctattgactgttttttccctctaagtttacactaacatctacccaagatagactgttttttaacagtcaatttcagttcagctaacatatattaatacctttgtaactctttgctatggcttttgttatcacaccaaaactatgcaattggtacatggttgtttaagaagaaaccgtatttttccatgataaatcactgtttgaaatatttggttcatggtatgatcgaaatgtaaaagcataattaacacattggctgctagttaacaattggaataactttattctgcagatcatttaagaagtaacaggccgggcgcggtggctcacgcctgtaatcccagcactttgggaggctgaggcgggcagatcacctgaggtcaggagttggagaccagcctgaccaacatggacaaaccccgtctctactaaaaatacaaaattggcagggtgtggtggcacatgcctataatcccagctacttgggaggctaaggcaggagaatcgcttgaacccgggaggcggaggttgcagtgagccgagatcgcaccattgcactcctgcctgggcaacaagagtgaaactccatctccaaaaaaaaaaagaaaaagtaacaaaaggaaattatttgtttttgaaataccagttcaactttgtggattatttttcctctgaaggaaaagaaaaggcttaatggttaggatttttaagtattcccaaagatctgaagggtaataaaatgtactggattttttaaggtggtaccaaaaatgaatgtctgtcatatatttatattacaaatacattatatttatgttctattcatcttttgaatgtttagtatgctattaagtcattctgaatctttgtatttgcttttgcaaataggtatttcaaagctcttttcctaactggttaagtaaaataaaaaattgagctttctagaatatttgcctaattgggaattaaaaagtaaaataataggccaggcatggtggctcatgcctataagcaccctgggaggccgaggcaggcagattatttgagctcaggagtttgagaccatcctgggcaacatggcgaaaccctatctctacaaaaaatacaaaaattagccagacatggtggcacatgcctttagtcccagctactctggaggctgaagttggaggatggcttgagcccacgagatggaagttgcagtgaactgaaattgtgccactgcacttttcagcctgggtgccacagcgagaccctagttaagagaaaaaaaaagtaaaaacaaattgtgggtcaaagtaaatgtatacagttttattacaatgtaacaaaagttgaaaatcaggcagatgtgtattcagtatccaattcaatatatcttagaaaaagcacaggaaacagaccttaaaattgtaacctaccaactaacttacatgcttataaaagtaaaggagaataactggccgggcacggtggctcatgcctataaaattccagcactttgggaggccaaggcaggaggatcacttgagcctatgagttcaagaccagcctaggcaatgtagtgacacctcatttctatttattttaaaaaaaagagagagtaactacagaagaactttaaaaaataaaaaataagcttaccttggattcttggcttagagtagaggttttttttaagttatggaggaaacatttttgtaaaagtttaatgacccactttagatgctccaagaacaagcatcccttccatgtatgtcttgagaaagaaatcacagaagcatttctcaccaatactctttggcttaaaatgttcagcagaattgggcagtgggggtgacttttcttatattaataatatttacatccaatacactgaatcttcctttagaggtaagactttaatatctatactgtaaatatttggtttatttggcactactgtaagttttgtttttcacaaagctcttattatgaagcaaaataaaaattctagtttcttgtatgattttttgtactcattcattcctgttaagctgccaaaaattaaagtgcaatattgtatatttttaagaacaaatttaaaatagaattttgatgtttctcagatcacaagaaatacaaatctatatagtataataaaatcagc

SEQ ID NO: 27810 - DNA, 2949 bp, Homo sapiens
  source 1..2949: mol_type = unassigned DNA
agttatggcagtgggagtcgaagcgagggtctgaagttcacgactactagaaggggaggggagtggaaaggctctcagtgaaaaaggtattagaattatttctgaattatcagtctctcatttgtgctttggagaagcagaaaaggcaaaaggggtctttggccatcttctgctggagcttccagggaggatgtgtctccaagagaccagatgtaccgagtttgaaatcccagaagcccaagaggaaaagaatcacagggaggaaaagactgtccaaaggcttctggagtcttctgttctctaaccttggaaggttttgaacaatatttctcagaggatagcctttcacttattcatctgtccagcatgactcatccccgggagtgttgaatgtctcctgtcttcctccagcattcacaaaccaggaacggctagctttttgacctgttgcatgatggaatttgaacattacttcaagaggttttgtattttggattagttaattgggtttgtcctctgctgactgtttcttcggatgcattttttggtgtgctcttgagggattaaatgcaaagagatcacaccatggactacaaggaaagctgcccaagtgtaagcattcccagctccgatgaacacagagagaaaaagaagaggtttactgtttataaagttctggtttcagtgggaagaagtgaatggtttgtcttcaggagatatgcagagtttgataaactttataacactttaaaaaaacagtttcctgctatggccctgaagattcctgccaagagaatatttggtgataattttgatccagattttattaaacaaagacgagcaggactaaacgaattcattcagaacctagttaggtatccagaactttataaccatccagatgtcagagcattccttcaaatggacagtccaaaacaccagtcagatccatctgaagatgaggatgaaagaagttctcagaagctacactctacctcacagaacatcaacctgggaccgtctggaaatcctcatgccaaaccaactgactttgatttcttaaaagttattggaaaaggcagctttggcaaggttcttcttgcaaaacggaaactggatggaaaattttatgctgtcaaagtgttacagaaaaaaatagttctcaacagaaaagagcaaaaacatattatggctgaacgtaatgtgctcttgaaaaatgtgaaacatccgtttttggttggattgcattattccttccaaacaactgaaaagctttattttgttctggattttgttaatggaggggagctttttttccacttacaaagagaacggtcctttcctgagcacagagctaggttttacgctgctgaaattgctagtgcattgggttacttacattccatcaaaatagtatacagagacttgaaaccagaaaatattcttttggattcagtaggacatgttgtcttaacagattttgggctttgtaaagaaggaattgctatttctgacaccactaccacattttgtgggacaccagagtatcttgcacctgaagtaattagaaaacagccctatgacaatactgtagattggtggtgccttggggctgttctgtatgaaatgctgtatggattgcctcctttttattgccgagatgttgctgaaatgtatgacaatatccttcacaaacccctaagtttgaggccaggagtgagtcttacagcctggtccattctggaagaactcctagaaaaagacaggcaaaatcgacttggtgccaaggaagactttcttgaaattcagaatcatcctttttttgaatcactcagctgggctgaccttgtacaaaagaagattccaccaccatttaatcctaatgtggctggaccagatgatatcagaaactttgacacagcatttacagaagaaacagttccatattctgtgtgtgtatcttctgactattctatagtgaatgccagtgtattggaggcagatgatgcattcgttggtttctcttatgcacctccttcagaagacttatttttgtgagcagtttgccattcagaaaccattgagcaaaataagtctatagatgggactgaaacttctatttgtgtgaatatattcaaatatgtataactagtgcctcatttttatatgtaatgatgaaaactatgaaaaaatgtattttcttctatgtgcaagaaaaatagggcatttcaaagagctgttttgattaaaatttatattcttgtttaataagcttatttttaaacaatttaaaagctattattcttagcattaacctatttttaaagaaaccttttttgctattgactgttttttccctctaagtttacactaacatctacccaagatagactgttttttaacagtcaatttcagttcagctaacatatattaatacctttgtaactctttgctatggcttttgttatcacaccaaaactatgcaattggtacatggttgtttaagaagaaaccgtatttttccatgataaatcactgtttgaaatatttggttcatggtatgatcgaaatgtaaaagcataattaacacattggctgctagttaacaattggaataactttattctgcagatcatttaagaagtaacaggccgggcgcggtggctcacgcctgtaatcccagcactttgggaggctgaggcgggcagatcacctgaggtcaggagttggagaccagcctgaccaacatggacaaaccccgtctctactaaaaatacaaaattggcagggtgtggtggcacatgcctataatcccagctacttgggaggctaaggcaggagaatcgcttgaacccgggaggcggaggttgcagtgagccgagatcgcaccattgcactcctgcctgggcaacaagagtgaaactccatctccaaaaaaaaaaagaaaaa

SEQ ID NO: 27811 - DNA, 2483 bp, Homo sapiens
  source 1..2483: mol_type = unassigned DNA
gggagctggtggcgcggcgcaggtcccggccgagtgtggcgcagcagtggcggcgcttcccattcgccatgcgccgggggtgggtgcccgaaggttgcatgatggaatttgaacattacttcaagaggttttgtattttggattagttaattgggtttgtcctctgctgactgtttcttcggatgcattttttggtgtgctcttgagggattaaatgcaaagagatcacaccatggactacaaggaaagctgcccaagtgtaagcattcccagctccgatgaacacagagagaaaaagaagaggtttactgtttataaagttctggtttcagtgggaagaagtgaatggtttgtcttcaggagatatgcagagtttgataaactttataacactttaaaaaaacagtttcctgctatggccctgaagattcctgccaagagaatatttggtgataattttgatccagattttattaaacaaagacgagcaggactaaacgaattcattcagaacctagttaggtatccagaactttataaccatccagatgtcagagcattccttcaaatggacagtccaaaacaccagtcagatccatctgaagatgaggatgaaagaagttctcagaagctacactctacctcacagaacatcaacctgggaccgtctggaaatcctcatgccaaaccaactgactttgatttcttaaaagttattggaaaaggcagctttggcaaggttcttcttgcaaaacggaaactggatggaaaattttatgctgtcaaagtgttacagaaaaaaatagttctcaacagaaaagagcaaaaacatattatggctgaacgtaatgtgctcttgaaaaatgtgaaacatccgtttttggttggattgcattattccttccaaacaactgaaaagctttattttgttctggattttgttaatggaggggagctttttttccacttacaaagagaacggtcctttcctgagcacagagctaggttttacgctgctgaaattgctagtgcattgggttacttacattccatcaaaatagtatacagagacttgaaaccagaaaatattcttttggattcagtaggacatgttgtcttaacagattttgggctttgtaaagaaggaattgctatttctgacaccactaccacattttgtgggacaccagagcctcctttttattgccgagatgttgctgaaatgtatgacaatatccttcacaaacccctaagtttgaggccaggagtgagtcttacagcctggtccattctggaagaactcctagaaaaagacaggcaaaatcgacttggtgccaaggaagactttcttgaaattcagaatcatcctttttttgaatcactcagctgggctgaccttgtacaaaagaagattccaccaccatttaatcctaatgtggctggaccagatgatatcagaaactttgacacagcatttacagaagaaacagttccatattctgtgtgtgtatcttctgactattctatagtgaatgccagtgtattggaggcagatgatgcattcgttggtttctcttatgcacctccttcagaagacttatttttgtgagcagtttgccattcagaaaccattgagcaaaataagtctatagatgggactgaaacttctatttgtgtgaatatattcaaatatgtataactagtgcctcatttttatatgtaatgatgaaaactatgaaaaaatgtattttcttctatgtgcaagaaaaatagggcatttcaaagagctgttttgattaaaatttatattcttgtttaataagcttatttttaaacaatttaaaagctattattcttagcattaacctatttttaaagaaaccttttttgctattgactgttttttccctctaagtttacactaacatctacccaagatagactgttttttaacagtcaatttcagttcagctaacatatattaatacctttgtaactctttgctatggcttttgttatcacaccaaaactatgcaattggtacatggttgtttaagaagaaaccgtatttttccatgataaatcactgtttgaaatatttggttcatggtatgatcgaaatgtaaaagcataattaacacattggctgctagttaacaattggaataactttattctgcagatcatttaagaagtaacaggccgggcgcggtggctcacgcctgtaatcccagcactttgggaggctgaggcgggcagatcacctgaggtcaggagttggagaccagcctgaccaacatggacaaaccccgtctctactaaaaatacaaaattggcagggtgtggtggcacatgcctataatcccagctacttgggaggctaaggcaggagaatcgcttgaacccgggaggcggaggttgcagtgagccgagatcgcaccattgcactcctgcctgggcaacaagagtgaaactccatctcc

SEQ ID NO: 27812 - DNA, 3000 bp, Homo sapiens
  source 1..3000: mol_type = unassigned DNA
actgcgggcggagcagagggaaacaccagagtctgtgactccagacaggacccactgtgtcctcttgaactttgcacagcgcgtgacgggggcagacggtgcaccgtggcccggcctttcgcgggggtcctcggggaagagagaggagcgcgggtttcctcggaggcctgagcgggacgcagcctgcagcccctccccgcacgggctgcccccggcccgccgctcgcgccgctctgctgggatccggcgccttccccggctgtcctcggcctcccgcgcgctccgcgggaggagccgccagcggccgtgacgcgtcaaggaggaaacgccggcgcccggcggccctgccgggaaggaggaagcgcagtgcgttcggctccgcgcccgccgcgccgggagcagcaccgcggggttgcatgatggaatttgaacattacttcaagaggttttgtattttggattagttaattgggtttgtcctctgctgactgtttcttcggatgcattttttggtgtgctcttgagggattaaatgcaaagagatcacaccatggactacaaggaaagctgcccaagtgtaagcattcccagctccgatgaacacagagagaaaaagaagaggtttactgtttataaagttctggtttcagtgggaagaagtgaatggtttgtcttcaggagatatgcagagtttgataaactttataacactttaaaaaaacagtttcctgctatggccctgaagattcctgccaagagaatatttggtgataattttgatccagattttattaaacaaagacgagcaggactaaacgaattcattcagaacctagttaggtatccagaactttataaccatccagatgtcagagcattccttcaaatggacagtccaaaacaccagtcagatccatctgaagatgaggatgaaagaagttctcagaagctacactctacctcacagaacatcaacctgggaccgtctggaaatcctcatgccaaaccaactgactttgatttcttaaaagttattggaaaaggcagctttggcaaggttcttcttgcaaaacggaaactggatggaaaattttatgctgtcaaagtgttacagaaaaaaatagttctcaacagaaaagagcaaaaacatattatggctgaacgtaatgtgctcttgaaaaatgtgaaacatccgtttttggttggattgcattattccttccaaacaactgaaaagctttattttgttctggattttgttaatggaggggagctttttttccacttacaaagagaacggtcctttcctgagcacagagctaggttttacgctgctgaaattgctagtgcattgggttacttacattccatcaaaatagtatacagagacttgaaaccagaaaatattcttttggattcagtaggacatgttgtcttaacagattttgggctttgtaaagaaggaattgctatttctgacaccactaccacattttgtgggacaccagagtatcttgcacctgaagtaattagaaaacagccctatgacaatactgtagattggtggtgccttggggctgttctgtatgaaatgctgtatggattgcctcctttttattgccgagatgttgctgaaatgtatgacaatatccttcacaaacccctaagtttgaggccaggagtgagtcttacagcctggtccattctggaagaactcctagaaaaagacaggcaaaatcgacttggtgccaaggaagactttcttgaaattcagaatcatcctttttttgaatcactcagctgggctgaccttgtacaaaagaagattccaccaccatttaatcctaatgtggctggaccagatgatatcagaaactttgacacagcatttacagaagaaacagttccatattctgtgtgtgtatcttctgactattctatagtgaatgccagtgtattggaggcagatgatgcattcgttggtttctcttatgcacctccttcagaagacttatttttgtgagcagtttgccattcagaaaccattgagcaaaataagtctatagatgggactgaaacttctatttgtgtgaatatattcaaatatgtataactagtgcctcatttttatatgtaatgatgaaaactatgaaaaaatgtattttcttctatgtgcaagaaaaatagggcatttcaaagagctgttttgattaaaatttatattcttgtttaataagcttatttttaaacaatttaaaagctattattcttagcattaacctatttttaaagaaaccttttttgctattgactgttttttccctctaagtttacactaacatctacccaagatagactgttttttaacagtcaatttcagttcagctaacatatattaatacctttgtaactctttgctatggcttttgttatcacaccaaaactatgcaattggtacatggttgtttaagaagaaaccgtatttttccatgataaatcactgtttgaaatatttggttcatggtatgatcgaaatgtaaaagcataattaacacattggctgctagttaacaattggaataactttattctgcagatcatttaagaaaaaaagtaacaaaaggaaattatttgtttttgaaataccagttcaactttgtggattatttttcctctgaaggaaaagaaaaggcttaatggttaggatttttaagtattcccaaagatctgaagggtaataaaatgtactggattttttaaggtggtaccaaaaatgaatgtctgtcatatatttatattacaaatacattatatttatgttctattcatcttttgaatgtttagtatgctattaagtcattctgaatctttgtatttgcttttgcaaataggtatttcaaagctcttttcctaactggttaagtaaaataaaaaattgagctttctagaatatttgcctaattgggaattaaaaagtaaaataataggccaggcatggtg

SEQ ID NO: 27813 - DNA, 3106 bp, Homo sapiens
  source 1..3106: mol_type = unassigned DNA
ggcgccgctgggagctggtggcgcggcgcaggtcccggccgagtgtggcgcagcagtggcggcgcttcccattcgccatgcgccgggggtgggtgcccgaagggatttagacatagtggactagtggctgttgcctgtttctagtgaggacttctgctgccctttctgttttgagttcccattctgcaaaccccccctcacatgcggcccctgccgttccctaccaaatatctaggttgcatgatggaatttgaacattacttcaagaggttttgtattttggattagttaattgggtttgtcctctgctgactgtttcttcggatgcattttttggtgtgctcttgagggattaaatgcaaagagatcacaccatggactacaaggaaagctgcccaagtgtaagcattcccagctccgatgaacacagagagaaaaagaagaggtttactgtttataaagttctggtttcagtgggaagaagtgaatggtttgtcttcaggagatatgcagagtttgataaactttataacactttaaaaaaacagtttcctgctatggccctgaagattcctgccaagagaatatttggtgataattttgatccagattttattaaacaaagacgagcaggactaaacgaattcattcagaacctagttaggtatccagaactttataaccatccagatgtcagagcattccttcaaatggacagtccaaaacaccagtcagatccatctgaagatgaggatgaaagaagttctcagaagctacactctacctcacagaacatcaacctgggaccgtctggaaatcctcatgccaaaccaactgactttgatttcttaaaagttattggaaaaggcagctttggcaaggttcttcttgcaaaacggaaactggatggaaaattttatgctgtcaaagtgttacagaaaaaaatagttctcaacagaaaagagcaaaaacatattatggctgaacgtaatgtgctcttgaaaaatgtgaaacatccgtttttggttggattgcattattccttccaaacaactgaaaagctttattttgttctggattttgttaatggaggggagctttttttccacttacaaagagaacggtcctttcctgagcacagagctaggttttacgctgctgaaattgctagtgcattgggttacttacattccatcaaaatagtatacagagacttgaaaccagaaaatattcttttggattcagtaggacatgttgtcttaacagattttgggctttgtaaagaaggaattgctatttctgacaccactaccacattttgtgggacaccagagtatcttgcacctgaagtaattagaaaacagccctatgacaatactgtagattggtggtgccttggggctgttctgtatgaaatgctgtatggattgcctcctttttattgccgagatgttgctgaaatgtatgacaatatccttcacaaacccctaagtttgaggccaggagtgagtcttacagcctggtccattctggaagaactcctagaaaaagacaggcaaaatcgacttggtgccaaggaagactttcttgaaattcagaatcatcctttttttgaatcactcagctgggctgaccttgtacaaaagaagattccaccaccatttaatcctaatgtggctggaccagatgatatcagaaactttgacacagcatttacagaagaaacagttccatattctgtgtgtgtatcttctgactattctatagtgaatgccagtgtattggaggcagatgatgcattcgttggtttctcttatgcacctccttcagaagacttatttttgtgagcagtttgccattcagaaaccattgagcaaaataagtctatagatgggactgaaacttctatttgtgtgaatatattcaaatatgtataactagtgcctcatttttatatgtaatgatgaaaactatgaaaaaatgtattttcttctatgtgcaagaaaaatagggcatttcaaagagctgttttgattaaaatttatattcttgtttaataagcttatttttaaacaatttaaaagctattattcttagcattaacctatttttaaagaaaccttttttgctattgactgttttttccctctaagtttacactaacatctacccaagatagactgttttttaacagtcaatttcagttcagctaacatatattaatacctttgtaactctttgctatggcttttgttatcacaccaaaactatgcaattggtacatggttgtttaagaagaaaccgtatttttccatgataaatcactgtttgaaatatttggttcatggtatgatcgaaatgtaaaagcataattaacacattggctgctagttaacaattggaataactttattctgcagatcatttaagaagtaacaggccgggcgcggtggctcacgcctgtaatcccagcactttgggaggctgaggcgggcagatcacctgaggtcaggagttggagaccagcctgaccaacatggacaaaccccgtctctactaaaaatacaaaattggcagggtgtggtggcacatgcctataatcccagctacttgggaggctaaggcaggagaatcgcttgaacccgggaggcggaggttgcagtgagccgagatcgcaccattgcactcctgcctgggcaacaagagtgaaactccatctccaaaaaaaaaaagaaaaagtaacaaaaggaaattatttgtttttgaaataccagttcaactttgtggattatttttcctctgaaggaaaagaaaaggcttaatggttaggatttttaagtattcccaaagatctgaagggtaataaaatgtactggattttttaaggtggtaccaaaaatgaatgtctgtcatatatttatattacaaatacattatatttatgttctattcatcttttgaatgtttagtatgctattaagtcattctgaatctttgtatttgcttttgcaaataggtatttcaaagctcttttcctaactggttaagtaaaataaaaaattgagctttctagaatatttgcctaattgggaattaaaaagtaaaa

SEQ ID NO: 27814 - DNA, 1852 bp, Homo sapiens
  source 1..1852: mol_type = unassigned DNA
gcagtgcggcggtcacaggctgagtgctgcggcgcgatccttgcttccctgagcgttggcccgggaggaaagaagatggtgctggatctggatttgtttcgggtggataaaggaggggacccagccctcatccgagagacgcaggagaagcgcttcaaggacccgggactagtggaccagctggtgaaggcagacagcgagtggcgacgatgtagatttcgggcagacaacttgaacaagctgaagaacctatgcagcaagacaatcggagagaaaatgaagaaaaaagagccagtgggagatgatgagtctgtcccagagaatgtgctgagtttcgatgaccttactgcagacgctttagctaacctgaaagtctcacaaatcaaaaaagtccgactcctcattgatgaagccatcctgaagtgtgacgcggagcggataaagttggaagcagagcggtttgagaacctccgagagattgggaaccttctgcacccttctgtacccatcagtaacgatgaggatgtggacaacaaagtagagaggatttggggtgattgtacagtcaggaagaagtactctcatgtggacctggtggtgatggtagatggctttgaaggcgaaaagggggccgtggtggctgggagtcgagggtacttcttgaagggggtcctggtgttcctggaacaggctctcatccagtatgcccttcgcaccttgggaagtcggggctacattcccatttataccccctttttcatgaggaaggaggtcatgcaggaggtggcacagctcagccagtttgatgaagaactttataaggtgattggcaaaggcagtgaaaagtctgatgacaactcctatgatgagaagtacctgattgccacctcagagcagcccattgctgccctgcaccgggatgagtggctccggccggaggacctgcccatcaagtatgctggcctgtctacctgcttccgtcaggaggtgggctcccatggccgtgacacccgtggcatcttccgagtccatcagtttgagaagattgaacagtttgtgtactcatcaccccatgacaacaagtcatgggagatgtttgaagagatgattaccaccgcagaggagttctaccagtccctggggattccttaccacattgtgaatattgtctcaggttctttgaatcatgctgccagtaagaagcttgacctggaggcctggtttccgggctcaggagccttccgtgagttggtctcctgttctaattgcacggattaccaggctcgccggcttcgaatccgatatgggcaaaccaagaagatgatggacaaggtggagtttgtccatatgctcaatgctaccatgtgcgccactacccgtaccatctgcgccatcctggagaactaccagacagagaagggcatcactgtgcctgagaaattgaaggagttcatgccgccaggactgcaagaactgatcccctttgtgaagcctgcgcccattgagcaggagccatcaaagaagcagaagaagcaacatgagggcagcaaaaagaaagcagcagcaagagacgtcaccctagaaaacaggctgcagaacatggaggtcaccgatgcttgaacattcctgcctccctatttgccaggctttcatttctgtctgctgagatctcagagcctgcccaacagcagggaagccaagcacccattcatccccctgcccccatctgactgcgtagctgagaggggaacagtgccatgtaccacacagatgttcctgtctcctcgcatgggcatagggacccatcattgatgactgatgaaaccatgtaataaagcatctctggggaggg

SEQ ID NO: 27815 - DNA, 1882 bp, Homo sapiens
  source 1..1882: mol_type = unassigned DNA
gaggaaagaagatggtgctggatctggatttgtttcgggtggataaaggaggggacccagccctcatccgagagacgcaggagaagcgcttcaaggacccgggactagtggaccagctggtgaaggcagacagcgagtggcgacgatgtagatttcgggcagacaacttgaacaagctgaagaacctatgcagcaagacaatcggagagaaaatgaagaaaaaagagccagtgggagatgatgagtctgtcccagagaatgtgctgagtttcgatgaccttactgcagacgctttagctaacctgaaagtctcacaaatcaaaaaagtccgactcctcattgatgaagccatcctgaagtgtgacgcggagcggataaagttggaagcagagcggtttgagaacctccgagagattgggaaccttctgcacccttctgtacccatcagtaacgatgaggatgtggacaacaaagtagagaggatttggggtgattgtacagtcaggaagaagtactctcatgtggacctggtggtgatggtagatggctttgaaggcgaaaagggggccgtggtggctgggagtcgagggtacttcttgaagggggtcctggtgttcctggaacaggctctcatccagtatgcccttcgcaccttgggaagtcggggctacattcccatttataccccctttttcatgaggaaggaggtcatgcaggaggtggcacagctcagccagtttgatgaagaactttataaggtgattggcaaaggcagtgaaaagtctgatgacaactcctatgatgagaagtacctgattgccacctcagagcagcccattgctgccctgcaccgggatgagtggctccggccggaggacctgcccatcaagtatgctggcctgtctacctgcttccgtcaggaggtgggctcccatggccgtgacacccgtggcatcttccgagtccatcagtttgagaagattgaacagtttgtgtactcatcaccccatgacaacaagtcatgggagatgtttgaagagatgattaccaccgcagaggagttctaccagtccctggggattccttaccacattgtgaatattgtctcaggttctttgaatcatgctgccagtaagaagcttgacctggaggcctggtttccgggctcaggagccttccgtgagttggtctcctgttctaattgcacggattaccaggctcgccggcttcgaatccgatatgggcaaaccaagaagatgatggacaagagaaagaataatctccatttatctacacagaacaagttggaggcttccctcttctcacccaagaaggtggagtttgtccatatgctcaatgctaccatgtgcgccactacccgtaccatctgcgccatcctggagaactaccagacagagaagggcatcactgtgcctgagaaattgaaggagttcatgccgccaggactgcaagaactgatcccctttgtgaagcctgcgcccattgagcaggagccatcaaagaagcagaagaagcaacatgagggcagcaaaaagaaagcagcagcaagagacgtcaccctagaaaacaggctgcagaacatggaggtcaccgatgcttgaacattcctgcctccctatttgccaggctttcatttctgtctgctgagatctcagagcctgcccaacagcagggaagccaagcacccattcatccccctgcccccatctgactgcgtagctgagaggggaacagtgccatgtaccacacagatgttcctgtctcctcgcatgggcatagggacccatcattgatgactgatgaaaccatgtaataaagcatctctggggagggcttaggactcttcctcagtcttcttccc

SEQ ID NO: 27816 - DNA, 1630 bp, Homo sapiens
  source 1..1630: mol_type = unassigned DNA
agtgccgccttgttcccggtccaagatggctgcgtccatggcgcggcgcttgtggcctttgctgactcgtcgggggttccggccccggggaggctgcatctccaacgatagtccaaggagaagtttcactacagagaaacgaaaccggaacctcctgtacgagtatgcgcgcgagggctacagcgcactccctcagctggacatagagcggttctgcgcatgcccagaagaggccgcacacgccctggagctccgcaagggggagctgcgctcggcggacctgcccgcgatcatctcgacatggcaggagctgaggcagctgcaggagcagatccggagcctggaggaagagaaggcagctgtgactgaggcagtgcgggccctgctggcaaaccaggacagtggtgaagtgcagcaggtgcggctggatccaggtgctggctccatatttggtcctacgttcctcccattcccaggccagctttctctccttgtggaggcccagcttgaggagcagttctacctgcaggcgctgaagctgcccaaccagacccacccagacgtgcccgtcggggatgagagccaggctcgagtgctccacatggtcggagacaagccagttttctccttccaacctcggggccacctggaaattggcgagaaactcgacatcatccgtcagaagcgcctgtcccacgtgtctggccaccggtcctattacctgcgcggggctggagccctcctgcagcacggcctggtcaacttcacattcaacaagcttctccgccggggcttcacccccatgacggtgccagaccttctccgcggagcagtgtttgaaggctgtgggatgacaccaaatgccaacccatcccaaatttacaacatcgaccctgcccgcttcaaagatctcaacctggctggaacagcggaggtggggcttgcaggctacttcatggaccacaccgtggccttcagggacctgccagtcaggatggtttgctccagcacctgctaccgggcagagacaaacacgggacaggaaccccgggggctgtatcgagtacaccacttcaccaaggtggagatgtttggggtgacaggccctgggctggagcagagctcacagctgctggaggagttcctgtcccttcagatggagatcttgacagagctgggcttgcacttccgggtcctggatatgcccacccaagaactgggcctccccgcctaccgcaagtttgacattgaggcctggatgccaggccgaggccgctttggagaggtcaccagtgcttccaactgcacagacttccagagccgccgcctccacatcatgttccagaccgaggctggggagctgcagtttgcccacacggtgaacgccaccgcctgtgctgtcccccgccttctcatcgcgctcctggagagtaaccagcagaaggacggctcagtgctcgtgccccctgccctccagtcctacctcggcactgatcggatcacagcccctacccacgtgcctctccagtacatcggccccaaccagccccggaagcctgggctgcctggccagcctgctgtaagctaagaacccacccacagcagccctcgggggtgtcactgcttcctg

SEQ ID NO: 27817 - DNA, 2059 bp, Homo sapiens
  source 1..2059: mol_type = unassigned DNA
tgaagaggcgggacacagacgacgattgggcgacgaaggactctatcgcggtcaactttcctcaggatctgattggctcgtcacggtcaggttcgctgccttgcaattggtctaaacgcggagtgggcgggacgaagtgccgccttgttcccggtccaagatggctgcgtccatggcgcggcgcttgtggcctttgctgactcgtcgggggttccggccccggggaggctgcatctccaacgatagtccaaggagaagtttcactacagagaaacgaaaccggaacctcctgtacgagtatgcgcgcgagggctacagcgcactccctcagctggacatagagcggttctgcgcatgcccagaagaggccgcacacgccctggagctccgcaagggggagctgcgctcggcggacctgcccgcgatcatctcgacatggcaggagctgaggcagctgcaggagcagatccggagcctggaggaagagaaggcagctgtgactgaggcagtgcgggccctgctggcaaaccaggacagtggtgaagtgcagcaggaccccaagtaccagggtctgcgggcacgtggccgggagatccggaaggagcttgttcacctgtaccccagggaggcccagcttgaggagcagttctacctgcaggcgctgaagctgcccaaccagacccacccagacgtgcccgtcggggatgagagccaggctcgagtgctccacatggtcggagacaagccagttttctccttccaacctcggggccacctggaaattggcgagaaactcgacatcatccgtcagaagcgcctgtcccacgtgtctggccaccggtcctattacctgcgcggggctggagccctcctgcagcacggcctggtcaacttcacattcaacaagcttctccgccggggcttcacccccatgacggtgccagaccttctccgcggagcagtgtttgaaggctgtgggatgacaccaaatgccaacccatcccaaatttacaacatcgaccctgcccgcttcaaagatctcaacctggctggaacagcggaggtggggcttgcaggctacttcatggaccacaccgtggccttcagggacctgccagtcaggatggtttgctccagcacctgctaccgggcagagacaaacacgggacaggaaccccgggggctgtatcgagtacaccacttcaccaaggtggagatgtttggggtgacaggccctgggctggagcagagctcacagctgctggaggagttcctgtcccttcagatggagatcttgacagagctgggcttgcacttccgggtcctggatatgcccacccaagaactgggcctccccgcctaccgcaagtttgacattgaggcctggatgccaggccgaggccgctttggagaggtcaccagtgcttccaactgcacagacttccagagccgccgcctccacatcatgttccagaccgaggctggggagctgcagtttgcccacacggtgaacgccaccgcctgtgctgtcccccgccttctcatcgcgctcctggagagtaaccagcagaaggacggctcagtgctcgtgccccctgccctccagtcctacctcggcactgatcggatcacagcccctacccacgtgcctctccagtacatcggccccaaccagccccggaagcctgggctgcctggccagcctgctgtaagctaagaacccacccacagcagccctcgggggtgtcactgcttcctggagttcaggagaccccggacacctgggacctgtgttgctgagcccgtcctgacatctgtgttcttcctgtcagctccacgcccgggcccctggaccacggggtccacctctcctctgtccttgctgcctcagagtcagtcactgaccctgttatcattgagggtcccagtgggaagcaggacgtctgggctttacggttctagggacaggagaagcagaggaagaggcttccatccctccttccttctttcctcctacagtgctgagcaaaaagtccccaataaatggtcaggacaaagg

SEQ ID NO: 27818 - DNA, 2215 bp, Homo sapiens
  source 1..2215: mol_type = unassigned DNA
agccgccacgccccgggagaggaccgaccgcccagaccgccggtcccggggccccctgggccacgccgatcacggggagcccctcgactgcctcccagaacaaagtgggaaagggaagcttagcccgccgctgccgcctccgagcagcccgccaggactctggctactggagatgggcgcccggctatcgcggcgacggctgccggcggacccatccctggccctggacgcgctgcccccggagctgctggtgcaggtgctgagccacgtgccgccacgctccttggtcacgcgatgccgcccagtgtgccgcgcctggcgcgacatagtggacgggcccactgtgtggctgctgcagctggcccgcgaccgcagcgccgagggccgcgcactctacgcagtggctcaacgctgcctgcccagcaacgaagacaaggaggagttcccgctgtgcgccctggcgcgctactgtctgcgcgcgcccttcggccgcaatctcatcttcaactcctgcggagagcagggcttcagaggctgggaggtggagcatggcgggaacggctgggccatagaaaagaacctaacaccggtgcctggggctccttcgcagacctgcttcgtgacctctttcgaatggtgctccaagaggcagcttgtggacctggtgatggaaggggtgtggcaggagctgctggacagcgcccagattgagatctgtgtggctgactggtggggcgctcgagagaactgcggctgcgtctaccagctccgggtccgccttctggatgtgtatgaaaaggaagtggtcaagttctcagcctcacctgacccggtccttcagtggactgagaggggctgccgacaggtctcccacgtcttcaccaactttggcaagggcatccgctacgtatcttttgagcagtacgggagagacgtgagttcctgggtggggcactatggcgcccttgtgacccactccagtgtgagggtcaggatccgtctgtcctagcgactggactactgcctgacgttgtcagtcaagaccagccttgcagccaggtgcagtggctcacacctgtggaatcccagcacttcaggaggccgaggtgggaggatcactggagctcgggagttcaagaccagcctgggcaacatagtgaaaccgtctccacaaataatttttaaaaaattagccaggcatggtggtgccgcctgtagtcccagctactcaggaggcttgggtgggaggattgcctgagaccaggaggttgaggctgcagtgagccgtgatttcaccaccactccagcctgggtgagaaagcaagaccctatatcaatgaaaaaaaaaaaaaaaaagaccagctttgcagccagaagccagaggatacccagggacagtagggctcccaggtggctggttctcagcacaccttccatgaatctgcttgctgctgcttcagtgtggtggccatcatgctgtgtgacaaaccaggctgttcacagcttcctcagccccccagaaggggagtgtcaggaagagacatttagttcatttgcctgcaaattttcttctcctgcaaggatctcggtggactcagtcacaaaacaaaggctaaaccaggatttataagagagggcttataaatccctctgccgacgcagggagcagagacttgccggcatgttttgggggtaatgatcgtgggcagggagcagaggtccgctgaggcagtctgtccttgagactaacaaagtcatctgctgtttggggaaatctctggtgttgggaacaggcccccaaatctggccataaactggccccaaaactggccataaacaaaatatctgcagcactgtgacatgtttgtgatggccatgacccccaccctgaaggttgtgggtttactggaacgagggcgaggaacacctggcccacccagggcggaaaaccgcttaaaggggttcctgaaccacaaaccatagcataagtgatctgtgccttaacgacatgttcctgctgcagataactagccagacccatccctttatttcagcccatccctttatttcctgtaagaaatgtttttagttaatctataatctatagaaataatgcttatcactggcttgctgtcaataaatatgtgggtaaatctctgttcaaggctctcagctctgaaggccgtgagacccctgatttcccactccacaccct

SEQ ID NO: 27819 - DNA, 2070 bp, Homo sapiens
  source 1..2070: mol_type = unassigned DNA
ttcaaacaaggactctggctactggagatgggcgcccggctatcgcggcgacggctgccggcggacccatccctggccctggacgcgctgcccccggagctgctggtgcaggtgctgagccacgtgccgccacgctccttggtcacgcgatgccgcccagtgtgccgcgcctggcgcgacatagtggacgggcccactgtgtggctgctgcagctggcccgcgaccgcagcgccgagggccgcgcactctacgcagtggctcaacgctgcctgcccagcaacgaagacaaggaggagttcccgctgtgcgccctggcgcgctactgtctgcgcgcgcccttcggccgcaatctcatcttcaactcctgcggagagcagggcttcagaggctgggaggtggagcatggcgggaacggctgggccatagaaaagaacctaacaccggtgcctggggctccttcgcagacctgcttcgtgacctctttcgaatggtgctccaagaggcagcttgtggacctggtgatggaaggggtgtggcaggagctgctggacagcgcccagattgagatctgtgtggctgactggtggggcgctcgagagaactgcggctgcgtctaccagctccgggtccgccttctggatgtgtatgaaaaggaagtggtcaagttctcagcctcacctgacccggtccttcagtggactgagaggggctgccgacaggtctcccacgtcttcaccaactttggcaagggcatccgctacgtatcttttgagcagtacgggagagacgtgagttcctgggtggggcactatggcgcccttgtgacccactccagtgtgagggtcaggatccgtctgtcctagcgactggactactgcctgacgttgtcagtcaagaccagccttgcagccaggtgcagtggctcacacctgtggaatcccagcacttcaggaggccgaggtgggaggatcactggagctcgggagttcaagaccagcctgggcaacatagtgaaaccgtctccacaaataatttttaaaaaattagccaggcatggtggtgccgcctgtagtcccagctactcaggaggcttgggtgggaggattgcctgagaccaggaggttgaggctgcagtgagccgtgatttcaccaccactccagcctgggtgagaaagcaagaccctatatcaatgaaaaaaaaaaaaaaaaagaccagctttgcagccagaagccagaggatacccagggacagtagggctcccaggtggctggttctcagcacaccttccatgaatctgcttgctgctgcttcagtgtggtggccatcatgctgtgtgacaaaccaggctgttcacagcttcctcagccccccagaaggggagtgtcaggaagagacatttagttcatttgcctgcaaattttcttctcctgcaaggatctcggtggactcagtcacaaaacaaaggctaaaccaggatttataagagagggcttataaatccctctgccgacgcagggagcagagacttgccggcatgttttgggggtaatgatcgtgggcagggagcagaggtccgctgaggcagtctgtccttgagactaacaaagtcatctgctgtttggggaaatctctggtgttgggaacaggcccccaaatctggccataaactggccccaaaactggccataaacaaaatatctgcagcactgtgacatgtttgtgatggccatgacccccaccctgaaggttgtgggtttactggaacgagggcgaggaacacctggcccacccagggcggaaaaccgcttaaaggggttcctgaaccacaaaccatagcataagtgatctgtgccttaacgacatgttcctgctgcagataactagccagacccatccctttatttcagcccatccctttatttcctgtaagaaatgtttttagttaatctataatctatagaaataatgcttatcactggcttgctgtcaataaatatgtgggtaaatctctgttcaaggctctcagctctgaaggccgtgagacccctgatttcccactccacaccct

SEQ ID NO: 27820 - DNA, 2065 bp, Homo sapiens
  source 1..2065: mol_type = unassigned DNA
tgaagaggcgggacacagacgacgattgggcgacgaaggactctatcgcggtcaactttcctcaggatctgattggctcgtcacggtcaggttcgctgccttgcaattggtctaaacgcggagtgggcgggacgaagtgccgccttgttcccggtccaagatggctgcgtccatggcgcggcgcttgtggcctttgctgactcgtcgggggttccggccccggggaggctgcatctccaacgatagtccaaggagaagtttcactacagagaaacgaaaccggaacctcctgtacgagtatgcgcgcgagggctacagcgcactccctcagctggacatagagcggttctgcgcatgcccagaagaggccgcacacgccctggagctccgcaagggggagctgcgctcggcggacctgcccgcgatcatctcgacatggcaggagctgaggcagctgcaggagcagatccggagcctggaggaagagaaggcagctgtgactgaggcagtgcgggccctgctggcaaaccaggacagtggtgaagtgcagcaggtgcggctggatccaggtgctggctccatatttggtcctacgttcctcccattcccaggccagctttctctccttgtggaggcccagcttgaggagcagttctacctgcaggcgctgaagctgcccaaccagacccacccagacgtgcccgtcggggatgagagccaggctcgagtgctccacatggtcggagacaagccagttttctccttccaacctcggggccacctggaaattggcgagaaactcgacatcatccgtcagaagcgcctgtcccacgtgtctggccaccggtcctattacctgcgcggggctggagccctcctgcagcacggcctggtcaacttcacattcaacaagcttctccgccggggcttcacccccatgacggtgccagaccttctccgcggagcagtgtttgaaggctgtgggatgacaccaaatgccaacccatcccaaatttacaacatcgaccctgcccgcttcaaagatctcaacctggctggaacagcggaggtggggcttgcaggctacttcatggaccacaccgtggccttcagggacctgccagtcaggatggtttgctccagcacctgctaccgggcagagacaaacacgggacaggaaccccgggggctgtatcgagtacaccacttcaccaaggtggagatgtttggggtgacaggccctgggctggagcagagctcacagctgctggaggagttcctgtcccttcagatggagatcttgacagagctgggcttgcacttccgggtcctggatatgcccacccaagaactgggcctccccgcctaccgcaagtttgacattgaggcctggatgccaggccgaggccgctttggagaggtcaccagtgcttccaactgcacagacttccagagccgccgcctccacatcatgttccagaccgaggctggggagctgcagtttgcccacacggtgaacgccaccgcctgtgctgtcccccgccttctcatcgcgctcctggagagtaaccagcagaaggacggctcagtgctcgtgccccctgccctccagtcctacctcggcactgatcggatcacagcccctacccacgtgcctctccagtacatcggccccaaccagccccggaagcctgggctgcctggccagcctgctgtaagctaagaacccacccacagcagccctcgggggtgtcactgcttcctggagttcaggagaccccggacacctgggacctgtgttgctgagcccgtcctgacatctgtgttcttcctgtcagctccacgcccgggcccctggaccacggggtccacctctcctctgtccttgctgcctcagagtcagtcactgaccctgttatcattgagggtcccagtgggaagcaggacgtctgggctttacggttctagggacaggagaagcagaggaagaggcttccatccctccttccttctttcctcctacagtgctgagcaaaaagtccccaataaatggtcaggacaaagg

SEQ ID NO: 27821 - DNA, 1967 bp, Homo sapiens
  source 1..1967: mol_type = unassigned DNA
agggggcggggctgagggacgcagtgcctgggcggtaggcccggtgggcggggctggagaagagggcttcagaggctgggaggtggagcatggcgggaacggctgggccatagaaaagaacctaacaccggtgcctggggctccttcgcagacctgcttcgtgacctctttcgaatggtgctccaagaggcagcttgtggacctggtgatggaaggggtgtggcaggagctgctggacagcgcccagattgagatctgtgtggctgactggtggggcgctcgagagaactgcggctgcgtctaccagctccgggtccgccttctggatgtgtatgaaaaggaagtggtcaagttctcagcctcacctgacccggtccttcagtggactgagaggggctgccgacaggtctcccacgtcttcaccaactttggcaagggcatccgctacgtatcttttgagcagtacgggagagacatctcgacatggcaggagctgaggcagctgcaggagcagatccggagcctggaggaagagaaggcagctgtgactgaggcagtgcgggccctgctggcaaaccaggacagtggtgaagtgcagcaggaccccaagtaccagggtctgcgggcacgtggccgggagatccggaaggagcttgttcacctgtaccccagggaggcccagcttgaggagcagttctacctgcaggcgctgaagctgcccaaccagacccacccagacgtgcccgtcggggatgagagccaggctcgagtgctccacatggtcggagacaagccagttttctccttccaacctcggggccacctggaaattggcgagaaactcgacatcatccgtcagaagcgcctgtcccacgtgtctggccaccggtcctattacctgcgcggggctggagccctcctgcagcacggcctggtcaacttcacattcaacaagcttctccgccggggcttcacccccatgacggtgccagaccttctccgcggagcagtgtttgaaggctgtgggatgacaccaaatgccaacccatcccaaatttacaacatcgaccctgcccgcttcaaagatctcaacctggctggaacagcggaggtggggcttgcaggctacttcatggaccacaccgtggccttcagggacctgccagtcaggatggtttgctccagcacctgctaccgggcagagacaaacacgggacaggaaccccgggggctgtatcgagtacaccacttcaccaaggtggagatgtttggggtgacaggccctgggctggagcagagctcacagctgctggaggagttcctgtcccttcagatggagatcttgacagagctgggcttgcacttccgggtcctggatatgcccacccaagaactgggcctccccgcctaccgcaagtttgacattgaggcctggatgccaggccgaggccgctttggagaggtcaccagtgcttccaactgcacagacttccagagccgccgcctccacatcatgttccagaccgaggctggggagctgcagtttgcccacacggtgaacgccaccgcctgtgctgtcccccgccttctcatcgcgctcctggagagtaaccagcagaaggacggctcagtgctcgtgccccctgccctccagtcctacctcggcactgatcggatcacagcccctacccacgtgcctctccagtacatcggccccaaccagccccggaagcctgggctgcctggccagcctgctgtaagctaagaacccacccacagcagccctcgggggtgtcactgcttcctggagttcaggagaccccggacacctgggacctgtgttgctgagcccgtcctgacatctgtgttcttcctgtcagctccacgcccgggcccctggaccacggggtccacctctcctctgtccttgctgcctcagagtcagtcactgaccctgttatcattga

SEQ ID NO: 27822 - DNA, 1118 bp, Homo sapiens
  source 1..1118: mol_type = unassigned DNA
gtgccgccttgttcccggtccaagatggctgcgtccatggcgcggcgcttgtggcctttgctgactcgtcgggggttccggccccggggaggctgcatctccaacgatagtccaaggagaagtttcactacagagaaacgaaaccggaacctcctgtacgagtatgcgcgcgagggctacagcgcactccctcagctggacatagagcggttctgcgcatgcccagaagaggccgcacacgccctggagctccgcaagggggagctgcgctcggcggacctgcccgcgatcatctcgacatggcaggagctgaggcagctgcaggagcagatccggagcctggaggaagagaaggcagctgtgactgaggcagtgcgggccctgctggcaaaccaggacagtggtgaagtgcagcaggaccccaagtaccagggtctgcgggcacgtggccgggagatccggaaggagcttgttcacctgtaccccagggaggcccagcttgaggagcagttctacctgcaggcgctgaagctgcccaaccagacccacccagacgtgcccgtcggggatgagagccaggctcgagtgctccacatggtcggagacaagccaggcgcctgtcccacgtgtctggccaccggtcctattacctgcgcggggctggagccctcctgcagcacggcctggtcaacttcacattcaacaagcttctccgccggggcttcacccccatgacggtgccagaccttctccgcggagcagtgtttgaaggctgtgggatgacaccaaatgccaacccatcccaaatttacaacatcgaccctgcccgcttcaaagatctcaacctggctggaacagcggaggtggggcttgcaggctacttcatggaccacaccgtggccttcagggacctgccagtcaggatggtttgctccagcacctgctaccgggcagagacaaacacgggacaggaaccccgggggctgtatcgagtacaccacttcaccaaggtggagatgtttggggtgacaggccctgggctggagcagagctcacagctgctggaggagttcctgtcccttcagatggagatcttgacagagctgggcttgcacttc

SEQ ID NO: 27823 - DNA, 2718 bp, Homo sapiens
  source 1..2718: mol_type = unassigned DNA
tgaaacagcctgtggatatgccccctcgattgtcttgtcttgtgaaaacagattatttagccaccttcatcccctttgcctcctacttaaaagagagagaaagaaaaaaaacacatttgactcagggaagagatgatgttgcctggaataagtgtgtcctgcaagctctatgacgttatgcacagcgtttactcttgcgtattaagccatcccttttctgaattgtcctttagaaagaggaacttggcattagaattcctcgaccactaggacagggaccaagcagattcatcccagaaaaggagatcctccaagtggggagtgaagacgcacagatgcatgctttatttgcagattcttttgctgctttgggccgtttggataacattacgttagtgatggttttccacccacaatatttagaaagtttcttaaaaactcagcactatctactgcaaatggatgggccgttacccctacattatcgtcactacattggaataatggctgcggcaagacatcagtgctcctacttagtgaacctgcatgtaaatgatttccttcatgttggtggggaccccaagtggctcaatggtttagagaatgctcctcaaaaactacagaatttaggagaacttaacaaagtgttagcccatagaccttggcttattaccaaagaacacattgagggacttttaaaagctgaagagcacagctggtcccttgcggaattggtacatgcagtagttttactcacacactatcattctcttgcctcattcacattcggctgtggaatcagtccagaaattcattgtgatggtggccacacattcagacctccttctgttagcaactactgcatctgtgacattacaaatggcaatcacagtgtggatgagatgccggtcaactcagcagaaaatgtttctgtaagtgattctttctttgaggttgaagccctcatggaaaagatgaggcagttacaggaatgtcgagatgaagaagaggcaagtcaggaagagatggcttcacgttttgaaatagaaaaaagagagagtatgtttgtcttctcttcagatgatgaagaagttacaccagcaagagctgtatctcgtcattttgaggatactagttatggctataaagatttctctagacatgggatgcatgttccaacatttcgtgtccaggactattgctgggaagatcatggttattctttggtaaatcgcctttatccagatgtgggacagttgattgatgaaaaatttcacattgcttacaatcttacttataatacaatggcaatgcacaaagatgttgatacctcaatgcttagacgggcaatttggaactatattcactgcatgtttggaataagatatgatgattatgactatggtgaaattaaccagctattggatcgtagctttaaagtttatatcaaaactgttgtttgcactcctgaaaaggttaccaaaagaatgtatgatagcttctggaggcagttcaagcactctgagaaggttcatgttaatctgcttcttatagaagctaggatgcaagcagaactcctttatgctctgagagccattacccgctatatgacctgatgcctttccttcattaaagatgattctggaatgatcagcagatatagtctacaagggggaaggtactaagccccaggaccaatggtagacaaaataattcagaaatccattgtgccatgattcctttagtttctgctatttttctgtggaaaaccactgctggcacaagcagtgactgtttggcagcttcaagtttagagctgtgaagacaggctgccattcacagtattttgctttttgacagtacaagatgctgtgtaactgttttaatacagcaaatagtaactctccaaatcctgttgcttttatgttaaataagataacaagaattggagcatgcaaagaatgggacttggataatgacttaagctttatatgtaaagaattttagaagatcttggtgctgctattcctgctggaggaatgaatagatggctgtttcagttaagctattagtaataaaagtgaacattgctactatctgagcctacatacataacttgtgtgatttcaaattaaacttgcattatgtgttaattttcttgcatctaaaaaagcatagaattcctactcacacagctcagcaacaaccattttgatggtaacagttaatttctttcattagttttttaaattcagggttctggatattaaattaaaatggcattcttaaagattttcttcaaaaagcaatcctaaatgaaagtgtgtaaattataagaagctggcgatcttttgatatgctgtttcacaggatcctgacactggagggcagctgtcttgtgcattacttgtgtttccagcaccaaagttgtgggacatgttgctgtagactgctgcgcagtcctgggtgcattcagtctctctgcctctgcctgcctcctggtccccactttaaaggctgtgcagctccttaaataataaagctggaaaatatttttagtcgggttatcaaatttgatttacaaaaacgctaactttgtttgaaatgcaaacaggtttgaaaatatgtattaagtactttgtattctggaagcgtgaattgcttttgaagtctgtcagtattactggtatttttaaataaagaagaatttttctccaa

SEQ ID NO: 27824 - DNA, 2676 bp, Homo sapiens
  source 1..2676: mol_type = unassigned DNA
gccgtccgtgctgactgaggcgctgcagccaggagccgcggccggctgcccagcgctcgccgcctccgcgcgtccgcagccgtccccgcgccgacatgcgcttggccgccgccgcgaacgaggcgtacacggcccctttggcggtctcggggctgctgggctgcaagcagtgcggcgggggccgcgaccaggacgaggaacttggcattagaattcctcgaccactaggacagggaccaagcagattcatcccagaaaaggagatcctccaagtggggagtgaagacgcacagatgcatgctttatttgcagattcttttgctgctttgggccgtttggataacattacgttagtgatggttttccacccacaatatttagaaagtttcttaaaaactcagcactatctactgcaaatggatgggccgttacccctacattatcgtcactacattggaataatggctgcggcaagacatcagtgctcctacttagtgaacctgcatgtaaatgatttccttcatgttggtggggaccccaagtggctcaatggtttagagaatgctcctcaaaaactacagaatttaggagaacttaacaaagtgttagcccatagaccttggcttattaccaaagaacacattgagggacttttaaaagctgaagagcacagctggtcccttgcggaattggtacatgcagtagttttactcacacactatcattctcttgcctcattcacattcggctgtggaatcagtccagaaattcattgtgatggtggccacacattcagacctccttctgttagcaactactgcatctgtgacattacaaatggcaatcacagtgtggatgagatgccggtcaactcagcagaaaatgtttctgtaagtgattctttctttgaggttgaagccctcatggaaaagatgaggcagttacaggaatgtcgagatgaagaagaggcaagtcaggaagagatggcttcacgttttgaaatagaaaaaagagagagtatgtttgtcttctcttcagatgatgaagaagttacaccagcaagagctgtatctcgtcattttgaggatactagttatggctataaagatttctctagacatgggatgcatgttccaacatttcgtgtccaggactattgctgggaagatcatggttattctttggtaaatcgcctttatccagatgtgggacagttgattgatgaaaaatttcacattgcttacaatcttacttataatacaatggcaatgcacaaagatgttgatacctcaatgcttagacgggcaatttggaactatattcactgcatgtttggaataagatatgatgattatgactatggtgaaattaaccagctattggatcgtagctttaaagtttatatcaaaactgttgtttgcactcctgaaaaggttaccaaaagaatgtatgatagcttctggaggcagttcaagcactctgagaaggttcatgttaatctgcttcttatagaagctaggatgcaagcagaactcctttatgctctgagagccattacccgctatatgacctgatgcctttccttcattaaagatgattctggaatgatcagcagatatagtctacaagggggaaggtactaagccccaggaccaatggtagacaaaataattcagaaatccattgtgccatgattcctttagtttctgctatttttctgtggaaaaccactgctggcacaagcagtgactgtttggcagcttcaagtttagagctgtgaagacaggctgccattcacagtattttgctttttgacagtacaagatgctgtgtaactgttttaatacagcaaatagtaactctccaaatcctgttgcttttatgttaaataagataacaagaattggagcatgcaaagaatgggacttggataatgacttaagctttatatgtaaagaattttagaagatcttggtgctgctattcctgctggaggaatgaatagatggctgtttcagttaagctattagtaataaaagtgaacattgctactatctgagcctacatacataacttgtgtgatttcaaattaaacttgcattatgtgttaattttcttgcatctaaaaaagcatagaattcctactcacacagctcagcaacaaccattttgatggtaacagttaatttctttcattagttttttaaattcagggttctggatattaaattaaaatggcattcttaaagattttcttcaaaaagcaatcctaaatgaaagtgtgtaaattataagaagctggcgatcttttgatatgctgtttcacaggatcctgacactggagggcagctgtcttgtgcattacttgtgtttccagcaccaaagttgtgggacatgttgctgtagactgctgcgcagtcctgggtgcattcagtctctctgcctctgcctgcctcctggtccccactttaaaggctgtgcagctccttaaataataaagctggaaaatatttttagtcgggttatcaaatttgatttacaaaaacgctaactttgtttgaaatgcaaacaggtttgaaaatatgtattaagtactttgtattctggaagcgtgaattgcttttgaagtctgtcagtattactggtatttttaaataaagaagaatttttctccaa

SEQ ID NO: 27825 - DNA, 3509 bp, Homo sapiens
  source 1..3509: mol_type = unassigned DNA
gattgccagggccgccctgtgccctctggctcggcggtggtgggcgagggctcagggatcggagaagtagcgtcttcccgggggtgccgaattggcggggctgggggacgctttttttcaccgccgcccgccgagactacggctgcccgagactgccgccctccgacagcgcccaagcctccggccgctgcggccagtgggccagggttcggcgagccttccctgccggcgccggccggctgctgaggcgctgggaggagctgcggagggcggggactggtgtcggagaaggggcggggtgggaacgccggagagaacccggtggctgcacagacaaaaaagccccgaatggctggagggcgttcagctgttaacagccttttggggcagagcacggatttgacagctccacaacgtgaggatatccactgaccccgcgagacggaggagaacgcttccccgaaattctctgcccaccaaagccagcgctgcaaggttgcaactttcaaactttgtttttccagaaagaagactgccctttcgtgtacaaggagagggtgagagggtgacctagcttgtagatcggctgaaggcaccagtggttccaaatgtcacccagatgtgtgttttcatgacgatttgatttctctgattttatttttacatttttcattttaaaaatacaaagcaatttttttggggcatgctgaaaggtaactgaagaccgcaaaggaaaaactattgtcatggctgaaggagagaatgaagtgagatgggatggactctgcagcagagattcaactactagggagacagcattggaaaacattaggcaaaccattttgaggaaaaccgagtatcttcgttcggtgaaagaaacacctcatcgtccatcagacgggctttcaaataccgagtcttcggatgggttgaataagctacttgctcatctgcttatgctttctaagaggtgtcccttcaaagatgtgagagagaaaagtgagtttattctgaagagcatccaggaacttggcattagaattcctcgaccactaggacagggaccaagcagattcatcccagaaaaggagatcctccaagtggggagtgaagacgcacagatgcatgctttatttgcagattcttttgctgctttgggccgtttggataacattacgttagtgatggttttccacccacaatatttagaaagtttcttaaaaactcagcactatctactgcaaatggatgggccgttacccctacattatcgtcactacattggaataatggctgcggcaagacatcagtgctcctacttagtgaacctgcatgtaaatgatttccttcatgttggtggggaccccaagtggctcaatggtttagagaatgctcctcaaaaactacagaatttaggagaacttaacaaagtgttagcccatagaccttggcttattaccaaagaacacattgagggacttttaaaagctgaagagcacagctggtcccttgcggaattggtacatgcagtagttttactcacacactatcattctcttgcctcattcacattcggctgtggaatcagtccagaaattcattgtgatggtggccacacattcagacctccttctgttagcaactactgcatctgtgacattacaaatggcaatcacagtgtggatgagatgccggtcaactcagcagaaaatgtttctgtaagtgattctttctttgaggttgaagccctcatggaaaagatgaggcagttacaggaatgtcgagatgaagaagaggcaagtcaggaagagatggcttcacgttttgaaatagaaaaaagagagagtatgtttgtcttctcttcagatgatgaagaagttacaccagcaagagctgtatctcgtcattttgaggatactagttatggctataaagatttctctagacatgggatgcatgttccaacatttcgtgtccaggactattgctgggaagatcatggttattctttggtaaatcgcctttatccagatgtgggacagttgattgatgaaaaatttcacattgcttacaatcttacttataatacaatggcaatgcacaaagatgttgatacctcaatgcttagacgggcaatttggaactatattcactgcatgtttggaataagatatgatgattatgactatggtgaaattaaccagctattggatcgtagctttaaagtttatatcaaaactgttgtttgcactcctgaaaaggttaccaaaagaatgtatgatagcttctggaggcagttcaagcactctgagaaggttcatgttaatctgcttcttatagaagctaggatgcaagcagaactcctttatgctctgagagccattacccgctatatgacctgatgcctttccttcattaaagatgattctggaatgatcagcagatatagtctacaagggggaaggtactaagccccaggaccaatggtagacaaaataattcagaaatccattgtgccatgattcctttagtttctgctatttttctgtggaaaaccactgctggcacaagcagtgactgtttggcagcttcaagtttagagctgtgaagacaggctgccattcacagtattttgctttttgacagtacaagatgctgtgtaactgttttaatacagcaaatagtaactctccaaatcctgttgcttttatgttaaataagataacaagaattggagcatgcaaagaatgggacttggataatgacttaagctttatatgtaaagaattttagaagatcttggtgctgctattcctgctggaggaatgaatagatggctgtttcagttaagctattagtaataaaagtgaacattgctactatctgagcctacatacataacttgtgtgatttcaaattaaacttgcattatgtgttaattttcttgcatctaaaaaagcatagaattcctactcacacagctcagcaacaaccattttgatggtaacagttaatttctttcattagttttttaaattcagggttctggatattaaattaaaatggcattcttaaagattttcttcaaaaagcaatcctaaatgaaagtgtgtaaattataagaagctggcgatcttttgatatgctgtttcacaggatcctgacactggagggcagctgtcttgtgcattacttgtgtttccagcaccaaagttgtgggacatgttgctgtagactgctgcgcagtcctgggtgcattcagtctctctgcctctgcctgcctcctggtccccactttaaaggctgtgcagctccttaaataataaagctggaaaatatttttagtcgggttatcaaatttgatttacaaaaacgctaactttgtttgaaatgcaaacaggtttgaaaatatgtattaagtactttgtattctggaagcgtgaattgcttttgaagtctgtcagtattactggtatttttaaataaagaagaatttttctccaatttta

SEQ ID NO: 27826 - DNA, 1671 bp, Homo sapiens
  source 1..1671: mol_type = unassigned DNA
gcggccgcgccccgccgccaccatgagggccgagggcctcggcggcctggagcgcttctgcagcccgggcaaaggccgggggctgcgggctctgcagcccttccaggtgggggacttgctgttctcctgcccggcctatgcctacgtgctcacggtcaacgagcggggcaaccactgcgagtactgcttcaccaggaaagaaggattgtccaaatgtggaagatgcaagcaggcattttactgcaatgtggagtgtcagaaagaagattggcccatgcacaagctggaatgttctcccatggttgtttttggggaaaactggaatccctcggagactgtaagactaacagcaaggattctggccaaacagaaaatccacccagagagaacaccttcggaaaaattgttagctgtgaaggagtttgaatcacatctggataagttagacaatgagaagaaggatttgattcagagtgacatagctgctctccatcacttttactccaagcatctcggattccctgacaatgatagcctcgtagtactctttgcacaggttaactgtaatggcttcacaattgaagatgaagaactttctcatttgggatcagcgatatttcctgatgttgcattgatgaatcatagctgttgccccaatgtcattgtgacctacaaagggaccctggcagaagtcagagctgtacaggaaatcaagccgggagaggaggtttttaccagctatattgatctcctgtacccaacggaagatagaaatgaccggttaagagattcttatttctttacctgtgagtgccaggagtgtaccaccaaggacaaggataaggccaaggtggaaatccggaagctcagcgatcccccaaaggcagaagccatccgagacatggtcagatatgcacgcaacgtcattgaagagttccggagggccaagcactataaatcccctagtgagctgctggagatctgcgagctcagccaggagaagatgagctctgtgtttgaggacagtaacgtgtacatgttgcacatgatgtaccaggccatgggtgtctgcttgtacatgcaggactgggaaggagccctgcaatatggacagaaaatcattaagccctacagtaagcactatcctttgtactccctcaacgtggcctccatgtggttgaagctagggagactctacatgggcctggaacacaaagccgcaggggagaaagccctgaagaaggccattgcaatcatggaagtagctcacggcaaagatcatccatatatttctgagatcaaacaggaaattgaaagccactgaaactatgcagcatttcagttttcatttaaacacttagttcagaaaccttaaaggatttgaatatttcaaattgcacacgtcactccagcatctctgtaaaataattggaatgaaaatacttcttgcacttaaacactgcacatgccgtactttgaggttagtctgaatcttgaactttaataccaaattaattttgaatgcttttgtttcctaagagataatggcatggtttcatatgttatactttggacagacagagttttaaaaatggaattattttttctttcatgcctcttgtaatgttctgaacaaacttgaatgatgaaagtattaaagagatatcagta

SEQ ID NO: 27827 - DNA, 1078 bp, Homo sapiens
  source 1..1078: mol_type = unassigned DNA
gcggccgcgccccgccgccaccatgagggccgagggcctcggcggcctggagcgcttctgcagcccgggcaaaggccgggggctgcgggctctgcagcccttccaggtgggggacttgctgttctcctgcccggcctatgcctacgtgctcacggtcaacgagcggggcaaccactgcgagtactgcttcaccaggaaagaaggattgtccaaatgtggaagatgcaagcaggcattttactgcaatgtggagtgtcagaaagaagattggcccatgcacaagctggaatgttctcccatggttgtttttggggaaaactggaatccctcggagactgtaagactaacagcaaggattctggccaaacagaaaatccacccagagagaacaccttcggaaaaattgttagctgtgaaggagtttgaatcacatctggataagttagacaatgagaagaaggatttgattcagagtgacatagctgctctccatcacttttactccaagcatctcggattccctgacaatgatagcctcgtagtactctttgcacaggttaactgtaatggcttcacaattgaagatgaagaactttctcatttgggatcagcgatatttcctgatgttgcattgatgaatcatagctgttgccccaatgtcattgtgacctacaaagggaccctggcagaagtcagagctgtacaggaaatcaagccgggagaggaggtttttaccagctatattgatctcctgtacccaacggaagatagaaatgaccggttaagagattcttatttctttacctgtgagtgccaggagtgtaccaccaaggacaagtaagcactatcctttgtactccctcaacgtggcctccatgtggttgaagctagggagactctacatgggcctggaacacaaagccgcaggggagaaagccctgaagaaggccattgcaatcatggaagtagctcacggcaaagatcatccatatatttctgagatcaaacaggaaattgaaagccactgaaactatgcagcatttcagttttcatttaaacacttagttcagaaacctta

SEQ ID NO: 27828 - DNA, 5735 bp, Homo sapiens
  source 1..5735: mol_type = unassigned DNA
gggcgggccggctggctgggaagatggcggcgggaacctgggccgccgccgccgccgccgccgccgcggactacttcgtgctggtggcgttcgggccgcacccgcgcgggagtggggaaggccagggccagattctgcagcgcttcccagagaaggactgggaggacaacccattcccccagggcatcgagctgttttgccagcccagcgggtggcagctgtgtcccgagaggaatccaccgaccttctttgttgctgtcctcaccgacatcaactccgagcgccactactgcgcctgcttgaccttctgggagccagcggagccttcacaggaaacgacgcgcgtggaggatgccacagagagggaggaagagggggatgagggaggccagacccacctgtctcccacagcacctgccccatctgcccagctgtttgcaccgaagacgctggtactggtgtcgcgactcgaccacacggaggtgttcaggaacagccttggcctcatctatgccatccacgtggagggcctgaatgtgtgcctggagaacgtgattgggaacctgctgacgtgcactgtgcccctggctgggggctcgcagaggacgatctctttgggggctggtgaccggcaggtcatccagactccactggccgactcgctgcccgtcagccgctgcagcgtggccctgctcttccgccagctaggcatcaccaacgtgctgtctttgttctgtgccgccctcacggagcacaaggttctcttcctgtcccggagctaccagcggctcgccgatgcctgtaggggcctcctggcactgctgtttcctctcagatacagcttcacctatgtgcccatcctgccggctcagctgctggaggtcctcagcacacccacgcccttcatcattggggtcaacgcggccttccaggcagagacccaggagctgctcgatgtgattgttgctgatctggatggagggacggtcaccattcctgagtgtgtgcacattccacccttgccagagccactgcagagtcagacgcacagtgtgctgagcatggtcctggacccggagctggagttggctgacctcgccttccctccgcccacgacatccacctcctccctgaagatgcaggacaaggagctgcgcgcggtcttcctgcggctgttcgctcagctgctgcagggctatcgctggtgcctgcacgtcgtgcgcatccacccggagcctgtcatccgcttccataaggcagccttcctgggccagcgtgggctggtagaggacgatttcctgatgaaggtgctggagggcatggcctttgctggctttgtgtcagagcgtggggtcccataccgccctacggacctgttcgatgagctggtggcccacgaggtggcaaggatgcgggcggatgagaaccacccccagcgtgtcctgcgtcacgtccaggaactggcagagcagctctacaagaacgagaacccgtacccagccgtggcgatgcacaaggtacagaggcccggtgagagcagccacctgcgacgggtgccccgacccttcccccggctggatgagggcaccgtgcagtggatcgtggaccaggctgcagccaagatgcagggtgcacccccagctgtgaaggccgagaggaggaccaccgtgccctcagggccccccatgactgccatactggagcggtgcagtgggctgcatgtcaacagcgcccggcggctggaggttgtgcgcaactgcatctcctacgtgtttgaggggaaaatgcttgaggccaagaagctgctcccagccgtgttgagggccctgaaggggcgagctgcccgccgctgcctcgcccaggagctgcacctgcatgtgcagcagaaccgtgcggtcctggaccaccagcagtttgactttgtcgtccgtatgatgaactgctgcctgcaggactgcacttctctggacgagcatggcattgcggcggctctgctgcctctggtcacagccttctgccggaagctgagcccgggggtgacgcagtttgcatacagctgtgtgcaggagcacgtggtgtggagcacgccacagttctgggaggccatgttctatggggatgtgcagactcacatccgggccctctacctggagcccacggaggacctggcccccgcccaggaggttggggaggcaccttcccaggaggacgagcgctctgccctagacgtggcttctgagcagcggcgcttgtggccaactctgagtcgtgagaagcagcaggagctggtgcagaaggaggagagcacggtgttcagccaggccatccactatgccaaccgcatgagctacctcctcctgcccctggacagcagcaagagccgcctacttcgggagcgtgccgggctgggcgacctggagagcgccagcaacagcctggtcaccaacagcatggctggcagtgtggccgagagctatgacacggagagcggcttcgaggatgcagagacctgcgacgtagctggggctgtggtccgcttcatcaaccgctttgtggacaaggtctgcacggagagtggggtcaccagcgaccacctcaaggggctgcatgtcatggtgccagacattgtccagatgcacatcgagaccctggaggccgtgcagcgggagagccggaggctgccgcccatccagaagcccaagctgctgcggccgcgcctgctgccgggtgaggagtgtgtgctggacggcctgcgcgtctacctgctgccggatgggcgtgaggagggcgcggggggcagtgctgggggaccagcattgctcccagctgagggcgccgtcttcctcaccacgtaccgggtcatcttcacggggatgcccacggaccccctggttggggagcaggtggtggtccgctccttcccggtggctgcgctgaccaaggagaagcgcatcagcgtccagacccctgtggaccagctcctgcaggacgggctccagctgcgctcctgcacattccagctgctgaaaatggcctttgacgaggaggtggggtctgacagcgccgagctcttccgtaagcagctgcataagctgcggtacccgccggacatcagggccacctttgcgttcaccttgggctctgcccacacacctggccggccaccgcgagtcaccaaggacaagggtccttccctcagaaccctgtcccggaacctggtcaagaacgccaagaagaccatcgggcggcagcatgtcactcgcaagaagtacaacccccccagctgggagcaccggggccagccgccccctgaggaccaggaggacgagatctcagtgtcggaggagctggagcccagcacgctgaccccgtcctcagccctgaagccctccgaccgcatgaccatgagcagcctggtggaaagggcttgctgtcgcgactaccagcgcctcggtctgggcaccctgagcagcagcctgagccgggccaagtctgagcccttccgcatttctccggtcaaccgcatgtatgccatctgccgcagctacccagggctgctgatcgtgccccagagtgtccaggacaacgccctgcagcgcgtgtcccgctgctaccgccagaaccgcttccccgtggtctgctggcgcagcgggcggtccaaggcggtgctgctgcgctctggaggcctgcatggcaaaggtgtcgtcggcctcttcaaggcccagaacgcaccttctccaggccagtcccaggcggactcgagtagcctggagcaggagaagtacctgcaggctgtggtcagctccatgccccgctacgccgacgcgtcgggacgcaacacgcttagcggcttctcctcagcccacatgggcagtcacgttcccagccccagagccagggtcaccacgctgtccaaccccatggcggcctcggcctccagacggaccgcaccccgaggtaagtggggcagtgtccggaccagtggacgcagcagtggccttggcaccgatgtgggctcccggctagctggcagagacgcgctggccccaccccaggccaacgggggccctcccgacccgggcttcctgcgtccgcagcgagcagccctctatatccttggggacaaagcccagctcaagggtgtgcggtcagaccccctgcagcagtgggagctggtgcccattgaggtattcgaggcacggcaggtgaaggctagcttcaagaagctgctgaaagcatgtgtcccaggctgccccgctgctgagcccagcccagcctccttcctgcgctcactggaggactcagagtggctgatccagatccacaagctgctgcaggtgtctgtgctggtggtggagctcctggattcaggctcctccgtgctggtgggcctggaggatggctgggacatcaccacccaggtggtatccttggtgcagctgctctcagaccccttctaccgcacgctggagggctttcgcctgctggtggagaaggagtggctgtccttcggccatcgcttcagccaccgtggagctcacaccctggccgggcagagcagcggcttcacacccgtcttcctgcagttcctggactgcgtacaccaggtccacctgcagttccccatggagtttgagttcagccagttctacctcaagttcctcggctaccaccatgtgtcccgccgtttccggaccttcctgctcgactctgactatgagcgcattgagctggggctgctgtatgaggagaagggggaacgcaggggccaggtgccgtgcaggtctgtgtgggagtatgtggaccggctgagcaagaggacgcctgtgttccacaattacatgtatgcgcccgaggacgcagaggtcctgcggccctacagcaacgtgtccaacctgaaggtgtgggacttctacactgaggagacgctggccgagggccctccctatgactgggaactggcccaggggccccctgaacccccagaggaagaacggtctgatggaggcgctccccagagcaggcgccgcgtggtgtggccctgttacgacagctgcccgcgggcccagcctgacgccatctcacgcctgctggaggagctgcagaggctggagacagagttgggccaacccgctgagcgctggaaggacacctgggaccgggtgaaggctgcacagcgcctcgagggccggccagacggccgtggcacccctagctccctccttgtgtccaccgcaccccaccaccgtcgctcgctgggtgtgtacctgcaggaggggcccgtgggctccaccctgagcctcagcctggacagcgaccagagtagtggctcaaccacatccggctcccgtcaggctgcccgccgcagcaccagcaccctgtacagccagttccagacagcagagagtgagaacaggtcctacgagggcactctgtacaagaagggggccttcatgaagccttggaaggcccgctggttcgtgctggacaagaccaagcaccagctgcgctactacgaccaccgtgtggacacagagtgcaagggtgtcatcgacttggcggaggtggaggctgtggcacctggcacgcccactatgggtgcccctaagactgtggacgagaaggccttctttgacgtgaagacaacgcgtcgcgtttacaacttctgtgcccaggacgtgccctcggcccagcagtgggtggaccggatccagagctgcctgtcggacgcctga

SEQ ID NO: 27829 - DNA, 3090 bp, Homo sapiens
  source 1..3090: mol_type = unassigned DNA
gggcgggccggctggctgggaagatggcggcgggaacctgggccgccgccgccgccgccgccgccgcggactacttcgtgctggtggcgttcgggccgcacccgcgcgggagtggggaaggccagggccagattctgcagcgcttcccagagaaggactgggaggacaacccattcccccagggcatcgagctgttttgccagcccagcgggtggcagctgtgtcccgagaggaatccaccgaccttctttgttgctgtcctcaccgacatcaactccgagcgccactactgcgcctgcttgaccttctgggagccagcggagccttcacagcaggaaacgacgcgcgtggaggatgccacagagagggaggaagagggggatgagggaggccagacccacctgtctcccacagcacctgccccatctgcccagctgtttgcaccgaagacgctggtactggtgtcgcgactcgaccacacggaggtgttcaggaacagccttggcctcatctatgccatccacgtggagggcctgaatgtgtgcctggagaacgtgattgggaacctgctgacgtgcactgtgcccctggctgggggctcgcagaggacgatctctttgggggctggtgaccggcaggtcatccagactccactggccgactcgctgcccgtcagccgctgcagcgtggccctgctcttccgccagctaggcatcaccaacgtgctgtctttgttctgtgccgccctcacggagcacaaggttctcttcctgtcccggagctaccagcggctcgccgatgcctgtaggggcctcctggcactgctgtttcctctcagatacagcttcacctatgtgcccatcctgccggctcagctgctggaggtcctcagcacacccacgcccttcatcattggggtcaacgcggccttccaggcagagacccaggagctgctcgatgtgattgttgctgatctggatggagggacggtcaccattcctgagtgtgtgcacattccacccttgccagagccactgcagagtcagacgcacagtgtgctgagcatggtcctggacccggagctggagttggctgacctcgccttccctccgcccacgacatccacctcctccctgaagatgcaggacaaggagctgcgcgcggtcttcctgcggctgttcgctcagctgctgcagggctatcgctggtgcctgcacgtcgtgcgcatccacccggagcctgtcatccgcttccataaggcagccttcctgggccagcgtgggctggtagaggacgatttcctgatgaaggtgctggagggcatggcctttgctggctttgtgtcagagcgtggggtcccataccgccctacggacctgttcgatgagctggtggcccacgaggtggcaaggatgcgggcggatgagaaccacccccagcgtgtcctgcgtcacgtccaggaactggcagagcagctctacaagaacgagaacccgtacccagccgtggcgatgcacaaggtacagaggcccggtgagagcagccacctgcgacgggtgccccgacccttcccccggctggatgagggcaccgtgcagtggatcgtggaccaggctgcagccaagatgcagggtgcacccccagctgtgaaggccgagaggaggaccaccgtgccctcagggccccccatgactgccatactggagcggtgcagtgggctgcatgtcaacagcgcccggcggctggaggttgtgcgcaactgcatctcctacgtgtttgaggggaaaatgcttgaggccaagaagctgctcccagccgtgttgagggccctgaaggggcgagctgcccgccgctgcctcgcccaggagctgcacctgcatgtgcagcagaaccgtgcggtcctggaccaccagcagtttgactttgtcgtccgtatgatgaactgctgcctgcaggactgcacttctctggacgagcatggcattgcggcggctctgctgcctctggtcacagccttctgccggaagctgagcccgggggtgacgcagtttgcatacagctgtgtgcaggagcacgtggtgtggagcacgccacagttctgggaggccatgttctatggggatgtgcagactcacatccgggccctctacctggagcccacggaggacctggcccccgcccaggaggttggggaggcaccttcccaggaggacgagcgctctgccctagacgtggcttctgagcagcggcgcttgtggccaactctgagtcgtgagaagcagcaggagctggtgcagaaggaggagagcacggtgttcagccaggccatccactatgccaaccgcatgagctacctcctcctgcccctggacagcagcaagagccgcctacttcgggagcgtgccgggctgggcgacctggagagcgccagcaacagcctggtcaccaacagcatggctggcagtgtggccgagagctatgacacggagagcggcttcgaggatgcagagacctgcgacgtagctggggctgtggtccgcttcatcaaccgctttgtggacaaggtctgcacggagagtggggtcaccagcgaccacctcaaggggctgcatgtcatggtgccagacattgtccagatgcacatcgagaccctggaggccgtgcagcgggagagccggaggctgccgcccatccagaagcccaagctgctgcggccgcgcctgctgccgggtgaggagtgtgtgctggacggcctgcgcgtctacctgctgccggatgggcgtgaggagggcgcggggggcagtgctgggggaccagcattgctcccagctgagggcgccgtcttcctcaccacgtaccgggtcatcttcacggggatgcccacggaccccctggttggggagcaggtggtggtccgctccttcccggtggctgcgctgaccaaggagaagcgcatcagcgtccagacccctgtggaccagctcctgcaggacgggctccagctgcgctcctgcacattccaggtgctggtccagccagcggctgcaggcgagtttctagaaccagagtctatataaagagagaactaac

SEQ ID NO: 27830 - DNA, 6253 bp, Homo sapiens
  source 1..6253: mol_type = unassigned DNA
ctggctgggaagatggcggcgggaacctgggccgccgccgccgccgccgccgccgccgcggagcgaaccaggggtgtccggggtgcgcggtccagggccggggccgggccatgagcgcgccgtcctcgagtccccgagccgcggagcccgcccgcgcccctcgggccgccccgcgtccctcgccatggcgcggctcgcggactacttcgtgctggtggcgttcgggccgcacccgcgcgggagtggggaaggccagggccagattctgcagcgcttcccagagaaggactgggaggacaacccattcccccagggcatcgagctgttttgccagcccagcgggtggcagctgtgtcccgagaggaatccaccgaccttctttgttgctgtcctcaccgacatcaactccgagcgccactactgcgcctgcttgaccttctgggagccagcggagccttcacaggaaacgacgcgcgtggaggatgccacagagagggaggaagagggggatgagggaggccagacccacctgtctcccacagcacctgccccatctgcccagctgtttgcaccgaagacgctggtactggtgtcgcgactcgaccacacggaggtgttcaggaacagccttggcctcatctatgccatccacgtggagggcctgaatgtgtgcctggagaacgtgattgggaacctgctgacgtgcactgtgcccctggctgggggctcgcagaggacgatctctttgggggctggtgaccggcaggtcatccagactccactggccgactcgctgcccgtcagccgctgcagcgtggccctgctcttccgccagctaggcatcaccaacgtgctgtctttgttctgtgccgccctcacggagcacaaggttctcttcctgtcccggagctaccagcggctcgccgatgcctgtaggggcctcctggcactgctgtttcctctcagatacagcttcacctatgtgcccatcctgccggctcagctgctggaggtcctcagcacacccacgcccttcatcattggggtcaacgcggccttccaggcagagacccaggagctgctcgatgtgattgttgctgatctggatggagggacggtcaccattcctgagtgtgtgcacattccacccttgccagagccactgcagagtcagacgcacagtgtgctgagcatggtcctggacccggagctggagttggctgacctcgccttccctccgcccacgacatccacctcctccctgaagatgcaggacaaggagctgcgcgcggtcttcctgcggctgttcgctcagctgctgcagggctatcgctggtgcctgcacgtcgtgcgcatccacccggagcctgtcatccgcttccataaggcagccttcctgggccagcgtgggctggtagaggacgatttcctgatgaaggtgctggagggcatggcctttgctggctttgtgtcagagcgtggggtcccataccgccctacggacctgttcgatgagctggtggcccacgaggtggcaaggatgcgggcggatgagaaccacccccagcgtgtcctgcgtcacgtccaggaactggcagagcagctctacaagaacgagaacccgtacccagccgtggcgatgcacaaggtacagaggcccggtgagagcagccacctgcgacgggtgccccgacccttcccccggctggatgagggcaccgtgcagtggatcgtggaccaggctgcagccaagatgcagggtgcacccccagctgtgaaggccgagaggaggaccaccgtgccctcagggccccccatgactgccatactggagcggtgcagtgggctgcatgtcaacagcgcccggcggctggaggttgtgcgcaactgcatctcctacgtgtttgaggggaaaatgcttgaggccaagaagctgctcccagccgtgttgagggccctgaaggggcgagctgcccgccgctgcctcgcccaggagctgcacctgcatgtgcagcagaaccgtgcggtcctggaccaccagcagtttgactttgtcgtccgtatgatgaactgctgcctgcaggactgcacttctctggacgagcatggcattgcggcggctctgctgcctctggtcacagccttctgccggaagctgagcccgggggtgacgcagtttgcatacagctgtgtgcaggagcacgtggtgtggagcacgccacagttctgggaggccatgttctatggggatgtgcagactcacatccgggccctctacctggagcccacggaggacctggcccccgcccaggaggttggggaggcaccttcccaggaggacgagcgctctgccctagacgtggcttctgagcagcggcgcttgtggccaactctgagtcgtgagaagcagcaggagctggtgcagaaggaggagagcacggtgttcagccaggccatccactatgccaaccgcatgagctacctcctcctgcccctggacagcagcaagagccgcctacttcgggagcgtgccgggctgggcgacctggagagcgccagcaacagcctggtcaccaacagcatggctggcagtgtggccgagagctatgacacggagagcggcttcgaggatgcagagacctgcgacgtagctggggctgtggtccgcttcatcaaccgctttgtggacaaggtctgcacggagagtggggtcaccagcgaccacctcaaggggctgcatgtcatggtgccagacattgtccagatgcacatcgagaccctggaggccgtgcagcgggagagccggaggctgccgcccatccagaagcccaagctgctgcggccgcgcctgctgccgggtgaggagtgtgtgctggacggcctgcgcgtctacctgctgccggatgggcgtgaggagggcgcggggggcagtgctgggggaccagcattgctcccagctgagggcgccgtcttcctcaccacgtaccgggtcatcttcacggggatgcccacggaccccctggttggggagcaggtggtggtccgctccttcccggtggctgcgctgaccaaggagaagcgcatcagcgtccagacccctgtggaccagctcctgcaggacgggctccagctgcgctcctgcacattccagctgctgaaaatggcctttgacgaggaggtggggtctgacagcgccgagctcttccgtaagcagctgcataagctgcggtacccgccggacatcagggccacctttgcgttcaccttgggctctgcccacacacctggccggccaccgcgagtcaccaaggacaagggtccttccctcagaaccctgtcccggaacctggtcaagaacgccaagaagaccatcgggcggcagcatgtcactcgcaagaagtacaacccccccagctgggagcaccggggccagccgccccctgaggaccaggaggacgagatctcagtgtcggaggagctggagcccagcacgctgaccccgtcctcagccctgaagccctccgaccgcatgaccatgagcagcctggtggaaagggcttgctgtcgcgactaccagcgcctcggtctgggcaccctgagcagcagcctgagccgggccaagtctgagcccttccgcatttctccggtcaaccgcatgtatgccatctgccgcagctacccagggctgctgatcgtgccccagagtgtccaggacaacgccctgcagcgcgtgtcccgctgctaccgccagaaccgcttccccgtggtctgctggcgcagcgggcggtccaaggcggtgctgctgcgctctggaggcctgcatggcaaaggtgtcgtcggcctcttcaaggcccagaacgcaccttctccaggccagtcccaggcggactcgagtagcctggagcaggagaagtacctgcaggctgtggtcagctccatgccccgctacgccgacgcgtcgggacgcaacacgcttagcggcttctcctcagcccacatgggcagtcacgttcccagccccagagccagggtcaccacgctgtccaaccccatggcggcctcggcctccagacggaccgcaccccgaggtaagtggggcagtgtccggaccagtggacgcagcagtggccttggcaccgatgtgggctcccggctagctggcagagacgcgctggccccaccccaggccaacgggggccctcccgacccgggcttcctgcgtccgcagcgagcagccctctatatccttggggacaaagcccagctcaagggtgtgcggtcagaccccctgcagcagtgggagctggtgcccattgaggtattcgaggcacggcaggtgaaggctagcttcaagaagctgctgaaagcatgtgtcccaggctgccccgctgctgagcccagcccagcctccttcctgcgctcactggaggactcagagtggctgatccagatccacaagctgctgcaggtgtctgtgctggtggtggagctcctggattcaggctcctccgtgctggtgggcctggaggatggctgggacatcaccacccaggtggtatccttggtgcagctgctctcagaccccttctaccgcacgctggagggctttcgcctgctggtggagaaggagtggctgtccttcggccatcgcttcagccaccgtggagctcacaccctggccgggcagagcagcggcttcacacccgtcttcctgcagttcctggactgcgtacaccaggtccacctgcagttccccatggagtttgagttcagccagttctacctcaagttcctcggctaccaccatgtgtcccgccgtttccggaccttcctgctcgactctgactatgagcgcattgagctggggctgctgtatgaggagaagggggaacgcaggggccaggtgccgtgcaggtctgtgtgggagtatgtggaccggctgagcaagaggacgcctgtgttccacaattacatgtatgcgcccgaggacgcagaggtcctgcggccctacagcaacgtgtccaacctgaaggtgtgggacttctacactgaggagacgctggccgagggccctccctatgactgggaactggcccaggggccccctgaacccccagaggaagaacggtctgatggaggcgctccccagagcaggcgccgcgtggtgtggccctgttacgacagctgcccgcgggcccagcctgacgccatctcacgcctgctggaggagctgcagaggctggagacagagttgggccaacccgctgagcgctggaaggacacctgggaccgggtgaaggctgcacagcgcctcgagggccggccagacggccgtggcacccctagctccctccttgtgtccaccgcaccccaccaccgtcgctcgctgggtgtgtacctgcaggaggggcccgtgggctccaccctgagcctcagcctggacagcgaccagagtagtggctcaaccacatccggctcccgtcaggctgcccgccgcagcaccagcaccctgtacagccagttccagacagcagagagtgagaacaggtcctacgagggcactctgtacaagaagggggccttcatgaagccttggaaggcccgctggttcgtgctggacaagaccaagcaccagctgcgctactacgaccaccgtgtggacacagagtgcaagggtgtcatcgacttggcggaggtggaggctgtggcacctggcacgcccactatgggtgcccctaagactgtggacgagaaggccttctttgacgtgaagacaacgcgtcgcgtttacaacttctgtgcccaggacgtgccctcggcccagcagtgggtggaccggatccagagctgcctgtcggacgcctgagcctcccagccctgcccggctgctctgcttccggtcgttaccgaccactaggggtgggcagggccgccccggccatgtttacagccccggccctcgacagtattgaggccccgagcccccagcacttgtgtgtacagcccccgtccccgccccgccccgcccggccggccctaacttattttggcgtcacagctgagcaccgtgccgggaggtggccaaggtacagcccgcaatgggcctgtaaatagtccggccccgtcagcgtgtgctggtccagccagcggctgcaggcgagtttctagaaccagagtctatataaagagagaactaacgccacgctcctgtgcctgccttccccactccccggctgcctgctctcggcctacc

SEQ ID NO: 27831 - DNA, 5789 bp, Homo sapiens
  source 1..5789: mol_type = unassigned DNA
gctggctgggaagatggcggcgggaacctgggccgccgccgccgccgccgccgccgccgcggagcgaaccaggggtgtccggggtgcgcggtccagggccggggccgggccatgagcgcgccgtcctcgagtccccgagccgcggagcccgcccgcgcccctcgggccgccccgcgtccctcgccatggcgcggctcgcggactacttcgtgctggtggcgttcgggccgcacccgcgcgggagtggggaaggccagggccagattctgcagcgcttcccagagaaggactgggaggacaacccattcccccagggcatcgagctgttttgccagcccagcgggtggcagctgtgtcccgagaggaatccaccgaccttctttgttgctgtcctcaccgacatcaactccgagcgccactactgcgcctgcttgaccttctgggagccagcggagccttcacaggaaacgacgcgcgtggaggatgccacagagagggaggaagagggggatgagggaggccagacccacctgtctcccacagcacctgccccatctgcccagctgtttgcaccgaagacgctggtactggtgtcgcgactcgaccacacggaggtgttcaggaacagccttggcctcatctatgccatccacgtggagggcctgaatgtgtgcctggagaacgtgattgggaacctgctgacgtgcactgtgcccctggctgggggctcgcagaggacgatctctttgggggctggtgaccggcaggtcatccagactccactggccgactcgctgcccgtcagccgctgcagcgtggccctgctcttccgccagctaggcatcaccaacgtgctgtctttgttctgtgccgccctcacggagcacaaggttctcttcctgtcccggagctaccagcggctcgccgatgcctgtaggggcctcctggcactgctgtttcctctcagatacagcttcacctatgtgcccatcctgccggctcagctgctggaggtcctcagcacacccacgcccttcatcattggggtcaacgcggccttccaggcagagacccaggagctgctcgatgtgattgttgctgatctggatggagggacggtcaccattcctgagtgtgtgcacattccacccttgccagagccactgcagagtcagacgcacagtgtgctgagcatggtcctggacccggagctggagttggctgacctcgccttccctccgcccacgacatccacctcctccctgaagatgcaggacaaggagctgcgcgcggtcttcctgcggctgttcgctcagctgctgcagggctatcgctggtgcctgcacgtcgtgcgcatccacccggagcctgtcatccgcttccataaggcagccttcctgggccagcgtgggctggtagaggacgatttcctgatgaaggtgctggagggcatggcctttgctggctttgtgtcagagcgtggggtcccataccgccctacggacctgttcgatgagctggtggcccacgaggtggcaaggatgcgggcggatgagaaccacccccagcgtgtcctgcgtcacgtccaggaactggcagagcagctctacaagaacgagaacccgtacccagccgtggcgatgcacaaggtacagaggcccggtgagagcagccacctgcgacgggtgccccgacccttcccccggctggatgagggcaccgtgcagtggatcgtggaccaggctgcagccaagatgcagggtgcacccccagctgtgaaggccgagaggaggaccaccgtgccctcagggccccccatgactgccatactggagcggtgcagtgggctgcatgtcaacagcgcccggcggctggaggttgtgcgcaactgcatctcctacgtgtttgaggggaaaatgcttgaggccaagaagctgctcccagccgtgttgagggccctgaaggggcgagctgcccgccgctgcctcgcccaggagctgcacctgcatgtgcagcagaaccgtgcggtcctggaccaccagcagtttgactttgtcgtccgtatgatgaactgctgcctgcaggactgcacttctctggacgagcatggcattgcggcggctctgctgcctctggtcacagccttctgccggaagctgagcccgggggtgacgcagtttgcatacagctgtgtgcaggagcacgtggtgtggagcacgccacagttctgggaggccatgttctatggggatgtgcagactcacatccgggccctctacctggagcccacggaggacctggcccccgcccaggaggttggggaggcaccttcccaggaggacgagcgctctgccctagacgtggcttctgagcagcggcgcttgtggccaactctgagtcgtgagaagcagcaggagctggtgcagaaggaggagagcacggtgttcagccaggccatccactatgccaaccgcatgagctacctcctcctgcccctggacagcagcaagagccgcctacttcgggagcgtgccgggctgggcgacctggagagcgccagcaacagcctggtcaccaacagcatggctggcagtgtggccgagagctatgacacggagagcggcttcgaggatgcagagacctgcgacgtagctggggctgtggtccgcttcatcaaccgctttgtggacaaggtctgcacggagagtggggtcaccagcgaccacctcaaggggctgcatgtcatggtgccagacattgtccagatgcacatcgagaccctggaggccgtgcagcgggagagccggaggctgccgcccatccagaagcccaagctgctgcggccgcgcctgctgccgggtgaggagtgtgtgctggacggcctgcgcgtctacctgctgccggatgggcgtgaggagggcgcggggggcagtgctgggggaccagcattgctcccagctgagggcgccgtcttcctcaccacgtaccgggtcatcttcacggggatgcccacggaccccctggttggggagcaggtggtggtccgctccttcccggtggctgcgctgaccaaggagaagcgcatcagcgtccagacccctgtggaccagctcctgcaggacgggctccagctgcgctcctgcacattccagctgctgaaaatggcctttgacgaggaggtggggtctgacagcgccgagctcttccgtaagcagctgcataagctgcggtacccgccggacatcagggccacctttgcgttcaccttgggctctgcccacacacctggccggccaccgcgagtcaccaaggacaagggtccttccctcagaaccctgtcccggaacctggtcaagaacgccaagaagaccatcgggcggcagcatgtcactcgcaagaagtacaacccccccagctgggagcaccggggccagccgccccctgaggaccaggaggacgagatctcagtgtcggaggagctggagcccagcacgctgaccccgtcctcagccctgaagccctccgaccgcatgaccatgagcagcctggtggaaagggcttgctgtcgcgactaccagcgcctcggtctgggcaccctgagcagcagcctgagccgggccaagtctgagcccttccgcatttctccggtcaaccgcatgtatgccatctgccgcagctacccagggctgctgatcgtgccccagagtgtccaggacaacgccctgcagcgcgtgtcccgctgctaccgccagaaccgcttccccgtggtctgctggcgcagcgggcggtccaaggcggtgctgctgcgctctggaggcctgcatggcaaaggtgtcgtcggcctcttcaaggcccagaacgcaccttctccaggccagtcccaggcggactcgagtagcctggagcaggagaagtacctgcaggctgtggtcagctccatgccccgctacgccgacgcgtcgggacgcaacacgcttagcggcttctcctcagcccacatgggcagtcacggtaagtggggcagtgtccggaccagtggacgcagcagtggccttggcaccgatgtgggctcccggctagctggcagagacgcgctggccccaccccaggccaacgggggccctcccgacccgggcttcctgcgtccgcagcgagcagccctctatatccttggggacaaagcccagctcaagggtgtgcggtcagaccccctgcagcagtgggagctggtgcccattgaggtattcgaggcacggcaggtgaaggctagcttcaagaagctgctgaaagcatgtgtcccaggctgccccgctgctgagcccagcccagcctccttcctgcgctcactggaggactcagagtggctgatccagatccacaagctgctgcaggtgtctgtgctggtggtggagctcctggattcaggctcctccgtgctggtgggcctggaggatggctgggacatcaccacccaggtggtatccttggtgcagctgctctcagaccccttctaccgcacgctggagggctttcgcctgctggtggagaaggagtggctgtccttcggccatcgcttcagccaccgtggagctcacaccctggccgggcagagcagcggcttcacacccgtcttcctgcagttcctggactgcgtacaccaggtccacctgcagttccccatggagtttgagttcagccagttctacctcaagttcctcggctaccaccatgtgtcccgccgtttccggaccttcctgctcgactctgactatgagcgcattgagctggggctgctgtatgaggagaagggggaacgcaggggccaggtgccgtgcaggtctgtgtgggagtatgtggaccggctgagcaagaggacgcctgtgttccacaattacatgtatgcgcccgaggacgcagaggtcctgcggccctacagcaacgtgtccaacctgaaggtgtgggacttctacactgaggagacgctggccgagggccctccctatgactgggaactggcccaggggccccctgaacccccagaggaagaacggtctgatggaggcgctccccagagcaggcgccgcgtggtgtggccctgttacgacagctgcccgcgggcccagcctgacgccatctcacgcctgctggaggagctgcagaggctggagacagagttgggccaacccgctgagcgctggaaggacacctgggaccgggtgaaggctgcacagcgcctcgagggccggccagacggccgtggcacccctagctccctccttgtgtccaccgcaccccaccaccgtcgctcgctgggtgtgtacctgcaggaggggcccgtgggctccaccctgagcctcagcctggacagcgaccagagtagtggctcaaccacatccggctcccgtcaggctgcccgccgcagcaccagcaccctgtacagccagttccagacagcagagagtgagaacaggtcctacgagggcactctgtacaagaagggggccttcatgaagccttggaaggcccgctggttcgtgctggacaagaccaagcaccagctgcgctactacgaccaccgtgtggacacagagtgcaagggtgtcatcgacttggcggaggtggaggctgtggcacctggcacgcccactatgggtgcccctaagactgtggacgagaaggccttctttgacgtgaagacaacgcgtcgcgtttacaacttctgtgcccaggacgtgccctcggcccagcagtgggtggaccggatccagagctgcctgtcggacgcctga

SEQ ID NO: 27832 - DNA, 7439 bp, Homo sapiens
  source 1..7439: mol_type = unassigned DNA
ggttgtcaaacatggctgaagcgctgccgctgccgctactgccgctgcagggaaaatgctgagccctcccgggccgggtgggcggcggcggcgagggcggcgacggggacccgcttcccgagcgcggcggcggcggccatggcccggctggctgactacttcatcgtggtaggctatgaccacgagaagccaggatcaggagaaggtctggggaaaataatccagagatttccacagaaggactgggatgatacaccttttccacagggaattgagttgttttgtcagcctggcgggtggcagctgtccagagagaggaagcagccaacgttctttgtggttgtcctgacagacattgactcagatcgacattactgctcatgcctaaccttctatgaggcagagatcaatcttcagggaacaaagaaggaagagattgaaggtgaagcaaaagtgtctggtttaattcagcctgcagaagtgtttgctcccaaaagcctggtgttggtatccagattatattatccagaaatttttagggcttgcctgggtttgatctataccgtgtatgtggacagcctgaatgtctccttggaaagtctaattgcaaacctttgtgcctgccttgtcccagcggctggagggtctcagaagctgttttctttgggtgcaggagatagacagttgatccagactcctttacatgatagtcttcctatcacgggcactagtgtggctctcctgttccagcaattgggaattcaaaatgtcctcagcctcttttgtgcagtcctcacagaaaataaggttctcttccattctgcaagtttccagagacttagtgatgcttgtagagccctggaatctttaatgtttcctcttaaatatagttatccttatatccctattctcccggctcagctactggaagttctaagttccccaacgcctttcattattggagtacattctgtctttaaaactgatgtccatgaacttttagatgtaatcatagcagatttggatggaggcactattaaaattcccgaatgtattcacctctcttccctcccagaaccacttctacatcagactcaatcagctctttctttgattttacacccagatttggaagtagcagatcatgcttttcctcctccacgaacagctttatcccactcaaaaatgctggataaagaggtgcgagccgttttccttagattatttgcacaactcttccaaggatatagatcctgcctgcaacttataagaattcatgcagagccagtaatacatttccacaagacagcattcttggggcagcgtggtttggtcgagaatgatttcctcactaaagtactcagtggaatggcatttgcaggttttgtttcagaaagaggtcctccttatagatcttgtgatctctttgatgagttggtagcctttgaagtagagagaattaaagttgaagaaaataacccagtgaagatgataaagcatgtcagggaacttgctgagcaactattcaaaaatgagaatccaaatcctcatatggcattccagaaagttccacggccaacagaaggatcccatttgcgagttcatattcttcctttcccagagattaatgaagcccgggttcaggaattaatacaggaaaatgttgctaagaaccagaatgcacctcctgccacacgaatagaaaagaaatgtgttgtgccagcaggtccacctgttgtttcgataatggacaaggtgacgacagttttcaacagtgcacaaagactagaagttgtcagaaactgtatctcattcatatttgaaaataaaattttggaaactgaaaagacccttcctgctgcactcagagcccttaaaggaaaggcagcaagacagtgtctcactgatgaattgggtttgcatgtccagcaaaaccgggcaatattagaccatcaacagtttgactacataataaggatgatgaattgtactctacaggattgttcaagtttagaagaatacaacattgccgcagcattactccctttgaccagtgctttctataggaaacttgcccctggagtcagccagtttgcttacacgtgtgtacaagaccaccccatttggacaaatcagcaattttgggagacaaccttttacaatgcagtgcaggaacaggttcgctccctttatctctcagccaaggaagacaatcatgccccgcatctgaagcaaaaggataagcttcctgatgaccattatcaggagaagacagcaatggacctggcagctgagcaactacgcctttggcctaccctgagcaagtcaactcagcaagagctagtgcaacatgaggaaagcactgtctttagtcaggccattcactttgcaaacctcatggtgaacctgctagttccactcgacacaagtaaaaacaagctcctaagaacatcagcgccaggtgactgggagagcggaagcaacagcattgtcacaaacagtattgcaggaagtgtagctgagagctatgatacagagagtgggtttgaagattcagagaatactgacattgccaattctgttgtgcggttcattacccgatttattgacaaagtttgtacagagagtggagttactcaggatcacatcaagagccttcattgcatgataccaggaattgtagctatgcacattgagaccctagaagcagtacatcgagaaagcagaagacttccgcctattcagaagcccaagattcttagacctgctctgctgccaggagaagaaattgtctgtgagggtcttcgagtcttgctggatcctgatggaagagaagaagctactggaggtcttcttggaggccctcagctcctgccagcagaaggagccttgttcctcaccacatacagaattctcttcagaggaacaccccatgatcagttagtgggtgagcagacagttgtgcggagctttcccattgcctccatcaccaaggagaagaagattacaatgcagaaccagctacagcagaacatgcaagaaggactgcagatcacatcagcatcttttcagttgattaaggtagcatttgatgaagaagtcagtccagaagtagtagagatctttaagaaacagctgatgaagttccgttatcctcagtccattttcagtacctttgcttttgctgctggacaaactaccccacaaataattttaccaaaacagaaggaaaagaacacttcttttcgtaccttctcaaaaacaattgtgaaaggtgccaaaagggcagggaaaatgacaattgggcggcaatatttactgaagaagaagacagggacaattgtggaagaaagagtaaatcgtcctggatggaatgaagatgatgatgtatctgtttcagatgagagtgagctccccacaagtaccaccctgaaggcctccgagaagtctacaatggaacagttggtggaaaaagcttgtttcagagactatcagcgtttaggtttaggaaccataagtggcagctcttcccgttcaagacccgagtattttagaattactgcctccaacaggatgtattcactctgccggagctatcctggccttttagtcgtacctcaagctgtacaggacagtagtttaccaagagtagctcgctgctatcgacacaatcgcctgcctgttgtatgttggaagaactcaagaagtggtactctgctcctccgatctggaggattccatgggaagggagtcgttggtcttttcaaatctcagaactcccctcaggccgctcctacctcctctttagaatcttccagtagcatagaacaagagaaatacttgcaagccttactgaatgctgtttctgtccatcagaaactcagaggcaacagcactcttactgtcaggccagcctttgctctatctccaggtgtgtgggcaagtcttcgctctagcactcgcttgatcagctctccaacatccttcattgatgttggcgcccggctggcaggcaaggatcactcggcctccttcagtaacagcagctacctacaaaaccagctcttgaaacggcaagcagccctttacatatttggtgaaaagtcgcaactaaggaacttcaaggtagaatttgctttaaattgtgagtttgttcctgttgaatttcatgaaatccggcaagtgaaagccagttttaagaagctgatgagggcttgtatcccaagcaccatccctactgactcagaagtgaccttcctgaaagcgctgggagattctgagtggttcccacagcttcacaggataatgcagctggctgtggttgtatcagaagtacttgagaatggttcctcagttttggtctgtttggaggaaggctgggacatcactgcacaagtgacatccctggttcagttactcagtgatcccttttataggacacttgaaggcttccagatgttggttgaaaaagagtggctctcttttggtcacaaattcagtcagaggagcagcttgaccctcaactgtcaggggagtggttttgctccagtcttcttacagttcttagactgtgtacaccaggttcacaaccagtatccaactgagtttgaattcaatctctattacttaaagttcttggctttccactatgtgtctaatcgctttaaaacatttctcctggattcagactatgaaagattagagcacggaactttatttgatgataaaggagaaaagcatgccaaaaaaggagtctgtatttgggaatgtattgacagaatgcacaagaggagtcccattttctttaattatttatattcaccattggaaatagaggctctaaagcccaatgtaaacgtctctagcctcaagaagtgggattactacatagaagagaccctgtccacaggcccttcctatgactggatgatgctaacccccaagcacttcccctccgaagactctgacctggctggagaagctgggccacggagccagaggagaacagtgtggccatgctatgatgatgtcagctgtactcagcctgatgctctcaccagccttttcagtgaaattgaaaaattggagcacaaattgaaccaagcccctgagaagtggcagcagctgtgggaaagggtaaccgtggaccttaaagaagaaccaagaacagatcgctcccaaagacacctgtcgagatccccaggaattgtgtctaccaacctaccttcctatcagaagaggtctctgctacatctcccagacagcagcatgggggaggaacagaattccagcatctccccatccaatggagtggagcgaagagcagccacgctctatagccagtatacatccaagaatgatgaaaacaggtcctttgagggaacactttataaaagaggggctttgctgaaaggttggaagccccgttggtttgttttggatgtaacaaaacatcagctgcgctactatgactcaggtgaggacacaagctgtaaaggccacattgatctggctgaagtagaaatggtcatccctgctggccccagcatgggagccccaaagcacacaagtgacaaggctttctttgatctcaagaccagcaaacgtgtgtataacttctgcgcccaggatggacagagtgcccagcaatggatggacaagatccagagttgtatctctgatgcctgatgcccatggtcaacccacgcagaagaaacagaagaactcatgctgccagatagatagaaaaagaagcatggatccttgaggagctgacaacaagttatcccagggcctgaggttctcctgcccagtcccctcttgcaggggttgctatatctacttaacctgaataggtgtttcacacaggtctggtcaacagccccatgcactccctgtatcttgcactaaatttttctaacagggtcttagtggttaatgatcagaagatgtctcctgagccaactgtgaacctcacccaggcaaaatggctaccacctacttgggtccttcttcatgaaagctatagatccttttttgttctctgaggtcataatttcctcggagacctgtttaacaagcaaaaatcaaaaccctccaagattgtctcatattctacctggactaggtttcctatgagagacatctacttgtaatgcctgacctttgagatgctcagttctctggtgctgccaaaagatgcttccatggtccgtgctctgccagtggggttcacaacaagagacgtcattgttcagtagcaggcaaagagggagcacacagcattattctgatggaaaaagattatccagggaatggtacaacaatgaccagcccaatgcaggaaaacactacttccaaaacactgaattctctagaccagaggtgctctgaggatccagggccttgtgttcttatgtatcttctgcttcctgacagcttctttttcaaaataacatgcaaaaaaagctgaatgcactaactcacaaaacaaacacttgcactgaattcccaatgaagtgaagatgttggaaagacagaggccagctatttaggaccatacgcacctgtgacaagggctgtgttgaccacagtcacactgtggcatgactggatacccaaactacacttctacacatgaaaagtaagaactgtctttagattttctttactttgataacttgtgattgtttagcttaagacccaagaaatgctgtttgctcatggtaaacagaaacagcatcttcgctacaaccactgacaccagctggcgtcataggtagctagatcattgcatttgttttgaaatgttaatatgttaaatactaaactaatatttcaaaaatgtgtatatatgatttctatatccttgtttttcagatagcctgcttataatttaatataaattaactgatgcattcataagatttcaataatgaaatggttcccttttaaaaaataaaaatactttgtagattaaaaataaatcagaatttcaaatttaaaattgtccacacactaggaaatagaactgtgttaatatataagaaatctggggataattaagaatgaaggacttttctatcatttccattttataaattgccacctgtgaaaatggtttttgcacattatttgtatttttctttgtatatgaaataattttttgtactttgtaaaatatggagcccattgtaccttcagctatttgagactatacacagtgcttcttttgtaactggattactttaactttcgtgaaggcattacattgcctcacattcactaaccaccttgaattaaatttatttcttaagaaaaagcatccctcatttactgtgaactaaagttcattctgtagtgcacagcattcaggagggtaacactcaggattcatacatgggactaaaggttcaagaataaaacaaagcatgacccac

SEQ ID NO: 27833 - DNA, 9899 bp, Homo sapiens
  source 1..9899: mol_type = unassigned DNA
ggttaagtggagctagagagctacattgtaacctagttggatttttttggggggggaatgtatcagaatctaacgtgtcgttaatagaaagaagaacaggcaagaagtggtccagccggcgaagttgcagatctgatctcttctgaacacctcatcgtgtctccatccctgggaatctgaccctagcaactggaccactttgttcttggaattttgggtgtcctcttttctcacctttcccttttcccttttccccttccccctcctgagaactccggaagactgtagagattgtcatggagtccagggaaaccttaagcagctcccggcaaagagggggcgagtcagacttcctgccggtctcctcagccaagcccccagctgctcctggctgtgcaggagaacctttgctctccactccaggacctgggaaggggatcccggtgggcggagagcgcatggagccagaggaggaggatgaactaggctcagggcgggatgtggattccaactccaacgcggacagtgagaaatgggtggcaggagatggtttggaagagcaggaattttctatcaaggaggcaaacttcacagagggaagtctgaagctaaagattcagaccacaaagcgggctaagaaacccccaaagaatttggagaactatatatgtccacctgagatcaagatcaccatcaagcagtctggggaccagaaggtgtcccgtgctggaaaaaatagcaaagccacgaaggaggaagaaagaagccactccaaaaagaagctcctcacagccagtgaccttgcagccagtgacctcaaaggatttcagccacaggcttacgagaggccccagaaacattcaactctccattatgacacgggcctcccacaggacttcaccggtgacaccttaaaaccaaagcaccagcaaaaaagcagcagccagaaccacatggactggtccaccaactctgacagcggacccgtcactcagaattgcttcatcagtccagagtctggcagagaaactgcaagcaccagcaagatccccgctcttgagcccgtggcttcctttgcaaaggcccagggtaagaaaggcagtgcagggaacacgtggagtcagttgtctaacaataacaaagatctgctcttgggaggtgtggctccatccccaagcagccacagctcaccagccccacccagcagctctgctgagtgcaacgggcttcagcccttggtggatcaagatggaggaggtacaaaggagcccccagaaccacctacggtgggcagcaagaaaaagtccagtaaaaaagatgtgataagtcagaccataccaaacccagacctggattgggtcaagaatgcccagaaagcatttgacaatacagaagggaaaagggaaggttattccgcagatagtgcccaagaggcatcaccagccaggcagaacgtgagttctgccagtaatcctgaaaatgactcaagtcatgtccggattactatccccatcaaggcaccctctctggatccaaccaaccataagaggaaaaaaagacagtccattaaagcggtggtggaaaagatcatgccagagaaagccttggcttctggaatcaccatgagcagtgaagtagttaacaggatactttccaactctgaggggaataagaaggatccccgtgtccctaagttgagtaaaatgatagagaatgagtccccctcagttggccttgaaactggtggaaatgctgagaaagttatcccaggaggtgtgtctaagccgcggaagccacccatggtcatgacacctccaacgtgcacagatcactctccatccagaaagctgccagaaatccagcatccaaaatttgctgcaaaacgaaggtggacttgcagcaaaccaaaacctagcaccatgcttcgagaggcagttatggccacctctgataaactgatgctggagcccccgtctgcatatcccatcaccccatccagccctctctacaccaacacagacagtcttactgtgatcactccagtcaaaaagaagcggggacgaccaaagaagcagcctttgctcacagtcgagacgattcatgagggaacttccaccagccccgtcagtcccatcagccgagagtttcctggcactaagaaaagaaagcgacgacgcaatttagcgaagttggcccagctagtgccgggagaggacaaacccatgagcgagatgaaatttcacaagaaagttggaaagctcggcgtgttggataagaagaccatcaaaactatcaataagatgaagacactcaagaggaaaaacatcttgaatcagatcttgtcctgttccagcagcgttgctctgaaggcaaaagctcccccagagaccagccctggggcagcagccattgaaagcaaactgggcaagcagattaatgtcagcaagaggggaaccatctacattggcaagaagcggggcaggaagccaagagcagagctgccacccccatccgaagaacccaaaacagccatcaagcaccccaggcctgtttctagccagccggatgttccagccgtgccttccaactttcagtcacttgtggcgtcttcaccagcagctatgcacccactttcaacacagttaggtgggtccaatggcaacctgagccctgccagcactgaaaccaatttttcagagttgaaaactatgccaaatctccagcccatcagtgctcttccaaccaaaacccaaaagggaatacacagtggaacctggaagctgtctccacccagactgatggccaactccccttcacacctgtgcgagattggctccctaaaggaaatcacgctgtcccctgtgagcgagtcccacagtgaggagacgatccccagcgacagcggcattgggacagacaacaacagcacttctgaccaagcggagaagagctcagaatcccgaaggaggtactcttttgatttctgctccctggacaacccggaggccattccgtccgacaccagcacaaagaaccggcatggccaccggcaaaagcatctcattgtggacaactttctggcccacgaaagcctcaagaagccaaagcacaagaggaaacggaaaagcctgcaaaaccgcgatgacctccagtttctggcagacctggaggagctaatcaccaagttccaagtgttcagaatctcccaccggagttacaccttctaccacgagaatccatatcccagcatttttcggattaattttgatcactattacccggtgccatatatccagtatgacccgttgctctatcttcgtaggacttcagacttgaagtcaaagaagaagcgtggtaggcctgcaaaaaccaatgacaccatgacaaaggtgccttttttacaagggttcagctaccctattcccagtggaagttactatgcaccctatggaatgccttacacatcaatgcctatgatgaaccttggttattacggtcagtacccagctcctttgtacctatcgcacacgcttggagcagcttccccattcatgaggccaacagtgccaccacctcagttccacacaaactcccacgtaaagatgtccggtgcagctaagcataaagccaagcatggagtacacctgcagggacctgttagcatgggccttggtgacatgcagccttctctgaaccctcccaaggtaggcagtgccagtctgtccagtggtcggctccataagaggaaacacaaacacaagcataagcacaaggaagaccggatcctagggacccatgacaacctgagtggtctttttgcaggcaaagccacaggcttctccagccacatcctgagcgagcggctgagtagcgcagacaaagagctcccgctggtgagtgagaagaacaagcataaggagaaacagaagcaccagcacagcgaagccggccacaaagcttctaagaacaactttgaggtggacaccctgtctacactgtcactttccgacgcccagcattggacacaggccaaggaaaaaggagacttgagcagtgagcctgtggactcatgcacgaaaagatactctggcagtggcggggatggtggcagcacgagatcagagaacctggacgtgttcagtgaaatgaacccttcgaatgacaagtgggacagtgacgtgagtgggagtaaaaggaggagctatgaaggctttggaacgtacagggaaaaggacatccaagccttcaagatgaaccgcaaggagagaagttcttatgactcctccatgtctccagggatgccaagtccccacttaaaagtggaccagacagcagtgcatagtaagaacgaaggctcagtgcccaccatgatgaccaggaagaagccagccgcagttgacagtgttacaattccaccagccccagtgttatctctccttgctgcatctgcagcaacgtcggatgcagtcggctcctccctgaagaagaggttcaagcggcgggagatcgaagccatccagtgcgaagtgcggaagatgtgcaactacaccaagatcctgtccaccaagaagaacctggaccacgtgaacaagatcctgaaggccaagcggctgcagagacaatcaaaaacaggcaacaacttcgtgaagaagaggcgcgggcgtcccaggaagcagcccacccagttcgatgaggactccagagaccaaatgccggtgctggaaaaatgcatcgacctgcccagcaaaagaggccagaagcccagcctgagcccgctggtgctggagcccgccgccagccaagacaccatcatggccaccatcgaggcggtcatccacatggcccgggaggcgccgcccctgcccccgccaccgccgccgcccctgccgccaccgccgccaccacccctgcccccgccaccccctctacccaagaccccccgaggcggaaagaggaaacacaaaccgcaggcccccgctcagcccccacagcagtcgcccccgcagcagccccttccccaggaagaggaggtgaaagccaaaaggcagaggaagtcccgagggagtgagagcgaggtccttccctagggcgggtctgggcgtctgcacctggggcctagggaactgacacgtgggaagcgcagtgagccggggcgggggcggaatcccccgctgcagggacacccacgcccttctctccagaagccgggcaggcagaatccggccagacgacggggctgagccatcaggagctcttgggaaagcaaagcagggagacaccttcagaagaagcttgtctgagcttcaccgcagctcccaccacgcggcgcttcagtacggctggatcctccgcaggcgagcggaaggcccccaggaggagcaggctggtggcactctcctgacctcacgctgccaaggtgcgccctcgactcccgatttcatttgctggccaggaaaatcgaaagggaaacaccctcaattaggaaacattccaaggggagaaaagctgcaaattgctcaactggcattgctgtaacccgttccatttaattggtttttatttcttttgattttcaagctctgctaagctttggggtaccaacgtcatcttcaggtgacctgaatctttcccttaaccgtacagtttctcgatggaattgtgtgatcagaaggtggaattctagtgataggcgacctcagacccgcattcatgttctgtgtgcctcttctattgcacatacactgatttttagcattgtctattcctatttttcctttgcccattgtacttccatatatcttttcattaacttacttgctgccttttttttttcttggtacacatttaaataaagtaatccttaacctgtgctgtaaagttcacccttggcatgctgttccaagaacctgggtttgaatcccaatcgttgtgaaacatactcagtattgataaaacctttttaataagtgatgcagagcagccaaggatatgttgacccagatgtcaaccaggctatttttatacttaaaacatgtcagcagagcataggcagaataaaatggtttaaataccccacagcaaatagagtaactgacaaaccaccaaaaactgaaaccccagacccaccagaaagacaagtgtctagcaatgccttggtacctgatctttttcattcaaataattgtcataggttgttcaaaaaaaaaaaaaaaaaggaaacaaaaacacaatagaagtccattatcccttgataattatttcttaaaagcaaatgggagtaagtgttcttatctggaaaaataaataaataaaatgctcaaagggtatcaccacttcaattttatcaagccaccttggacaaagtatccaaattgtggttgccttaataaactaaaacattattgtacataatgtaattataaatctatcagtctgcatggatgcaaactgtgtgtgacaaatcgtcttttaaatggtcaatttcagctgtacatttctcatccaagttgtactctagccattggtttagcgtggacagatactccatctctattatccatttccacagcccaaataaaatatgttaagcaggctcagaatgaatatgaagaattccatttccgtagatgttttctaaaagtcagattgtggaaatttcaaataagtattttcaatttcctccctcactccctcttaccttccccaagacatcaaacacctggcatggtagattatagaaagagacactgagagagagaattaaattttctaatgggaattagaatatctggtttacctccaaattaagtttctttacaggaagttgggaccagctggaaattgtattatcatttcggaacacaatattacttccttagagagagatggatttttgttggcaacataaaagaataagtgatggggtatctatgtgagtaaatttttaaattccaagttaatatgcttgcaaacattactgctgcgttatggcaccaagagttggttgaaattacccacgtagtcatactcctgtgctctgtcaccatggacttcacatcatttgctgcccactagttcaatcgcatttaatcctagcaatatgtaagtttaaaggactgcattcccctctactttaaagcttatatcctagatactcagtttgtgaccttggttgacctttggcatttcacgcaagttgaacagcaaaatcaaagcagccatttttaattcgtcattcccaagccctatctgagtggttccaaagtcacctgagaggaaggtttaaattagtccctctcaccccaccattgctataaaacagcaacgttttcattccaattcagccataaagaggtttctcttcttactgggttttgaaatcatttccttttttctttcgtttgcccttcttccttcctgtgttgtactatctctccaaccacgtctataagcagactcaatcttcttgcagaggaagatgagctggcactctgcaaacttctttaataaggacccaaagtttacttgacattaacctctagtaggtgagaaattccaaaaaagctttggggtacattagaatttccaaagctctgaaagatatttcaggagatttaacagcagagttgcaacttacacgtgaattctggtctatagtggtcatgtgagttaaattcgaatcctctacttgtatgaccctaggaatagattggaatactgcagaggaccaaagctgaggcatgctaaacagctgcttggaggtggaagcaagttcagtcacctactcagcttcctctctccaccacccagttcctccctcagtatcacattatttttttcttctgcttttcattaacctaactcatctcatcagtacaaccattttcttattctctaactacccccaattcctttagcctctccccacctgtccaaactcagctcagccgtgggccaatgcagcttacagacggttgcagagctaggaagaaaacccagctctcccaaccctgatcgtggaggtctctggccccccaacactgccttctgggggctgcattttttttttttttttgagaagaggtcttttgggatgcatggtgctccacatacagcttcacaaaatatttcattataagagaaaccccttgatttttatttctttttcttttgttttctggattacctgccttcagtaagcagatgcagacccacttgtaaggagtctggttagtgatgagaaaaggatgaaatctagatacaaaagtcaccttgaaggtgatgatggatctttaatccacttgactaagtgtctggaagagctacttgctcttccacccctcatctcaaatgagaggagcagaagtttaacttcctcaaatagcccagctctggctaaaacccaaagaagaaaggtcaaaggaagggaaagcatgtcaggggctggtttgtgacttggcaggaccaggaaacagcagccactgacagcccagagaaggtgactaagggctggcagaagattagaatgttaatttggctgctgtccggactaggaggccatgttcaatggcagtcagaatttgtgttctgcgcattgctgggtctataaatatgataagcaagtggtgacagaattatagtataaggtgatgtactacatgcagatcataaaggctttggttttaagacttaagtagaaaatccctctcctagcttattacccaacaatattcagataatgagcttttggagaatatctttttcctatcactagaaagatttacctgggaactgtctaaagtctacacacatatttccaaagcctttaaataccaactgcagcatggagagagaggggtggcagaagctgaaatgcctcaaaagccatttaagtgttacgttgcaggattttcagtccttctcgttatgtaaaagtagataaatatagacgttattctcaacactaccctatagtatcacagtggtccaaatgccagagcttacagataatgtcatcacagtgcctagaaactcgaactgtaatatatcgtagcattttcttggtgtttcttaaagtttctttccacaatacaaggtcctctctgcctcttgtttcttggagagttcaccccactgatgagtcttccttccctgttggactcagtcatttggggaacagtcttagaagcacatatcaaccaaggaagaaacttcctggatatctattgcccacttgcccaggtctaataaacactaaaggggggaaattgaaaggagctgccaactggtcaacgtggaagggcggttccaccctagattggtgtctttctttttcttcctttttttaaaaaaaatctatttcttaaataataataaatgcacatgatgtgttaaatatgtacatatatatttcaaaagaaaaaatggggcacaagattgtcttacaagtcgtgctggctaatttttagtttgtattcataagtggtttttaaaagccttttttaaagtgtaatttgcatgttctactttgattgtatgtaaacatattttagaacaaaaaatgtatttgtattttattgaatatagaggcaagaaaattgtacattgtttgaaatgttctttttgtaacagtttttattcataaagcatttttgtacatttaaaatgaacatggacttgctgttatttgaggcgtagatacatctagcatgcttactgtcatgctcctccatggtcttagatgttgggttttaaacatttttttctaaaagaaagctcagtcttttccgctaccagatcaggttagcacagtatagagcacttaactattaaaaaaaaaaagttaatcctattcatatgttattcattgtgtgaaattaaagacattcaattcagtctaa

SEQ ID NO: 27834 - DNA, 1785 bp, Homo sapiens
  source 1..1785: mol_type = unassigned DNA
aagcgcggggccggccggggcgcccgccgctcgccgccgcctccgcgcgcccgggggccccggcgccccccgagctagggcggccagctcgcggctcgccgtttgacagatgctcatcgccatggagttgccgcagcagcacctttgggggctcgggcgagcgacgggagccgggatctgagcgagcgccggggccagcggagccggagccgccgggacatggttgcagatctgatctcttctgaacacctcatcgtgtctccatccctgggaatctgaccctagcaactggaccactttgttcttggaattttgggtgtcctcttttctcacctttcccttttcccttttccccttccccctcctgagaactccggaagactgtagagattgtcatggagtccagggaaaccttaagcagctcccggcaaagagggggcgagtcagacttcctgccggtctcctcagccaagcccccagctgctcctggctgtgcaggagaacctttgctctccactccaggacctgggaaggggatcccggtgggcggagagcgcatggagccagaggaggaggatgaactaggctcagggcgggatgtggattccaactccaacgcggacagtgagaaatgggtggcaggagatggtttggaagagcaggaattttctatcaaggaggcaaacttcacagagggaagtctgaagctaaagattcagaccacaaagcgggctaagaaacccccaaagaatttggagaactatatatgtccacctgagatcaagatcaccatcaagcagtctggggaccagaaggtgtcccgtgctggaaaaaatagcaaagccacgaaggaggaagaaagaagccactccaaaaagaagctcctcacagccagtgaccttgcagccagtgacctcaaaggatttcagccacagattaaagactccagtaaggaggaagtctggaagagaagaggaggccaaggcatcccattcaaaaagcaattcctgtcccaggaacgtgccatgtgcttctcatgcccccggaacccattccccgcaaaacccggttctctcactcttccttttcacagtgaacctgcagtctgggcacaagaagtataacttcgcatggattctgcaaagcccacacctgtggtcattccctgttctttccattcaacaatggagacttgcccaagattgtaaactagtgagtgacagcatttgggcttatgatcttctctgcctgctagctagacattctctctgggtctaaaagataatccaaaaagatccagcttcacaatgctgccctgaagagataatgcattaggcggccctgatgcagcattcactgtcttccagggcaggcttgatcccatgagtttgcttgctcagacgatcacttaggaaacacatgcctttactctctaggccttttttctagcttgccttgtatcagctatgccatggatctttgctctcttaccccatgctatacagagtatgggctccaagccacagctggcctgtcaagtgtgtgtcgctggtccaccatgggatacatttagaaacttttatagcaatttgacatttttgtgatatccaagcatgtgattgttttcctacggatttgtcttatagtattttaccaaagtttccacacaaaaagtatggattaaggacaaagtatctggtccttcatcaaagatcgtttgataagctctgttctagttaaccaacactgagctttcctagttttaataaaagagtaggatttgga

SEQ ID NO: 27835 - DNA, 762 bp, Homo sapiens
  source 1..762: mol_type = unassigned DNA
gcgtgagcctgtgcgtgtgctcacacgcgcattttggcagggctgaatcacaagaggactcgcagttgatacccagactcaccaaaaaattgagctgtgaatttggggaggcaggtacgtgctgggaaggaagctaaaggagaacaacagctttgtgtgctgatgaagtaaacagacagttgcagatctgatctcttctgaacacctcatcgtgtctccatccctgggaatctgaccctagcaactggaccactttgttcttggaattttgggtgtcctcttttctcacctttcccttttcccttttccccttccccctcctgagaactccggaagactgtagagattgtcatggagtccagggaaaccttaagcagctcccggcaaagagggggcgagtcagacttcctgccggtctcctcagccaagcccccagctgctcctggctgtgcaggagaacctttgctctccactccaggacctgggaaggggatcccggtgggcggagagcgcatggagccagaggaggaggatgaactaggctcagggcgggatgtggattccaactccaacgcggacagtgagaaatgggtggcaggagatggtttggaagagcaggaattttctatcaaggaggcaaacttcacagagggaagtctgaagctaaagattcagaccacaaagcgggctaagaaacccccaaagaatttggagaactatatatgtccacctgagatcaagatcaccatcaagcagtctggg

SEQ ID NO: 27836 - DNA, 2443 bp, Homo sapiens
  source 1..2443: mol_type = unassigned DNA
acaagtcccagcatccaccgcgcggcccaggactgtcagggtagtgggcgttgcgtgaggcgggtaaatgttcgcggaagcggcaaagacgacacggccttgtgggatggcggagtttaaggagaagcctgaggccccgactgagcagctggatgtcgcgtgcggccaggaaaacttgccggtgggcgcgtggcccccgggggccgcgccggcgcccttccagtacactcctgatcatgtagttggacctggagcagacattgatcccactcaaataacctttcccggatgcatttgtgtcaaaactccctgcctccctggcacttgctcctgtctccgccatggagagaactatgatgataactcatgccttagagatataggatctggaggaaagtatgcagagcctgtttttgaatgcaatgtcctgtgccgatgcagtgaccactgcagaaacagagtggtccagaaaggtctacagttccacttccaagtgttcaagacgcataaaaaaggctggggacttcgtaccttggaatttataccgaaaggaaggtttgtctgtgaatatgctggtgaggttttaggattctctgaagttcagagaagaattcacttacaaacaaaatccgactccaattacattatagccatcagggaacatgtttataatgggcaggtaatggaaacatttgttgaccctacttatataggaaatattggaagattccttaatcattcttgtgagccaaaccttttgatgattcctgtccgaattgactcaatggtacctaagttggcactttttgcagccaaagatattgtgccagaagaagaactctcttatgattattcaggaagatatcttaatctaacagtcagtgaagacaaagaaaggctagatcatgggaaactaaggaaaccttgttactgtggtgccaaatcatgtactgctttcctgccttttgacagttctctgtactgccccgtagaaaagtcgaacatcagttgtggaaatgagaaggaacccagcatgtgtggctcagccccttctgtgttcccctcctgcaagcgattgacccttgagactatgaaaatgatgttagacaaaaagcaaattcgagcaattttcttattcgagttcaaaatgggtcgtaaagcagcagaaacaactcgcaacatcaacaatgcatttggcccaggaactgctaacgaacgtacagtgcagtggtggttcaagaagttttgcaaaggagatgagagccttgaagatgaggagcgtagtggccggccatcagaagttgacaacgaccagttgagagcaatcatcgaagctgatccccttacaactacacgagaagttgctgaagaactcaatgtcaaccattctacggtcgttcgacatttgaagcaaattggaaaggtgaaaaagctcgataagtgggtgcctcatgagctgactgaaaatcaaaaaaatcgtcgttttgaagtgtcatcttctcttattctacgcaaccacaacgaaccatttctcgatcggattgtgacgtgtgatgaaaagtggattttatatgacaaccggcgacgatcagctcagtggttggatcaagaagaagctccaaagcacttcccaaagccaatcttgcacccaaaaaaggtcatggtcactatttggtggtctgctgctggtctgatccactacagctttctgaatcccggtgaaaccattacatctgagaagtatgctcaggaaatcgatgagatgaaccaaaaactgcaacgcctgcagctggcattggtcaacagaaagggcccaattcttctccacgacaatgcccgaccgcatgttgcacaacccacacttcaaaagttgaatgaattgggctatgaagttttgcctcatccaccgtattcacctgacctcttgccaaccaactaccacgtctttaagcatctcaacaactttttgcagggaaaacgcttccacaaccagcaggatgcagaaaatgctttccaagagttcgtcgaatcccaaagcacggatttttacgctacaggaataaaccaacttatttctcgttggcaaaaatgtgttgattgtaatggttcctattttgattaataaaaatgcgttgagcctagttataatgatttaaaattcacagtccaaaaccgcagttagttttgcaccaacccaatatcttcatagattgaaatataaattaaaattgcatttgaagtagattccacggactttattaagaatgtagaaatgtggcctggcatggtggcttacaactgtaatcccagcactttgggaggcccaggcgggcagatcacttgagtccaattgttcaggaccagcctgggcaacatagtgagaccctgactctaataaaataattttttaaaaaaagattaaaacatgtaccttgaaaagcat

SEQ ID NO: 27837 - DNA, 1671 bp, Homo sapiens
  source 1..1671: mol_type = unassigned DNA
aggcgggtaaatgttcgcggaagcggcaaagacgacacggccttgtgggatggcggagtttaaggagaagcctgaggccccgactgagcagctggatgtcgcgtgcggccaggaaaacttgccggtgggcgcgtggcccccgggggccgcgccggcgcccttccagtacactcctgatcatgtagttggacctggagcagacattgatcccactcaaataacctttcccggatgcatttgtgtcaaaactccctgcctccctggcacttgctcctgtctccgccatggagagaactatgatgataactcatgccttagagatataggatctggaggaaagtatgcagagcctgtttttgaatgcaatgtcctgtgccgatgcagtgaccactgcagaaacagagtggtccagaaaggtctacagttccacttccaagtgttcaagacgcataaaaaaggctggggacttcgtaccttggaatttataccgaaaggaaggtttgtctgtgaatatgctggtgaggttttaggattctctgaagttcagagaagaattcacttacaaacaaaatccgactccaattacattatagccatcagggaacatgtttataatgggcaggtaatggaaacatttgttgaccctacttatataggaaatattggaagattccttaatcattcttgtgagccaaaccttttgatgattcctgtccgaattgactcaatggtacctaagttggcactttttgcagccaaagatattgtgccagaagaagaactctcttatgattattcaggaagatatcttaatctaacagtcagtgaagacaaagaaaggctagatcatgggaaactaaggaaaccttgttactgtggtgccaaatcatgtactgctttcctgccttttgacagttctctgtactgccccgtagaaaagtcgaacatcagttgtggaaatgagaaggaacccagcatgtgtggctcagccccttctgtgttcccctcctgcaagcgattgacccttgaggtgagtctgttcagtgataagcagcttgcccctccctatagtggaagacagtggttggctagctttacctctgcctagttacataagtttaactcaggaatgtggcagagactgcaagttgtccatcagtatcctttcccctttctgtaatagaattctccatttaacaaaagtacatgactacccagaatactcactttcctagttagatttgtcttagtgactgttctagttaataggatataagcaaaaatgacaagtccttaaatggagatatcctgcccttcacctcctctttcttcctgctggctggaatgtatacatgatgactggaactggagcagtcatcctagaccccaggatgaccctgggaaaggaagccattgcatagaaaaatcaacaaggttaaaaggagtctaggtgtctggtactgtagaacatcctgtcagtcgtgatctgacacctttgtactttcaggtgagaaatagtctctcccttgcttaagtcactgttattgtaagttttctagcactaacatcgaacctaataatgatccaagaaacccttgtggctgcatacctaaaccctgcttgccaaccaattttaacagtaataaagctgactttttgatttctgtctga

SEQ ID NO: 27838 - DNA, 1676 bp, Homo sapiens
  source 1..1676: mol_type = unassigned DNA
aggactgtcagggtagtgggcgttgcgtgaggcgggtaaatgttcgcggaagcggcaaagacgacacggccttgtgggatggcggagtttaaggagaagcctgaggccccgactgagcagctggatgtcgcgtgcggccaggaaaacttgccggtgggcgcgtggcccccgggggccgcgccggcgcccttccagtacactcctgatcatgtagttggacctggagcagacattgatcccactcaaataacctttcccggatgcatttgtgtcaaaactccctgcctccctggcacttgctcctgtctccgccatggagagaactatgatgataactcatgccttagagatataggatctggaggaaagtatgcagagcctgtttttgaatgcaatgtcctgtgccgatgcagtgaccactgcagaaacagagtggtccagaaaggtctacagttccacttccaagtgttcaagacgcataaaaaaggctggggacttcgtaccttggaatttataccgaaaggaagaaaagtcgaacatcagttgtggaaatgagaaggaacccagcatgtgtggctcagccccttctgtgttcccctcctgcaagcgattgacccttgagactatgaaaatgatgttagacaaaaagcaaattcgagcaattttcttattcgagttcaaaatgggtcgtaaagcagcagaaacaactcgcaacatcaacaatgcatttggcccaggaactgctaacgaacgtacagtgcagtggtggttcaagaagttttgcaaaggagatgagagccttgaagatgaggagcgtagtggccggccatcagaagttgacaacgaccagttgagagcaatcatcgaagctgatccccttacaactacacgagaagttgctgaagaactcaatgtcaaccattctacggtcgttcgacatttgaagcaaattggaaaggtgaaaaagctcgataagtgggtgcctcatgagctgactgaaaatcaaaaaaatcgtcgttttgaagtgtcatcttctcttattctacgcaaccacaacgaaccatttctcgatcggattgtgacgtgtgatgaaaagtggattttatatgacaaccggcgacgatcagctcagtggttggatcaagaagaagctccaaagcacttcccaaagccaatcttgcacccaaaaaaggtcatggtcactatttggtggtctgctgctggtctgatccactacagctttctgaatcccggtgaaaccattacatctgagaagtatgctcaggaaatcgatgagatgaaccaaaaactgcaacgcctgcagctggcattggtcaacagaaagggcccaattcttctccacgacaatgcccgaccgcatgttgcacaacccacacttcaaaagttgaatgaattgggctatgaagttttgcctcatccaccgtattcacctgacctcttgccaaccaactaccacgtctttaagcatctcaacaactttttgcagggaaaacgcttccacaaccagcaggatgcagaaaatgctttccaagagttcgtcgaatcccaaagcacggatttttacgctacaggaataaaccaacttatttctcgttggcaaaaatgtgttgattgtaatggttcctattttgattaataaaaatgcgttgagccta

SEQ ID NO: 27839 - DNA, 7365 bp, Homo sapiens
  source 1..7365: mol_type = unassigned DNA
gggaacacggacagtgcacgacggactttcaagttgctcccggcacaacgggaggtcgggagctcggagcccctacgggcggtccaagtgtccgcgagaagcccgcagcgcccaggaccgcgttgagcgctcggggcgcgccaagccgcacctaagcaaaagagaaacgctgacgggccggaggcgggttggctgggacgcggaatacgcgcggccccggagcgcctttcgttttaaggagccttacttctggaaagggacagggaactgtcaatcagcgagggagggagcgcaccggcgctgggtgatgtcagcggatcagctgctcgataacaaagagagggtattacaggagaaagttgcagcagcggcagcggccaaggcggcacaccggagcctccgaggcgaggggcaagtgggcgaagggaggggggacgacggctgctgccgcagcagctgaaggccaaggaattgaaagggctgtagggggaggcagtgcgagccagccccgactgctcctcctcttcctcctcctcctccaaactcgcgagccccagagctcgctcagccgccgggagcacccagagggacgggaggcagccgcgcagccccgagctgggcagtgtccccagccgccatggatagcgacgacgagatggtggaggaggcggtggaagggcacctggacgatgacggattaccgcacgggttctgcacagtcacctactcctccacagacagatttgaggggaactttgttcacggagaaaagaacggacgggggaagttcttcttctttgatggcagcaccctggaggggtattatgtggatgatgccttgcagggccagggagtttacacttacgaagatgggggagttctccagggcacgtatgtagacggagagctgaacggtccagcccaggaatatgacacagatgggagactgatcttcaaggggcagtataaagataacattcgtcatggagtgtgctggatatattacccagatggaggaagccttgtaggagaagtaaatgaagatggggagatgactggagagaagatagcctatgtgtaccctgatgagaggaccgcactttatgggaaatttattgatggagagatgatagaaggcaaactggctacccttatgtccactgaagaagggaggcctcactttgaactgatgcctggaaattcagtgtaccactttgataagtcgacttcatcttgcatttctaccaatgctcttcttccagatccttatgaatcagaaagggtttatgttgctgaatctcttatttccagtgctggagaaggacttttttcaaaggtagctgtgggacctaatactgttatgtctttttataatggagttcgaattacacaccaagaggttgacagcagggactgggcccttaatgggaacaccctctcccttgatgaagaaacggtcattgatgtgcctgagccctataaccacgtatccaagtactgtgcctccttgggacacaaggcaaatcactccttcactccaaactgcatctacgatatgtttgtccacccccgttttgggcccatcaaatgcatccgcaccctgagagcagtggaggccgatgaagagctcaccgttgcctatggctatgaccacagcccccccgggaagagtgggcctgaagcccctgagtggtaccaggtggagctgaaggccttccaggccacccagcaaaagtgaaaggcctggctttggggttcagagacctggaatagaaacttggatctatgcactacgtttatctgacaatgggacaaccagggactgctcatgctgtgacgtcacatcctctcaccatgcgttagcaacgactttctcgcatactaactaggtttgactgtattactcataccagatttaaaattagctagccttgcaacaacgtcctactgagaggtattgtcgagcatttgacataagacagcgtgatgttctttggtggttcaagtctaaatctgtaccacattcggagatgccaaatgattagactgaaacagggaaacggggtttttcagtcatttttagtcagtggtttttccatagtgcttttttcctatggccagtgcaaattgtgttagcacacttgcatatgtgccgtattaagggttgacaattactacatctttattctctaaatgtagtataatttgccttttaacctttgatctgtatcttgcaatagaatggctttggtttttttcttagtaaataggagcccacttctaaagtcatttcacccctcagccctattctctttcttagataccctttacaagagaaaacttccaaatggatttttgcatcaatagcagtgtgtaggtctctctggttctttctatatcatcattttattattatgtcctaatataaagtactggctcatagggccagggtattattatagaatattattctcgcatgtaaacaaagatatctttgctttaagatgtgagaagaaatgaatttactttgtttgcattaagttatggaagagttgtaatatatactttaagaaagaagagaagaaaactagtatctctaagcggtaactatggcaattttgcaatattttcagtagtgctagtaattttttcctccttgagtacacattaaatgtacataacatagcgcggtcaggcttgtggcacagtgcattgaattcaaaagtcaaacagcaaatttgaattctaacagaattcaaaaaaaaatttttttagtcagtactactaaggcagacacactgattactaggtacaaatcaaaccttgatgctaaaactcttcatcattgtaatttcaaagcacttacctgcttcaaaacattgtaaactaagactgaacacctgtatagtttaaaagcaacactatcaatagcatttcagccattttgccagccatgtgtaatcacaactgcagaaataaggagaaaacccctgtttttttagtttagctaattagatctgtaacatcactgggattgctctgaatgaatcctgagagttttgttttttataagcaccctcaccacatgccatagctttgtctcttttagacacctcgatgcagcggctggaaggactggagagcagctgttgtgctgatctgtagctgtcagctgtgattcctgtcacctgagtcagtttggtctggaaagcgaaggccttccaagctgtagcagatagtgagctccagctgatgagagaaggcttcagtggaagaagagtgaggacataggcagaaggaagtttgctatttcttgtcagttgcacattgctttatgaagactacaacaaaagtgcttaatcccaggctgctcatgactttcatttcaggtggcccttgggcacattgacagagttgcccttcccttctttgcaacaccaggcttcctagagcacccggttgcatgctttgcagctaggtggcagtggtttcagggagatccagttggatccctgcttgaaagcttaagccaatggttcacccatgagaggaagttgtcagtgcttccaggaagattgcccaccaaaggaactgaatagtttttagatttaaaggcaccaggatagggtcactcttactctgtagaaagagaccgttctatacactgtgacggatgggccagggcctctggacttgcattctgataggtgctttaatttaaatgtgcccaaagggagtgactgtcttcaggagaaagatggcttgcattaacctcgatcaagtgggttgtgcagccaggtcagggaatacggtcagggagaggatagtgctggtcatgcccccgatgcagctatgctctgaatgatttcattcctgagagtgatagcattctggtcctggctgcagtggggtacaatttacgtcctaagtgggggctactctaattatcccattcaaatggaatttttttcaacattggatagaaggaattgaagagttgtaagtagtgattagtctgctaatcagttcttcagatgagatattgaatggtaacactctgagcttaaaactcagcagtgtgtctgtgacctccacgcaaatcagaggaagcaatgcatccacgctgagcctcaccatgtcttcctcccaactctcttcatactctctgtgtcttccagctcttctttctctggccggctctctttcctcttctctctgcatatgtgagaacgcctgggcatcctgggtaacagcagccccagctgccctctcctgttccctgttccaagtcccctgcactgacctttcttgagtctctctggctctgtgcatgtctttgggactctgctcatctggcttttcctctgtgtgtgcctctctgtttgcttatgtctctggctctgtcttccccacccctcccctcacacacacacatactcccaaatgtaaggctctgtggcaggttggaatcggagtaaggcttgagattcactgagttctgtaggtagggaaagaagtcaagggagtggaggttctataaggaattaacagctgaggacggaagggtttgtttcccgtttgaacctaaacgcaagtggaaaagaatactcagaatgtatttttctactttacatctgctggggaaggaaatgtgtcaggaagccgctgcatctggtcatttcatcgcatcagaatcacagcagacgtggaagattccatgtggtggggaataaagaaataactttatgctctcctgaaaaacagcgggagcctatgtgtgtgtgcgacactgtaatctcaaggagattcactcagagctgtctcagtccaactcctgcatgaccagatcttcccttagcatcttttctgtgatgaaatattatcttgtgttagagttaggaataggaactaacctgtaggagcatgtccccaaatggacatttgaatggactaacaaaaacaactggaaagactgaatttccgacacaaaggaatgatgggatcaaaaagaaagcagtgaggagttcttgagtcttgtagtacctattcttattttaacttgcttcatccttgatctacctgagacactaagaaggaaattagttttccaagagctctttgaacctgtctaggactgtagttaaacctatttgccctatgggggttcttcacactcgaaaaactatttccttatcaccaacgacccacccagaaaggccaatgaggccaaatgtaacaatttttaacatttaaatataactattaaaattgcattaattgtgaacagtgaattaaagggttgtcttctccaggagacagtatgtggcacttttcgtaaatttcatttaatatataaaaatttaaatcactcactgcaacatgcatttaaaatcttccaagaaggtagaggtatcattttctgttttgctttgttttaaaacagttgcctcaagcttctgtcttaagagtagtgacttagaatccagatatcttttgttttagaaaaacaagcaaaactatgttgcaagactgacagttgtaatgtttatttgccacagatcaaaggttcacaaagtatatcaaatttacatctacttggggtaccttgatagattattattgtttttcttttatctttcccttcaggaatttggaaactcgttgtcactttttttaattttaaaaatactaaattgtaatagttttcttttgccaaatgtgtgcgtacatattcaaagcaatgaaactatttcaagccatacaaccacaggggtgggaacccttttcacaaattttaatgtgtttgtatgtaaatagatgtttgtatgaaatattttcatgatagaatgaatatatttaaatgaagttgaattattccagtgctacttaaacacattacaaaaattttggtgagaattatctgagtctattgagatgtaatgcagatcaattttgatttttaaaaatcaaaagcctacaataactctgactctcagcaacttcctcggcgttgttgcacctgacgtggagagagctcgtaggcttccccagtgcctcagccgcttcctggtggaagttaggtgctaatggaggtgtgttcaccttttagtgatatcactgcaggcctttgaggggcctgagagtgaatcagaggcattagagacaccggtgcagttatctggagcacaatttctttgcagggcagcagaatcagaagccagacttggccatgtgaacctcgaaactcggtttcccggccgccatcaaccgccacccttactgcctagtcacacacgtcagggaggctgccctcagtggagttggggttgagaccccagggtgggacttcacagttttgccagcaatctctaccttctgacttctgcctcgcagagaggaaggagaggggagcatctggcaaggggcccatttctcagcacagtacatttcctgtctcagctctggaagactatgcacccaagcaccaaacttccaaccagagagagagacgtcctccgataacaaaaatccttgcttcctctgtctgtgactttacacacagttgttcaaagttgttaaatgtcaagagtcaatcacatccctaggacatacctcccaactctcctgactcttatgttattgaaaaaacaaacaaacaaaaactcctttatgatgatattcaacttgagtggggttttttttccactttggtcctggatataatgaaatgatacatattaggataaattttcactgtgtatagtagcaatacgaacacacatgccaatgtatcaacatatctacttggttacattttggtttatgataattaaccttgattcatgtattgggaagctacagggactacgtaatacctgcttatcacataggaaaattatgtccatgattctgagctcccttcttcaaaagtttcctcctgggtgttctatgttctctctttatcctgaaatacatttattaggttgtgaggtatgttgaagaagtagaagccaggggtatgctttcagcatttattgcaaccaaaagttaaccccatcacggttaacgagcatctttggtctcttgtggaatttgaactaaaactatgagccttattcaatatctataattctatgatttttttaaattatgggaaattaatgaaagatgtttacatgaataatgtttgcccttactgtgttatgaatgagttttttgtagtgtgtctgggtgcatgatgcaagagagtaggaaaaatgtttctgaaacaaaacttgacaaatatttgtaatgaaagtaaatttaaagattgctataattgcgctatagaaacaatgcaagtattaaacaaaatatacaatcatc

SEQ ID NO: 27840 - DNA, 6451 bp, Homo sapiens
  source 1..6451: mol_type = unassigned DNA
atcctcagaattcctcgggtccctcgatactcggctgaaaattctcatcggactctgagaggagcgctgggctggaggcattttccccagggacagaagcgggctattctctcacttgggccagtaagaaaaatccaaaaaaagttgtcgactctgccagcagggattggctaacgggccgttattttcttgactccaccaaggcggatgaaggggaggctacggctgaggccgggaacagtggcgaatctgcagcctctcagaatttggcagtgcaaggaagggacggggaagagaagcaaagcggcgcgcatcctgtccagcgattcgccccgcccgcccggtgaatctgcgtctgcagaacgcgccactgaaggttccccagcgctggctggcctcctcccctccgccccgccccttttcctcagggactagtcgcagctttcgtcgccgccgattcgtcaaggtcccgggccgcagcatctagatcgtcgtggcgaagccgactctccgggggatgcggccaatctccaagctccctgggccgcaacttccgagcctcccagggcgccggccgaggcgaagccgctaccctcggccccgtgggtcccccggcagcgcctgtggcgaaagtgcgaatgcagaccctgtgcccgctgggcctcgcgcagtgtaaatgagcaaagatggatcaggaaggtgggggagatgggcagaaggccccgagcttccagtggcggaactacaagctcatcgtggatcctgccttggaccctgccctgcgcaggccttctcagaaggtgtaccgctatgatggagtccacttcagtgtcaacgactcaaagtatataccagtcgaagacctccaagacccccgttgccatgtcaggtccaaaaacagagacttttccctcccagtccctaagtttaagctggacgagttctatattggacagattccactgaaggaagtgacttttgcaaggctgaatgacaacgtgcgggagaccttcctgaaggatatgtgccgtaagtacggtgaggtggaagaggtagagatcctccttcacccccgtacgcgcaagcacctgggcctggcccgtgtgctcttcaccagcactcggggcgccaaggaaacggtcaaaaacctccaccttacctccgtcatgggcaacatcatccatgcccagcttgacatcaaaggacaacaacgaatgaaatactatgaactaattgtcaatggctcctacacccctcagactgtgcccactgggggcaaggccctgagtgagaagttccaaggctcgggtgcagccactgagacggccgaatcccgccgccgctcttcctctgacacagctgcctacccagcaggcaccactgcggtgggcactcctggcaacggcaccccctgctcccaggacacaagcttctccagcagccgacaagataccccatcttcctttggccagttcacacctcagtcctcccaaggaaccccctacacgtctcggggcagcaccccctactctcaggactctgcctactccagcagcaccacttcaacctccttcaagccccggcggtcagagaacagctaccaagatgccttttcccgccgccacttctctgcatcttcagcctccacaaccgcctccacggccatcgccgccaccactgcagccactgcctcatcctccgcctcttcctcctcattgtcctcgtcctcctcgtcatcctcttcctcctcgtcctctcagtttcgtagttctgatgcaaactacccagcgtattatgaaagctggaatcgctaccagcgccatacttcctacccaccacgccgggccacacgggaggaaccccctggagccccttttgctgaaaatacagctgagcgcttcccaccttcttacacctcctacctgccccccgagcccagccggcccaccgaccaggactaccggcctcctgcctcagaggctccacccccggagcctccagaacctggtggaggcgggggtggaggagggcccagccctgagagagaagaagttcggacttccccccgcccagcctcccctgcccgctctggctccccagccccggagaccaccaatgagagtgtgcccttcgcccagcacagcagcctggattcccgcatcgagatgctgctgaaggagcagcgctccaagttttccttcttggcctctgacacagaggaggaggaagagaacagcagcatggtccttggggccagagatacagggagtgaggtgccttctgggtcagggcatgggccctgcacaccccctccggccccagctaattttgaggatgtggcacctacagggagcggggagccaggggctacccgggagtctcccaaggcaaatggacagaaccaggcttctccatgctcttctggagacgacatggagatctccgacgacgaccggggtggctcaccccctccggccccgacgccccctcagcagcctccgccacctccccctcccccgccgcctcctcctccctacctggcgtcccttcctcttggttatcctccccaccaacctgcctacctcctcccacccagacctgatgggccgccgccccctgagtaccccccacctcctccaccacccccgcacatctatgactttgtgaactccttggagctcatggaccgacttggggctcagtggggagggatgcccatgtccttccagatgcagacccagatgttaactcggctccatcagctgcggcagggcaagggattgattgccgcctcagctggcccccccggtggggcctttggggaggccttcctcccgtttccacccccgcaggaggcagcctacggcttgccgtatgctctatatgcacaggggcaggagggcagaggggcatactcacgggaggcctaccacctgcccatgccaatggcagccgagcccctgccctcctcctcagtctcgggagaggaggcccggctgccacccagggaagaagcagagctggcagagggcaagaccctcccgacagcaggcaccgtgggccgtgtgctcgccatgctggtccaggagatgaagagcatcatgcagcgagacctcaaccgcaagatggtggagaacgtggccttcggagcctttgaccagtggtgggagagcaaggaggagaaggccaagccattccagaacgcggccaagcagcaagccaaggaggaggataaagagaagacgaagctgaaggagcctggcctgctgtccctcgtggactgggccaagagcgggggcactacgggcatcgaggctttcgcctttgggtcagggctgagaggggccctgcggctgccttcattcaaggtaaagcggaaagagccatcggaaatttccgaggccagtgaggaaaagaggcctcgtccctccactcctgctgaggaagatgaagacgaccctgaacaagagaaggaggctggagagccaggacgtccggggaccaagcccccgaagcgggacgaagagcgaggcaagacccagggcaagcaccgcaagtcctttgctctggacagcgaaggggaggaggcatcccaggagtcctcctcggagaaggatgaggaggatgacgaggaagatgaggaagatgaagatcgagaggaagctgtggataccacaaagaaggagacagaggtgtcggatggcgaggacgaggaaagcgattcgtcttccaaatgttctctgtatgctgactcagatggcgaaaatgacagcacatcagactccgagagcagcagctcttccagctcctcatcctcctcctcctcctcgtcctcatcctcctcgtcctcttcatcctctgagtcctcctctgaagatgaagaggaagaggagcggccagcagcccttccctcagcctccccgccccccagagaagtcccagtgcccacgccagcacctgtggaggtgccagtgccggaaagggttgcaggctccccagtcacacccctgcccgaacaggaggcgtctccagcaaggcctgcaggccccacggaggagtcaccccccagtgcgcctctgcgtcccccagaaccacctgctgggcccccggcccctgccccacgccccgatgagcgtccctcttctcccatccccctcctgcccccacccaagaaacgccggaaaactgtctccttctctgccatcgaggtggtgccagccccggagccccctccagccacaccgccgcaggccaagtttcccggcccagcctcccgcaaggctccccggggcgtggagcggaccatccgcaacctgcccctggaccacgcatctctggtcaagagttggcccgaggaggtgtcccgaggaggccggagccgggctggaggccgaggccgcctcaccgaggaagaggaggctgagccagggacagaggtggacctggcggtcctggccgacctggccctgacccctgcccggcgcgggctgcctgccctgcctgctgttgaagactcagaggccacagagacatcggacgaggccgagcgccctaggcccctgctcagccacatcctcctggagcacaactatgccctggccgtcaagcccacgccccctgcgccagccctgcggcccccggagccagtgcccgcacccgccgccctcttcagttccccagctgatgaggtcctggaggcccccgaggtggtggtggctgaggcggaggagcccaagccgcagcaactgcagcagcagcgggaggagggcgaagaggagggggaggaagagggggaggaagaggaggaggagtcctctgacagcagcagcagcagcgatggggagggcgccctccggaggcgcagcctccgctcccacgcccggcgccgccgccctccgcccccacccccgccgccaccgccccgcgcctacgagccacgcagtgagtttgaacagatgaccatcctgtatgacatttggaactcgggcctggactcagaggacatgagttacctgcggcttacgtacgagcggctgctgcagcagacaagcggggctgactggctcaacgacactcactgggtccatcacacaatcaccaacctgaccaccccaaaacgcaagcggcggccccaggatgggccccgggagcaccagacaggctcagcccgcagcgaaggctactaccccatcagcaagaaggagaaggacaagtacctggacgtgtgcccagtctcggcccggcagctggagggcgtggacactcaggggacgaaccgcgtgctgtccgagcgccggtccgagcagcggcggctgctgagcgccatcggtacctccgccatcatggacagtgacctgctgaaactcaaccagctcaagttccggaagaagaagctccgatttggccggagccggatccacgagtggggtctgtttgccatggaacccattgctgctgacgagatggtcatcgaatacgtgggtcagaacatccgtcagatggtggccgacatgcgggagaagcgctacgtgcaggagggcattggcagcagctacctgttccgggtggaccacgacaccatcatcgatgccaccaagtgtggcaacctggccagattcatcaaccactgctgcacgcctaactgctacgccaaggtcatcaccatcgagtcccagaagaagatcgtgatctactccaagcagcccattggcgtggacgaggagatcacctacgactacaagttcccactggaagacaacaagatcccgtgtctgtgtggcacagagagctgccggggctccctaaactgaggtggggcaggatgggtgcccacacccctatttattccccctggtgccctgagctcccagcacccccccagccttagtgggctcagcagggcccacatgcccccatctccaagcgtggggttgggggccccaagcccagcgagggagcctcagtccctggaggcagcttctgcctctcctgtcacccctgcccaccaccccctgattgtttttctttgcggagaagaagctgtaaatgttttgtagcagccagcagctgtttcctgtggaaacctggggtgccggcctgtacagattctgtcctggggggctacacagtcctcttgctttgtgttaatggggacttccccttacgccctgcgtgtacccctccccagtttaggggtctctggggcagtggccatgttctccccctgggggggctctgcacccccagtcctggggactccgtgcctggaaccctgcctcatctgttcctgccagaccctgagggtcacccttccaccctggtgtcactccccggctcagccaggccaggatggcggggtgggtcccttttgctgggctggactgtacatatgttaatagcgcaaacccgacgccacatttttataattgtgattaaactttattgtacaaaa

SEQ ID NO: 27841 - DNA, 315 bp, Homo sapiens
  source 1..315: mol_type = unassigned DNA
ggtgccacctttcggccggaggatcggggcgcggggaggagagcgggtgtgtgggagccgtggccgggctcggcccgggccgctggccgtgtaaatgagcaaagatggatcaggaaggtgggggagatgggcagaaggccccgagcttccagtggcggaactacaagctcatcgtggatcctgccttggaccctgccctgcgcaggccttctcagaaggtgtaccgctatgatggagtccacttcagtgtcaacgactcaaagtatataccagtcgaagacctccaagacccccgttgccatgtcaggtccaaaa

SEQ ID NO: 27842 - DNA, 926 bp, Homo sapiens
  source 1..926: mol_type = unassigned DNA
caaggtcccgggccgcagcatctagatcgtcgtggcgaagccgactctccgggggatgcggccaatctccaagctccctgggccgcaacttccgagcctcccagggcgccggccgaggcgaagccgctaccctcggccccgtgggtcccccggcagcgcctgtggcgaaatgtaaatgagcaaagatggatcaggaaggtgggggagatgggcagaaggccccgagcttccagtggcggaactacaagctcatcgtggatcctgccttggaccctgccctgcgcaggccttctcagaaggtgtaccgctatgatggagtccacttcagtgtcaacgactcaaagtatataccagtcgaagacctccaagacccccgttgccatgtcaggtccaaaaacagagacttttccctcccagtccctaagtttaagctggacgagttctatattggacagattccactgaaggaagtgacttttgcaaggctgaatgacaacgtgcgggagaccttcctgaaggatatgtgccgtaagtacggtgaggtggaagaggtagagatcctccttcacccccgtacgcgcaagcacctgggcctggcccgtgtgctcttcaccagcactcggggcgccaaggaaacggtcaaaaacctccaccttacctccgtcatgggcaacatcatccatgcccagcttgacatcaaaggacaacaacgaatgaaatactatgaactaattgtcaatggctcctacacccctcagactgtgcccactgggggcaaggccctgagtgagaagttccaaggctcgggtgcagccactgagacggccgaatcccgccgccgctcttcctctgacacagctgcctacccagcaggcaccactgcggtgggcactcctggcaacggcaccccctgctcccaggacaca

SEQ ID NO: 27843 - DNA, 8195 bp, Homo sapiens
  source 1..8195: mol_type = unassigned DNA
aacggcatggagaacagtcaccccccccaccaccaccaccagcagcccccgccgcagcccggcccttcgggcgagaggaggaaccaccattggagaagttacaagttgatgattgacccggctctgaaaaaggggcatcataaactgtaccgctacgatgggcagcatttcagcctggcgatgtccagcaaccgcccggtggaaattgtcgaagatccccgggtcgtcgggatctggaccaaaaacaaggagctggagctgtcggtgcccaaattcaagatcgatgagttctacgtgggcccggtgcctccgaagcaggtgacatttgccaagctgaatgataacatccgtgaaaacttcctgagggacatgtgcaagaagtatggggaggtggaggaggtggagattttgtacaaccccaagaccaagaagcacctgggcatcgccaaggtggtctttgccacggtccggggagccaaggatgccgttcagcacttgcacagcacttccgtcatgggcaacattatccacgtggagctggacaccaaaggggaaacccgaatgcggttctatgaactgttggtcactggccgatacaccccccagaccctcccagtgggcgagctggacgctgtctctccaatcgtgaatgagaccctgcagctgtcagatgccctgaagcgcctcaaggatggaggcctgtctgcaggctgtggctccggctcctcctctgtcacccccaatagcggtgggacacccttctcccaggacacagcttattccagctgccgcctggacacacccaactcctatggacagggcaccccgctcacaccgcgcctgggcacccctttctcacaggactccagctactccagccgccagcccacaccctcatacctcttcagccaggaccctgcagtgaccttcaaggcccggcgccacgagagcaagttcacggacgcctacaaccgccgccacgaacatcattatgtacacaattctcccgcggtcactgcggtggccggggccacagccgctttccggggttcctcggacctcccgttcggagcagtcggcggcactgggggcagcagcggtcccccgttcaaggctcaaccacaggattcagccacatttgcccacactccaccacccgcccaagcaacccctgctcctggattcaagtctgctttctctccgtatcagaccccagtggcccacttccctccacccccggaagagcccaccgccacagccgcttttggggcccgcgacagtggggagttccggagggcaccggcgcccccacccctgccacctgctgagcctctggccaaggagaagccaggcacgccacccggcccgccgccccccgacaccaacagcatggagctgggcggccggcccaccttcggctggagtcctgagccctgtgacagccctggcacgcccacgctggagtcgtcccctgcagggccagagaaaccccacgacagcctggactcgcgcatcgagatgctgctgaaggagcagcgcaccaagctgctcttcctgagggagccggactcggacaccgagctgcagatggagggcagccccatctcctcctcctcctcccagctctccccactggccccctttggcaccaactcccagccaggcttccggggccccacgcccccctcgtcacgcccctccagcaccggcctggaggatatcagcccaacacccctcccagactccgacgaggacgaggagctcgacctgggccttgggcctcggcctccacctgagccaggccccccggaccctgctgggcttctgagccagacagctgaggtggccttggacctggttggagacagaaccccgacctcagagaagatggatgagggccagcagtcctcaggcgaggacatggagatctcggatgacgagatgccctcggcccccatcaccagcgctgactgccccaagcccatggtggtgaccccaggagcggcagccgtggcagccccttctgtgctagccccaaccctgccgctgcccccgccacctggcttccccccgctgccccccccaccaccaccacccccaccgcagcctggcttccccatgcccccaccgctgcccccaccgccgcccccaccccctccagcccaccctgctgtgacagtgcccccaccacccttgccagcgccgcctggagtcccgcccccacccatcctgccaccactgcccccctttccgccgggcctgttccctgtgatgcaggtggacatgagccacgtgctgggtggccagtggggcggcatgcccatgtccttccagatgcaaacgcaggtgctcagccggctgatgacgggccagggcgcctgcccctacccgcccttcatggccgctgcggccgccgctgcctcagctgggctccagtttgtcaacctgccgccctaccggggccccttctccctgagcaactccggcccaggccgcgggcagcactggccaccactgcccaagtttgacccgtcagtgcctccaccaggctacatgccacgccaggaggacccacacaaagccacggtggatggcgtcctgctggtggtcctcaaagaactcaaggccatcatgaagcgtgacctgaaccgcaagatggtggaagtggtggctttccgggcctttgacgagtggtgggacaagaaggagcggatggccaaggcctcgctgaccccggtgaagtcgggcgagcacaaggacgaggacaggccgaagcccaaggaccgcatcgcctcgtgcctgctggagtcatggggcaagggcgagggcctgggctacgagggcctgggcctgggcattgggctgcgtggggccattcgcctgccctccttcaaggtcaagaggaaggagccaccagacaccacctcatctggcgaccagaagcggctgcggccctcgacctctgtggatgaggaagatgaagagtccgagcgagagcgagaccgggatatggcagacaccccctgtgagctcgccaagcgggaccccaagggcgtgggtgtgcggcggcggccggcgcggcctctggagctggacagtggtggggaggaggacgagaaggagtcattgtcggaggaacaggagagcaccgaggaggaagaggaggcggaggaggaggaggaggaggaagatgacgacgatgacgacagtgatgaccgggacgagtctgagaacgatgacgaggacacagccctgtcagaggcgagtgagaaggacgaaggggactcggatgaagaggagacagtgagcattgtaacctccaaggccgaagccacgtcgtccagtgagagttccgagtcttctgagtttgagtcaagctccgagtcctcgccctcatcctcggaggatgaggaggaggtagtggccagggaagaggaggaagaagaggaggaggaggagatggtggccgaggaaagcatggcttctgcaggccctgaggactttgagcaggacggggaggaagcggctctggccccgggggcacctgcagtggactcgttgggcatggaagaggaggtggacatcgagactgaggctgtggcccctgaggagcggccctccatgctggacgagccccccttgcctgtgggtgttgaagagccagcggactccagggagccgcctgaggaaccaggcctgagccaggaaggggccatgttgctgtctccagagccccctgccaaggaggtggaggctcgacccccattgtcccctgagcgagctccagaacatgacctggaagtggagccggagccccctatgatgctccccttgccgctgcaaccaccattgccgcccccacgaccaccccggccacccagcccaccgccggagcctgagaccacagatgcctcacacccatctgtccctccggagccccttgccgaggaccaccccccgcatactccaggcctctgtggcagcctggccaagtcgcagagcacagagacggtgccagccacaccaggcggggagcccccgctatcagggggcagcagtggcctgtccctgagctctccgcaagtgcccggcagccccttctcctacccagccccgtcccctagcttgagcagtgggggcctccctcggacacctggccgggacttcagcttcacacccaccttctccgagcccagcgggcccttgctcctgcccgtctgcccactccccactggccgacgcgatgaacgctccgggcccctggcctccccggtgctcctggagacgggcctgcccctccctctgccccttcccctgcccttgcccttggcattgcccgccgtcttgcgggcccaggctcgtgcgcccaccccgctgccacccctgctgcccgcccccctggcctcttgccctcccccaatgaagaggaagccgggccggccccggcgatccccaccatctatgctctccttggatgggcccttggtccgaccaccagcaggggccgcccttggaagggaactcctgctcctgccgggccagccacagacccccgtcttccccagcacccatgacccccggacggtgaccctggacttccggaacgcggggatcccagcccctccaccaccccttcccccccagccacccccacccccacctcccccacctgtagagcccaccaagctgccctttaaggagctagacaaccagtggccctccgaggccattcctccgggcccccgtgggcgcgatgaggtcactgaggaatacatggagttggccaagagccgggggccgtggcgccggccacctaagaagcgccatgaggacctggtgccacctgcgggctcgcccgaactctcgccaccccagcccctcttccggccccgctcggagtttgaggagatgaccatcctgtatgacatctggaacggtggcatcgatgaggaggacatccgcttcctgtgtgtcacctacgagcgactgctacagcaggacaatggcatggactggcttaacgacacgctctgggtctaccatccctccaccagcctctcttcagctaagaagaagaaacgggacgatggcatccgcgagcacgtgacgggctgtgcccgcagtgagggcttctacaccatcgacaagaaggacaagctcagatacctcaacagcagccgtgccagcaccgatgagccccccgcagacacccagggcatgagcatcccagcacagccccacgcctccacccgggcaggctcggagcggcgttcggagcagcgccgcctgctgtcctccttcactggcagctgtgacagtgacctgctcaagttcaaccagctcaagttccggaagaaaaagctcaagttctgcaagagccacattcacgactggggcttgttcgccatggagcccatcgcggctgacgagatggtcatcgagtacgtgggccagaatatccgtcaggtgatcgcagacatgcgggagaagcgttatgaggacgagggcatcgggagcagctacatgttccgggtggaccatgacaccatcatcgacgccaccaagtgcggcaacttcgcgcgcttcatcaaccacagctgcaaccccaactgctatgccaaggtgatcacggtggagtcacagaagaagatagtcatctactcgaagcagcacattaacgtcaatgaggagattacctatgactataagttccccatcgaggacgtcaagatcccctgcctctgtggctccgagaactgccgggggaccctcaactaggccccggcaccagactcaaaggatgtcagccgtagccctgggactcccgagcgtggagcccctggccccggggcccggccccccgcgcccgcccccatttcaggtgctgtcctctacccagcggccattcagggcctggcgccccacactaccccctggagcccctggctccggcccctccgcgggaaagggcttctctgtcgttcagcccacgtctctctcattttaacaaacgcccctttcaggatttctgtttaactccagcatcagcttctctctctccgtctctcctcccctctctctcttctctgtctcttctctctcccaccatcaccctcggcctcttcctgtgaatgctgctacgttgttttgtcttctctatttttttcctcgttgtgagaaaagacatttaaccgttgaaatgtgaaggtggaatcagagaggggccccgcgggggtctgcagaggcctcagtgtggctgtgcgtggcccgtgtcctggaagccacccggacctggacgcagggccaggtgctgtgggaaggatggaggcccccacggccttgacctcagaacactacgccctgaaagcgcccctcactgcccgtgggcacagtgaggagaccccacacctttccccacccgagctgcagcctgttccttccccagaggcctggggcaccactgacccggtggaccctgatggagctaagctgtcccaggcaggggtctccgctctgggctttccctgccacctcacaccccagcaccccctaaaccttgggttcaatgtttactttctcattcggatgccagcaacgcgggagcctctcggaggccccagtgcaggtgaggggcgctgagaacgcgggcagccactctcttctgcccttgccttcgccctgggtgggacagggctcccaagggcaggcgggtcccccagtcccgccattacgggttgtcagaccgtctgcgtgtggcattttttggcttataagcttcacccactcacccccaacccacaccccacatccccctgccggcagcccctcaacctaagaaggccagagcatatttattttcggagggagcagattacttctcccagagaaaggaaaatcttggaaaagatttaaaaacacaaatctaagccttgacggtttttttttcccttttgacccccttcccatctcttcagaatttattcccatggcttttttttttcttgtgcgtgtataaaatcaaaaggaaggggaaaaaggtttttgaagttcagaaccaacttctgtatatagaggctgccgcaaaggactttctcttgggaacattgtttcttgtagaaacatgcgggaagacattttttgctcatttctttgtacttccaaaaaaaaaggaaaaaaaagacaaaagcaagtccccccgtaccccagaaagcagaggaggcgtgtaaataatttctggaaagtgactgttgtgacccggagtcctcatcaagatgagcgcgctccatgagggagctgctcccaccctgcggacgcaggcggccggagcctctggtatctcagcttgtgtcaagcttgttatcatgtaaattctgtacaaagaattgttatttttctcttttttgttgttggtggttttgttgtgtgttttttgttgttttttttttattcctttcccccaggccctctctatttgagactgtgcccgccggtttcaagatcaaggaaattggtggcaacaagacacagatggggtacctgggcacagcggcgaacttctcttccgtttgcggttttctgcctaattgtgcaactgaggaaataatttatttttcacatgaggaaatgcgtagcttgtagagacggctgattcaagttacatgtacagcctccaaagggctgtctccattctgtccccttcccataaaagaagtgggggtgttcgagaagaccagggaagggacccttgcctcacccctccccctggcctcaccttgctcccagccatcgtgcccagtgttaacctcggctggccttcactaaggggactagacctccctctccccaggagccccagccccagagtggtttgcaataatcaagatatgtgtcgagtcatttttctttcaactccctcatttttcattgaacaaatctctgcttttcaagagttgggggtttctgctattttttgctttctctccctccccctgcaaagatgagaaccaatgagttttagggatgtttgtgcgggtagactccatcatccatatgtaacttgttttgaagagaagtgtttccgttgtgtgtcttgatgtaaatatttgttcatatttttgtgaattcaatactatgtaccattgtattatagtaacttttataaagcaaaccataaatatactgacttttcttacaga

SEQ ID NO: 27844 - DNA, 8185 bp, Homo sapiens
  source 1..8185: mol_type = unassigned DNA
gggggacaccatgtactggctggcggcgcagggaggccggcgcccggcggggatgttgggttaacggcatggagaacagtcaccccccccaccaccaccaccagcagcccccgccgcagcccggcccttcgggcgagaggaggaaccaccattggagaagttacaagttgatgattgacccggctctgaaaaaggggcatcataaactgtaccgctacgatgggcagcatttcagcctggcgatgtccagcaaccgcccggtggaaattgtcgaagatccccgggtcgtcgggatctggaccaaaaacaaggagctggagctgtcggtgcccaaattcaagatcgatgagttctacgtgggcccggtgcctccgaagcaggtgacatttgccaagctgaatgataacatccgtgaaaacttcctgagggacatgtgcaagaagtatggggaggtggaggaggtggagattttgtacaaccccaagaccaagaagcacctgggcatcgccaaggtggtctttgccacggtccggggagccaaggatgccgttcagcacttgcacagcacttccgtcatgggcaacattatccacgtggagctggacaccaaaggggaaacccgaatgcggttctatgaactgttggtcactggccgatacaccccccagaccctcccagtgggcgagctggacgctgtctctccaatcgtgaatgagaccctgcagctgtcagatgccctgaagcgcctcaaggatggaggcctgtctgcaggctgtggctccggctcctcctctgtcacccccaatagcggtgggacacccttctcccaggacacagcttattccagctgccgcctggacacacccaactcctatggacagggcaccccgctcacaccgcgcctgggcacccctttctcacaggactccagctactccagccgccagcccacaccctcatacctcttcagccaggaccctgcagtgaccttcaaggcccggcgccacgagagcaagttcacggacgcctacaaccgccgccacgaacatcattatgtacacaattctcccgcggtcactgcggtggccggggccacagccgctttccggggttcctcggacctcccgttcggagcagtcggcggcactgggggcagcagcggtcccccgttcaaggctcaaccacaggattcagccacatttgcccacactccaccacccgcccaagcaacccctgctcctggattcaagtctgctttctctccgtatcagaccccagtggcccacttccctccacccccggaagagcccaccgccacagccgcttttggggcccgcgacagtggggagttccggagggcaccggcgcccccacccctgccacctgctgagcctctggccaaggagaagccaggcacgccacccggcccgccgccccccgacaccaacagcatggagctgggcggccggcccaccttcggctggagtcctgagccctgtgacagccctggcacgcccacgctggagtcgtcccctgcagggccagagaaaccccacgacagcctggactcgcgcatcgagatgctgctgaaggagcagcgcaccaagctgctcttcctgagggagccggactcggacaccgagctgcagatggagggcagccccatctcctcctcctcctcccagctctccccactggccccctttggcaccaactcccagccaggcttccggggccccacgcccccctcgtcacgcccctccagcaccggcctggaggatatcagcccaacacccctcccagactccgacgaggacgaggagctcgacctgggccttgggcctcggcctccacctgagccaggccccccggaccctgctgggcttctgagccagacagctgaggtggccttggacctggttggagacagaaccccgacctcagagaagatggatgagggccagcagtcctcaggcgaggacatggagatctcggatgacgagatgccctcggcccccatcaccagcgctgactgccccaagcccatggtggtgaccccaggagcggcagccgtggcagccccttctgtgctagccccaaccctgccgctgcccccgccacctggcttccccccgctgccccccccaccaccaccacccccaccgcagcctggcttccccatgcccccaccgctgcccccaccgccgcccccaccccctccagcccaccctgctgtgacagtgcccccaccacccttgccagcgccgcctggagtcccgcccccacccatcctgccaccactgcccccctttccgccgggcctgttccctgtgatgcaggtggacatgagccacgtgctgggtggccagtggggcggcatgcccatgtccttccagatgcaaacgcaggtgctcagccggctgatgacgggccagggcgcctgcccctacccgcccttcatggccgctgcggccgccgctgcctcagctgggctccagtttgtcaacctgccgccctaccggggccccttctccctgagcaactccggcccaggccgcgggcagcactggccaccactgcccaagtttgacccgtcagtgcctccaccaggctacatgccacgccaggaggacccacacaaagccacggtggatggcgtcctgctggtggtcctcaaagaactcaaggccatcatgaagcgtgacctgaaccgcaagatggtggaagtggtggctttccgggcctttgacgagtggtgggacaagaaggagcggatggccaaggcctcgctgaccccggtgaagtcgggcgagcacaaggacgaggacaggccgaagcccaaggaccgcatcgcctcgtgcctgctggagtcatggggcaagggcgagggcctgggctacgagggcctgggcctgggcattgggctgcgtggggccattcgcctgccctccttcaaggtcaagaggaaggagccaccagacaccacctcatctggcgaccagaagcggctgcggccctcgacctctgtggatgaggaagatgaagagtccgagcgagagcgagaccgggatatggcagacaccccctgtgagctcgccaagcgggaccccaagggcgtgggtgtgcggcggcggccggcgcggcctctggagctggacagtggtggggaggaggacgagaaggagtcattgtcggaggaacaggagagcaccgaggaggaagaggaggcggaggaggaggaggaggaggaagatgacgacgatgacgacagtgatgaccgggacgagtctgagaacgatgacgaggacacagccctgtcagaggcgagtgagaaggacgaaggggactcggatgaagaggagacagtgagcattgtaacctccaaggccgaagccacgtcgtccagtgagagttccgagtcttctgagtttgagtcaagctccgagtcctcgccctcatcctcggaggatgaggaggaggtagtggccagggaagaggaggaagaagaggaggaggaggagatggtggccgaggaaagcatggcttctgcaggccctgaggactttgagcaggacggggaggaagcggctctggccccgggggcacctgcagtggactcgttgggcatggaagaggaggtggacatcgagactgaggctgtggcccctgaggagcggccctccatgctggacgagccccccttgcctgtgggtgttgaagagccagcggactccagggagccgcctgaggaaccaggcctgagccaggaaggggccatgttgctgtctccagagccccctgccaaggaggtggaggctcgacccccattgtcccctgagcgagctccagaacatgacctggaagtggagccggagccccctatgatgctccccttgccgctgcaaccaccattgccgcccccacgaccaccccggccacccagcccaccgccggagcctgagaccacagatgcctcacacccatctgtccctccggagccccttgccgaggaccaccccccgcatactccaggcctctgtggcagcctggccaagtcgcagagcacagagacggtgccagccacaccaggcggggagcccccgctatcagggggcagcagtggcctgtccctgagctctccgcaagtgcccggcagccccttctcctacccagccccgtcccctagcttgagcagtgggggcctccctcggacacctggccgggacttcagcttcacacccaccttctccgagcccagcgggcccttgctcctgcccgtctgcccactccccactggccgacgcgatgaacgctccgggcccctggcctccccggtgctcctggagacgggcctgcccctccctctgccccttcccctgcccttgcccttggcattgcccgccgtcttgcgggcccaggctcgtgcgcccaccccgctgccacccctgctgcccgcccccctggcctcttgccctcccccaatgaagaggaagccgggccggccccggcgatccccaccatctatgctctccttggatgggcccttggtccgaccaccagcaggggccgcccttggaagggaactcctgctcctgccgggccagccacagacccccgtcttccccagcacccatgacccccggacggtgaccctggacttccggaacgcggggatcccagcccctccaccaccccttcccccccagccacccccacccccacctcccccacctgtagagcccaccaagctgccctttaaggagctagacaaccagtggccctccgaggccattcctccgggcccccgtgggcgcgatgaggtcactgaggaatacatggagttggccaagagccgggggccgtggcgccggccacctaagaagcgccatgaggacctggtgccacctgcgggctcgcccgaactctcgccaccccagcccctcttccggccccgctcggagtttgaggagatgaccatcctgtatgacatctggaacggtggcatcgatgaggaggacatccgcttcctgtgtgtcacctacgagcgactgctacagcaggacaatggcatggactggcttaacgacacgctctgggtctaccatccctccaccagcctctcttcagctaagaagaagaaacgggacgatggcatccgcgagcacgtgacgggctgtgcccgcagtgagggcttctacaccatcgacaagaaggacaagctcagatacctcaacagcagccgtgccagcaccgatgagccccccgcagacacccagggcatgagcatcccagcacagccccacgcctccacccgggcaggctcggagcggcgttcggagcagcgccgcctgctgtcctccttcactggcagctgtgacagtgacctgctcaagttcaaccagctcaagttccggaagaaaaagctcaagttctgcaagagccacattcacgactggggcttgttcgccatggagcccatcgcggctgacgagatggtcatcgagtacgtgggccagaatatccgtcaggtgatcgcagacatgcgggagaagcgttatgaggacgagggcatcgggagcagctacatgttccgggtggaccatgacaccatcatcgacgccaccaagtgcggcaacttcgcgcgcttcatcaaccacagctgcaaccccaactgctatgccaaggtgatcacggtggagtcacagaagaagatagtcatctactcgaagcagcacattaacgtcaatgaggagattacctatgactataagttccccatcgaggacgtcaagatcccctgcctctgtggctccgagaactgccgggggaccctcaactaggccccggcaccagactcaaaggatgtcagccgtagccctgggactcccgagcgtggagcccctggccccggggcccggccccccgcgcccgcccccatttcaggtgctgtcctctacccagcggccattcagggcctggcgccccacactaccccctggagcccctggctccggcccctccgcgggaaagggcttctctgtcgttcagcccacgtctctctcattttaacaaacgcccctttcaggatttctgtttaactccagcatcagcttctctctctccgtctctcctcccctctctctcttctctgtctcttctctctcccaccatcaccctcggcctcttcctgtgaatgctgctacgttgttttgtcttctctatttttttcctcgttgtgagaaaagacatttaaccgttgaaatgtgaaggtggaatcagagaggggccccgcgggggtctgcagaggcctcagtgtggctgtgcgtggcccgtgtcctggaagccacccggacctggacgcagggccaggtgctgtgggaaggatggaggcccccacggccttgacctcagaacactacgccctgaaagcgcccctcactgcccgtgggcacagtgaggagaccccacacctttccccacccgagctgcagcctgttccttccccagaggcctggggcaccactgacccggtggaccctgatggagctaagctgtcccaggcaggggtctccgctctgggctttccctgccacctcacaccccagcaccccctaaaccttgggttcaatgtttactttctcattcggatgccagcaacgcgggagcctctcggaggccccagtgcaggtgaggggcgctgagaacgcgggcagccactctcttctgcccttgccttcgccctgggtgggacagggctcccaagggcaggcgggtcccccagtcccgccattacgggttgtcagaccgtctgcgtgtggcattttttggcttataagcttcacccactcacccccaacccacaccccacatccccctgccggcagcccctcaacctaagaaggccagagcatatttattttcggagggagcagattacttctcccagagaaaggaaaatcttggaaaagatttaaaaacacaaatctaagccttgacggtttttttttcccttttgacccccttcccatctcttcagaatttattcccatggcttttttttttcttgtgcgtgtataaaatcaaaaggaaggggaaaaaggtttttgaagttcagaaccaacttctgtatatagaggctgccgcaaaggactttctcttgggaacattgtttcttgtagaaacatgcgggaagacattttttgctcatttctttgtacttccaaaaaaaaaggaaaaaaaagacaaaagcaagtccccccgtaccccagaaagcagaggaggcgtgtaaataatttctggaaagtgactgttgtgacccggagtcctcatcaagatgagcgcgctccatgagggagctgctcccaccctgcggacgcaggcggccggagcctctggtatctcagcttgtgtcaagcttgttatcatgtaaattctgtacaaagaattgttatttttctcttttttgttgttggtggttttgttgtgtgttttttgttgttttttttttattcctttcccccaggccctctctatttgagactgtgcccgccggtttcaagatcaaggaaattggtggcaacaagacacagatggggtacctgggcacagcggcgaacttctcttccgtttgcggttttctgcctaattgtgcaactgaggaaataatttatttttcacatgaggaaatgcgtagcttgtagagacggctgattcaagttacatgtacagcctccaaagggctgtctccattctgtccccttcccataaaagaagtgggggtgttcgagaagaccagggaagggacccttgcctcacccctccccctggcctcaccttgctcccagccatcgtgcccagtgttaacctcggctggccttcactaaggggactagacctccctctccccaggagccccagccccagagtggtttgcaataatcaagatatgtgtcgagtcatttttctttcaactccctcatttttcattgaacaaatctctgcttttcaagagttgggggtttctgctattttttgctttctctccctccccctgcaaagatgagaaccaatgagttttagggatgtttgtgcgggtagactccatcatccatatgtaacttgttttgaagagaagtgtttccgttgtgtgtcttgatgtaaatatttgttcatatttttgtgaatt

SEQ ID NO: 27845 - DNA, 8142 bp, Homo sapiens
  source 1..8142: mol_type = unassigned DNA
gctgcggggagggggctcgcgtcgccgtctccagccgctcccgatgaagcagctgcagccgcagccgcctccgaagatgggggatttctacgacccggagcacccgacccctgaagaagaagaaaatgaggcaaagattgaaaatgtgcagaaaacaggtttcatcaaaggaccaatgttcaaaggtgttgcttctagtcgatttttgcccaaaggcaccaaaacaaaagttaatttggaagaacagggacgacagaaggtgtcattcagcttcagccttacaaagaaaactttgcagaataggtttctcactgcacttggcaatgaaaagcaaagtgatactccaaaccctccagctgtacctcttcaggtagactcgactcctaaaatgaaaatggaaattggtgataccttatctactgcagaagaatcttccccaccaaagtcaagggtggaattgggcaaaattcattttaagaaacatctgcttcatgtaacatccaggccactgctggctactaccacagcagtagcatctccacctactcatgcagcaccattaccagcagtgatagcagaatcaacaactgtagactcaccgccctcatctccgcctccaccgcctccacctgcccaagccacaacactctcatcaccagcaccagtaacagagccagtggccttgccacatacaccaataacagttctaatggcagcaccagtacccttaccagtagatgtagcagttagatctctgaaagaaccaccaattataattgtaccagaatctttagaagcagatactaagcaggacactatatctaatagtttagaagaacacgtaactcaaatattgaatgagcaagcagatatttcctcaaaaaaagaagattcccatattgggaaggatgaagaaattccagatagttctaagattagtctgagctgtaaaaaaacaggttctaagaagaaatcctcacaatctgaaggcatctttcttggttcagaatctgatgaagattctgtacggacttcttcaagtcaaagatcacatgatttaaaattttcagcaagcattgaaaaggaaagagattttaaaaagagctcagcacctttaaaaagtgaggatctagggaaaccttcacgatctaaaacagacagagatgataaatattttagctattcaaaacttgaaagagatactcggtatgtatcttcccgatgtagatcagaaagagagcgacggcggagcagatctcactctaggtctgagagaggctctagaactaatttatcctattccaggtcagaacgatctcattattatgactctgatcgtcgctaccataggagctccccttatcgagagaggacgcgctattctcggccatacacagataacagagcacgagagagttctgactcagaagaagagtataagaagacatactcaaggcgtacctcatctcattcctcttcttacagagacctaaggacatcatcctattctaaatctgatcgggactgtaaaactgagacctcttacttagagatggaaagaagaggcaagtattcttcaaaactagaaagagaatctaaaaggacttcagaaaatgaagcaattaaaagatgttgttctccccctaatgaactgggattccgacgagggtcatcatattctaagcatgacagtagtgcttcccgttataaatctaccctttcaaaacctatacccaagtctgataaatttaaaaattctttctgttgtacagaattaaatgaagaaatcaaacagtctcattcttttagtttacagacaccttgttcaaaaggtagtgaattaagaatgattaataaaaatcctgaaagagaaaaggctgggtctccagctccatcaaatcgattaaatgattcacctactttaaaaaagctagatgaattgcctatttttaagtccgaatttataacacatgatagccatgatagtattaaggaattagactctttatctaaagtgaagaatgatcaattaagaagtttttgtcccatagaattaaatataaatggatctcctggggcagaatctgatttggcaacattttgcacttctaaaactgatgctgttttaatgacttctgatgatagtgtgactggatcggaattatcccctttggtcaaagcatgcatgctttcatcaaatggatttcagaatattagtaggtgcaaagaaaaagacttggatgatacctgcatgctgcataagaagtcagaaagcccatttagagaaacagaacctctggtgtcaccacaccaagataaactcatgtctatgccagttatgactgtggattattccaaaacagtagttaaagaaccagttgatacgagggtttcttgctgcaaaaccaaagattcagacatatactgtactttgaacgatagcaacccttctttgtgtaactctgaagctgaaaatattgagccttcagttatgaagatttcttcaaatagctttatgaatgtgcatttggaatcaaaaccagttatatgtgatagtagaaatttgacagatcactcaaaatttgcatgtgaagaatataagcagagcatcggtagcactagttcagcttctgttaatcattttgatgatttatatcaacctattgggagttcaggtattgcttcatctcttcagagtcttccaccaggaataaaggtggacagtctaactctcttgaaatgcggagagaacacatctccagttctggatgcagtgctaaagagtaaaaaaagttcagagtttttaaagcatgcagggaaagaaacaatagtagaagtaggtagtgaccttcctgattcaggaaagggatttgcttccagggagaacaggcgtaataatgggttatctgggaaatgtttgcaagaggctcaagaagaagggaattccatattgcctgaaagaagaggaagaccagaaatctctttagatgaaagaggagaaggaggacatgtgcatacttctgatgactcagaagttgtattttcttcttgtgatttgaatttaaccatggaagacagtgatggtgtaacttatgcattaaagtgtgacagtagtggtcatgccccagaaattgtgtctacagttcatgaagattattctggctcttctgaaagttcaaatgatgaaagtgattcagaagatacagattcggatgatagcagtattccaagaaaccgtctccagtctgttgtggttgtgccaaagaattctactttgcccatggaagaaacaagtccttgttcttctcggagcagtcaaagttatagacactattctgaccattgggaagatgagagattggagtcaaggagacatttgtatgaggaaaaatttgaaagtatagcaagtaaagcctgtcctcaaactgataagtttttccttcataaaggaacagagaagaatccggaaatttcttttacacagtccagtagaaaacaaatagataatcgcctgcctgaactttctcatcctcagagtgatggggttgatagtacaagtcatacagatgtgaaatctgaccctctgggtcacccaaattcagaggaaaccgtgaaagccaaaataccttctaggcagcaagaagagctgccaatttattcttctgattttgaagatgtcccaaataagtcttggcaacagaccactttccaaaacaggccagatagtagactgggaaaaacagaattgagtttttcttcctcttgtgagataccacatgtggatggcttgcactcatcagaagagctcagaaacttaggttgggacttctctcaagaaaagccttctaccacgtatcagcaacctgacagtagctatggagcttgtggtggacacaagtatcagcaaaatgcagaacagtatggtgggacacgtgattactggcaaggcaatggttactgggatccaagatcaggtagacctcctggaactggggttgtgtatgatcgaactcaaggacaagtaccagattccctaacagatgatcgtgaagaagaggagaattgggatcaacaggatggatcccatttttcagaccagtccgataaatttcttctatcccttcagaaagacaaggggtcagtgcaagcacctgaaataagcagcaattccattaaggacactttagctgtgaatgaaaagaaagatttttcaaaaaacttagaaaaaaatgatatcaaagatagagggcctcttaaaaaaaggaggcaggaaatagagagtgattctgaaagtgatggtgagcttcaggacagaaagaaagttagagtggaggtagagcagggagagacatcagtgcccccaggttcagcactggttgggccctcctgtgtcatggatgacttcagggacccacagcgatggaaggaatgtgccaagcaagggaaaatgccatgttactttgatcttattgaagaaaatgtttatttaacagaaagaaagaagaataaatctcatcgagatattaagcgaatgcagtgtgagtgtacacctctttctaaagatgaaagagctcaaggtgaaatagcatgtggggaagattgtcttaatcgtcttctcatgattgaatgttcttctcggtgtccaaatggggattattgttccaatagacggtttcagagaaaacagcatgcagatgtggaagtcatactcacagaaaagaaaggctggggcttgagagctgccaaagaccttccttcgaacacctttgtcctagaatattgtggagaggtactcgatcataaagagtttaaagctcgagtgaaggagtatgcacgaaacaaaaacatccattactatttcatggccctgaagaatgatgagataatagatgccactcaaaaaggaaattgctctcgtttcatgaatcacagctgtgaaccaaattgtgaaacccaaaaatggactgtgaacggacaactgagggttgggttttttaccaccaaactggttccttcaggctcagagttaacgtttgactatcagttccagagatatggaaaagaagcccagaaatgtttctgcggatcagccaattgccggggttacctgggaggagaaaacagagtcagcatcagagcagcaggagggaaaatgaagaaggaacgatctcgtaagaaggattcagtggatggagagctagaagctctgatggaaaatggtgagggtctctctgataaaaaccaggtgctcagcttatcccggctaatggttagaattgaaactttggagcagaaacttacctgtctggaactcatacagaacacacactcacagtcctgcctgaagtcctttctggaacgtcatgggctgtctttgttgtggatctggatggcagagctaggtgacggccgggaaagtaaccagaagcttcaggaagagattataaagactttggaacacttgcccattcctactaaaaatatgttggaggaaagcaaagtacttccaattattcaacgctggtctcagactaagactgctgtccctccgttgagtgaaggagatgggtattctagtgagaatacatcgcgtgctcatacaccactcaacacacctgatccttccaccaagctgagcacagaagctgacacagacactcccaagaaactaatgtttcgcagactgaaaattataagtgaaaatagcatggacagtgcaatctctgatgcaaccagtgagctagaaggcaaggatggcaaagaggatcttgatcaattagaaaatgtccctgtagaggaagaggaagaattgcagtcacaacagctactcccacaacagctgcctgaatgcaaagttgatagtgaaaccaacatagaagctagtaagctacctacatctgaaccagaagctgacgctgaaatagagcccaaagagagcaacggcacaaaactagaagaacctattaatgaagaaacaccatcccaagatgaagaggagggtgtgtctgatgtggagagtgaaaggagccaagaacagccagataaaacagtggatataagtgatttggccaccaaactcctggacagttggaaagacctaaaggaggtatatcgaattccaaagaaaagtcaaactgaaaaggaaaacacaacaactgaacgaggaagggatgctgttggcttcagagatcaaacacctgccccgaagactcctaataggtcaagagagagagacccagacaagcaaactcaaaataaagagaaaaggaaacgaagaagctccctctcaccaccctcttctgcctatgagcggggaacaaaaaggccagatgacagatatgatacaccaacttctaaaaagaaagtacgaattaaagaccgcaataaactttctacagaggaacgccggaagttgtttgagcaagaggtggctcaacgggaggctcagaaacaacagcaacagatgcagaacctgggaatgacatcaccactgccctatgactctcttggttataatgccccgcatcatccctttgctggttacccaccaggttatcccatgcaggcctatgtggatcccagcaaccctaatgctggaaaggtgctcctgcccacacccagcatggacccagtgtgttctcctgctccttatgatcatgctcagcccttggtgggacattctacagaacccctttctgcccctccaccagtaccagtggtgccacatgtggcagctcctgtggaagtttccagttcccagtatgtggcccagagtgatggtgtagtacaccaagactccagcgttgctgtcttgccagtgccggcccccggcccagttcagggacagaattatagtgtttgggattcaaaccaacagtctgtcagtgtacagcagcagtactctcctgcacagtctcaagcaaccatatattatcaaggacagacatgtccaacagtctatggtgtgacatcaccttattcacagacaactccaccaattgtacagagttatgcccagccaagtcttcagtatatccaggggcaacagattttcacagctcatccacaaggagtggtggtacagccagccgcagcagtgactacaatagttgcaccagggcagcctcagcccttgcagccatctgaaatggttgtgacaaataatctcttggatctgccgcccccctctcctcccaaaccaaaaaccattgtcttacctcccaactggaagacagctcgagatccagaagggaagatttattactaccatgtgatcacaaggcagactcagtgggatcctcctacttgggaaagcccaggagatgatgccagccttgagcatgaagctgagatggacctgggaactccaacatatgatgaaaaccccatgaaggcctcgaaaaagcccaagacagcagaagcagacacctccagtgaactagcaaagaaaagcaaagaagtattcagaaaagagatgtcccagttcatcgtccagtgcctgaacccttaccggaaacctgactgcaaagtgggaagaattaccacaactgaagactttaaacatctggctcgcaagctgactcacggtgttatgaataaggagctgaagtactgtaagaatcctgaggacctggagtgcaatgagaatgtgaaacacaaaaccaaggagtacattaagaagtacatgcagaagtttggggctgtttacaaacccaaagaggacactgaattagagtgactgttgggccagggtgggaggatgggtggtcaggtaagacagactctagggagaggaaatcctgtgggcctttctgtcccacccctgtcagcactgtgctactgatgatacatcaccctggggaattcaaccctgcagatgtcaactgaaggccacaaaaatgaactccatctacaagtgattacctagttgtgagctgttggcatgtggttagaagccatcagaggtgcaagggcttagaaaagaccctggccagacctgactccactcttaaacctgggtcttctccttggcggtgctgtcagcgcacagacccatgcgcatccccacccacaaccctttaccctgatgatctgtattatattttaatgtatatgtgaatatattgaaaataatttgttttt

SEQ ID NO: 27846 - DNA, 8431 bp, Homo sapiens
  source 1..8431: mol_type = unassigned DNA
gcgtcgccctgctgcggggagggggctcgcgtcgccgtctccagccgctcccgatgaagcagctgcagccgcagccgcctccgaagatgggggatttctacgacccggagcacccgacccctgaggaacaagagcctgaggcaaagattgaaaatgtgcagaaaacaggtttcatcaaaggaccaatgttcaaaggtgttgcttctagtcgatttttgcccaaaggcaccaaaacaaaagttaatttggaagaacagggacgacagaaggtgtcattcagcttcagccttacaaagaaaactttgcagaataggtttctcactgcacttggcaatgaaaagcaaagtgatactccaaaccctccagctgtacctcttcaggtagactcgactcctaaaatgaaaatggaaattggtgataccttatctactgcagaagaatcttccccaccaaagtcaagggtggaattgggcaaaattcattttaagaaacatctgcttcatgtaacatccaggccactgctggctactaccacagcagtagcatctccacctactcatgcagcaccattaccagcagtgatagcagaatcaacaactgtagactcaccgccctcatctccgcctccaccgcctccacctgcccaagccacaacactctcatcaccagcaccagtaacagagccagtggccttgccacatacaccaataacagttctaatggcagcaccagtacccttaccagtagatgtagcagttagatctctgaaagaaccaccaattataattgtaccagaatctttagaagcagatactaagcaggacactatatctaatagtttagaagaacacgtaactcaaatattgaatgagcaagcagatatttcctcaaaaaaagaagattcccatattgggaaggatgaagaaattccagatagttctaagattagtctgagctgtaaaaaaacaggttctaagaagaaatcctcacaatctgaaggcatctttcttggttcagaatctgatgaagattctgtacggacttcttcaagtcaaagatcacatgatttaaaattttcagcaagcattgaaaaggaaagagattttaaaaagagctcagcacctttaaaaagtgaggatctagggaaaccttcacgatctaaaacagacagagatgataaatattttagctattcaaaacttgaaagagatactcggtatgtatcttcccgatgtagatcagaaagagagcgacggcggagcagatctcactctaggtctgagagaggctctagaactaatttatcctattccaggtcagaacgatctcattattatgactctgatcgtcgctaccataggagctccccttatcgagagaggacgcgctattctcggccatacacagataacagagcacgagagagttctgactcagaagaagagtataagaagacatactcaaggcgtacctcatctcattcctcttcttacagagacctaaggacatcatcctattctaaatctgatcgggactgtaaaactgagacctcttacttagagatggaaagaagaggcaagtattcttcaaaactagaaagagaatctaaaaggacttcagaaaatgaagcaattaaaagatgttgttctccccctaatgaactgggattccgacgagggtcatcatattctaagcatgacagtagtgcttcccgttataaatctaccctttcaaaacctatacccaagtctgataaatttaaaaattctttctgttgtacagaattaaatgaagaaatcaaacagtctcattcttttagtttacagacaccttgttcaaaaggtagtgaattaagaatgattaataaaaatcctgaaagagaaaaggctgggtctccagctccatcaaatcgattaaatgattcacctactttaaaaaagctagatgaattgcctatttttaagtccgaatttataacacatgatagccatgatagtattaaggaattagactctttatctaaagtgaagaatgatcaattaagaagtttttgtcccatagaattaaatataaatggatctcctggggcagaatctgatttggcaacattttgcacttctaaaactgatgctgttttaatgacttctgatgatagtgtgactggatcggaattatcccctttggtcaaagcatgcatgctttcatcaaatggatttcagaatattagtaggtgcaaagaaaaagacttggatgatacctgcatgctgcataagaagtcagaaagcccatttagagaaacagaacctctggtgtcaccacaccaagataaactcatgtctatgccagttatgactgtggattattccaaaacagtagttaaagaaccagttgatacgagggtttcttgctgcaaaaccaaagattcagacatatactgtactttgaacgatagcaacccttctttgtgtaactctgaagctgaaaatattgagccttcagttatgaagatttcttcaaatagctttatgaatgtgcatttggaatcaaaaccagttatatgtgatagtagaaatttgacagatcactcaaaatttgcatgtgaagaatataagcagagcatcggtagcactagttcagcttctgttaatcattttgatgatttatatcaacctattgggagttcaggtattgcttcatctcttcagagtcttccaccaggaataaaggtggacagtctaactctcttgaaatgcggagagaacacatctccagttctggatgcagtgctaaagagtaaaaaaagttcagagtttttaaagcatgcagggaaagaaacaatagtagaagtaggtagtgaccttcctgattcaggaaagggatttgcttccagggagaacaggcgtaataatgggttatctgggaaatgtttgcaagaggctcaagaagaagggaattccatattgcctgaaagaagaggaagaccagaaatctctttagatgaaagaggagaaggaggacatgtgcatacttctgatgactcagaagttgtattttcttcttgtgatttgaatttaaccatggaagacagtgatggtgtaacttatgcattaaagtgtgacagtagtggtcatgccccagaaattgtgtctacagttcatgaagattattctggctcttctgaaagttcaaatgatgaaagtgattcagaagatacagattcggatgatagcagtattccaagaaaccgtctccagtctgttgtggttgtgccaaagaattctactttgcccatggaagaaacaagtccttgttcttctcggagcagtcaaagttatagacactattctgaccattgggaagatgagagattggagtcaaggagacatttgtatgaggaaaaatttgaaagtatagcaagtaaagcctgtcctcaaactgataagtttttccttcataaaggaacagagaagaatccggaaatttcttttacacagtccagtagaaaacaaatagataatcgcctgcctgaactttctcatcctcagagtgatggggttgatagtacaagtcatacagatgtgaaatctgaccctctgggtcacccaaattcagaggaaaccgtgaaagccaaaataccttctaggcagcaagaagagctgccaatttattcttctgattttgaagatgtcccaaataagtcttggcaacagaccactttccaaaacaggccagatagtagactgggaaaaacagaattgagtttttcttcctcttgtgagataccacatgtggatggcttgcactcatcagaagagctcagaaacttaggttgggacttctctcaagaaaagccttctaccacgtatcagcaacctgacagtagctatggagcttgtggtggacacaagtatcagcaaaatgcagaacagtatggtgggacacgtgattactggcaaggcaatggttactgggatccaagatcaggtagacctcctggaactggggttgtgtatgatcgaactcaaggacaagtaccagattccctaacagatgatcgtgaagaagaggagaattgggatcaacaggatggatcccatttttcagaccagtccgataaatttcttctatcccttcagaaagacaaggggtcagtgcaagcacctgaaataagcagcaattccattaaggacactttagctgtgaatgaaaagaaagatttttcaaaaaacttagaaaaaaatgatatcaaagatagagggcctcttaaaaaaaggaggcaggaaatagagagtgattctgaaagtgatggtgagcttcaggacagaaagaaagttagagtggaggtagagcagggagagacatcagtgcccccaggttcagcactggttgggccctcctgtgtcatggatgacttcagggacccacagcgatggaaggaatgtgccaagcaagggaaaatgccatgttactttgatcttattgaagaaaatgtttatttaacagaaagaaagaagaataaatctcatcgagatattaagcgaatgcagtgtgagtgtacacctctttctaaagatgaaagagctcaaggtgaaatagcatgtggggaagattgtcttaatcgtcttctcatgattgaatgttcttctcggtgtccaaatggggattattgttccaatagacggtttcagagaaaacagcatgcagatgtggaagtcatactcacagaaaagaaaggctggggcttgagagctgccaaagaccttccttcgaacacctttgtcctagaatattgtggagaggtactcgatcataaagagtttaaagctcgagtgaaggagtatgcacgaaacaaaaacatccattactatttcatggccctgaagaatgatgagataatagatgccactcaaaaaggaaattgctctcgtttcatgaatcacagctgtgaaccaaattgtgaaacccaaaaatggactgtgaacggacaactgagggttgggttttttaccaccaaactggttccttcaggctcagagttaacgtttgactatcagttccagagatatggaaaagaagcccagaaatgtttctgcggatcagccaattgccggggttacctgggaggagaaaacagagtcagcatcagagcagcaggagggaaaatgaagaaggaacgatctcgtaagaaggattcagtggatggagagctagaagctctgatggaaaatggtgagggtctctctgataaaaaccaggtgctcagcttatcccggctaatggttagaattgaaactttggagcagaaacttacctgtctggaactcatacagaacacacactcacagtcctgcctgaagtcctttctggaacgtcatgggctgtctttgttgtggatctggatggcagagctaggtgacggccgggaaagtaaccagaagcttcaggaagagattataaagactttggaacacttgcccattcctactaaaaatatgttggaggaaagcaaagtacttccaattattcaacgctggtctcagactaagactgctgtccctccgttgagtgaaggagatgggtattctagtgagaatacatcgcgtgctcatacaccactcaacacacctgatccttccaccaagctgagcacagaagctgacacagacactcccaagaaactaatgtttcgcagactgaaaattataagtgaaaatagcatggacagtgcaatctctgatgcaaccagtgagctagaaggcaaggatggcaaagaggatcttgatcaattagaaaatgtccctgtagaggaagaggaagaattgcagtcacaacagctactcccacaacagctgcctgaatgcaaagttgatagtgaaaccaacatagaagctagtaagctacctacatctgaaccagaagctgacgctgaaatagagcccaaagagagcaacggcacaaaactagaagaacctattaatgaagaaacaccatcccaagatgaagaggagggtgtgtctgatgtggagagtgaaaggagccaagaacagccagataaaacagtggatataagtgatttggccaccaaactcctggacagttggaaagacctaaaggaggtatatcgaattccaaagaaaagtcaaactgaaaaggaaaacacaacaactgaacgaggaagggatgctgttggcttcagagatcaaacacctgccccgaagactcctaataggtcaagagagagagacccagacaagcaaactcaaaataaagagaaaaggaaacgaagaagctccctctcaccaccctcttctgcctatgagcggggaacaaaaaggccagatgacagatatgatacaccaacttctaaaaagaaagtacgaattaaagaccgcaataaactttctacagaggaacgccggaagttgtttgagcaagaggtggctcaacgggaggctcagaaacaacagcaacagatgcagaacctgggaatgacatcaccactgccctatgactctcttggttataatgccccgcatcatccctttgctggttacccaccaggttatcccatgcaggcctatgtggatcccagcaaccctaatgctggaaaggtgctcctgcccacacccagcatggacccagtgtgttctcctgctccttatgatcatgctcagcccttggtgggacattctacagaacccctttctgcccctccaccagtaccagtggtgccacatgtggcagctcctgtggaagtttccagttcccagtatgtggcccagagtgatggtgtagtacaccaagactccagcgttgctgtcttgccagtgccggcccccggcccagttcagggacagaattatagtgtttgggattcaaaccaacagtctgtcagtgtacagcagcagtactctcctgcacagtctcaagcaaccatatattatcaaggacagacatgtccaacagtctatggtgtgacatcaccttattcacagacaactccaccaattgtacagagttatgcccagccaagtcttcagtatatccaggggcaacagattttcacagctcatccacaaggagtggtggtacagccagccgcagcagtgactacaatagttgcaccagggcagcctcagcccttgcagccatctgaaatggttgtgacaaataatctcttggatctgccgcccccctctcctcccaaaccaaaaaccattgtcttacctcccaactggaagacagctcgagatccagaagggaagatttattactaccatgtgatcacaaggcagactcagtgggatcctcctacttgggaaagcccaggagatgatgccagccttgagcatgaagctgagatggacctgggaactccaacatatgatgaaaaccccatgaaggcctcgaaaaagcccaagacagcagaagcagacacctccagtgaactagcaaagaaaagcaaagaagtattcagaaaagagatgtcccagttcatcgtccagtgcctgaacccttaccggaaacctgactgcaaagtgggaagaattaccacaactgaagactttaaacatctggctcgcaagctgactcacggtgttatgaataaggagctgaagtactgtaagaatcctgaggacctggagtgcaatgagaatgtgaaacacaaaaccaaggagtacattaagaagtacatgcagaagtttggggctgtttacaaacccaaagaggacactgaattagagtgactgttgggccagggtgggaggatgggtggtcaggtaagacagactctagggagaggaaatcctgtgggcctttctgtcccacccctgtcagcactgtgctactgatgatacatcaccctggggaattcaaccctgcagatgtcaactgaaggccacaaaaatgaactccatctacaagtgattacctagttgtgagctgttggcatgtggttagaagccatcagaggtgcaagggcttagaaaagaccctggccagacctgactccactcttaaacctgggtcttctccttggcggtgctgtcagcgcacagacccatgcgcatccccacccacaaccctttaccctgatgatctgtattatattttaatgtatatgtgaatatattgaaaataatttgttttttcctggtttttgtttggttttcgttttgcttttagcctctacatgctaggatcacaggaagactttgtaaggacagtttaagttctcctgcaaggtttaatttgttatcatgtaaatattctaaagcaggctgccttgtggttttggccagccttgtgctatgttgataagattgatttactgcttaaaatcactttactttatccaatttttactgaactttttatgtaaaaaaataaaatcaattaaagaacttggcatgtgtgttccctaaaagtt

SEQ ID NO: 27847 - DNA, 8431 bp, Homo sapiens
  source 1..8431: mol_type = unassigned DNA
gcgtcgccctgctgcggggagggggctcgcgtcgccgtctccagccgctcccgatgaagcagctgcagccgcagccgcctccgaagatgggggatttctacgacccggagcacccgacccctgaaaaaaaagaaagagaggcaaagattgaaaatgtgcagaaaacaggtttcatcaaaggaccaatgttcaaaggtgttgcttctagtcgatttttgcccaaaggcaccaaaacaaaagttaatttggaagaacagggacgacagaaggtgtcattcagcttcagccttacaaagaaaactttgcagaataggtttctcactgcacttggcaatgaaaagcaaagtgatactccaaaccctccagctgtacctcttcaggtagactcgactcctaaaatgaaaatggaaattggtgataccttatctactgcagaagaatcttccccaccaaagtcaagggtggaattgggcaaaattcattttaagaaacatctgcttcatgtaacatccaggccactgctggctactaccacagcagtagcatctccacctactcatgcagcaccattaccagcagtgatagcagaatcaacaactgtagactcaccgccctcatctccgcctccaccgcctccacctgcccaagccacaacactctcatcaccagcaccagtaacagagccagtggccttgccacatacaccaataacagttctaatggcagcaccagtacccttaccagtagatgtagcagttagatctctgaaagaaccaccaattataattgtaccagaatctttagaagcagatactaagcaggacactatatctaatagtttagaagaacacgtaactcaaatattgaatgagcaagcagatatttcctcaaaaaaagaagattcccatattgggaaggatgaagaaattccagatagttctaagattagtctgagctgtaaaaaaacaggttctaagaagaaatcctcacaatctgaaggcatctttcttggttcagaatctgatgaagattctgtacggacttcttcaagtcaaagatcacatgatttaaaattttcagcaagcattgaaaaggaaagagattttaaaaagagctcagcacctttaaaaagtgaggatctagggaaaccttcacgatctaaaacagacagagatgataaatattttagctattcaaaacttgaaagagatactcggtatgtatcttcccgatgtagatcagaaagagagcgacggcggagcagatctcactctaggtctgagagaggctctagaactaatttatcctattccaggtcagaacgatctcattattatgactctgatcgtcgctaccataggagctccccttatcgagagaggacgcgctattctcggccatacacagataacagagcacgagagagttctgactcagaagaagagtataagaagacatactcaaggcgtacctcatctcattcctcttcttacagagacctaaggacatcatcctattctaaatctgatcgggactgtaaaactgagacctcttacttagagatggaaagaagaggcaagtattcttcaaaactagaaagagaatctaaaaggacttcagaaaatgaagcaattaaaagatgttgttctccccctaatgaactgggattccgacgagggtcatcatattctaagcatgacagtagtgcttcccgttataaatctaccctttcaaaacctatacccaagtctgataaatttaaaaattctttctgttgtacagaattaaatgaagaaatcaaacagtctcattcttttagtttacagacaccttgttcaaaaggtagtgaattaagaatgattaataaaaatcctgaaagagaaaaggctgggtctccagctccatcaaatcgattaaatgattcacctactttaaaaaagctagatgaattgcctatttttaagtccgaatttataacacatgatagccatgatagtattaaggaattagactctttatctaaagtgaagaatgatcaattaagaagtttttgtcccatagaattaaatataaatggatctcctggggcagaatctgatttggcaacattttgcacttctaaaactgatgctgttttaatgacttctgatgatagtgtgactggatcggaattatcccctttggtcaaagcatgcatgctttcatcaaatggatttcagaatattagtaggtgcaaagaaaaagacttggatgatacctgcatgctgcataagaagtcagaaagcccatttagagaaacagaacctctggtgtcaccacaccaagataaactcatgtctatgccagttatgactgtggattattccaaaacagtagttaaagaaccagttgatacgagggtttcttgctgcaaaaccaaagattcagacatatactgtactttgaacgatagcaacccttctttgtgtaactctgaagctgaaaatattgagccttcagttatgaagatttcttcaaatagctttatgaatgtgcatttggaatcaaaaccagttatatgtgatagtagaaatttgacagatcactcaaaatttgcatgtgaagaatataagcagagcatcggtagcactagttcagcttctgttaatcattttgatgatttatatcaacctattgggagttcaggtattgcttcatctcttcagagtcttccaccaggaataaaggtggacagtctaactctcttgaaatgcggagagaacacatctccagttctggatgcagtgctaaagagtaaaaaaagttcagagtttttaaagcatgcagggaaagaaacaatagtagaagtaggtagtgaccttcctgattcaggaaagggatttgcttccagggagaacaggcgtaataatgggttatctgggaaatgtttgcaagaggctcaagaagaagggaattccatattgcctgaaagaagaggaagaccagaaatctctttagatgaaagaggagaaggaggacatgtgcatacttctgatgactcagaagttgtattttcttcttgtgatttgaatttaaccatggaagacagtgatggtgtaacttatgcattaaagtgtgacagtagtggtcatgccccagaaattgtgtctacagttcatgaagattattctggctcttctgaaagttcaaatgatgaaagtgattcagaagatacagattcggatgatagcagtattccaagaaaccgtctccagtctgttgtggttgtgccaaagaattctactttgcccatggaagaaacaagtccttgttcttctcggagcagtcaaagttatagacactattctgaccattgggaagatgagagattggagtcaaggagacatttgtatgaggaaaaatttgaaagtatagcaagtaaagcctgtcctcaaactgataagtttttccttcataaaggaacagagaagaatccggaaatttcttttacacagtccagtagaaaacaaatagataatcgcctgcctgaactttctcatcctcagagtgatggggttgatagtacaagtcatacagatgtgaaatctgaccctctgggtcacccaaattcagaggaaaccgtgaaagccaaaataccttctaggcagcaagaagagctgccaatttattcttctgattttgaagatgtcccaaataagtcttggcaacagaccactttccaaaacaggccagatagtagactgggaaaaacagaattgagtttttcttcctcttgtgagataccacatgtggatggcttgcactcatcagaagagctcagaaacttaggttgggacttctctcaagaaaagccttctaccacgtatcagcaacctgacagtagctatggagcttgtggtggacacaagtatcagcaaaatgcagaacagtatggtgggacacgtgattactggcaaggcaatggttactgggatccaagatcaggtagacctcctggaactggggttgtgtatgatcgaactcaaggacaagtaccagattccctaacagatgatcgtgaagaagaggagaattgggatcaacaggatggatcccatttttcagaccagtccgataaatttcttctatcccttcagaaagacaaggggtcagtgcaagcacctgaaataagcagcaattccattaaggacactttagctgtgaatgaaaagaaagatttttcaaaaaacttagaaaaaaatgatatcaaagatagagggcctcttaaaaaaaggaggcaggaaatagagagtgattctgaaagtgatggtgagcttcaggacagaaagaaagttagagtggaggtagagcagggagagacatcagtgcccccaggttcagcactggttgggccctcctgtgtcatggatgacttcagggacccacagcgatggaaggaatgtgccaagcaagggaaaatgccatgttactttgatcttattgaagaaaatgtttatttaacagaaagaaagaagaataaatctcatcgagatattaagcgaatgcagtgtgagtgtacacctctttctaaagatgaaagagctcaaggtgaaatagcatgtggggaagattgtcttaatcgtcttctcatgattgaatgttcttctcggtgtccaaatggggattattgttccaatagacggtttcagagaaaacagcatgcagatgtggaagtcatactcacagaaaagaaaggctggggcttgagagctgccaaagaccttccttcgaacacctttgtcctagaatattgtggagaggtactcgatcataaagagtttaaagctcgagtgaaggagtatgcacgaaacaaaaacatccattactatttcatggccctgaagaatgatgagataatagatgccactcaaaaaggaaattgctctcgtttcatgaatcacagctgtgaaccaaattgtgaaacccaaaaatggactgtgaacggacaactgagggttgggttttttaccaccaaactggttccttcaggctcagagttaacgtttgactatcagttccagagatatggaaaagaagcccagaaatgtttctgcggatcagccaattgccggggttacctgggaggagaaaacagagtcagcatcagagcagcaggagggaaaatgaagaaggaacgatctcgtaagaaggattcagtggatggagagctagaagctctgatggaaaatggtgagggtctctctgataaaaaccaggtgctcagcttatcccggctaatggttagaattgaaactttggagcagaaacttacctgtctggaactcatacagaacacacactcacagtcctgcctgaagtcctttctggaacgtcatgggctgtctttgttgtggatctggatggcagagctaggtgacggccgggaaagtaaccagaagcttcaggaagagattataaagactttggaacacttgcccattcctactaaaaatatgttggaggaaagcaaagtacttccaattattcaacgctggtctcagactaagactgctgtccctccgttgagtgaaggagatgggtattctagtgagaatacatcgcgtgctcatacaccactcaacacacctgatccttccaccaagctgagcacagaagctgacacagacactcccaagaaactaatgtttcgcagactgaaaattataagtgaaaatagcatggacagtgcaatctctgatgcaaccagtgagctagaaggcaaggatggcaaagaggatcttgatcaattagaaaatgtccctgtagaggaagaggaagaattgcagtcacaacagctactcccacaacagctgcctgaatgcaaagttgatagtgaaaccaacatagaagctagtaagctacctacatctgaaccagaagctgacgctgaaatagagcccaaagagagcaacggcacaaaactagaagaacctattaatgaagaaacaccatcccaagatgaagaggagggtgtgtctgatgtggagagtgaaaggagccaagaacagccagataaaacagtggatataagtgatttggccaccaaactcctggacagttggaaagacctaaaggaggtatatcgaattccaaagaaaagtcaaactgaaaaggaaaacacaacaactgaacgaggaagggatgctgttggcttcagagatcaaacacctgccccgaagactcctaataggtcaagagagagagacccagacaagcaaactcaaaataaagagaaaaggaaacgaagaagctccctctcaccaccctcttctgcctatgagcggggaacaaaaaggccagatgacagatatgatacaccaacttctaaaaagaaagtacgaattaaagaccgcaataaactttctacagaggaacgccggaagttgtttgagcaagaggtggctcaacgggaggctcagaaacaacagcaacagatgcagaacctgggaatgacatcaccactgccctatgactctcttggttataatgccccgcatcatccctttgctggttacccaccaggttatcccatgcaggcctatgtggatcccagcaaccctaatgctggaaaggtgctcctgcccacacccagcatggacccagtgtgttctcctgctccttatgatcatgctcagcccttggtgggacattctacagaacccctttctgcccctccaccagtaccagtggtgccacatgtggcagctcctgtggaagtttccagttcccagtatgtggcccagagtgatggtgtagtacaccaagactccagcgttgctgtcttgccagtgccggcccccggcccagttcagggacagaattatagtgtttgggattcaaaccaacagtctgtcagtgtacagcagcagtactctcctgcacagtctcaagcaaccatatattatcaaggacagacatgtccaacagtctatggtgtgacatcaccttattcacagacaactccaccaattgtacagagttatgcccagccaagtcttcagtatatccaggggcaacagattttcacagctcatccacaaggagtggtggtacagccagccgcagcagtgactacaatagttgcaccagggcagcctcagcccttgcagccatctgaaatggttgtgacaaataatctcttggatctgccgcccccctctcctcccaaaccaaaaaccattgtcttacctcccaactggaagacagctcgagatccagaagggaagatttattactaccatgtgatcacaaggcagactcagtgggatcctcctacttgggaaagcccaggagatgatgccagccttgagcatgaagctgagatggacctgggaactccaacatatgatgaaaaccccatgaaggcctcgaaaaagcccaagacagcagaagcagacacctccagtgaactagcaaagaaaagcaaagaagtattcagaaaagagatgtcccagttcatcgtccagtgcctgaacccttaccggaaacctgactgcaaagtgggaagaattaccacaactgaagactttaaacatctggctcgcaagctgactcacggtgttatgaataaggagctgaagtactgtaagaatcctgaggacctggagtgcaatgagaatgtgaaacacaaaaccaaggagtacattaagaagtacatgcagaagtttggggctgtttacaaacccaaagaggacactgaattagagtgactgttgggccagggtgggaggatgggtggtcaggtaagacagactctagggagaggaaatcctgtgggcctttctgtcccacccctgtcagcactgtgctactgatgatacatcaccctggggaattcaaccctgcagatgtcaactgaaggccacaaaaatgaactccatctacaagtgattacctagttgtgagctgttggcatgtggttagaagccatcagaggtgcaagggcttagaaaagaccctggccagacctgactccactcttaaacctgggtcttctccttggcggtgctgtcagcgcacagacccatgcgcatccccacccacaaccctttaccctgatgatctgtattatattttaatgtatatgtgaatatattgaaaataatttgttttttcctggtttttgtttggttttcgttttgcttttagcctctacatgctaggatcacaggaagactttgtaaggacagtttaagttctcctgcaaggtttaatttgttatcatgtaaatattctaaagcaggctgccttgtggttttggccagccttgtgctatgttgataagattgatttactgcttaaaatcactttactttatccaatttttactgaactttttatgtaaaaaaataaaatcaattaaagaacttggcatgtgtgttccctaaaagtt

SEQ ID NO: 27848 - DNA, 4437 bp, Homo sapiens
  source 1..4437: mol_type = unassigned DNA
ggcactaaaggtttgcttccgggcgtttcttttgcttccccttccctctttcacgcttcctcccctccccctcctcccttatcccttcgctttcgctcttttccgtcgaggccgacccctgagttgtgagtctggggtctggttggtgaaaaagagcccttgaagctggaagacgggagaggacaaaagcatgtcttcccttcctgggtgcattggtttggatgcagcaacagctacagtggagtctgaagagattgcagagctgcaacaggcagtggttgaggaactgggtatctctatggaggaacttcggcatttcatcgatgaggaactggagaagatggattgtgtacagcaacgcaagaagcagctagcagagttagagacatgggtaatacagaaagaatctgaggtggctcacgttgaccaactctttgatgatgcatccagggcagtgactaattgtgagtctttggtgaaggacttctactccaagctgggactacaataccgggacagtagctctgaggacgaatcttcccggcctacagaaataattgagattcctgatgaagatgatgatgtcctcagtattgattcaggtgatgctgggagcagaactccaaaagaccagaagctccgtgaagctatggctgccttaagaaagtcagctcaagatgttcagaagttcatggatgctgtcaacaagaagagcagttcccaggatctgcataaaggaaccttgagtcagatgtctggagaactaagcaaagatggtgacctgatagtcagcatgcgaattctgggcaagaagagaactaagacttggcacaaaggcacccttattgccatccagacagttgggccagggaagaaatacaaggtgaaatttgacaacaaaggaaagagtctactgtcggggaaccatattgcctatgattaccaccctcctgctgacaagctgtatgtgggcagtcgggtggtcgccaaatacaaagatgggaatcaggtctggctctatgctggcattgtagctgagacaccaaacgtcaaaaacaagctcaggtttctcattttctttgatgatggctatgcttcctatgtcacacagtcggaactgtatcccatttgccggccactgaaaaagacttgggaggacatagaagacatctcctgccgtgacttcatagaggagtatgtcactgcctaccccaaccgccccatggtactgctcaagagtggccagcttatcaagactgagtgggaaggcacgtggtggaagtcccgagttgaggaggtggatggcagcctagtcaggatcctcttcctggatgacaaaagatgtgagtggatctatcgaggctctacacggctggagcccatgttcagcatgaaaacatcctcagcctctgcactggagaagaagcaaggacagctcaggacacgtccaaatatgggtgctgtgaggagcaaaggccctgttgtccagtacacacaggatctgaccggtactggaacccagttcaagccagtggaacccccacagcctacagctccacctgccccacctttcccacctgctccacctctatccccccaagcaggtgacagtgacttggaaagccagcttgcccagtcacggaagcaggtagccaaaaagagcacgtcctttcgaccaggatctgtgggctctggtcattcctcccctacatctcctgcactcagtgaaaatgtctctggtgggaaacctgggatcaaccagacatatagatcacctttaggctccacagcctctgccccagcaccctcagcactcccggcccctccagcacccccagtcttccatggcatgctggagcgggccccagcagagccctcctaccgtgctcccatggagaagcttttctacttacctcatgtctgcagctatacctgtctgtctcgagtcagacctatgaggaatgagcagtaccggggcaagaaccctctgctggtcccgttactatatgacttccggcggatgacagcccggcgtcgagttaaccgcaagatgggctttcatgttatctataagacaccttgtggtctctgccttcggacaatgcaggagatagaacgctaccttttcgagactggctgtgacttcctcttcctggagatgttctgtttggatccatatgttcttgtggaccgaaagtttcagccctataagcctttttactatattttggacatcacttatgggaaggaagatgttcccctatcctgtgtcaatgagattgacacaacccctccaccccaggtggcctacagcaaggaacgtatcccgggcaagggtgttttcattaacacaggccctgaatttctggttggctgtgactgcaaggatgggtgtcgggacaagtccaagtgtgcctgccatcaactaactatccaggctacagcctgtaccccaggaggccaaatcaaccctaactctggctaccagtacaagagactagaagagtgtctacccacaggggtatatgagtgtaacaaacgctgcaaatgtgacccaaacatgtgcacaaaccggttggtgcaacatggactacaagttcggctacagctattcaagacacagaacaagggctggggtatccgctgcttggatgacattgccaaaggctcttttgtttgtatttatgcaggcaaaatcctgacagatgactttgcagacaaggagggtctggaaatgggtgatgagtactttgcaaatctggaccatatcgagagcgtggagaacttcaaagaaggatatgagagtgatgccccctgttcctctgacagcagtggtgtagacttgaaggaccaggaagatggcaacagcggtacagaggaccctgaagagtccaatgatgatagctcagatgataacttctgtaaggatgaggacttcagcaccagttcagtgtggcggagctatgctacccggaggcagacccggggccagaaagagaacggactctctgagacaacttccaaggactcccaccccccagatcttggacccccacatattcctgttcctccctcaatccctgtaggtggctgcaatccaccttcctccgaagagacacccaagaacaaggtggcctcatggttgagctgcaatagtgtcagtgaaggtggttttgctgactctgatagccattcatccttcaagactaatgaaggtggggagggccgggctgggggaagccgaatggaggctgagaaggcctccacctcaggactaggcatcaaggatgagggagacatcaaacaggccaagaaagaggacactgacgaccgaaacaagatgtcagtagttactgaaagctctcgaaattacggttacaatccttctcctgtgaagcctgaaggacttcgccgcccacctagtaagactagtatgcatcaaagccgaagactcatggcttctgctcagtccaaccctgatgatgtcctgacactgtccagcagcacagaaagtgagggggaaagtgggaccagccgaaagcccactgctggtcagacttcggctacagcggttgacagtgatgatatccagaccatatcctctggctctgaaggggatgactttgaggacaagaagaacatgactggtccaatgaagcgtcaagtggcagtaaaatcaacccgaggctttgctcttaaatcaacccatgggattgcaattaaatcaaccaacatggcctctgtggacaagggggagagcgcacctgttcgtaagaacacacgccaattctatgatggcgaggagtcttgctacatcattgatgccaagcttgaaggcaacctgggccgctacctcaaccacagttgcagccccaacctgtttgtccagaatgtcttcgtggatacccatgatcttcgcttcccctgggtggccttctttgccagcaaaagaatccgggctgggacagaacttacttgggactacaactacgaggtgggcagtgtggaaggcaaggagctactctgttgctgtggggccattgaatgcagaggacgtcttctttagaggacagccttcttcccaacccttcttgaactgtcgtttcctcaggaactgggtcttcctgattgttgaaccctgacccgaagtctctgggctagctactccccccagctcctagttgatagaaatgggggttctggaccagatgatcccttccaatgtggtgctagcaggcaggatcccttctccacctccaaaggccctaaagggtggggagagatcaccactctaacctcggcctgacatccctcccatcccatatttgtccaagtgttcctgcttctaacagactttgttcttagaatggagcctgtgtatctactatctccagtttgtattatttcttgaaagtcttttaacaatatgataaaact

SEQ ID NO: 27849 - DNA, 1478 bp, Homo sapiens
  source 1..1478: mol_type = unassigned DNA
gtttgcttccgggcgtttcttttgcttccccttccctctttcacgcttcctcccctccccctcctcccttatcccttcgctttcgctcttttccgtcgaggccgacccctgagttaggacaaaagcatgtcttcccttcctgggtgcattggtttggatgcagcaacagctacagtggagtctgaagagattgcagagctgcaacaggcagtggttgaggaactgggtatctctatggaggaacttcggcatttcatcgatgaggaactggagaagatggattgtgtacagcaacgcaagaagcagctagcagagttagagacatgggtaatacagaaagaatctgaggtggctcacgttgaccaactctttgatgatgcatccagggcagtgactaattgtgagtctttggtgaaggacttctactccaagctgggactacaataccgggacagtagctctgaggacgaatcttcccggcctacagaaataattgagattcctgatgaagatgatgatgtcctcagtattgattcaggtgatgctgggagcagaactccaaaagaccagaagctccgtgaagctatggctgccttaagaaagtcagctcaagatgttcagaagttcatggatgctgtcaacaagaagagcagttcccaggatctgcataaaggaaccttgagtcagatgtctggagaactaagcaaagatggtgacctgatagtcagcatgcgaattctgggcaagaagagaactaagacttggcacaaaggcacccttattgccatccagacagttgggccagggaagaaatacaaggtgaaatttgacaacaaaggaaagagtctactgtcggggaaccatattgcctatgattaccaccctcctgctgacaagctgtatgtgggcagtcgggtggtcgccaaatacaaagatgggaatcaggtctggctctatgctggcattgtagctgagacaccaaacgtcaaaaacaagctcaggtttctcattttctttgatgatggctatgcttcctatgtcacacagtcggaactgtatcccatttgccggccactgaaaaagacttgggaggacatagaagacatctcctgccgtgacttcatagaggagtatgtcactgcctaccccaaccgccccatggtactgctcaagagtggccagcttatcaagactgagtgggaaggcacgtggtggaagtcccgagttgaggaggtggatggcagcctagtcaggatcctcttcctggtactgttcttctctacaattttggaggcagaggttggtggggggggaacttaagaagcagtaatgaggatggttttatagctattccatagccttcctctttcttatcctcgtatgtgttctcactgtttttggtcaaattttactttgccctttttgttgttcctctgcaggtcattgttgaaaataaattatctgaattataatacgaa

SEQ ID NO: 27850 - DNA, 1045 bp, Homo sapiens
  source 1..1045: mol_type = unassigned DNA
ttcgctttcgctcttttccgtcgaggccgacccctgagttgtgagtctggggtctggttggtgaaaaagagcccttgaagctggaagacgggagaggacaaaagcatgtcttcccttcctgggtgcattggtttggatgcagcaacagctacagtggagtctgaagagattgcagagctgcaacaggcagtggttgaggaactgggtatctctatggaggaacttcggcatttcatcgatgaggaactggagaagatggattgtgtacagcaacgcaagaagcagctagcagagttagagacatgggtaatacagaaagaatctgaggtggctcacgttgaccaactctttgatgatgcatccagggcagtgactaattgtgagtctttggtgaaggacttctactccaagctgggactacaataccgggacagtagctctgaggacgaatcttcccggcctacagaaataattgagattcctgatgaagatgatgatgtcctcagtattgattcaggtgatgctgggagcagaactccaaaagaccagaagctccgtgaagctatggctgccttaagaaagtcagctcaagatgttcagaagttcatggatgctgtcaacaagaagagcagttcccaggatctgcataaaggaaccttgagtcagatgtctggagaactaagcaaagatggtgacctgatagtcagcatgcgaattctgggcaagaagagaactaagacttggcacaaaggcacccttattgccatccagacagttggtttctcattttctttgatgatggctatgcttcctatgtcacacagtcggaactgtatcccatttgccggccactgaaaaagacttgggaggacatagaagacatctcctgccgtgacttcatagaggagtatgtcactgcctaccccaaccgccccatggtactgctcaagagtggccagcttatcaagactgagtgggaaggcacgtggtggaagtcccgagttgaggaggtggatggcagcctagtcaggatcctcttcctggt

SEQ ID NO: 27851 - DNA, 4363 bp, Homo sapiens
  source 1..4363: mol_type = unassigned DNA
ctcccttatcccttcgctttcgctcttttccgtcgaggccgacccctgagttgtgagtctggggtctggttggtgaaaaagagcccttgaagctggaagacgggagaggacaaaagcatgtcttcccttcctgggtgcattggtttggatgcagcaacagctacagtggagtctgaagagattgcagagctgcaacaggcagtggttgaggaactgggtatctctatggaggaacttcggcatttcatcgatgaggaactggagaagatggattgtgtacagcaacgcaagaagcagctagcagagttagagacatgggtaatacagaaagaatctgaggtggctcacgttgaccaactctttgatgatgcatccagggcagtgactaattgtgagtctttggtgaaggacttctactccaagctgggactacaataccgggacagtagctctgaggacgaatcttcccggcctacagaaataattgagattcctgatgaagatgatgatgtcctcagtattgattcaggtgatgctgggagcagaactccaaaagaccagaagctccgtgaagctatggctgccttaagaaagtcagctcaagatgttcagaagttcatggatgctgtcaacaagaagagcagttcccaggatctgcataaaggaaccttgagtcagatgtctggagaactaagcaaagatggtgacctgatagtcagcatgcgaattctgggcaagaagagaactaagacttggcacaaaggcacccttattgccatccagacagttgggccagggaagaaatacaaggtgaaatttgacaacaaaggaaagagtctactgtcggggaaccatattgcctatgattaccaccctcctgctgacaagctgtatgtgggcagtcgggtggtcgccaaatacaaagatgggaatcaggtctggctctatgctggcattgtagctgagacaccaaacgtcaaaaacaagctcaggtttctcattttctttgatgatggctatgcttcctatgtcacacagtcggaactgtatcccatttgccggccactgaaaaagacttgggaggacatagaagacatctcctgccgtgacttcatagaggagtatgtcactgcctaccccaaccgccccatggtactgctcaagagtggccagcttatcaagactgagtgggaaggcacgtggtggaagtcccgagttgaggaggtggatggcagcctagtcaggatcctcttcctggatgacaaaagatgtgagtggatctatcgaggctctacacggctggagcccatgttcagcatgaaaacatcctcagcctctgcactggagaagaagcaaggacagctcaggacacgtccaaatatgggtgctgtgaggagcaaaggccctgttgtccagtacacacaggatctgaccggtactggaacccagttcaagccagtggaacccccacagcctacagctccacctgccccacctttcccacctgctccacctctatccccccaagcaggtgacagtgacttggaaagccagcttgcccagtcacggaagcaggtagccaaaaagagcacgtcctttcgaccaggatctgtgggctctggtcattcctcccctacatctcctgcactcagtgaaaatgtctctggtgggaaacctgggatcaaccagacatatagatcacctttaggctccacagcctctgccccagcaccctcagcactcccggcccctccagcacccccagtcttccatggcatgctggagcgggccccagcagagccctcctaccgtgctcccatggagaagcttttctacttacctcatgtctgcagctatacctgtctgtctcgagtcagacctatgaggaatgagcagtaccggggcaagaaccctctgctggtcccgttactatatgacttccggcggatgacagcccggcgtcgagttaaccgcaagatgggctttcatgttatctataagacaccttgtggtctctgccttcggacaatgcaggagatagaacgctaccttttcgagactggctgtgacttcctcttcctggagatgttctgtttggatccatatgttcttgtggaccgaaagtttcagccctataagcctttttactatattttggacatcacttatgggaaggaagatgttcccctatcctgtgtcaatgagattgacacaacccctccaccccaggtggcctacagcaaggaacgtatcccgggcaagggtgttttcattaacacaggccctgaatttctggttggctgtgactgcaaggatgggtgtcgggacaagtccaagtgtgcctgccatcaactaactatccaggctacagcctgtaccccaggaggccaaatcaaccctaactctggctaccagtacaagagactagaagagtgtctacccacaggggtatatgagtgtaacaaacgctgcaaatgtgacccaaacatgtgcacaaaccggttggtgcaacatggactacaagttcggctacagctattcaagacacagaacaagggctggggtatccgctgcttggatgacattgccaaaggctcttttgtttgtatttatgcaggcaaaatcctgacagatgactttgcagacaaggagggtctggaaatgggtgatgagtactttgcaaatctggaccatatcgagagcgtggagaacttcaaagaaggatatgagagtgatgccccctgttcctctgacagcagtggtgtagacttgaaggaccaggaagatggcaacagcggtacagaggaccctgaagagtccaatgatgatagctcagatgataacttctgtaaggatgaggacttcagcaccagttcagtgtggcggagctatgctacccggaggcagacccggggccagaaagagaacggactctctgagacaacttccaaggactcccaccccccagatcttggacccccacatattcctgttcctccctcaatccctgtaggtggctgcaatccaccttcctccgaagagacacccaagaacaaggtggcctcatggttgagctgcaatagtgtcagtgaaggtggttttgctgactctgatagccattcatccttcaagactaatgaaggtggggagggccgggctgggggaagccgaatggaggctgagaaggcctccacctcaggactaggcatcaaggatgagggagacatcaaacaggccaagaaagaggacactgacgaccgaaacaagatgtcagtagttactgaaagctctcgaaattacggttacaatccttctcctgtgaagcctgaaggacttcgccgcccacctagtaagactagtatgcatcaaagccgaagactcatggcttctgctcagtccaaccctgatgatgtcctgacactgtccagcagcacagaaagtgagggggaaagtgggaccagccgaaagcccactgctggtcagacttcggctacagcggttgacagtgatgatatccagaccatatcctctggctctgaaggggatgactttgaggacaagaagaacatgactggtccaatgaagcgtcaagtggcagtaaaatcaacccgaggctttgctcttaaatcaacccatgggattgcaattaaatcaaccaacatggcctctgtggacaagggggagagcgcacctgttcgtaagaacacacgccaattctatgatggcgaggagtcttgctacatcattgatgccaagcttgaaggcaacctgggccgctacctcaaccacagttgcagccccaacctgtttgtccagaatgtcttcgtggatacccatgatcttcgcttcccctgggtggccttctttgccagcaaaatccgggctgggacagaacttacttgggactacaactacgaggtgggcagtgtggaaggcaaggagctactctgttgctgtggggccattgaatgcagaggacgtcttctttagaggacagccttcttcccaacccttcttgaactgtcgtttcctcaggaactgggtcttcctgattgttgaaccctgacccgaagtctctgggctagctactccccccagctcctagttgatagaaatgggggttctggaccagatgatcccttccaatgtggtgctagcaggcaggatcccttctccacctccaaaggccctaaagggtggggagagatcaccactctaacctcggcctgacatccctcccatcccatatttgtccaagtgttcctgcttctaacagactttgttcttagaatggagcctgtgtatctactatctccagtttgtattatttcttgaaagtcttttaacaatatgataaaactaa

SEQ ID NO: 27852 - DNA, 1404 bp, Homo sapiens
  source 1..1404: mol_type = unassigned DNA
atgtcttcccttcctgggtgcattggtttggatgcagcaacagctacagtggagtctgaagagattgcagagctgcaacaggcagtggttgaggaactgggtatctctatggaggaacttcggcatttcatcgatgaggaactggagaagatggattgtgtacagcaacgcaagaagcagctagcagagttagagacagttgggccagggaagaaatacaaggtgaaatttgacaacaaaggaaagagtctactgtcggggaaccatattgcctatgattaccaccctcctgctgacaagctgtatgtgggcagtcgggtggtcgccaaatacaaagatgggaatcaggtctggctctatgctggcattgtagctgagacaccaaacgtcaaaaacaagctcaggtttctcattttctttgatgatggctatgcttcctatgtcacacagtcggaactgtatcccatttgccggccacgtgagtgtttctcccttattccttagctcagttttctcctctaccttgtatttcttcttaggacatccagttgaaaagccctagtgtttttggtatttcagtctcaaagagcataagtttggttgatgtcttttgctcccaaaggtcagtttgctcccaaaagagatacagttttattgttcatctccaggactgggtctttgtagacaaagagtgagacactagaagatcatgaatggccttgagtagactgctcacgttatagatgtgcttcaatttcatttctaagtgagttacgttggaaaaggtgttacttctttcctagtgtcatactgcacctaacatttgtataaatgtgtagtctgcataatgctttccacagaagctgtgttagatggaacctcatagtgtccactatatttgttaccctggcttgggagcagactcctatggaaacaatcatttttaactgcagaagaatcaactaacacttttgtttacacataacatgacagtaaacacattctgagtctcttaaaaacctgatagagaatgagaaggaaggactaatttttttcatttcatgatgccacctgatctttttaaatttaccactagactgatcaacaagtgagcaagaatttccacttgaattttccagaggagaaacatccatttgtgtaaaataagtgaatcacctatattgtacatttcttatttagtatttacttgatttgtaagtatgtacagtttgtacattaggtttattacttaggtggtcttggctttgcttcccttgaggttctgattttactttttctctccttttcaacttaaaaagtatcaaatgtctcctggccaagtcttttccctatcaagacatgccctacctgccctctcagttctacttcttccttgaaacagtg

SEQ ID NO: 27853 - DNA, 668 bp, Homo sapiens
  source 1..668: mol_type = unassigned DNA
aaaggtttgcttccgggcgtttcttttgcttccccttccctctttcacgcttcctcccctccccctcctcccttatcccttcgctttcgctcttttccgtcgaggccgacccctgagttgtgagtctggggtctggttggtgaaaaagagcccttgaagctggaagacgggaggtgcggggaatactaggacaaaagcatgtcttcccttcctgggtgcattggtttggatgcagcaacagctacagtggagtctgaagagattgcagagctgcaacaggcagtggttgaggaactgggtatctctatggaggaacttcggcatttcatcgatgaggaactggagaagatggattgtgtacagcaacgcaagaagcagctagcagagttagagacatgggtaatacagaaagaatctgaggtggctcacgttgaccaactctttgatgatgcatccagggcagtgactaattgtgagtctttggtgaaggacttctactccaagctgggactacaataccgggacagtagctctgaggacgaatcttcccggcctacagaaataattgagattcctgatgaagatgatgatgtcctcagtattgattcaggtgatgctgggagcagaactccaaaagaccagaagctccgtgaagctatggctgcctt

SEQ ID NO: 27854 - DNA, 3854 bp, Homo sapiens
  source 1..3854: mol_type = unassigned DNA
ttggtgaaaaagagcccttgaagctggaagacgggaggtgcggggaatactgttgagttatttgaggacaaaagcatgtcttcccttcctgggtgcattggtttggatgcagcaacagctacagtggagtctgaagagattgcagagctgcaacaggcagtggttgaggaactgggtatctctatggaggaacttcggcatttcatcgatgaggaactggagaagatggattgtgtacagcaacgcaagaagcagctagcagagttagagacatgggtaatacagaaagaatctgaggtggctcacgttgaccaactctttgatgatgcatccagggcagtgactaattgtgagtctttggtgaaggacttctactccaagctgggactacaataccgggacagtagctctgaggacgaatcttcccggcctacagaaataattgagattcctgatgaagatgatgatgtcctcagtattgattcaggtgatgctgggagcagaactccaaaagaccagaagctccgtgaagctatggctgccttaagaaagtcagctcaagatgttcagaagttcatggatgctgtcaacaagaagagcagttcccaggatctgcataaaggaaccttgagtcagatgtctggagaactaagcaaagatggtgacctgatagtcagcatgcgaattctgggcaagaagagaactaagacttggcacaaaggcacccttattgccatccagacagttgggccagggaagaaatacaaggtgaaatttgacaacaaaggaaagagtctactgtcggggaaccatattgcctatgattaccaccctcctgctgacaagctgtatgtgggcagtcgggtggtcgccaaatacaaagatgggaatcaggtctggctctatgctggcattgtagctgagacaccaaacgtcaaaaacaagctcaggtttctcattttctttgatgatggctatgcttcctatgtcacacagtcggaactgtatcccatttgccggccactgaaaaagacttgggaggacatagaagacatctcctgccgtgacttcatagaggagtatgtcactgcctaccccaaccgccccatggtactgctcaagagtggccagcttatcaagactgagtgggaaggcacgtggtggaagtcccgagttgaggaggtggatggcagcctagtcaggatcctcttcctggatgacaaaagatgtgagtggatctatcgaggctctacacggctggagcccatgttcagcatgaaaacatcctcagcctctgcactggagaagaagcaaggacagctcaggacacgtccaaatatgggtgctgtgaggagcaaaggccctgttgtccagtacacacaggatctgaccggtactggaacccagttcaagccagtggaacccccacagcctacagctccacctgccccacctttcccacctgctccacctctatccccccaagcaggtgacagtgacttggaaagccagcttgcccagtcacggaagcaggtagccaaaaagagcacgtcctttcgaccaggatctgtgggctctggtcattcctcccctacatctcctgcactcagtgaaaatgtctctggtgggaaacctgggatcaaccagacatatagatcacctttaggctccacagcctctgccccagcaccctcagcactcccggcccctccagcacccccagtcttccatggcatgctggagcgggccccagcagagccctcctaccgtgctcccatggagaagcttttctacttacctcatgtctgcagctatacctgtctgtctcgagtcagacctatgaggaatgagcagtaccggggcaagaaccctctgctggtcccgttactatatgacttccggcggatgacagcccggcgtcgagttaaccgcaagatgggctttcatgttatctataagacaccttgtggtctctgccttcggacaatgcaggagatagaacgctaccttttcgagactggctgtgacttcctcttcctggagatgttctgtttggatccatatgttcttgtggaccgaaagtttcagccctataagcctttttactatattttggacatcacttatgggaaggaagatgttcccctatcctgtgtcaatgagattgacacaacccctccaccccaggtggcctacagcaaggaacgtatcccgggcaagggtgttttcattaacacaggccctgaatttctggttggctgtgactgcaaggatgggtgtcgggacaagtccaagtgtgcctgccatcaactaactatccaggctacagcctgtaccccaggaggccaaatcaaccctaactctggctaccagtacaagagactagaagagtgtctacccacaggggtatatgagtgtaacaaacgctgcaaatgtgacccaaacatgtgcacaaaccggttggtgcaacatggactacaagttcggctacagctattcaagacacagaacaagggctggggtatccgctgcttggatgacattgccaaaggctcttttgtttgtatttatgcaggcaaaatcctgacagatgactttgcagacaaggagggtctggaaatgggtgatgagtactttgcaaatctggaccatatcgagagcgtggagaacttcaaagaaggatatgagagtgatgccccctgttcctctgacagcagtggtgtagacttgaaggaccaggaagatggcaacagcggtacagaggaccctgaagagtccaatgatgatagctcagatgataacttctgtaaggatgaggacttcagcaccagttcagtgtggcggagctatgctacccggaggcagacccggggccagaaagagaacggactctctgagacaacttccaaggactcccaccccccagatcttggacccccacatattcctgttcctccctcaatccctgtaggtggctgcaatccaccttcctccgaagagacacccaagaacaaggtggcctcatggttgagctgcaatagtgtcagtgaaggtggttttgctgactctgatagccattcatccttcaagactaatgaaggtggggagggccgggctgggggaagccgaatggaggctgagaaggcctccacctcaggactaggcatcaaggatgagggagacatcaaacaggccaagaaagaggacactgacgaccgaaacaagatgtcagtagttactgaaagctctcgaaattacggttacaatccttctcctgtgaagcctgaaggacttcgccgcccacctagtaagactagtatgcatcaaagccgaagactcatggcttctgctcagtccaaccctgatgatgtcctgacactgtccagcagcacagaaagtgagggggaaagtgggaccagccgaaagcccactgctggtcagacttcggctacagcggttgacagtgatgatatccagaccatatcctctggctctgaaggggatgactttgaggacaagaagaacatgactggtccaatgaagcgtcaagtggcagtaaaatcaacccgaggctttgctcttaaatcaacccatgggattgcaattaaatcaaccaacatggcctctgtggacaagggggagagcgcacctgttcgtaagaacacacgccaattctatgatggcgaggagtcttgctacatcattgatgccaagcttgaaggcaacctgggccgctacctcaacgtgagacccctctccccacctctagatgctggattatcccatggtcctcagatttcttttaacatactctataagcccttttcttgttataaactcttgatctcaaagga

SEQ ID NO: 27855 - DNA, 587 bp, Homo sapiens
  source 1..587: mol_type = unassigned DNA
agttttcgtcgcctctgaggggcgccccgcggctttggatttgaccccgtcaggctaccgtcgcggtgaccggaacggcactaaagaggacaaaagcatgtcttcccttcctgggtgcattggtttggatgcagcaacagctacagtggagtctgaagagattgcagagctgcaacaggcagtggttgaggaactgggtatctctatggaggaacttcggcatttcatcgatgaggaactggagaagatggattgtgtacagcaacgcaagaagcagctagcagagttagagacatgggtaatacagaaagaatctgaggtggctcacgttgaccaactctttgatgatgcatccagggcagtgactaattgtgagtctttggtgaaggacttctactccaagctgggactacaataccgggacagtagctctgaggacgaatcttcccggcctacagaaataattgagattcctgatgaagatgatgatgtcctcagtattgattcaggtgatgctgggagcagaactccaaaagaccagaagctccgtgaagctatggctgccttaagaaagtcagctcaagatg

SEQ ID NO: 27856 - DNA, 2043 bp, Homo sapiens
  source 1..2043: mol_type = unassigned DNA
ttcctcccctccccctcctcccttatcccttcgctttcgctcttttccgtcgaggccgacccctgagttgtgagtctggggtctggttggtgaaaaagagcccttgaagctggaagacgggagaggacaaaagcatgtcttcccttcctgggtgcattggtttggatgcagcaacagctacagtggagtctgaagagattgcagagctgcaacaggcagtggttgaggaactgggtatctctatggaggaacttcggcatttcatcgatgaggaactggagaagatggattgtgtacagcaacgcaagaagcagctagcagagttagagacatgggtaatacagaaagaatctgaggtggctcacgttgaccaactctttgatgatgcatccagggcagtgactaattgtgagtctttggtgaaggacttctactccaagctgggactacaataccgggacagtagctctgaggacgaatcttcccggcctacagaaataattgagattcctgatgaagatgatgatgtcctcagtattgattcaggtgatgctgggagcagaactccaaaagaccagaagctccgtgaagctatggctgccttaagaaagtcagctcaagatgttcagaagttcatggatgctgtcaacaagaagagcagttcccaggatctgcataaaggaaccttgagtcagatgtctggagaactaagcaaagatggtgacctgatagtcagcatgcgaattctgggcaagaagagaactaagacttggcacaaaggcacccttattgccatccagacagttgggccagggaagaaatacaaggtgaaatttgacaacaaaggaaagagtctactgtcggggaaccatattgcctatgattaccaccctcctgctgacaagctgtatgtgggcagtcgggtggtcgccaaatacaaagatgggaatcaggtctggctctatgctggcattgtagctgagacaccaaacgtcaaaaacaagctcaggtttctcattttctttgatgatggctatgcttcctatgtcacacagtcggaactgtatcccatttgccggccactgaaaaagacttgggaggacatagaagacatctcctgccgtgacttcatagaggagtatgtcactgcctaccccaaccgccccatggtactgctcaagagtggccagcttatcaagactgagtgggaaggcacgtggtggaagtcccgagttgaggaggtggatggcagcctagtcaggatcctcttcctggatgacaaaagatgtgagtggatctatcgaggctctacacggctggagcccatgttcagcatgaaaacatcctcagcctctgcactggagaagaagcaaggacagctcaggacacgtccaaatatgggtgctgtgaggagcaaaggccctgttgtccagtacacacaggatctgaccggtactggaacccagttcaagccagtggaacccccacagcctacagctccacctgccccacctttcccacctgctccacctctatccccccaagcaggtgacagtgaaagcttggaaagccagcttgcccagtcacggaagcaggtagccaaaaagagcacgtcctttcgaccaggatctgtgggctctggtcattcctcccctacatctcctgcactcagtgaaaatgtctctggtgggaaacctgggatcaaccagacatatagatcacctttaggctccacagcctctgccccagcaccctcagcactcccggcccctccagcacccccagtcttccatggcatgctggagcgggccccagcagagccctcctaccgtgctcccatggagaagcttttctacttacctcatgtctgcagctatacctgtctgtctcgagtcagacctatgaggaatgagcagtaccggggcaagaaccctctgctggtcccgttactatatgacttccggcggatgacagcccggcgtcgagttaaccgcaagatgggctttcatgttatctataagacaccttgtggtctctgccttc

SEQ ID NO: 27857 - DNA, 3306 bp, Homo sapiens
  source 1..3306: mol_type = unassigned DNA
cctgcgctcgggaggtttgggcggcttggcgtcggaggagagccccacccgcggaggaacccagccttgccaacggagctggcggagctcactcctcaggtcaggcgggcggcgtagaaaacgcagcggagccaggtgaaaccaaggcaccgccgtggctggcccccgacagttcctctagccgggaggttggaggagctgaaaacgccgcggagccctcggccgcccgagcaggggctggaccccagcccttgcagcctcccttctcctggcacccaagtgcagtcctggctgcagaaggggccgcgggcgcactgagtttccaacctccatttcagcctgtctgtctcagggtgcagccttaatgagaggtgattcctaagctgctgggaacctgaggttgtcaaaggggcggcaggaaatggacagcagtataaaacccagaagcagaacttgaaggttaaaccactagcccatttcacagaatgtttcatccatttgtggaccaaaagatggagttggtttttatttttaaaaagataatgttaatgatctgataccactacaaatatttacgtgagaagattcatggacttgtcttttggttggactgtcactcatttctgaaagtttcttcagccacaatttctatttgaaaattcaagtatcaaaggataccaggtttagaatggtataatgatgtattttgtctgaggactgcaaattttatagagaccacagttggattccagtgatattctgcaatcaaagtgatttgataaacctaattttgaagcattttatatttataagcgacatcaaaagatgggagaaaaaaatggcgatgcaaaaactttctggatggagctagaagatgatggaaaagtggacttcatttttgaacaagtacaaaatgtgctgcagtcactgaaacaaaagatcaaagatgggtctgccaccaataaagaatacatccaagcaatgattctagtgaatgaagcaactataattaacagttcaacatcaataaagggagcatcacagaaagaagtgaatgcccaaagcagtgatcctatgcctgtgactcagaaggaacaggaaaacaaatccaatgcatttccctctacatcatgtgaaaactcctttccagaagactgtacatttctaacaacagaaaataaggaaattctctctcttgaagataaagttgtagactttagagaaaaagactcatcttcgaatttatcttaccaaagtcatgactgctctggtgcttgtctgatgaaaatgccactgaacttgaagggagaaaaccctctgcagctgccaatcaaatgtcacttccaaagacgacatgcaaagacaaactctcattcttcagcactccacgtgagttataaaaccccttgtggaaggagtctacgaaacgtggaggaagtttttcgttacctgcttgagacagagtgtaactttttatttacagataacttttctttcaatacctatgttcagttggctcggaattacccaaagcaaaaagaagttgtttctgatgtggatattagcaatggagtggaatcagtgcccatttctttctgtaatgaaattgacagtagaaagctcccacagtttaagtacagaaagactgtgtggcctcgagcatataatctaaccaacttttccagcatgtttactgattcctgtgactgctctgagggctgcatagacataacaaaatgtgcatgtcttcaactgacagcaaggaatgccaaaacttcccccttgtcaagtgacaaaataaccactggatataaatataaaagactacagagacagattcctactggcatttatgaatgcagccttttgtgcaaatgtaatcgacaattgtgtcaaaaccgagttgtccaacatggtcctcaagtgaggttacaggtgttcaaaactgagcagaagggatggggtgtacgctgtctagatgacattgacagagggacatttgtttgcatttattcaggaagattactaagcagagctaacactgaaaaatcttatggtattgatgaaaacgggagagatgagaatactatgaaaaatatattttcaaaaaagaggaaattagaagttgcatgttcagattgtgaagttgaagttctcccattaggattggaaacacatcctagaactgctaaaactgagaaatgtccaccaaagttcagtaataatcccaaggagcttactgtggaaacgaaatatgataatatttcaagaattcaatatcattcagttattagagatcctgaatccaagacagccatttttcaacacaatgggaaaaaaatggaatttgtttcctcggagtctgtcactccagaagataatgatggatttaaaccaccccgagagcatctgaactctaaaaccaagggagcacaaaaggactcaagttcaaaccatgttgatgagtttgaagataatctgctgattgaatcagatgtgatagatataactaaatatagagaagaaactccaccaaggagcagatgtaaccaggcgaccacattggataatcagaatattaaaaaggcaattgaggttcaaattcagaaaccccaagagggacgatctacagcatgtcaaagacagcaggtattttgtgatgaagagttgctaagtgaaaccaagaatacttcatctgattctctaacaaagttcaataaagggaatgtgtttttattggatgccacaaaagaaggaaatgtcggccgcttccttaatcatagttgttgcccaaatctcttggtacagaatgtttttgtagaaacacacaacaggaattttccattggtggcattcttcaccaacaggtatgtgaaagcaagaacagagctaacatgggattatggctatgaagctgggactgtgcctgagaaggaaatcttctgccaatgtggggttaataaatgtagaaaaaaaatattataaatatgtaactaacgcctgtttgtgaaattagcttatcaggctgaaattaaagccatgcaaaagaaggtctaggtccatcaaggaaattcccctccgttttcctttgtcatggggtttatgttttatttcagattttatttgtgtgacttagaaattccaggaacacaattaggatattttcatacacatagggtatcttgttcactgctgtgctactttacatgagtaggatggaagtgtatattttatatgaaataccactgtacaatttataatttatttacaaattatatattaagagaaacaaatgtcataacagaa

SEQ ID NO: 27858 - DNA, 6183 bp, Homo sapiens
  source 1..6183: mol_type = unassigned DNA
atccccggtagaggcagggcgggactgttgtggttgagatgaaggctagtaaatggtgaagtacttcccggccagagggcacctgcgctcgggaggtttgggcggcttggcgtcggaggagagccccacccgcggaggaacccagccttgccaacggagctggcggagctcactcctcaggtcaggcgggcggcgtagaaaacgcagcggagccaggtgaaaccaaggcaccgccgtggctggcccccgacagttcctctagccgggaggttggaggagctgaaaacgccgcggagccctcggccgcccgagcaggggctggaccccagcccttgcagcctcccttctcctggcacccaagtgcagtcctggctgcagaaggggccgcgggcgcactgagtttccaacctccatttcagcctgtctgtctcagggtgcagccttaatgagaggtgattcctaagctgctgggaacctgaggttgtcaaaggggcggcaggaaatggacagcagtataaaacccagaagcagaacttgaaggttaaaccactagcccatttcacagaatgtttcatccatttgtggaccaaaagatggagttggtttttatttttaaaaagataatgttaatgatctgataccactacaaatatttacgtgagaagattcatggacttgtcttttggttggactgtcactcatttctgaaagtttcttcagccacaatttctatttgaaaattcaagtatcaaaggataccaggtttagaatggtataatgatgtattttgtctgaggactgcaaattttatagagaccacagttggattccagtgatattctgcaatcaaagtgatttgataaacctaattttgaagcattttatatttataagcgacatcaaaagatgggagaaaaaaatggcgatgcaaaaactttctggatggagctagaagatgatggaaaagtggacttcatttttgaacaagtacaaaatgtgctgcagtcactgaaacaaaagatcaaagatgggtctgccaccaataaagaatacatccaagcaatgattctagtgaatgaagcaactataattaacagttcaacatcaataaaggatcctatgcctgtgactcagaaggaacaggaaaacaaatccaatgcatttccctctacatcatgtgaaaactcctttccagaagactgtacatttctaacaacagaaaataaggaaattctctctcttgaagataaagttgtagactttagagaaaaagactcatcttcgaatttatcttaccaaagtcatgactgctctggtgcttgtctgatgaaaatgccactgaacttgaagggagaaaaccctctgcagctgccaatcaaatgtcacttccaaagacgacatgcaaagacaaactctcattcttcagcactccacgtgagttataaaaccccttgtggaaggagtctacgaaacgtggaggaagtttttcgttacctgcttgagacagagtgtaactttttatttacagataacttttctttcaatacctatgttcagttggctcggaattacccaaagcaaaaagaagttgtttctgatgtggatattagcaatggagtggaatcagtgcccatttctttctgtaatgaaattgacagtagaaagctcccacagtttaagtacagaaagactgtgtggcctcgagcatataatctaaccaacttttccagcatgtttactgattcctgtgactgctctgagggctgcatagacataacaaaatgtgcatgtcttcaactgacagcaaggaatgccaaaacttcccccttgtcaagtgacaaaataaccactggatataaatataaaagactacagagacagattcctactggcatttatgaatgcagccttttgtgcaaatgtaatcgacaattgtgtcaaaaccgagttgtccaacatggtcctcaagtgaggttacaggtgttcaaaactgagcagaagggatggggtgtacgctgtctagatgacattgacagagggacatttgtttgcatttattcaggaagattactaagcagagctaacactgaaaaatcttatggtattgatgaaaacgggagagatgagaatactatgaaaaatatattttcaaaaaagaggaaattagaagttgcatgttcagattgtgaagttgaagttctcccattaggattggaaacacatcctagaactgctaaaactgagaaatgtccaccaaagttcagtaataatcccaaggagcttactgtggaaacgaaatatgataatatttcaagaattcaatatcattcagttattagagatcctgaatccaagacagccatttttcaacacaatgggaaaaaaatggaatttgtttcctcggagtctgtcactccagaagataatgatggatttaaaccaccccgagagcatctgaactctaaaaccaagggagcacaaaaggactcaagttcaaaccatgttgatgagtttgaagataatctgctgattgaatcagatgtgatagatataactaaatatagagaagaaactccaccaaggagcagatgtaaccaggcgaccacattggataatcagaatattaaaaaggcaattgaggttcaaattcagaaaccccaagagggacgatctacagcatgtcaaagacagcaggtattttgtgatgaagagttgctaagtgaaaccaagaatacttcatctgattctctaacaaagttcaataaagggaatgtgtttttattggatgccacaaaagaaggaaatgtcggccgcttccttaatcatagttgttgcccaaatctcttggtacagaatgtttttgtagaaacacacaacaggaattttccattggtggcattcttcaccaacaggtatgtgaaagcaagaacagagctaacatgggattatggctatgaagctgggactgtgcctgagaaggaaatcttctgccaatgtggggttaataaatgtagaaaaaaaatattataaatatgtaactaacgcctgtttgtgaaattagcttatcaggctgaaattaaagccatgcaaaagaaggtctaggtccatcaaggaaattcccctccgttttcctttgtcatggggtttatgttttatttcagattttatttgtgtgacttagaaattccaggaacacaattaggatattttcatacacatagggtatcttgttcactgctgtgctactttacatgagtaggatggaagtgtatattttatatgaaataccactgtacaatttataatttatttacaaattatatattaagagaaacaaatgtcataacagaactcagctgtttctaattgcttttgtgactgttaccttttagttcatgcccccccaaagagctaaatttcacatttttacctacaaaattgatttttaattcctggcaaataatttaccattatgagctacaaggtgggcaacagcgcctgaggatctaattttatgcatattactcccaagtattttaacacttgttggagaagcaatatctggatcgataaaacactgtcccatcaaccatttgagtggggagagggagaagctcttctgtaagtaagattctggcaagctctttgaaatgagtcttctttcccacagattttctctactctttctatacaaacagataggagaagagggaatagaaacctggaggaacttgaatatttttgttctagatagagatacagttactgaaaaggaaacctagaaagtagtcacacgttgcttatttaggccagaagtaattgtactgggcaaaaatttcacttaaaaaacacaagaagtccaggtatggtggctcagacctgtaatcccagcactttgagaggccgaggcaggtggattacttgagcctaggggttcaagaccagcttgggcaacatgtcaaaaccctgtctctacaaaaaatacaaaaattagcctggcatgatggcatgtgcccgtagtctcagctactcaggagtgaggtgggaggatcatttgagctcagaaggtcaaggctgcaatgagacataatttcaccatagtacttccagcctgggcaatagagcaagactctctctcaaaaaaaacagcacacacacacacacacgaaaacaattctgaactatgaaatctgaaacagccccttggtatctcctgggcatgatttgcaaatcttttttttttacagaaaaaaggcaaagagtaagcactttgccataggttacttggccgtgatcatctatctagtggaaaaggggactgggaagcccaagcagactgggaaaccagacagctaggaaaaggagcaaaacatagcccagcaacctacagatgaagaaagttgagaaatccatttattcaccatagagacgcaggaatttcaggcaatgcactaaaatgaaatgggggaaaaaagcttgatcagtatgggaaccatttttgtgcaaaagggaatattatggatcagccagtatttctttgagctctgcctgtggagtccatttgacctttagaaatatgaggtattctgtcagttttatcttcttggagaaatttctcctaaaatcttgatttgctttagtctggactggttcatagccatcatcttccatcagtaccccagagattcactttgtctcttatgtgggatctgtttccagttagatgccattattttccttttccttggtttactcttccacatattggtaaagctcttccaatagcttttggaaaggaaaaatgaaaagtaaatgttttgaatctctgtgtgtttgacaatgtctttattttacccttatacctgattgctgttttggttggcaaggtataggattctttagtggtctccatgcccagttttgaagacatctgctagctttcagtgctgttgctgtggagtctgaaaatctgtcttctggcttccagggtgactactggaaattgaatgccattctgttccttctcttttgcatatataatccatttttatctctcttgaagcttataggtttatctttgtctcaatgttctgtccctgttaagagtccattttcatcctttgtactaggtgcctggtgggatcattccgtctgaaactaatgatttcccatctcttcactgtttctggaattcctgttttccagatgttagacctccagaatttgatctctaattttcctatcttttctcttaactttcagctctgtcttcttgctaggaccttttcctaggagcatttctcaatttaatcttccagttcatctgttgcattttatttttctagtctcatattgtctcatatttttaatttctaagagctccccttctccgaatattctttttttttaatagcatcctattttggctcatggttgcagtattttatctccttgaagatgtttgtgtgtttatgtatgtatatgcacacacgtatacatacacatacaggcatgcatctctgtattctttcggcataatctgtgtcctccagggtttgtttctttgtttcccctgtatgtttgttttggtcgttcacattataggctttcctcagagttaatggtcttggtagtctactcatatttaagtgtggaacaccaaaaagcttactataagctgagagtgtggtaaagggctctttgttttactatgacctacctgagctatcttgctggggaacaccctaatgtcagtctctttataaagggcctttcattttggcctggcaagaaatactctttcatcctcctgcatggagggcaaaaaaaaatttaaaaattggctgctagggtctgtctgctcacttccctgttttgcagaccccacactcttctgcaattcatttcatagttgtcaagactatacaaattgtcctttttaatgttctctcttctgctatccctagttggcagtcttcctctttacaacctgctgaaagtggaagacctccagttttcctttaattcctcagcaaaccaccaactattatatgtcttttttccagaacaacttattttttaactataattatatgcatttatgttagattcactgaaaacctcatcttgtatggtgctctgtaccctatgggtgctaaataaaggcttgctactggcaactgg

SEQ ID NO: 27859 - DNA, 2517 bp, Homo sapiens
  source 1..2517: mol_type = unassigned DNA
ccccgcggggctgcagcgagccaggcatgctcactggcgcaggcccggcccgcagcccgagcaggaagcgccggcgctaggcggccccctgcgctgccagctggagccgggcggagccagcgccccggcgcagggtggctctgccagtccccgcgcgcctgggcggccgcacacgtgtccaggcgtcacgtccgcgcgcgcccccggggcttgcgtcagcggctgttccagaagcgggtgggccagggctctgcgcaccgctggggttcggggcccgggacgccgccgggaggagggcaccgcgcggggtccgacgcggaggcgtgctcggaacgccgggggctgcggagtgcatcagcgcggtccagccctccgcctgccgggcgccgagcgtctccgccgcccggacctgggctgggcgccgtggcgttgcctcggagctcgctgcccgcggggcgcgcaccgccttgacccgggcggccccgcggcaggcaggcgcccgcagttccatggttggttcggagcgcgatgagccgcccgtcctccaccggccccagcgctaataaaccctgcagcaagcagccgccgccgcagccccagcacactccgtccccggctgcgcccccggccgccgccaccatctcggctgcgggccccggctcgtccgcggtgcccgccgcggcggcggtgatctcgggccccggcggcggcggcggggccggcccggtgtccccgcagcaccacgagctgacctcgctcttcgagtgtccggtctgctttgactatgtcctgcctcctattctgcagtgccaggccgggcacctggtgtgtaaccaatgccgccagaagttgagctgctgcccgacgtgcaggggcgccctgacgcccagcatcaggaacctggctatggagaaggtggcctcggcagtcctgtttccctgtaagtatgccaccacgggctgttccctgaccctgcaccatacggagaaaccagaacatgaagacatatgtgaataccgtccctactcctgcccatgtcctggtgcttcctgcaagtggcaggggtccctggaagctgtgatgtcccatctcatgcacgcccacaagagcattaccacccttcagggagaagacatcgtctttctagctacagacattaacttgccaggggctgtcgactgggtgatgatgcagtcatgttttggccatcacttcatgctggtgctggagaaacaagagaagtacgaaggccaccagcagttttttgccatcgtcctgctcattggcacccgcaagcaagccgagaactttgcctacagactggagttgaatgggaaccggcggagattgacctgggaggccacgccccgttcgattcatgacggtgtggctgcggccatcatgaacagcgactgccttgttttcgacacagccatagcacatctttttgcagataatgggaaccttggaatcaatgttactatttctacatgttgtccatgatgtgactttcgtaaaccttcaaaattatttgggcatagtgctctatgtttaataaaggtttttatagatgttttattccatatgtcttcacaagtcaggacccacaattacccgtgttttgtttgaacagcagtgtcccatctggcttcgacccaacaaagttcattaacctgggatgaatggggttggcctgttggtgatttggatgctgttctgtgatctaaaacaactcttattgaattgtatttactccctaaacaacacttgacaggctgttgcacagggcttctatagatcagtgtgttaggaatgggaggccccttcctgcctgccttcccatattggtcccttgacattgacaaaagcacagtgactgtcagcagattcctttacttttgtttgtgggaggtaggaattgttttaatgcattttaaacagtgtttctgaaattggatggctggctaatagacactgaatcacccggagtgcttatcttaaaattgcagatttagggagcctgccaatttaacagtctcatcaggtgattcttttcaacagtaatgtttgagaattactgggttaaattgtgggaaagggtccagattttaaaggtgctttaaggttgccctctgccgatactgtttgtctttctactgtttcatcccctaacttcccccaaccctcaaattaaaactagaactatagatccacatgaacgcacgcctgagatttggccactcacctatgttttgggtggattgcctaggaaagcaagtcatatggccattgatagttctcatgtaattagttttgctcaccactagtacagatgacccgtttacacgtggcttccctcggaagccctcctcaacagtagctggtgtgaaagactaaatcagtagagttggaaaagctttataaccggtgtgtcatatgcttgctatttaaagctgtgtgttggttttgtttttctgccacattcactagttttttaataaatattttccaaaaatg

SEQ ID NO: 27860 - DNA, 1997 bp, Homo sapiens
  source 1..1997: mol_type = unassigned DNA
ggcgtcgcgggagctctctgatccactcaggggtcagggcatcactggtctcgcgtgcgcgtgaccaggcccggtttccggtgccaggacctttccgaagcgtcgagtggcctaacggtcacagctgtcgcccatcggagaggcaggactactgcgagcagttttaccgcgacctccggaggccggcgtgacaggctctgtcactaaaataggagtagaggtttaccactcttaggtgactaagcagtatcacaaataaaccctccagcaagtttaaaaataattaggtccaactcagaggaagtggagtttctcctgttgcacaaaaatgatgtctaacagctccagtgaaatcgatgtgataaaaacaagaatacctacttacgatgaagatgacaacactattctttatgcgtatgaaacaaaacctgaatttgtcaataaagaaccgaatattgtatctgacgcatcctgtaatactgaagagcaactgaagacagttgatgatgtccttattcattgccaggttatatatgatgctctgcaaaacctggataagaagattgatgtgattcgtagaaaggtttcaaaaatccaacgtttccatgcgagatccctgtggacaaatcataagcgatatggatataaaaagcattcttaccggcttgttaaaaagcttaaactccagaaaatgaagaaaaatgaggtttacgagacattctcctaccctgaaagttacagccccactttaccagtgtcaaggcgtgagaataattccccgagcaaccttccaaggccatccttttgcatggaagaataccagcgagctgagctggaggaggacccgatcctcagccgcactccgagtccagtgcatccctcagatttctctgagcataattgtcagccgtattatgcatctgatggtgcaacgtatggttcttcttcagggctctgccttggcaaccctcgggctgacagcatccacaacacttactcaactgaccatgcttctgcagcaccaccttcagttacaaggtcaccagttgaaaatgacggttacatagaggaaggaagcatcactaagcacccttcaacctggtcggtggaagcagtggtcctatttctaaaacaaacagatcctcttgcattatgccctcttgtcgacctcttcagaagccatgaaattgacgggaaggctctgctcctactcacgagtgacgtgttgctgaagcacttgggggtgaagctgggaacggctgtgaagctatgctactacattgaccgacttaaacaaggaaaatgctttgaaaattgaaaaaatccttgtgcaaatttagattgggccaacttctagaggcaccaatgccttcttagtgtggaatcatttttctgccctttagtcgtttttgttttgtagaaagtatctctcaaaatatattatagctagaattgtagaactatgttatagtccagtctacttctttaaaaaccatttaaactgctagatagtattagaatagtccaatagaaaattcattctttataggtctttaaaaattacttttattatattgtttacaaatatatttcatgcaagaaacagaaaaaaaaaaaaaccctttgattctggttcatctcgatacagagaaccaaaacagctaagagaggtattatcagggttgacaactcctatgattgaatctatgggaattattcctcagaagagaatttaaaggtgtacccatatatatctctttctggagtattttatctgtctgatgttgcagtattctacaagtttccagaaagagaatagccatataaattattttcctttctgctattatttctctatatgttttatttattcagatttagagtaaaaaataagcatataaacttttattatgtgctcttaacagttttaagataaactataggatagatagaatggttattttatgcaagaaatattgtaccgcaagggtggtttg

SEQ ID NO: 27861 - DNA, 2830 bp, Homo sapiens
  source 1..2830: mol_type = unassigned DNA
ggcgtcgcgggagctctctgatccactcaggggtcagggcatcactggtctcgcgtgcgcgtgaccaggcccggtttccggtgccaggacctttccgaagcgtcgagtggcctaacggtcacagctgtcgcccatcggagaggcaggactactgcgagcagttttaccgcgacctccggaggccggcgtgacaggctctgtcactaaaataggagtagaggtttaccactcttaggtgactaagcagtatcacaaataaaccctccagcaagtttaaaaataattaggtccaactcagaggaagtggagtttctcctgttgcacaaaaatgatgtctaacagctccagtgaaatcgatgtgcaggaaccgaatattgtatctgacgcatcctgtaatactgaagagcaactgaagacagttgatgatgtccttattcattgccaggttatatatgatgctctgcaaaacctggataagaagattgatgtgattcgtagaaaggtttcaaaaatccaacgtttccatgcgagatccctgtggacaaatcataagcgatatggatataaaaagcattcttaccggcttgttaaaaagcttaaactccagaaaatgaagaaaaatgaggtttacgagacattctcctaccctgaaagttacagccccactttaccagtgtcaaggcgtgagaataattccccgagcaaccttccaaggccatccttttgcatggaagaataccagcgagctgagctggaggaggacccgatcctcagccgcactccgagtccagtgcatccctcagatttctctgagcataattgtcagccgtattatgcatctgatggtgcaacgtatggttcttcttcagggctctgccttggcaaccctcgggctgacagcatccacaacacttactcaactgaccatgcttctgcagcaccaccttcagttacaaggtcaccagttgaaaatgacggttacatagaggaaggaagcatcactaagcacccttcaacctggtcggtggaagcagtggtcctatttctaaaacaaacagatcctcttgcattatgccctcttgtcgacctcttcagaagccatgaaattgacgggaaggctctgctcctactcacgagtgacgtgttgctgaagcacttgggggtgaagctgggaacggctgtgaagctatgctactacattgaccgacttaaacaaggaaaatgctttgaaaattgaaaaaatccttgtgcaaatttagattgggccaacttctagaggcaccaatgccttcttagtgtggaatcatttttctgccctttagtcgtttttgttttgtagaaagtatctctcaaaatatattatagctagaattgtagaactatgttatagtccagtctacttctttaaaaaccatttaaactgctagatagtattagaatagtccaatagaaaattcattctttataggtctttaaaaattacttttattatattgtttacaaatatatttcatgcaagaaacagaaaaaaaaaaaaaccctttgattctggttcatctcgatacagagaaccaaaacagctaagagaggtattatcagggttgacaactcctatgattgaatctatgggaattattcctcagaagagaatttaaaggtgtacccatatatatctctttctggagtattttatctgtctgatgttgcagtattctacaagtttccagaaagagaatagccatataaattattttcctttctgctattatttctctatatgttttatttattcagatttagagtaaaaaataagcatataaacttttattatgtgctcttaacagttttaagataaactataggatagatagaatggttattttatgcaagaaatattgtaccgcaagggtggtttggatgaagtctgactactttttttcaaacaaactattatattaaaactgtcatattttggctaagtttggacctataactacactttcattgtttgcatctctctatgaagatacgtctgtccaaacttttaaaaggcataactgtattttatgtgtttattctttatatagatagtattttatattttattctcacccgaagtattcacacaatctttttaaaaaaaatttgaaatggcattttgtattgccacagaggtaggatgagccatatattagtgaaatgttttattttgtaaaatataaatggattatttgccatcattagtacctctcaacttactttttagaggacaagaaacaatctgtagattggtttccatacagggaagttctccgtcctatgcaatgtttctaattaatttgcttaattctgagccattaatcctgctacactttgaatgatacattaattcagactaatctttgggggctttattttgtaagttagaactttcaagggaaacatgttcaacactattattttgttataaatttataactttgttattacattgtgtaacaaatataaggtttacgagctatgagaattggtgctatcaccattagctatttgctgtaatgtcaagaaaatgttcaccagatgcaagaatgtaccttttctttttagaaagccaaatgtactttagacatgaatgcaactatttaaagaatagcttcatcaatgttattccttacatgtcataagattcttacttaaacttggtcttctttcaaattgtttgtatgaagatgctgtacccacttgaacagtcctcaggtgtttacataaatactatgttttacagttttcatattttaaaatattaataaagttaaatcacaatagttca

SEQ ID NO: 27862 - DNA, 2679 bp, Homo sapiens
  source 1..2679: mol_type = unassigned DNA
cggcgtcgcgggagctctctgatccactcaggggtcagggcatcactggtctcgcgtgcgcgtgaccaggcccggtttccggtgccaggacctttccgaagcgtcgagtggcctaacggtcacagctgtcgcccatcggagaggcaggactactgcgagcagttttaccgcgacctccggaggccggcgtgacaggctctgtcactaaaataggaaccgaatattgtatctgacgcatcctgtaatactgaagagcaactgaagacagttgatgatgtccttattcattgccaggttatatatgatgctctgcaaaacctggataagaagattgatgtgattcgtagaaaggtttcaaaaatccaacgtttccatgcgagatccctgtggacaaatcataagcgatatggatataaaaagcattcttaccggcttgttaaaaagcttaaactccagaaaatgaagaaaaatgaggtttacgagacattctcctaccctgaaagttacagccccactttaccagtgtcaaggcgtgagaataattccccgagcaaccttccaaggccatccttttgcatggaagaataccagcgagctgagctggaggaggacccgatcctcagccgcactccgagtccagtgcatccctcagatttctctgagcataattgtcagccgtattatgcatctgatggtgcaacgtatggttcttcttcagggctctgccttggcaaccctcgggctgacagcatccacaacacttactcaactgaccatgcttctgcagcaccaccttcagttacaaggtcaccagttgaaaatgacggttacatagaggaaggaagcatcactaagcacccttcaacctggtcggtggaagcagtggtcctatttctaaaacaaacagatcctcttgcattatgccctcttgtcgacctcttcagaagccatgaaattgacgggaaggctctgctcctactcacgagtgacgtgttgctgaagcacttgggggtgaagctgggaacggctgtgaagctatgctactacattgaccgacttaaacaaggaaaatgctttgaaaattgaaaaaatccttgtgcaaatttagattgggccaacttctagaggcaccaatgccttcttagtgtggaatcatttttctgccctttagtcgtttttgttttgtagaaagtatctctcaaaatatattatagctagaattgtagaactatgttatagtccagtctacttctttaaaaaccatttaaactgctagatagtattagaatagtccaatagaaaattcattctttataggtctttaaaaattacttttattatattgtttacaaatatatttcatgcaagaaacagaaaaaaaaaaaaaccctttgattctggttcatctcgatacagagaaccaaaacagctaagagaggtattatcagggttgacaactcctatgattgaatctatgggaattattcctcagaagagaatttaaaggtgtacccatatatatctctttctggagtattttatctgtctgatgttgcagtattctacaagtttccagaaagagaatagccatataaattattttcctttctgctattatttctctatatgttttatttattcagatttagagtaaaaaataagcatataaacttttattatgtgctcttaacagttttaagataaactataggatagatagaatggttattttatgcaagaaatattgtaccgcaagggtggtttggatgaagtctgactactttttttcaaacaaactattatattaaaactgtcatattttggctaagtttggacctataactacactttcattgtttgcatctctctatgaagatacgtctgtccaaacttttaaaaggcataactgtattttatgtgtttattctttatatagatagtattttatattttattctcacccgaagtattcacacaatctttttaaaaaaaatttgaaatggcattttgtattgccacagaggtaggatgagccatatattagtgaaatgttttattttgtaaaatataaatggattatttgccatcattagtacctctcaacttactttttagaggacaagaaacaatctgtagattggtttccatacagggaagttctccgtcctatgcaatgtttctaattaatttgcttaattctgagccattaatcctgctacactttgaatgatacattaattcagactaatctttgggggctttattttgtaagttagaactttcaagggaaacatgttcaacactattattttgttataaatttataactttgttattacattgtgtaacaaatataaggtttacgagctatgagaattggtgctatcaccattagctatttgctgtaatgtcaagaaaatgttcaccagatgcaagaatgtaccttttctttttagaaagccaaatgtactttagacatgaatgcaactatttaaagaatagcttcatcaatgttattccttacatgtcataagattcttacttaaacttggtcttctttcaaattgtttgtatgaagatgctgtacccacttgaacagtcctcaggtgtttacataaatactatgttttacagttttcatattttaaaatattaataaagttaaatcacaatagttca

SEQ ID NO: 27863 - DNA, 2677 bp, Homo sapiens
  source 1..2677: mol_type = unassigned DNA
gtcgcgggagctctctgatccactcaggggtcagggcatcactggtctcgcgtgcgcgtgaccaggcccggtttccggtgccaggacctttccgaagcgtcgagtggcctaacggtcacagctgtcgcccatcggagaggcaggactactgcgagcagttttaccgcgacctccggaggccggcgtgacaggctctgtcactaaaatagcaggaaccgaatattgtatctgacgcatcctgtaatactgaagagcaactgaagacagttgatgatgtccttattcattgccaggttatatatgatgctctgcaaaacctggataagaagattgatgtgattcgtagaaaggtttcaaaaatccaacgtttccatgcgagatccctgtggacaaatcataagcgatatggatataaaaagcattcttaccggcttgttaaaaagcttaaactccagaaaatgaagaaaaatgaggtttacgagacattctcctaccctgaaagttacagccccactttaccagtgtcaaggcgtgagaataattccccgagcaaccttccaaggccatccttttgcatggaagaataccagcgagctgagctggaggaggacccgatcctcagccgcactccgagtccagtgcatccctcagatttctctgagcataattgtcagccgtattatgcatctgatggtgcaacgtatggttcttcttcagggctctgccttggcaaccctcgggctgacagcatccacaacacttactcaactgaccatgcttctgcagcaccaccttcagttacaaggtcaccagttgaaaatgacggttacatagaggaaggaagcatcactaagcacccttcaacctggtcggtggaagcagtggtcctatttctaaaacaaacagatcctcttgcattatgccctcttgtcgacctcttcagaagccatgaaattgacgggaaggctctgctcctactcacgagtgacgtgttgctgaagcacttgggggtgaagctgggaacggctgtgaagctatgctactacattgaccgacttaaacaaggaaaatgctttgaaaattgaaaaaatccttgtgcaaatttagattgggccaacttctagaggcaccaatgccttcttagtgtggaatcatttttctgccctttagtcgtttttgttttgtagaaagtatctctcaaaatatattatagctagaattgtagaactatgttatagtccagtctacttctttaaaaaccatttaaactgctagatagtattagaatagtccaatagaaaattcattctttataggtctttaaaaattacttttattatattgtttacaaatatatttcatgcaagaaacagaaaaaaaaaaaaaccctttgattctggttcatctcgatacagagaaccaaaacagctaagagaggtattatcagggttgacaactcctatgattgaatctatgggaattattcctcagaagagaatttaaaggtgtacccatatatatctctttctggagtattttatctgtctgatgttgcagtattctacaagtttccagaaagagaatagccatataaattattttcctttctgctattatttctctatatgttttatttattcagatttagagtaaaaaataagcatataaacttttattatgtgctcttaacagttttaagataaactataggatagatagaatggttattttatgcaagaaatattgtaccgcaagggtggtttggatgaagtctgactactttttttcaaacaaactattatattaaaactgtcatattttggctaagtttggacctataactacactttcattgtttgcatctctctatgaagatacgtctgtccaaacttttaaaaggcataactgtattttatgtgtttattctttatatagatagtattttatattttattctcacccgaagtattcacacaatctttttaaaaaaaatttgaaatggcattttgtattgccacagaggtaggatgagccatatattagtgaaatgttttattttgtaaaatataaatggattatttgccatcattagtacctctcaacttactttttagaggacaagaaacaatctgtagattggtttccatacagggaagttctccgtcctatgcaatgtttctaattaatttgcttaattctgagccattaatcctgctacactttgaatgatacattaattcagactaatctttgggggctttattttgtaagttagaactttcaagggaaacatgttcaacactattattttgttataaatttataactttgttattacattgtgtaacaaatataaggtttacgagctatgagaattggtgctatcaccattagctatttgctgtaatgtcaagaaaatgttcaccagatgcaagaatgtaccttttctttttagaaagccaaatgtactttagacatgaatgcaactatttaaagaatagcttcatcaatgttattccttacatgtcataagattcttacttaaacttggtcttctttcaaattgtttgtatgaagatgctgtacccacttgaacagtcctcaggtgtttacataaatactatgttttacagttttcatattttaaaatattaataaagttaaatcacaatagttc

SEQ ID NO: 27864 - DNA, 817 bp, Homo sapiens
  source 1..817: mol_type = unassigned DNA
gggaatacacgatttggcttaggggccggggctctcctgaggagagagggtttgctttgcggggaagagcgagtcttgacttcgcagcctccaatttcagccgcggtgtggaggggggtgctttgggtggtccccacagcctttccggagtgcccgcgcgtgtaagcttttgagatttgacaatttgtgaagtgcttggtgctgactttcggggacgacaggatccttttacagtcattctcctgtcaggggaggcaggagtagaggtttaccactcttaggtgactaagcagtatcacaaataaaccctccagcaagtttaaaaataattaggtccaactcagaggaagtggagtttctcctgttgcacaaaaatgatgtctaacagctccagtgaaatcgatgtgcaggaaccgaatattgtatctgacgcatcctgtaatactgaagagcaactgaagacagttgatgatgtccttattcattgccaggttatatatgatgctctgcaaaacctggataagaagattgatgtgattcgtagaaaggtttcaaaaatccaacgtttccatgcgagatccctgtggacaaatcataagcgatatggatataaaaagcattcttaccggcttgttaaaaagcttaaactccagaaaatgaagaaaaatgaggtttacgagacattctcctaccctgaaagttacagccccactttaccagtgtcaaggcgtgagaataattccccgagcaaccttccaaggccatccttttgcatggaagaataccagcgagctgagctggaggaggacccgatcct

SEQ ID NO: 27865 - DNA, 4200 bp, Homo sapiens
  source 1..4200: mol_type = unassigned DNA
ggcggcagtggcggttgcggggcatgcgcggctccgcgcgcggcttctcaaacatggcggcggcggtgtgaagctcggtgccggctcgcgcgatcggtgggacagaatttcgttgttttcaccgacgagactggaggaaacaacaccaaatagggataccatgggacaaacagtgaatgaagattccatggatgtcaagaaggagaatcaagagaaaactcctcagtcaagtacatcttctgtacaaagggatgatttccactgggaggagtatttgaaagagactgggtctataagtgctccttcagagtgcttccgtcagtctcagattccacctgtgaatgatttcaaagttggtatgaaattggaagcccgtgaccctcgcaatgccacttcagtatgtattgctacggttattggaattactggggccaggttacggttacgactggatggtagtgacaacagaaatgatttttggaggcttgtcgattccccagacatacaacctgttgggacatgtgaaaaggaaggagacttacttcaacctccactagggtaccagatgaatacatcctcctggccgatgttcctcttaaagacactaaatgggtctgaaatggcatctgccacattatttaagaaggaaccaccaaagcccccactaaataattttaaagtggggatgaaactggaagctattgacaaaaagaacccgtatctcatctgtcctgcgaccattggagatgttaaaggggatgaagttcatatcacatttgatggctggagtggagcttttgattactggtgcaagtatgattctcgagatattttcccagctgggtggtgtcgcctgacaggagatgtattacaacccccaggaactagtgttcctattgtaaagaatatagcaaaaacagagtcttctccttccgaagcaagccagcattcaatgcagtctccacagaaaactactctaatattaccaacacagcaggtcaggagatcaagtcgaattaaaccacctggacctactgcagtccccaaaaggagcagttctgttaaaaatatcacaccaaggaaaaaaggtccaaactcaggaaaaaaggaaaaacctttgcccgtgatatgttctacatctgcagcttctctaaaatcgctgaccagagaccgtggcatgttatataaagatgtcgcttctgggccatgtaaaatagtgatgtctacagtctgtgtctatgtaaacaaacatggaaactttggccctcatctggatcccaagagaatccagcagctgcctgaccacttcggcccgggcccggtgaatgtggtgcttcgccggattgtgcaggcctgtgtggattgtgcccttgaaactaaaactgtttttggatacctgaagccagataatcgtggaggagaagtgataactgcctcctttgatggggaaactcattccatccagctccctccagtgaacagtgcatcatttgctcttcgctttcttgagaacttctgccacagtctgcagtgtgataaccttttgagtagccagccttttagttcttccaggggtcatactcacagctctgcagagcatgataaaaatcagtcagcaaaagaagatgtaacagaaaggcaaagcaccaaacgatctcctcagcaaactgtaccatatgttgttcctctctctcctaagctccccaaaacaaaggagtatgcgtctgaaggagaaccattgtttgctgggggaagtgccattcccaaagaggagaatctttcagaagattctaagagctcatcactaaattcaggaaattatttgaatcctgcctgtagaaatcctatgtatattcatacttcagtctcccaggatttttctcgaagtgtgccaggcaccacaagttcaccactagttggggacatatcccccaagagcagtccccatgaagttaaattccaaatgcagaggaaaagtgaagctccaagttatatagctgtacctgatcccagtgtcctgaaacaaggcttctctaaggacccttcaacctggtctgtggatgaagtgatacagtttatgaaacatacagatcctcagatatcaggccccctcgccgacctcttcaggcaacatgaaattgatgggaaggctctgttcctactcaagagtgatgtgatgatgaagtatatggggctgaagctggggccagcattaaagctgtgttactacattgaaaagcttaaagaaggaaaatacagttaaaaaaatgtgtaagtttagattggacataattctcaggtgtactgttaacattttaatttaaaagtatttctcttagcagtttttgttttgtagacagttcccataaaaatattttatcagaattgcagaactgtagtaacagttcagtcaactttgtttttttcctggagtcaccaaccagctttgggagacacagccgccactcccccagtctacttctttaaaaagcatttaacaggttagtattggcatattcaaattggcagttctttatgtctttttaaattttcattgtacagtttacaaatatacttaatgtagttaacagagaaaaacctttgattttggttaacctttatatctagaaccaaaacagctaaatcccaaaggggaaaatatcagggattgacaacttctataattaaatccatgagaatttttcctcactagagaatttaaaggtgcacctgtagatatcatcttttctcagatattttgtgtgatactctgtggtgttctgttcatgttctatcagtatatctagaaagggaatagccatataaattattttccttttattatttctctgtatgttgtatttgatcatatttaaaggaaaaaagcaagcttataagctttcatgaagtgttcttaccagtttttgataaattttttaaattataggatagaattgtcattttatgcaggagatatttatactacgagggttgtttggatggagtcagattaaattttttcagtgaaattcctattattttaaaactttccatattttcactacgcttggacatttaactaggcattcttttcttacatctctatatgaagatacctgtgtccaaaatttttgaagatatatattgtatgtgtttattcttcatatggtactttaccatatttatatattgttttatacctgtaggtttacacacaagtaaatcttttttttcttgaatttaatctggcactttgcactgccacagaggtgacgatgaactatgtatatagttagatgttttgatttcgtaaaaaatatatgtccatcgtttgctatcaccagtacctctcagcttactcttcaggggatatgaaacaatctgtagattggtttccatacagggaagttctctgtcctatgcaatgtttctaattaatttgcttagttctgagccatttattctgctacactttgaaagatatattagttctgacttattgtttggggctttattttatttttatttttttgagatggagtttcactcttgttgcccaggctggagtgcaatagctcgatctcggctcactgcaacctcgcctccctggttcaagcaattctcctgcctcagcgattacaggaatgcaccaccacgcccagctaattttgtagagatggggtttctccatgttggtcaggctggtctcaaactcctgacctcaggtgatccgcccacctcggccttgcaaaatgctgggattacaggcatgagccaccatgcccagccatgtttggggctttattttataagttagaactttgaagaggaaatggtgctatatgtttattgttattactttgtgtaactttgatgtaatgtttataagctatgagaatcagttataaaagtattagccatttgttgtaaatgccaataaaatattcaccaggggcaagaatgtacattttctttttagaaaaccaaatgtactttagacatgaatgcaactatttaaagaatagcttcatttatgttattccttacatgtcataagattcttacttaaacttggtcttctttcaagttgtttgtatgaagatgctgtacccacttgaacagtcctcaggtgtttacataaatactatgttttacagttttcatattttaaaatattaataaagttaatcgcaacgattc

SEQ ID NO: 27866 - DNA, 1514 bp, Homo sapiens
  source 1..1514: mol_type = unassigned DNA
gctagaaattcaggcttgctcaggcaacatgggctttgttgacttgctttctccagaaaggcaattttattcctggtaaggagcaaggctatcctatcatttggaacctaaatcaccttaacggtaaaaacagcaacaacttgtttctctggaatattgataaagttcctattgtaaagaatatagcaaaaacagagtcttctccttccgaagcaagccagcattcaatgcagtctccacagaaaactactctaatattaccaacacagcaggtcaggagatcaagtcgaattaaaccacctggacctactgcagtccccaaaaggagcagttctgttaaaaatatcacaccaaggaaaaaaggtccaaactcaggaaaaaaggaaaaacctttgcccgtgatatgttctacatctgcagcttctctaaaatcgctgaccagagaccgtggcatgttatataaagatgtcgcttctgggccatgtaaaatagtgatgtctacagtctgtgtctatgtaaacaaacatggaaactttggccctcatctggatcccaagagaatccagcagctgcctgaccacttcggcccgggcccggtgaatgtggtgcttcgccggattgtgcaggcctgtgtggattgtgcccttgaaactaaaactgtttttggatacctgaagccagataatcgtggaggagaagtgataactgcctcctttgatggggaaactcattccatccagctccctccagtgaacagtgcatcatttgctcttcgctttcttgagaacttctgccacagtctgcagtgtgataaccttttgagtagccagccttttagttcttccaggggtcatactcacagctctgcagagcatgataaaaatcagtcagcaaaagaagatgtaacagaaaggcaaagcaccaaacgatctcctcagcaaactgtaccatatgttgttcctctctctcctaagctccccaaaacaaaggagtatgcgtctgaaggagaaccattgtttgctgggggaagtgccattcccaaagaggagaatctttcagaagattctaagagctcatcactaaattcaggaaattatttgaatcctgcctgtagaaatcctatgtatattcatacttcagtctcccaggatttttctcgaagtgtgccaggcaccacaagttcaccactagttggggacatatcccccaagagcagtccccatgaagttaaattccaaatgcagaggaaaagtgaaggaaattgatgggaaggctctgttcctactcaagagtgatgtgatgatgaagtatatggggctgaagctggggccagcattaaagctgtgttactacattgaaaagcttaaagaaggaaaatacagttaaaaaaatgtgtaagtttagattggacataattctcaggtgtactgttaacattttaatttaaaagtatttctcttagcagtttttgttttgtagacagttcccataaaaatattttatcagaattgcag

SEQ ID NO: 27867 - DNA, 2435 bp, Homo sapiens
  source 1..2435: mol_type = unassigned DNA
cagcaaaagaagatgtaacagaaaggcaaagcaccaaacgatctcctcagcaaactgtaccatatgttgttcctctctctcctaagctccccaaaacaaaggagtatgcgtctgaaggagaaccattgtttgctgggggaagtgccattcccaaagaggagaatctttcagaagattctaagagctcatcactaaattcaggaaattatttgaatcctgcctgtagaaatcctatgtatattcatacttcagtctcccaggatttttctcgaagtgtgccaggcaccacaagttcaccactagttggggacatatcccccaagagcagtccccatgaagttaaattccaaatgcagaggaaaagtgaaggaaattgatgggaaggctctgttcctactcaagagtgatgtgatgatgaagtatatggggctgaagctggggccagcattaaagctgtgttactacattgaaaagcttaaagaaggaaaatacagttaaaaaaatgtgtaagtttagattggacataattctcaggtgtactgttaacattttaatttaaaagtatttctcttagcagtttttgttttgtagacagttcccataaaaatattttatcagaattgcagaactgtagtaacagttcagtcaactttgtttttttcctggagtcaccaaccagctttgggagacacagccgccactcccccagtctacttctttaaaaagcatttaacaggttagtattggcatattcaaattggcagttctttatgtctttttaaattttcattgtacagtttacaaatatacttaatgtagttaacagagaaaaacctttgattttggttaacctttatatctagaaccaaaacagctaaatcccaaaggggaaaatatcagggattgacaacttctataattaaatccatgagaatttttcctcactagagaatttaaaggtgcacctgtagatatcatcttttctcagatattttgtgtgatactctgtggtgttctgttcatgttctatcagtatatctagaaagggaatagccatataaattattttccttttattatttctctgtatgttgtatttgatcatatttaaaggaaaaaagcaagcttataagctttcatgaagtgttcttaccagtttttgataaattttttaaattataggatagaattgtcattttatgcaggagatatttatactacgagggttgtttggatggagtcagattaaattttttcagtgaaattcctattattttaaaactttccatattttcactacgcttggacatttaactaggcattcttttcttacatctctatatgaagatacctgtgtccaaaatttttgaagatatatattgtatgtgtttattcttcatatggtactttaccatatttatatattgttttatacctgtaggtttacacacaagtaaatcttttttttcttgaatttaatctggcactttgcactgccacagaggtgacgatgaactatgtatatagttagatgttttgatttcgtaaaaaatatatgtccatcgtttgctatcaccagtacctctcagcttactcttcaggggatatgaaacaatctgtagattggtttccatacagggaagttctctgtcctatgcaatgtttctaattaatttgcttagttctgagccatttattctgctacactttgaaagatatattagttctgacttattgtttggggctttattttatttttatttttttgagatggagtttcactcttgttgcccaggctggagtgcaatagctcgatctcggctcactgcaacctcgcctccctggttcaagcaattctcctgcctcagcgattacaggaatgcaccaccacgcccagctaattttgtagagatggggtttctccatgttggtcaggctggtctcaaactcctgacctcaggtgatccgcccacctcggccttgcaaaatgctgggattacaggcatgagccaccatgcccagccatgtttggggctttattttataagttagaactttgaagaggaaatggtgctatatgtttattgttattactttgtgtaactttgatgtaatgtttataagctatgagaatcagttataaaagtattagccatttgttgtaaatgccaataaaatattcaccaggggcaagaatgtacattttctttttagaaaaccaaatgtactttagacatgaatgcaactatttaaagaatagcttcatttatgttattccttacatgtcataagattcttacttaaacttggtcttctttcaagttgtttgtatgaagatgctgtacccacttgaacagtcctcaggtgtttacataaatactatgttttacagttttcatattttaaaatattaataaagttaatcgcaacgattc

SEQ ID NO: 27868 - DNA, 1957 bp, Homo sapiens
  source 1..1957: mol_type = unassigned DNA
ggcttctcaaacatggcggcggcggtgtgaagctcggtgccggctcgcgcgatcggtgggacagaatttcgttgttttcaccgacgagactggaggaaacaacaccaaatagggataccatgggacaaacagtgaatgaagattccatggatgtcaagaaggagaatcaagagaaaactcctcagtctcagattccacctgtgaatgatttcaaagttggtatgaaattggaagcccgtgaccctcgcaatgccacttcagtatgtattgctacggttattggaattactggggccaggttacggttacgactggatggtagtgacaacagaaatgatttttggaggcttgtcgattccccagacatacaacctgttgggacatgtgaaaaggaaggagacttacttcaacctccactagggtaccagatgaatacatcctcctggccgatgttcctcttaaagacactaaatgggtctgaaatggcatctgccacattatttaagaaggaaccaccaaagcccccactaaataattttaaagtggggatgaaactggaagctattgacaaaaagaacccgtatctcatctgtcctgcgaccattggagatgttaaaggggatgaagttcatatcacatttgatggctggagtggagcttttgattactggtgcaagtatgattctcgagatattttcccagctgggtggtgtcgcctgacaggagatgtattacaacccccaggaactagtgttcctattgtaaagaatatagcaaaaacagagtcttctccttccgaagcaagccagcattcaatgcagtctccacagaaaactactctaatattaccaacacagcaggtcaggagatcaagtcgaattaaaccacctggacctactgcagtccccaaaaggagcagttctgttaaaaatatcacaccaaggaaaaaaggtccaaactcaggaaaaaaggaaaaacctttgcccgtgatatgttctacatctgcagcttctctaaaatcgctgaccagagaccgtggcatgttatataaagatgtcgcttctgggccatgtaaaatagtgatgtctacagtctgtgtctatgtaaacaaacatggaaactttggccctcatctggatcccaagagaatccagcagctgcctgaccacttcggcccgggcccggtgaatgtggtgcttcgccggattgtgcaggcctgtgtggattgtgcccttgaaactaaaactgtttttggatacctgaagccagataatcgtggaggagaagtgataactgcctcctttgatggggaaactcattccatccagctccctccagtgaacagtgcatcatttgctcttcgctttcttgagaacttctgccacagtctgcagtgtgataaccttttgagtagccagccttttagttcttccaggggtcatactcacagctctgcagagcatgataaaaatcagtcagcaaaagaagatgtaacagaaaggcaaagcaccaaacgatctcctcagcaaactgtaccatatgttgttcctctctctcctaagctccccaaaacaaaggagtatgcgtctgaaggagaaccattgtttgctgggggaagtgccattcccaaagaggagaatctttcagaagattctaagagctcatcactaaattcaggaaattatttgaatcctgcctgtagaaatcctatgtatattcatacttcagtctcccaggatttttctcgaagtgtgccaggcaccacaagttcaccactagttggggacatatcccccaagagcagtccccatgaagttaaattccaaatgcagaggaaaagtgaaggaaattgatgggaaggctctgttcctactcaagagtgatgtgatgatgaagtatatggggctgaagctggggccagcattaaagctgtgttactacattgaaaagcttaaag

SEQ ID NO: 27869 - DNA, 845 bp, Homo sapiens
  source 1..845: mol_type = unassigned DNA
gtaacaaagaatctggtagaagtgagttttggatagtaaaataagtttcgaactctggcacctttcaattttgtcgcactctccttgtttttgacaatgcaatcatatgcttctgctatgttaagcgtattcaacagcgatgattacagtccagctgtgcaagagaatattcccgctctccggagaagctcttccttcctttgcactgaaagctgtaactctaagtatcagtgtgaaacgggagaaaacagtaaaggcaacgtccaggatagagtgaagcgacccatgaacgcattcatcgtgtggtctcgcgatcagaggcgcaagatggctctagagaatcccagaatgcgaaactcagagatcagcaagcagctgggataccagtggaaaatgcttactgaagccgaaaaatggccattcttccaggaggcacagaaattacaggccatgcacagagagaaatacccgaattataagtatcgacctcgtcggaaggcgaagatgctgccgaagaattgcagtttgcttcccgcagatcccgcttcggtactctgcagcgaagtgcaactggacaacaggttgtacagggatgactgtacgaaagccacacactcaagaatggagcaccagctaggccacttaccgcccatcaacgcagccagctcaccgcagcaacgggaccgctacagccactggacaaagctgtaggacaatcgggtaacattggctacaaagacctacctagatgctcctttttacgataacttacagccctcactttcttatgtttagtttcaatattgttttcttttctctggctaataaaggccttattcatttca

SEQ ID NO: 27870 - DNA, 591 bp, Homo sapiens
  source 1..591: mol_type = unassigned DNA
atgcaatcatatgcttctgctatgttaagcgtattcaacagcgatgattacagtccagctgtgcaagagaatattcccgctctccggagaagctcttccttcctttgcactgaaagctgtaactctaagtatcagtgtgaaacgggagaaaacagtaaaggcaacgtccaggatagagtgaagcgacccatgaacgcattcatcgtgtggtctcgcgatcagaggcgcaagatggctctagagaatcccagaatgcgaaactcagagatcagcaagcagctgggataccagtggaaaatgcttactgaagccgaaaaatggccattcttccaggaggcacagaaattacaggccatgcacagagagaaatacccgaattataagtatcgacctcgtcggaaggcgaagatgctgccgaagaattgcagtttgcttcccgcagatcccgcttcggtactctgcagcgaagtgcaactggacaacaggttgtacagggatgactgtacgaaagccacacactcaagaatggagcaccagctaggccacttaccgcccatcaacgcagccagcgcagcaacgggaccgctacag

SEQ ID NO: 27871 - DNA, 498 bp, Homo sapiens
  source 1..498: mol_type = unassigned DNA
atgcaatcatatgcttctgctatgttaagcgtattcaacagcgatgattacagtccagctgtgcaagagaatattcccgctctccggagaagctcttccttcctttgcactgaaagctgtaactctaagtatcagtgtgaaacgggagaaaacagtaaaggcaacgtccaggatagagtgaagcgacccatgaacgcattcatcgtgtggtctcgcgatcagaggcgcaagatggctctagagaatcccagaatgcgaaactcagagatcagcaagcagctgggataccagtggaaaatgcttactgaagccgaaaaatggccattcttccaggaggcacagaaattacaggccatgcacagagagaaatacccgaattataagtatcgacctcgtcggaaggcgaagatgctgccgaagaattgcagtttgcttcccgcagatcccgcttcggtactctgcagcgaagtgcaaggacaacaggttgtacagggatga

SEQ ID NO: 27872 - DNA, 4002 bp, Homo sapiens
  source 1..4002: mol_type = unassigned DNA
aagaagcaggtcccggatcgccgtataccgccgggttttctcccaacgtcaggcccgatggctcggcttccccagttagaaggggaagataaaagactttgattcatgaagaatctgctcactgagaagtgtatatcaagccacaatttccatcaaaaagtgattaagcagagaatggagaagaaggttgattccaggtattttaaggatggtgcagttaagaaaccttattctgcaaagacactgtccaacaagaagtcttctgcatcctttgggatccggagggagttacctagtaccagtcatctagtgcagtatcgtggcacacatacttgtacccgacagggccggttaagagaactgcgcatcagatgcgtggccagaaagttcttatatttatggattcgaatgacttttggaagagtatttccctctaaagccagattttactatgagcagcgattactacggaaggtcttcgaagaatggaaagaggagtggtgggttttccagcacgagtggaaactctgtgttcgagctgactgtcactacaggtattacctgtacaacctgatgttccagacgtggaagacctatgtgcgtcagcagcaggagatgaggaacaagtacattagagccgaggttcatgatgcaaagcaaaagatgcgacaggcctggaagtcctggttgatctacgtggttgttcgtaggaccaaacttcagatgcagactacagctctggagtttaggcaacggattatcttacgggtgtggtggagcacgtggaggcagcgactaggacaggtccgtgtgagccgtgccctccatgcctctgctttgaagcacagggccctgagcctccaggtgcaggcttggtcacagtggcgggaacagctcctgtatgtccagaaggagaaacaaaaggttgtctctgcagtgaaacatcatcagcactggcaaaaacggagatttctaaaggcctggcttgaatacctgcaagtccgcagagtgaagagacagcagaatgagatggctgagcgattccatcatgtcactgtgctccagatatacttctgtgactggcagcaggcctgggagcggagggagagcttgtacgctcaccatgcccaggtggagaaactggccaggaagatggccctgcggcgcgcctttactcactggaaacactacatgctgctgtgtgcagaagaagctgcccagtttgagatggcagaagagcaccacaggcacagccagctgtatttttgctttagagccctaaaagacaatgtgacccacgctcatctccagcaaataagaaggaatcttgctcaccagcagcatggtgtcacgctgctgcacaggttctggaacctctggcggtctcagattgagcagaaaaaggaaagagagctgctccccttactgcatgctgcctgggaccactacagaatagcactgctgtgcaaatgtatcgaattgtggctacagtatactcagaagaggcggtacaagcagctgctacaggccagagcggatggtcatttccagcagagagccctgcctgctgccttccacacatggaacagactctggcgatggcgccaccaggaaaatgtcctcagtgcaagagcaacacgtttccacagggagacattagagaagcaagtattttctctctggaggcagaagatgtttcagcatcgagaaaaccgcctggcagagagaatggccatccttcacgcagagcgacagcttctgtataggtcttggttcatgtggcaccagcaggcagcagcacgtcaccaggagcaggagtggcaaacagtggcctgtgcccaccaccgccacgggcggctcaagaaagctttctgcctctggagggaaagtgcccaagggctcagaacagagaggacgggcagggtgcgggcagcagaattccacatggcccagctcctgcgttgggcctggagccagtggagggagtgcctggccctgcggggagcggagcggcagaagctgatgcgagcagacctgcaccaccagcacagcgtgctgcacagggcgctgcaggcatgggtgacttaccagggcagggtgcgaagcatcctccgggaggtggcagccagggagagccagcacaacaggcagctgctgcgcggggcattacgtcgctggaaagagaacaccatggcccgagtggatgaagccaaaaaaacctttcaagcaagtactcattacagaaggaccatatgttccaaggtcctggtccagtggcgggaagctgtgtcagtgcagatgtattaccgacagcaggaggactgtgccatctgggaggcccagaaggtgctggacaggggctgtctgcggacctggtttcagcgctggtgggactgcagccggaggtcagcccagcagagactgcagctggagagggcagtgcaacaccaccaccggcagctgctgctggaggggctggcccggtggaagacgcaccatctgcagtgtgtcaggaagaggctcctgcacaggcagagcacccaactgctggcacagagactcagccggacctgcttccgccagtggagacaacagctggcagccaggaggcaggagcagcgggcgacagtgcgggccctgtggttctgggccttctcgctgcaggcaaaggtgtgggccacgtggctggcctttgtactggaaaggaggagaaagaaggcgcggctgcagtgggcgctccaggcctaccaggggcagctcctccaggagggtgccacgcggctcctgcgctttgcagccagcatgaaggcctcccggcagcagctgcaggcccagcagcaggtccaggcggctcacagtctccatcgtgccgtccgccgctgtgccacgctctggaaacagaaagtgctgggccggggcgggaagcctcagcccctggcagccatcgcacccagcaggaaagtgacgtttgagggtccccttctcaaccgcattgctgctggggctggggatggcacccttgagaccaagaggccacaggcttctcggcctctgggagctctgggccgcctggctgctgaggagccccacgccctggagctcaacactgcccactcagcgaggaagcagccgcgacgcccacacttcctgttggagcctgcgcagagccagaggcctcagaagccacaggaacatggcctaggcatggctcagccagcagccccctccctgacgcggcccttcctggcagaggccccgacagcactggtcccacacagccccctgcctggggccctgtcaagcgcccctggcccgaagcagcccccgacggcaagcacaggcccggagctgctgctgctgcctctttcctccttcatgccctgcggggcggctgcaccagccagggtgtcagcacagcgggctactcctagggataagcccccggtcccctcatccctggccagtgtccctgacccccatctactccttcctggggacttctcagccaccagggctgggcctggactttcaactgcaggcagcctggaccttgaggctgaacttgaggagatccagcagcaactactgcactaccagaccaccaagcagaacctctggtcctgtcggcggcaagcgagcagcctgcgcaggtggctggagctgaacagagaggagccggggcctgaggaccaggaagtagagcagcaggtgcagaaagagctggaacaggtggaaatgcagatccagctgctggcagaggagctccaggctcagcgccagcccattggcgcctgcgttgcccgcatccaggccctgcggcaggccctgtgctagcgtgttcgcaccaggaacgcaggtgctgggctgtcggggaggcctcaggccacctccaggaacagaacacagttttaagtttgattttttttatttcaaaatgctttgcaattaaatgaattactgttcagaagtctcccacttttcatacaaaaatactgtgctact

SEQ ID NO: 27873 - DNA, 3739 bp, Homo sapiens
  source 1..3739: mol_type = unassigned DNA
ggcgggcgtggaccgcgcgggagttaagaagcaggtcccggatcgccgtataccgccgggttttctcccaacgtcaggcccgatggctcggcttccccagaaggggaagataaaagactttgattcatgaagaatctgctcactgagaagtgtatatcaagccacaatttccatcaaaaagtgattaagcagagaatggagaagaaggttgattccagattttactatgagcagcgattactacggaaggtcttcgaagaatggaaagaggagtggtgggttttccagcacgagtggaaactctgtgttcgagctgactgtcactacaggtattacctgtacaacctgatgttccagacgtggaagacctatgtgcgtcagcagcaggagatgaggaacaagtacattagagccgaggttcatgatgcaaagcaaaagatgcgacaggcctggaagtcctggttgatctacgtggttgttcgtaggaccaaacttcagatgcagactacagctctggagtttaggcaacggattatcttacgggtgtggtggagcacgtggaggcagcgactaggacaggtccgtgtgagccgtgccctccatgcctctgctttgaagcacagggccctgagcctccaggtgcaggcttggtcacagtggcgggaacagctcctgtatgtccagaaggagaaacaaaaggttgtctctgcagtgaaacatcatcagcactggcaaaaacggagatttctaaaggcctggcttgaatacctgcaagtccgcagagtgaagagacagcagaatgagatggctgagcgattccatcatgtcactgtgctccagatatacttctgtgactggcagcaggcctgggagcggagggagagcttgtacgctcaccatgcccaggtggagaaactggccaggaagatggccctgcggcgcgcctttactcactggaaacactacatgctgctgtgtgcagaagaagctgcccagtttgagatggcagaagagcaccacaggcacagccagctgtatttttgctttagagccctaaaagacaatgtgacccacgctcatctccagcaaataagaaggaatcttgctcaccagcagcatggtgtcacgctgctgcacaggttctggaacctctggcggtctcagattgagcagaaaaaggaaagagagctgctccccttactgcatgctgcctgggaccactacagaatagcactgctgtgcaaatgtatcgaattgtggctacagtatactcagaagaggcggtacaagcagctgctacaggccagagcggatggtcatttccagcagagagccctgcctgctgccttccacacatggaacagactctggcgatggcgccaccaggaaaatgtcctcagtgcaagagcaacacgtttccacagggagacattagagaagcaagtattttctctctggaggcagaagatgtttcagcatcgagaaaaccgcctggcagagagaatggccatccttcacgcagagcgacagcttctgtataggtcttggttcatgtggcaccagcaggcagcagcacgtcaccaggagcaggagtggcaaacagtggcctgtgcccaccaccgccacgggcggctcaagaaagctttctgcctctggagggaaagtgcccaagggctcagaacagagaggacgggcagggtgcgggcagcagaattccacatggcccagctcctgcgttgggcctggagccagtggagggagtgcctggccctgcggggagcggagcggcagaagctgatgcgagcagacctgcaccaccagcacagcgtgctgcacagggcgctgcaggcatgggtgacttaccagggcagggtgcgaagcatcctccgggaggtggcagccagggagagccagcacaacaggcagctgctgcgcggggcattacgtcgctggaaagagaacaccatggcccgagtggatgaagccaaaaaaacctttcaagcaagtactcattacagaaggaccatatgttccaaggtcctggtccagtggcgggaagctgtgtcagtgcagatgtattaccgacagcaggaggactgtgccatctgggaggcccagaaggtgctggacaggggctgtctgcggacctggtttcagcgctggtgggactgcagccggaggtcagcccagcagagactgcagctggagagggcagtgcaacaccaccaccggcagctgctgctggaggggctggcccggtggaagacgcaccatctgcagtgtgtcaggaagaggctcctgcacaggcagagcacccaactgctggcacagagactcagccggacctgcttccgccagtggagacaacagctggcagccaggaggcaggagcagcgggcgacagtgcgggccctgtggttctgggccttctcgctgcaggcaaaggtgtgggccacgtggctggcctttgtactggaaaggaggagaaagaaggcgcggctgcagtgggcgctccaggcctaccaggggcagctcctccaggagggtgccacgcggctcctgcgctttgcagccagcatgaaggcctcccggcagcagctgcaggcccagcagcaggtccaggcggctcacagtctccatcgtgccgtccgccgctgtgccacgctctggaaacagaaagtgctgggccggggcgggaagcctcagcccctggcagccatcgcacccagcaggaaagtgacgtttgagggtccccttctcaaccgcattgctgctggggctggggatggcacccttgagaccaagaggccacaggcttctcggcctctgggagctctgggccgcctggctgctgaggagccccacgccctggagctcaacactgcccactcagcgaggaagcagccgcgacgcccacacttcctgttggagcctgcgcagagccagaggcctcagaagccacaggaacatggcctaggcatggctcagccagcagccccctccctgacgcggcccttcctggcagaggccccgacagcactggtcccacacagccccctgcctggggccctgtcaagcgcccctggcccgaagcagcccccgacggcaagcacaggcccggagctgctgctgctgcctctttcctccttcatgccctgcggggcggctgcaccagccagggtgtcagcacagcgggctactcctagggataagcccccggtcccctcatccctggccagtgtccctgacccccatctactccttcctggggacttctcagccaccagggctgggcctggactttcaactgcaggcagcctggaccttgaggctgaacttgaggagatccagcagcaactactgcactaccagaccaccaagcagaacctctggtcctgtcggcggcaagcgagcagcctgcgcaggtggctggagctgaacagagaggagccggggcctgaggaccaggaagtagagcagcaggtgcagaaagagctggaacaggtggaaatgcagatccagctgctggcagaggagctccaggctcagcgccagcccattggcgcctgcgttgcccgcatccaggccctgcggcaggccctgtgctagcgtgttcgcaccaggaacgcaggtgctgggctgtcggggaggcctcaggccacctccaggaacagaacacagttttaagtttgattttttttatttcaaaatgctttgcaattaaatgaattactgttca

SEQ ID NO: 27874 - DNA, 3788 bp, Homo sapiens
  source 1..3788: mol_type = unassigned DNA
agcaagctgagctcagagcgaagctggcgagccaaggagataaagaaccctcggtggggatgcccagagggtgcatgctccacgcccctcgaaaccgattctcattgctgctgctgcaaagcaacccgaagtgcgccacctacccgactgaggctgcgcaagccccggggtctgggcggggtggtcctcgtgcgcgccgcgtcgccgtggagacgagggcgggcccgcgcgagactggcgtctagaggcgcgcgaagcgctgaggcgggcgtggaccgcgcgggagttaagaagcaggtcccggatcgccgtataccgccgggttttctcccaacgtcaggcccgatggctcggcttccccagttagaaggggaagataaaagactttgattcatgaagaatctgctcactgagaagtgtatatcaagccacaatttccatcaaaaagtgattaagcagagaatggagaagaaggttgattccagattttactatgagcagcgattactacggaaggtcttcgaagaatggaaagaggagtggtgggttttccagcacgagtggaaactctgtgttcgagctgactgtcactacagggtgtggtggagcacgtggaggcagcgactaggacaggtccgtgtgagccgtgccctccatgcctctgctttgaagcacagggccctgagcctccaggtgcaggcttggtcacagtggcgggaacagctcctgtatgtccagaaggagaaacaaaaggttgtctctgcagtgaaacatcatcagcactggcaaaaacggagatttctaaaggcctggcttgaatacctgcaagtccgcagagtgaagagacagcagaatgagatggctgagcgattccatcatgtcactgtgctccagatatacttctgtgactggcagcaggcctgggagcggagggagagcttgtacgctcaccatgcccaggtggagaaactggccaggaagatggccctgcggcgcgcctttactcactggaaacactacatgctgctgtgtgcagaagaagctgcccagtttgagatggcagaagagcaccacaggcacagccagctgtatttttgctttagagccctaaaagacaatgtgacccacgctcatctccagcaaataagaaggaatcttgctcaccagcagcatggtgtcacgctgctgcacaggttctggaacctctggcggtctcagattgagcagaaaaaggaaagagagctgctccccttactgcatgctgcctgggaccactacagaatagcactgctgtgcaaatgtatcgaattgtggctacagtatactcagaagaggcggtacaagcagctgctacaggccagagcggatggtcatttccagcagagagccctgcctgctgccttccacacatggaacagactctggcgatggcgccaccaggaaaatgtcctcagtgcaagagcaacacgtttccacagggagacattagagaagcaagtattttctctctggaggcagaagatgtttcagcatcgagaaaaccgcctggcagagagaatggccatccttcacgcagagcgacagcttctgtataggtcttggttcatgtggcaccagcaggcagcagcacgtcaccaggagcaggagtggcaaacagtggcctgtgcccaccaccgccacgggcggctcaagaaagctttctgcctctggagggaaagtgcccaagggctcagaacagagaggacgggcagggtgcgggcagcagaattccacatggcccagctcctgcgttgggcctggagccagtggagggagtgcctggccctgcggggagcggagcggcagaagctgatgcgagcagacctgcaccaccagcacagcgtgctgcacagggcgctgcaggcatgggtgacttaccagggcagggtgcgaagcatcctccgggaggtggcagccagggagagccagcacaacaggcagctgctgcgcggggcattacgtcgctggaaagagaacaccatggcccgagtggatgaagccaaaaaaacctttcaagcaagtactcattacagaaggaccatatgttccaaggtcctggtccagtggcgggaagctgtgtcagtgcagatgtattaccgacagcaggaggactgtgccatctgggaggcccagaaggtgctggacaggggctgtctgcggacctggtttcagcgctggtgggactgcagccggaggtcagcccagcagagactgcagctggagagggcagtgcaacaccaccaccggcagctgctgctggaggggctggcccggtggaagacgcaccatctgcagtgtgtcaggaagaggctcctgcacaggcagagcacccaactgctggcacagagactcagccggacctgcttccgccagtggagacaacagctggcagccaggaggcaggagcagcgggcgacagtgcgggccctgtggttctgggccttctcgctgcaggcaaaggtgtgggccacgtggctggcctttgtactggaaaggaggagaaagaaggcgcggctgcagtgggcgctccaggcctaccaggggcagctcctccaggagggtgccacgcggctcctgcgctttgcagccagcatgaaggcctcccggcagcagctgcaggcccagcagcaggtccaggcggctcacagtctccatcgtgccgtccgccgctgtgccacgctctggaaacagaaagtgctgggccggggcgggaagcctcagcccctggcagccatcgcacccagcaggaaagtgacgtttgagggtccccttctcaaccgcattgctgctggggctggggatggcacccttgagaccaagaggccacaggcttctcggcctctgggagctctgggccgcctggctgctgaggagccccacgccctggagctcaacactgcccactcagcgaggaagcagccgcgacgcccacacttcctgttggagcctgcgcagagccagaggcctcagaagccacaggaacatggcctaggcatggctcagccagcagccccctccctgacgcggcccttcctggcagaggccccgacagcactggtcccacacagccccctgcctggggccctgtcaagcgcccctggcccgaagcagcccccgacggcaagcacaggcccggagctgctgctgctgcctctttcctccttcatgccctgcggggcggctgcaccagccagggtgtcagcacagcgggctactcctagggataagcccccggtcccctcatccctggccagtgtccctgacccccatctactccttcctggggacttctcagccaccagggctgggcctggactttcaactgcagcctggaccttgaggctgaacttgaggagatccagcagcaactactgcactaccagaccaccaagcagaacctctggtcctgtcggcggcaagcgagcagcctgcgcaggtggctggagctgaacagagaggagccggggcctgaggaccaggaagtagagcagcaggtgcagaaagagctggaacaggtggaaatgcagatccagctgctggcagaggagctccaggctcagcgccagcccattggcgcctgcgttgcccgcatccaggccctgcggcaggccctgtgctagcgtgttcgcaccaggaacgcaggtgctgggctgtcggggaggcctcaggccacctccaggaacagaacacagttttaagtttgattttttttatttcaaaatgctttgcaattaaatgaattactgttc

SEQ ID NO: 27875 - DNA, 3498 bp, Homo sapiens
  source 1..3498: mol_type = unassigned DNA
agcaagctgagctcagagcgaagctggcgagccaaggagataaagaaccctcggtggggatgcccagagggtgcatgctccacgcccctcgaaaccgattctcattgctgctgctgcaaagcaacccgaagtgcgccacctacccgactgaggctgcgcaagccccggggtctgggcggggtggtcctcgtgcgcgccgcgtcgccgtggagacgagggcgggcccgcgcgagactggcgtctagaggcgcgcgaagcgctgaggcgggcgtggaccgcgcgggagttaagaagcaggtcccggatcgccgtataccgccgggttttctcccaacgtcaggcccgatggctcggcttccccagttagaaggggaagataaaagactttgattcatgaagaatctgctcactgagaagtgtatatcaagccacaatttccatcaaaaagtgattaagcagagaatggagaagaaggttgattccaggtattttaaggatggtgcagttaagaaaccttattctgcaaagacactgtccaacaagaagtcttctgcatcctttgggatccggagggagttacctagtaccagtcatctagtgcagtatcgtggcacacatacttgtacccgacagggccggttaagagaactgcgcatcagattttactatgagcagcgattactacggaaggtcttcgaagaatggaaagaggagtggtgggttttccagcacgagtggaaactctgtgttcgagctgactgtcactacaggtattacctgtacaacctgatgttccagacgtggaagacctatgtgcgtcagcagcaggagatgaggaacaagtacattagagccgaggttcatgatgcaaagcaaaagatgcgacaggcctggaagtcctggttgatctacgtggttgttcgtaggaccaaacttcagatgcagactacagctctggagtttaggcaacggattatcttacgggtgtggtggagcacgtggaggcagcgactaggacaggtccgtgtgagccgtgccctccatgcctctgctttgaagcacagggccctgagcctccaggtgcaggcttggtcacagtggcgggaacagctcctgtatgtccagaaggagaaacaaaaggttgtctctgcagtgaaacatcatcagcactggcaaaaacggagatttctaaaggcctggcttgaatacctgcaagtccgcagagtgaagagacagcagaatgagatggctgagcgattccatcatgtcactgtgctccagatatacttctgtgactggcagcaggcctgggagcggagggagagcttgtacgctcaccatgcccaggtggagaaactggccaggaagatggccctgcggcgcgcctttactcactggaaacactacatgctgctgtgtgcagaagaagctgcccagtttgagatggcagaagagcaccacaggcacagccagctgtatttttgctttagagccctaaaagacaatgtgacccacgctcatctccagcaaataagaaggaatcttgctcaccagcagcatggtgtcacgctgctgcacaggttctggaacctctggcggtctcagattgagcagaaaaaggaaagagagctgctccccttactgcatgctgcctgggaccactacagaatagcactgctgtgcaaatgtatcgaattgtggctacagtatactcagaagaggcggtacaagcagctgctacaggccagagcggatggtcatttccagcagagagccctgcctgctgccttccacacatggaacagactctggcgatggcgccaccaggaaaatgtcctcagtgcaagagcaacacgtttccacagggagacattagagaagcaagtattttctctctggaggcagaagatgtttcagcatcgagaaaaccgcctggcagagagaatggccatccttcacgcagagcgacagcttctgtataggtcttggttcatgtggcaccagcaggcagcagcacgtcaccaggagcaggagtggcaaacagtggcctgtgcccaccaccgccacgggcggctcaagaaagctttctgcctctggagggaaagtgcccaagggctcagaacagagaggacgggcagggtgcgggcagcagaattccacatggcccagctcctgcgttgggcctggagccagtggagggagtgcctggccctgcggggagcggagcggcagaagctgatgcgagcagacctgcaccaccagcacagcgtgctgcacagggcgctgcaggcatgggtgacttaccagggcagggtgcgaagcatcctccgggaggtggcagccagggagagccagcagctgcaggcccagcagcaggtccaggcggctcacagtctccatcgtgccgtccgccgctgtgccacgctctggaaacagaaagtgctgggccggggcgggaagcctcagcccctggcagccatcgcacccagcaggaaagtgacgtttgagggtccccttctcaaccgcattgctgctggggctggggatggcacccttgagaccaagaggccacaggcttctcggcctctgggagctctgggccgcctggctgctgaggagccccacgccctggagctcaacactgcccactcagcgaggaagcagccgcgacgcccacacttcctgttggagcctgcgcagagccagaggcctcagaagccacaggaacatggcctaggcatggctcagccagcagccccctccctgacgcggcccttcctggcagaggccccgacagcactggtcccacacagccccctgcctggggccctgtcaagcgcccctggcccgaagcagcccccgacggcaagcacaggcccggagctgctgctgctgcctctttcctccttcatgccctgcggggcggctgcaccagccagggtgtcagcacagcgggctactcctagggataagcccccggtcccctcatccctggccagtgtccctgacccccatctactccttcctggggacttctcagccaccagggctgggcctggactttcaactgcaggcagcctggaccttgaggctgaacttgaggagatccagcagcaactactgcactaccagaccaccaagcagaacctctggtcctgtcggcggcaagcgagcagcctgcgcaggtggctggagctgaacagagaggagccggggcctgaggaccaggaagtagagcagcaggtgcagaaagagctggaacaggtggaaatgcagatccagctgctggcagaggagctccaggctcagcgccagcccattggcgcctgcgttgcccgcatccaggccctgcggcaggccctgtgctagcgtgttcgcaccaggaacgcaggtgctgggctgtcggggaggcctcaggccacctccaggaacagaacacagttttaagtttgattttttttatttcaaaatgctttgcaattaaatgaattactgttc

SEQ ID NO: 27876 - DNA, 4162 bp, Homo sapiens
  source 1..4162: mol_type = unassigned DNA
agcaagctgagctcagagcgaagctggcgagccaaggagataaagaaccctcggtggggatgcccagagggtgcatgctccacgcccctcgaaaccgattctcattgctgctgctgcaaagcaacccgaagtgcgccacctacccgactgaggctgcgcaagccccggggtctgggcggggtggtcctcgtgcgcgccgcgtcgccgtggagacgagggcgggcccgcgcgagactggcgtctagaggcgcgcgaagcgctgaggcgggcgtggaccgcgcgggagttaagaagcaggtcccggatcgccgtataccgccgggttttctcccaacgtcaggcccgatggctcggcttccccagttagaaggggaagataaaagactttgattcatgaagaatctgctcactgagaagtgtatatcaagccacaatttccatcaaaaagtgattaagcagagaatggagaagaaggttgattccaggtattttaaggatggtgcagttaagaaaccttattctgcaaagacactgtccaacaagaagtcttctgcatcctttgggatccggagggagttacctagtaccagtcatctagtgcagtatcgtggcacacatacttgtacccgacagggccggttaagagaactgcgcatcagatgcgtggccagaaagttcttatatttatggattcgaatgacttttggaagagtatttccctctaaagccagattttactatgagcagcgattactacggaaggtcttcgaagaatggaaagaggagtggtgggttttccagcacgagtggaaactctgtgttcgagctgactgtcactacaggtattacctgtacaacctgatgttccagacgtggaagacctatgtgcgtcagcagcaggagatgaggaacaagtacattagagccgaggttcatgatgcaaagcaaaagatgcgacaggcctggaagtcctggttgatctacgtggttgttcgtaggaccaaacttcagatgcagactacagctctggagtttaggcaacggattatcttacgggtgtggtggagcacgtggaggcagcgactaggacaggtccgtgtgagccgtgccctccatgcctctgctttgaagcacagggccctgagcctccaggtgcaggcttggtcacagtggcgggaacagctcctgtatgtccagaaggagaaacaaaaggttgtctctgcagtgaaacatcatcagcactggcaaaaacggagatttctaaaggcctggcttgaatacctgcaagtccgcagagtgaagagacagcagaatgagatggctgagcgattccatcatgtcactgtgctccagatatacttctgtgactggcagcaggcctgggagcggagggagagcttgtacgctcaccatgcccaggtggagaaactggccaggaagatggccctgcggcgcgcctttactcactggaaacactacatgctgctgtgtgcagaagaagctgcccagtttgagatggcagaagagcaccacaggcacagccagctgctgctgcacaggttctggaacctctggcggtctcagattgagcagaaaaaggaaagagagctgctccccttactgcatgctgcctgggaccactacagaatagcactgctgtgcaaatgtatcgaattgtggctacagtatactcagaagaggcggtacaagcagctgctacaggccagagcggatggtcatttccagcagagagccctgcctgctgccttccacacatggaacagactctggcgatggcgccaccaggaaaatgtcctcagtgcaagagcaacacgtttccacagggagacattagagaagcaagtattttctctctggaggcagaagatgtttcagcatcgagaaaaccgcctggcagagagaatggccatccttcacgcagagcgacagcttctgtataggtcttggttcatgtggcaccagcaggcagcagcacgtcaccaggagcaggagtggcaaacagtggcctgtgcccaccaccgccacgggcggctcaagaaagctttctgcctctggagggaaagtgcccaagggctcagaacagagaggacgggcagggtgcgggcagcagaattccacatggcccagctcctgcgttgggcctggagccagtggagggagtgcctggccctgcggggagcggagcggcagaagctgatgcgagcagacctgcaccaccagcacagcgtgctgcacagggcgctgcaggcatgggtgacttaccagggcagggtgcgaagcatcctccgggaggtggcagccagggagagccagcacaacaggcagctgctgcgcggggcattacgtcgctggaaagagaacaccatggcccgagtggatgaagccaaaaaaacctttcaagcaagtactcattacagaaggaccatatgttccaaggtcctggtccagtggcgggaagctgtgtcagtgcagatgtattaccgacagcaggaggactgtgccatctgggaggcccagaaggtgctggacaggggctgtctgcggacctggtttcagcgctggtgggactgcagccggaggtcagcccagcagagactgcagctggagagggcagtgcaacaccaccaccggcagctgctgctggaggggctggcccggtggaagacgcaccatctgcagtgtgtcaggaagaggctcctgcacaggcagagcacccaactgctggcacagagactcagccggacctgcttccgccagtggagacaacagctggcagccaggaggcaggagcagcgggcgacagtgcgggccctgtggttctgggccttctcgctgcaggcaaaggtgtgggccacgtggctggcctttgtactggaaaggaggagaaagaaggcgcggctgcagtgggcgctccaggcctaccaggggcagctcctccaggagggtgccacgcggctcctgcgctttgcagccagcatgaaggcctcccggcagcagctgcaggcccagcagcaggtccaggcggctcacagtctccatcgtgccgtccgccgctgtgccacgctctggaaacagaaagtgctgggccggggcgggaagcctcagcccctggcagccatcgcacccagcaggaaagtgacgtttgagggtccccttctcaaccgcattgctgctggggctggggatggcacccttgagaccaagaggccacaggcttctcggcctctgggagctctgggccgcctggctgctgaggagccccacgccctggagctcaacactgcccactcagcgaggaagcagccgcgacgcccacacttcctgttggagcctgcgcagagccagaggcctcagaagccacaggaacatggcctaggcatggctcagccagcagccccctccctgacgcggcccttcctggcagaggccccgacagcactggtcccacacagccccctgcctggggccctgtcaagcgcccctggcccgaagcagcccccgacggcaagcacaggcccggagctgctgctgctgcctctttcctccttcatgccctgcggggcggctgcaccagccagggtgtcagcacagcgggctactcctagggataagcccccggtcccctcatccctggccagtgtccctgacccccatctactccttcctggggacttctcagccaccagggctgggcctggactttcaactgcaggcagcctggaccttgaggctgaacttgaggagatccagcagcaactactgcactaccagaccaccaagcagaacctctggtcctgtcggcggcaagcgagcagcctgcgcaggtggctggagctgaacagagaggagccggggcctgaggaccaggaagtagagcagcaggtgcagaaagagctggaacaggtggaaatgcagatccagctgctggcagaggagctccaggctcagcgccagcccattggcgcctgcgttgcccgcatccaggccctgcggcaggccctgtgctagcgtgttcgcaccaggaacgcaggtgctgggctgtcggggaggcctcaggccacctccaggaacagaacacagttttaagtttgattttttttatttcaaaatgctttgcaattaaatgaattactgttcagaa

SEQ ID NO: 27877 - DNA, 4005 bp, Homo sapiens
  source 1..4005: mol_type = unassigned DNA
agcaagctgagctcagagcgaagctggcgagccaaggagataaagaaccctcggtggggatgcccagagggtgcatgctccacgcccctcgaaaccgattctcattgctgctgctgcaaagcaacccgaagtgcgccacctacccgactgaggctgcgcaagccccggggtctgggcggggtggtcctcgtgcgcgccgcgtcgccgtggagacgagggcgggcccgcgcgagactggcgtctagaggcgcgcgaagcgctgaggcgggcgtggaccgcgcgggagttaagaagcaggtcccggatcgccgtataccgccgggttttctcccaacgtcaggcccgatggctcggcttccccagttagaaggggaagataaaagactttgattcatgaagaatctgctcactgagaagtgtatatcaagccacaatttccatcaaaaagtgattaagcagagaatggagaagaaggttgattccagattttactatgagcagcgattactacggaaggtcttcgaagaatggaaagaggagtggtgggttttccagcacgagtggaaactctgtgttcgagctgactgtcactacaggtattacctgtacaacctgatgttccagacgtggaagacctatgtgcgtcagcagcaggagatgaggaacaagtacattagagccgaggttcatgatgcaaagcaaaagatgcgacaggcctggaagtcctggttgatctacgtggttgttcgtaggaccaaacttcagatgcagactacagctctggagtttaggcaacggattatcttacgggtgtggtggagcacgtggaggcagcgactaggacaggtccgtgtgagccgtgccctccatgcctctgctttgaagcacagggccctgagcctccaggtgcaggcttggtcacagtggcgggaacagctcctgtatgtccagaaggagaaacaaaaggttgtctctgcagtgaaacatcatcagcactggcaaaaacggagatttctaaaggcctggcttgaatacctgcaagtccgcagagtgaagagacagcagaatgagatggctgagcgattccatcatgtcactgtgctccagatatacttctgtgactggcagcaggcctgggagcggagggagagcttgtacgctcaccatgcccaggtggagaaactggccaggaagatggccctgcggcgcgcctttactcactggaaacactacatgctgctgtgtgcagaagaagctgcccagtttgagatggcagaagagcaccacaggcacagccagctgtatttttgctttagagccctaaaagacaatgtgacccacgctcatctccagcaaataagaaggaatcttgctcaccagcagcatggtgtcacgctgctgcacaggttctggaacctctggcggtctcagattgagcagaaaaaggaaagagagctgctccccttactgcatgctgcctgggaccactacagaatagcactgctgtgcaaatgtatcgaattgtggctacagtatactcagaagaggcggtacaagcagctgctacaggccagagcggatggtcatttccagcagagagccctgcctgctgccttccacacatggaacagactctggcgatggcgccaccaggaaaatgtcctcagtgcaagagcaacacgtttccacagggagacattagagaagcaagtattttctctctggaggcagaagatgtttcagcatcgagaaaaccgcctggcagagagaatggccatccttcacgcagagcgacagcttctgtataggtcttggttcatgtggcaccagcaggcagcagcacgtcaccaggagcaggagtggcaaacagtggcctgtgcccaccaccgccacgggcggctcaagaaagctttctgcctctggagggaaagtgcccaagggctcagaacagagaggacgggcagggtgcgggcagcagaattccacatggcccagctcctgcgttgggcctggagccagtggagggagtgcctggccctgcggggagcggagcggcagaagctgatgcgagcagacctgcaccaccagcacagcgtgctgcacagggcgctgcaggcatgggtgacttaccagggcagggtgcgaagcatcctccgggaggtggcagccagggagagccagcacaacaggcagctgctgcgcggggcattacgtcgctggaaagagaacaccatggcccgagtggatgaagccaaaaaaacctttcaagcaagtactcattacagaaggaccatatgttccaaggtcctggtccagtggcgggaagctgtgtcagtgcagatgtattaccgacagcaggaggactgtgccatctgggaggcccagaaggtgctggacaggggctgtctgcggacctggtttcagcgctggtgggactgcagccggaggtcagcccagcagagactgcagctggagagggcagtgcaacaccaccaccggcagctgctgctggaggggctggcccggtggaagacgcaccatctgcagtgtgtcaggaagaggctcctgcacaggcagagcacccaactgctggcacagagactcagccggacctgcttccgccagtggagacaacagctggcagccaggaggcaggagcagcgggcgacagtgcgggccctgtggttctgggccttctcgctgcaggcaaaggtgtgggccacgtggctggcctttgtactggaaaggaggagaaagaaggcgcggctgcagtgggcgctccaggcctaccaggggcagctcctccaggagggtgccacgcggctcctgcgctttgcagccagcatgaaggcctcccggcagcagctgcaggcccagcagcaggtccaggcggctcacagtctccatcgtgccgtccgccgctgtgccacgctctggaaacagaaagtgctgggccggggcgggaagcctcagcccctggcagccatcgcacccagcaggaaagtgacgtttgagggtccccttctcaaccgcattgctgctggggctggggatggcacccttgagaccaagaggccacaggcttctcggcctctgggagctctgggccgcctggctgctgaggagccccacgccctggagctcaacactgcccactcagcgaggaagcagccgcgacgcccacacttcctgttggagcctgcgcagagccagaggcctcagaagccacaggaacatggcctaggcatggctcagccagcagccccctccctgacgcggcccttcctggcagaggccccgacagcactggtcccacacagccccctgcctggggccctgtcaagcgcccctggcccgaagcagcccccgacggcaagcacaggcccggagctgctgctgctgcctctttcctccttcatgccctgcggggcggctgcaccagccagggtgtcagcacagcgggctactcctagggataagcccccggtcccctcatccctggccagtgtccctgacccccatctactccttcctggggacttctcagccaccagggctgggcctggactttcaactgcaggcagcctggaccttgaggctgaacttgaggagatccagcagcaactactgcactaccagaccaccaagcagaacctctggtcctgtcggcggcaagcgagcagcctgcgcaggtggctggagctgaacagagaggagccggggcctgaggaccaggaagtagagcagcaggtgcagaaagagctggaacaggtggaaatgcagatccagctgctggcagaggagctccaggctcagcgccagcccattggcgcctgcgttgcccgcatccaggccctgcggcaggccctgtgctagcgtgttcgcaccaggaacgcaggtgctgggctgtcggggaggcctcaggccacctccaggaacagaacacagttttaagtttgattttttttatttcaaaatgctttgcaattaaatgaattactgttc

SEQ ID NO: 27878 - DNA, 449 bp, Homo sapiens
  source 1..449: mol_type = unassigned DNA
gagttaagaagcaggtcccggatcgccgtataccgccgggttttctcccaacgtcaggcccgatggctcggcttccccagataccgtgttttttacaaattgaaagtttgtagcaagcagccctgcaccgagcaactattttttcaacagcatgtgcccacttcctgtcacttacactttgttagaaggggaagataaaagactttgattcatgaagaatctgctcactgagaagtgtatatcaagccacaatttccatcaaaaagtgattaagcagagaatggagaagaaggttgattccaggtattttaaggatggtgcagttaagaaaccttattctgcaaagacactgtccaacaagaagtcttctgcatcctttgggatccggagggagttacctagtaccagtcatctagtgcagtatcgtggcacacatacttgtacccgac

SEQ ID NO: 27879 - DNA, 4086 bp, Homo sapiens
  source 1..4086: mol_type = unassigned DNA
agcaagctgagctcagagcgaagctggcgagccaaggagataaagaaccctcggtggggatgcccagagggtgcatgctccacgcccctcgaaaccgattctcattgctgctgctgcaaagcaacccgaagtgcgccacctacccgactgaggctgcgcaagccccggggtctgggcggggtggtcctcgtgcgcgccgcgtcgccgtggagacgagggcgggcccgcgcgagactggcgtctagaggcgcgcgaagcgctgaggcgggcgtggaccgcgcgggagttaagaagcaggtcccggatcgccgtataccgccgggttttctcccaacgtcaggcccgatggctcggcttccccagttagaaggggaagataaaagactttgattcatgaagaatctgctcactgagaagtgtatatcaagccacaatttccatcaaaaagtgattaagcagagaatggagaagaaggttgattccaggtattttaaggatggtgcagttaagaaaccttattctgcaaagacactgtccaacaagaagtcttctgcatcctttgggatccggagggagttacctagtaccagtcatctagtgcagtatcgtggcacacatacttgtacccgacagggccggttaagagaactgcgcatcagattttactatgagcagcgattactacggaaggtcttcgaagaatggaaagaggagtggtgggttttccagcacgagtggaaactctgtgttcgagctgactgtcactacaggtattacctgtacaacctgatgttccagacgtggaagacctatgtgcgtcagcagcaggagatgaggaacaagtacattagagccgaggttcatgatgcaaagcaaaagatgcgacaggcctggaagtcctggttgatctacgtggttgttcgtaggaccaaacttcagatgcagactacagctctggagtttaggcaacggattatcttacgggtgtggtggagcacgtggaggcagcgactaggacaggtccgtgtgagccgtgccctccatgcctctgctttgaagcacagggccctgagcctccaggtgcaggcttggtcacagtggcgggaacagctcctgtatgtccagaaggagaaacaaaaggttgtctctgcagtgaaacatcatcagcactggcaaaaacggagatttctaaaggcctggcttgaatacctgcaagtccgcagagtgaagagacagcagaatgagatggctgagcgattccatcatgtcactgtgctccagatatacttctgtgactggcagcaggcctgggagcggagggagagcttgtacgctcaccatgcccaggtggagaaactggccaggaagatggccctgcggcgcgcctttactcactggaaacactacatgctgctgtgtgcagaagaagctgcccagtttgagatggcagaagagcaccacaggcacagccagctgctgctgcacaggttctggaacctctggcggtctcagattgagcagaaaaaggaaagagagctgctccccttactgcatgctgcctgggaccactacagaatagcactgctgtgcaaatgtatcgaattgtggctacagtatactcagaagaggcggtacaagcagctgctacaggccagagcggatggtcatttccagcagagagccctgcctgctgccttccacacatggaacagactctggcgatggcgccaccaggaaaatgtcctcagtgcaagagcaacacgtttccacagggagacattagagaagcaagtattttctctctggaggcagaagatgtttcagcatcgagaaaaccgcctggcagagagaatggccatccttcacgcagagcgacagcttctgtataggtcttggttcatgtggcaccagcaggcagcagcacgtcaccaggagcaggagtggcaaacagtggcctgtgcccaccaccgccacgggcggctcaagaaagctttctgcctctggagggaaagtgcccaagggctcagaacagagaggacgggcagggtgcgggcagcagaattccacatggcccagctcctgcgttgggcctggagccagtggagggagtgcctggccctgcggggagcggagcggcagaagctgatgcgagcagacctgcaccaccagcacagcgtgctgcacagggcgctgcaggcatgggtgacttaccagggcagggtgcgaagcatcctccgggaggtggcagccagggagagccagcacaacaggcagctgctgcgcggggcattacgtcgctggaaagagaacaccatggcccgagtggatgaagccaaaaaaacctttcaagcaagtactcattacagaaggaccatatgttccaaggtcctggtccagtggcgggaagctgtgtcagtgcagatgtattaccgacagcaggaggactgtgccatctgggaggcccagaaggtgctggacaggggctgtctgcggacctggtttcagcgctggtgggactgcagccggaggtcagcccagcagagactgcagctggagagggcagtgcaacaccaccaccggcagctgctgctggaggggctggcccggtggaagacgcaccatctgcagtgtgtcaggaagaggctcctgcacaggcagagcacccaactgctggcacagagactcagccggacctgcttccgccagtggagacaacagctggcagccaggaggcaggagcagcgggcgacagtgcgggccctgtggttctgggccttctcgctgcaggcaaaggtgtgggccacgtggctggcctttgtactggaaaggaggagaaagaaggcgcggctgcagtgggcgctccaggcctaccaggggcagctcctccaggagggtgccacgcggctcctgcgctttgcagccagcatgaaggcctcccggcagcagctgcaggcccagcagcaggtccaggcggctcacagtctccatcgtgccgtccgccgctgtgccacgctctggaaacagaaagtgctgggccggggcgggaagcctcagcccctggcagccatcgcacccagcaggaaagtgacgtttgagggtccccttctcaaccgcattgctgctggggctggggatggcacccttgagaccaagaggccacaggcttctcggcctctgggagctctgggccgcctggctgctgaggagccccacgccctggagctcaacactgcccactcagcgaggaagcagccgcgacgcccacacttcctgttggagcctgcgcagagccagaggcctcagaagccacaggaacatggcctaggcatggctcagccagcagccccctccctgacgcggcccttcctggcagaggccccgacagcactggtcccacacagccccctgcctggggccctgtcaagcgcccctggcccgaagcagcccccgacggcaagcacaggcccggagctgctgctgctgcctctttcctccttcatgccctgcggggcggctgcaccagccagggtgtcagcacagcgggctactcctagggataagcccccggtcccctcatccctggccagtgtccctgacccccatctactccttcctggggacttctcagccaccagggctgggcctggactttcaactgcaggcagcctggaccttgaggctgaacttgaggagatccagcagcaactactgcactaccagaccaccaagcagaacctctggtcctgtcggcggcaagcgagcagcctgcgcaggtggctggagctgaacagagaggagccggggcctgaggaccaggaagtagagcagcaggtgcagaaagagctggaacaggtggaaatgcagatccagctgctggcagaggagctccaggctcagcgccagcccattggcgcctgcgttgcccgcatccaggccctgcggcaggccctgtgctagcgtgttcgcaccaggaacgcaggtgctgggctgtcggggaggcctcaggccacctccaggaacagaacacagttttaagtttgattttttttatttcaaaatgctttgcaattaaatgaattactgttc

SEQ ID NO: 27880 - DNA, 593 bp, Homo sapiens
  source 1..593: mol_type = unassigned DNA
ttttttgcacatctggctgaactgggagtcaggtggttgacttgtgcctggctgcagtagcagcggcatctcccttgcacagttctcctcctcggcctgcccaagagtccaccaggccatggacgcagtggctgtgtatcatggcaaaatcagcagggaaaccggcgagaagctcctgcttgccactgggctggatggcagctatttgctgagggacagcgagagcgtgccaggcgtgtactgcctatgtgtgctgtatcacggttacatttatacataccgagtgtcccagacagaaacaggttcttggagtgctgagacagcacctggggtacataaaagatatttccggaaaataaaaaatctcatttcagcatttcagaagccagatcaaggcattgtaatacctctgcagtatccagttgagaagaagtcctcagctagaagtacacaagggataagagaagatcctgatgtctgcctgaaagccccatgaagaaaaataaaacaccttgtactttattttctataatttaaatatatgctaagtcttatatattgtagataatacagttcggtgagctacaaatgca

SEQ ID NO: 27881 - DNA, 2450 bp, Homo sapiens
  source 1..2450: mol_type = unassigned DNA
aaatccttcttccaatgttcctcccctctctgtatgaaccctgtgttggggggcagaagatggaagcccttggcaagctcgatcgaaccaagctactaaattgctgagctcgttttaactgaagtgtgagaaggaggtttaaggcaagtagacaacatcctgttgttggggtgcttctctcttttttgcacatctggctgaactgggagtcaggtggttgacttgtgcctggctgcagtagcagcggcatctcccttgcacagttctcctcctcggcctgcccaagagtccaccaggccatggacgcagtggctgtgtatcatggcaaaatcagcagggaaaccggcgagaagctcctgcttgccactgggctggatggcagctatttgctgagggacagcgagagcgtgccaggcgtgtactgcctatgtgtgctgtatcacggttacatttatacataccgagtgtcccagacagaaacaggttcttggagtgctgagacagcacctggggtacataaaagatatttccggaaaataaaaaatctcatttcagcatttcagaagccagatcaaggcattgtaatacctctgcagtatccagttgagaagaagtcctcagctagaagtacacaaggtactacagggataagagaagatcctgatgtctgcctgaaagccccatgaagaaaaataaaacaccttgtactttattttctataatttaaatatatgctaagtcttatatattgtagataatacagttcggtgagctacaaatgcatttctaaagccattgtagtcctgtaatggaagcatctagcatgtcgtcaaagctgaaatggacttttgtacatagtgaggagctttgaaacgaggattgggaaaaagtaattccgtaggttattttcagttattatatttacaaatgggaaacaaaaggataatgaatactttataaaggattaatgtcaattcttgccaaatataaataaaaataatcctcagtttttgtgaaaagctccatttttagtgaaatattattttatagctactaattttaaaatgtcttgcttgattgtatggtgggaagttggctggtgtcccttgtctttgccaagttctccactagctatggtgtcataggctcttttgggatttttgaagctgtatactgtgtgctaaaacaagcactaaacaaagagtgaaggatttatgtttaattctgaaagcaaccttcttgcctagtgttctgatattggacagtaaaatccacagaccaacctggagttgaaaatcttataatttaaaatatgctctaaacatgtttatcgtatttgatgctacaggatttgaaattgtattacaaatccaatgaaatgagtttttcttttcatttacctctgccccagttgtttctactacatggaagacctcattttgaagggaaatttcagcagctgcagctcatgagtaactgatttgtaacaagcctccttttaaagtaaccctacaaaaccactggaaagtttatggttgtattattttttaaaaaaattccaagtgattgaaacctacacgagatacagaattttatgcggcattttcttctcacatttatatttttgtgattttgtgattgattatatgtcactttgctacagggctcacagaattcattcactcaacaaacataatagggcgctgagggcatagaagtaaaaacacctggtccctgctctcagttcactgtcttgttggacgagaaaacaataacgataaaagacagtgaaagaaaataacgataaaagacagtgaaagaaaataacaataaaagacaaggaaaaaataacaatgaaagttgataagtacatgataagcgaggttccccgtgtgtaggtagatctggtctttagaggcagatagataggtcagtgcaaatactctggtccatgggccatatgaaaaggctaagcttcactgtaaaataataactgggaattctggattgtgtatgggtgttggtgaacttggttttaattagtgaactgctgagagacagagctattctccatgtactggcaagacctgatttctgagcatttaatatggatgccgtgggagtacaaaagtggagtgtggcctgagtaatgcattatgggtggtttaccatttcttgaggtaaaagcatcacatgaacttgtaaaggaatttaaaaatcctactttcataataagttgcataggtttaataatttttaattatatggcttgagtttaaattgtaataggcgtaactaattttaactctataatgtgttcattctggaataatcctaaacatatgaattatgtttgcatgttcacttccaagagcctttttttgaaaaaaagctttttttgaatcatcaagtctttcacatttaaataaagtgtttgaaagctttattta

SEQ ID NO: 27882 - DNA, 267 bp, Homo sapiens
  source 1..267: mol_type = unassigned DNA
gagtcaggtggttgacttgtgcctggctgcagtagcagcggcatctcccttgcacagttctcctcctcggcctgcccaagagtccaccaggccatggacgcagtggctgtgtatcatggcaaaatcagcagggaaaccggcgagaagctcctgcttgccactgggctggatggcagctatttgctgagggacagcgagagcgtgccaggcgtgtactgcctatgtgtgctacaccattggggttacattaaatttattaataaacta

SEQ ID NO: 27883 - DNA, 2041 bp, Homo sapiens
  source 1..2041: mol_type = unassigned DNA
gtagctccacaggaggtacagctgcttacacatctctcctcagagctgtcccttgacttgggggtgaatttcaggccaacagggcttcctgggatacaagagcgttctccatggatctgccttactaccatggacgtctgaccaagcaagactgtgagaccttgctgctcaaggaaggggtggatggcaactttcttttaagagacagcgagtcgataccaggagtcctgtgcctctgtgtctcgtttaaaaatattgtctacacataccgaatcttcagagagaaacacgggtattacaggatacagaacagtaacagcgattatgtggatgtcttgccttgaagataaggctgccggacaaagcaagttgaagagatgagtaacagttctcactgatgacccacttctgcaggcataggtccagagcaccaaactctagtggacaattcagactctcctggttgtgtaactgaagatgttctgcccaccagcaccagaggtcactctccacatccccgcctcccagacatataccaggagcaatttcaaaaccctctccagtttcactcttctttcttggaatgggacagcctgaacattttccctttgacttgttaaaggtaccaccctacatcatggttgacaccctcctttggaccatgcagtcagaggggcagctttatacagaggaggggcacacttgtctgtgagtttgaagccctgagttccagtcctgtggctgtgtgactttgaacacgtttctgcccatctccaggtcttagtttctttgtctctgtggttgggtgggatgataaacattgccccagtctctctgttgagcctgcttgtgtcaggtgaaggtgagggatcgggagtgatggagatgcatacagatcagcaccttctctgtacctgctggacccccatgtgcacccttctccctccagcctgggctactctcctcctggttctttctaatcttaaacttcctggtgagcattgccccagccacactttctccctggttttgcttaattccacttatgcatcagtcatttcaacagcatgaatgtggttctgtacagtgatgtatgtggagatttctaaaatattctatgtgtgatttctgttcccaactaggttctaagtgccatcaaagcacggttgggtctcccttgtatcttccacagtgtgtagaaatttgtgctgcccagagctgtgcctagttcatagaaactgactggaagcacattgctgagggaggtttgttgaattggtttttaaggtttactgaaattgatttgctgaatttttctgctagttcaaaatgtgaattaggacctggtcagtttgaaatataccaaattctatgccctttctcttacctatcatcaaattgtagtaatgtatttcaccccactggacttatcttcagagttttaaaagagaggagctctcgacttagaggtaatatgaacagatgaacagacactgtggctggagccccaaagtgtggagcattgtgagatttggggtcacagcaatttatggctactattccctgggtctggtaggtaggacaaatgtcctcttttacttttcaaaactggcttaggtattcatggaccttgattcttctatatacattttataataaatacgtgaaattgcttaaaacctctttttggaatttttaatgaacttgcaacaaatttgtaaataggagagaactgacgttcttgtgatgttttcccatgcataaacatgccacatccatgttcttgggtcatcttttttgccctttcatggagtcataaattttcccaactgaagtcttgtatattctgttagattaattcctatttctagttgctgtaaatgatatcttatgttttattacatttctaataggatatggtgttggtgaaatgttaaccctctcattagatctactagtttacctgttgattctattgtgttttctatgtaaatgattttgtcagctataaataataacattttattttctctttccttgc

SEQ ID NO: 27884 - DNA, 2523 bp, Homo sapiens
  source 1..2523: mol_type = unassigned DNA
gtagctccacaggaggtacagctgcttacacatctctcctcagagctgtcccttgacttgggggtgaatttcaggccaacagggcttcctgggatacaagagcgttctccatggatctgccttactaccatggacgtctgaccaagcaagactgtgagaccttgctgctcaaggaaggggtggatggcaactttcttttaagagacagcgagtcgataccaggagtcctgtgcctctgtgtctcgtttaaaaatattgtctacacataccgaatcttcagagagaaacacgggtattacaggatacagactgcagaaggttctccaaaacaggtctttccaagcctaaaggaactgatctccaaatttgaaaaaccaaatcaggggatggtggttcaccttttaaagccaataaagagaaccagccccagcttgagatggagaggattgaaattagagttggaaacatttgtgaacagtaacagcgattatgtggatgtcttgccttgaagataaggctgccggacaaagcaagttgaagagatgagtaacagttctcactgatgacccacttctgcaggcataggtccagagcaccaaactctagtggacaattcagactctcctggttgtgtaactgaagatgttctgcccaccagcaccagaggtcactctccacatccccgcctcccagacatataccaggagcaatttcaaaaccctctccagtttcactcttctttcttggaatgggacagcctgaacattttccctttgacttgttaaaggtaccaccctacatcatggttgacaccctcctttggaccatgcagtcagaggggcagctttatacagaggaggggcacacttgtctgtgagtttgaagccctgagttccagtcctgtggctgtgtgactttgaacacgtttctgcccatctccaggtcttagtttctttgtctctgtggttgggtgggatgataaacattgccccagtctctctgttgagcctgcttgtgtcaggtgaaggtgagggatcgggagtgatggagatgcatacagatcagcaccttctctgtacctgctggacccccatgtgcacccttctccctccagcctgggctactctcctcctggttctttctaatcttaaacttcctggtgagcattgccccagccacactttctccctggttttgcttaattccacttatgcatcagtcatttcaacagcatgaatgtggttctgtacagtgatgtatgtggagatttctaaaatattctatgtgtgatttctgttcccaactaggttctaagtgccatcaaagcacggttgggtctcccttgtatcttccacagtgtgtagaaatttgtgctgcccagagctgtgcctagttcatagaaactgactggaagcacattgctgagggaggtttgttgaattggtttttaaggtttactgaaattgatttgctgaatttttctgctagttcaaaatgtgaattaggacctggtcagtttgaaatataccaaattctatgccctttctcttacctatcatcaaattgtagtaatgtatttcaccccactggacttatcttcagagttttaaaagagaggagctctcgacttagaggtaatatgaacagatgaacagacactgtggctggagccccaaagtgtggagcattgtgagatttggggtcacagcaatttatggctactattccctgggtctggtaggtaggacaaatgtcctcttttacttttcaaaactggcttaggtattcatggaccttgattcttctatatacattttataataaatacgtgaaattgcttaaaacctctttttggaatttttaatgaacttgcaacaaatttgtaaataggagagaactgacgttcttgtgatgttttcccatgcataaacatgccacatccatgttcttgggtcatcttttttgccctttcatggagtcataaattttcccaactgaagtcttgtatattctgttagattaattcctatttctagttgctgtaaatgatatcttatgttttattacatttctaataggatatggtgttggtgaaatgttaaccctctcattagatctactagtttacctgttgattctattgtgttttctatgtaaatgattttgtcagctataaataataacattttattttctctttccttgcaatacctatgctcatttattttttatgtttacccattggttagggcctcctgtatacattaaacagttcatagtcatgatagtgagtattcttacactgttcccagtattacagggaatgcttagaaattttctttatttaaacattatgtttgttgtagccttgttaaaggctattttataatttttactagaaatattttgacatttattgtgatttttttctatctctaatctattgagatagtcacattccttttgtcttcactccattataaaggtaagttaccttaataaaattgttgatatcatttcatc

SEQ ID NO: 27885 - DNA, 3095 bp, Homo sapiens
  source 1..3095: mol_type = unassigned DNA
gggctccgggaggcagctgcggctccgactgctcaggaacctcctcctgggcccggcagagagagaccccgagtcccccggagtccgactcgctacgcgggtcttgcgagatatctggccgcctctgccgcagctggagcagagatggggtttcaccgtgttagccaggatggtcttgatctcctgacctcatgatccgcctgtctcggcctcccaaagtgctgggattacaggcgtgagccactgtgcccggccttgaacattcttaggtgcaactggagaaggcactgaagccctacgagattcacaccgtcttcggtctcctggggtcggcgccgagtgggaggatggcggaactgctgccgcccacccctcgtcttctggctgcctccctctttgtgccccacaggctccccctctccacctcctggggcccatcatgaatggtgccccttccccagaggacggggcctccccctcgtctcccccgctgcccccacccccgccccctagttggcgggagttctgtgagtcccacgcccgggctgcggctctggactttgcccgccgttttcgcctctacctggcctcccacccccaatatgcggggcccggggccgaggctgccttctcccgccgttttgctgagctcttcctgcagcactttgaagccgaggtggcccgggcctctggctccctgtcgccacccatcctggctcccctgagccctggtgcggagatttcgccacatgacctgtcccttgagagctgcagggtgggtgggcccctggctgtgctgggcccttctcgatcatctgaggacctggccggccccctcccttcctcagtctcttcctcctctacaacctcctccaagccgaagctcaagaagcgcttttccctgcgttcagtgggtcgctctgtccgaggctcagtccgtggcatcctgcagtggcgggggaccgttgaccctccctcctccgctgggcccctggagacctcgtcaggccccccagtcttaggtggaaacagcaactccaactcctctggcggggctgggaccgttggtaggggactggtcagtgatggaacgtcccctggggaaagatggactcaccgttttgagaggctgagactcagtcggggagggggcgccttgaaggatggagcagggatggtgcagagggaagagctgctgagtttcatgggggctgaggaggcagcccctgacccagccggagtgggccggggaggaggggtggctgggcctccttcagggggaggagggcagcctcagtggcagaagtgtcgcctgctgcttcgaagtgaaggagaaggaggaggaggaagtcgcctggagttctttgtaccacccaaggcctctcggccccgactcagcatcccctgctcttctatcacagacgtccggacaaccacagccctggagatgcctgaccgggagaacacgtttgtggttaaggtggaaggtccatccgagtatatcatggagacagtggatgcccagcatgtgaaggcctgggtgtctgacatccaagaatgcctgagcccaggaccctgccctgctaccagtccccgccccatgaccctccctctggcccctgggacctcattccttacaagggagaacacagacagcctggagctgtcctgcctgaatcactcggagagtctacccagccaggacctgctgcttggacccagcgagagcaatgaccgcctgtcgcagggggcatatgggggcctctcagaccgcccctcggcatccatctcccccagctctgcctccattgccgcctcccattttgactcgatggaactgcttcccccagagttgcccccccgcatccccattgaagagggacccccaacagggacagttcatcccctctcagccccctaccctcccttggacactccggaaacagccacagggtccttcctgttccagggggagccagagggcggtgagggggaccagcccctctcagggtatccttggttccacgggatgctctctcggctcaaggctgcacagttggtgctgactggcggcactggctcccacggtgtcttcctggtgcgccagagtgagacaaggcggggtgaatacgtcctcaccttcaacttccagggcaaggccaagcacctgcgtttgtcgctgaacgaggagggtcagtgccgggtccagcacctgtggttccagtccattttcgatatgctcgagcacttccgggtgcaccccatccctttggagtcgggaggctccagtgatgttgtccttgtcagctatgtcccatcctcccagcgacagcaggaaccgaccacctcccatgacccaccccagccccctgaacccccttcatggacagatcccccacagcctggggcagaagaggcgtcgagggcgccagaagtggcggcagcagcagccgcagcagccaaagagaggcaagagaaagagaaagcgggcggtggaggggtcccggaagagctggtccccgtggttgagctggtccccgtggttgaattggaagaggccatagccccaggctcagaggcccagggcgctgggtctggtggggacgcgggggtgcccccaatggtgcagctgcagcagtcaccactagggggtgatggagaggaagggggccaccccagggccattaacaaccagtactccttcgtgtgagccaaccccacccgctccaccctttttaaaccccccagccctgctcgtgagattgggctgggtagggacagaggaggccgaaatccctcccccatgcttcctgacccttgttggccaagggcatctttgatggtacaagcagaggctcgggagaggctcccgtcacacactacaggtcccctccccagggcaggggatttgggctccatgagctccttgaggggctcttctggtcagccccaccctgggggccatttccccattaactacccccagcccgaggcagggtgagggggaagggctgtcagttacattaaggtggttgttgttgttgttttaaacaaaatggagaagcataaataaataaaaaggtttatctcggttc

SEQ ID NO: 27886 - DNA, 4865 bp, Homo sapiens
  source 1..4865: mol_type = unassigned DNA
cgcgacccggccctggcgcccgagaggattcctgggtgggggtgggcgtggagggccgggggctggagaggcactcggccccggagagtgcagcagacagggctggtcccgaggtggatgcggccccggaaaatgggcggctggggggtgtccagggagtagggtcggatcggagtatatggaccaccgggcccggagggtccgagccgagagcggagcctgcaccctccacctcccgcccttcgggaaatatcagaactgagccaggaggcaggtgcaccgggaaaatgtgtctgagtcctgcttggcagaagagaaactgagtcaccagcttaggagtcgcagggtcagcgggcctgaagggggctgggtctgtctgcggtgcggaggattgggtgggcctgtgtgagccgaggtggccgctggctggagattggtttgcacttcttggctgggttcccccgtgctccatgactcctgcatctcctgattgtttctcgttggtttggagttgtccctgcggttggagccatctgagcttgtagggtcgaggcccaggaggaaggggagggttcaccgacttacagcctggctgtaggtttgaacaggagtctgaggtcgctgagggtttggggaggctttcctgagctgctctggccccagtcctggggctgtcaccttccagtattgcgtggcgggaggagcgctaacaagagccaagggttgtaaattccacacccagctctgccactttctagttgtaagaccttgagagggctcctcctttctctaatttctattttagaaaattggaacaataatattcttctcccacatgaagatagtaacaatggcagtcgttcagcggatgcttactttgcgttcagcgctgacataccccattccatgtaattctctcaacatttcgaggggagggatcattagctttgtttaacagatagaaaaacggaggctcagagaggacgtggaatttgttcaagataacatcgctcataaggtggctggactgggtgctcataaggtggtttgagccctggtctgactcaagtccatggccttaaccagaaggctaacctgcctttagggcatactccccagtgggagaagaggaaggtgaaaaatcctagggccccagctctccctgtgatgttttgtttacgtgaggccagcaaagacttgacctgagccaacccagtttctcctctggggcccctgcggcctctggccccagactgaagggataccaaagaagtgggctgtagctatttcacatctccttcacgcagtgcgtgggtgctggactctggggtcagctttcaagacaattactgttttggtccatcatgcatccatcctcattaatgaatcggccccctccaaagagttggaccctaagatgcgtgaggcaggctctctaaggtctagaatcccagctcctctctagccccctgcgagctggggcggtgaggtgctatggctgaggctggcccagccgggccctggggacagggactatgaagtggggaaaacagtagacttggagttctgaaacttttctgagcttcggtttcctcatctgttcgagaggtctttgaaacctctcagggaaaggtaagataaccaagtgggagcctctagaatggctcatgggaagtgtgacatgaatattggaggatccgatgtagagggggggtgatctggaaaagttcccttttttagggggaaggtgctccaaagccctctactgctggatccaaagctaaggaaagtgggggcaaatgtggcaggctcggggcaggttagacgctggggagccagttggctggggcctgcagggtgccaggatctgggagagggaagggaggtgttgggctcccttccccattgctctctgcggagtctgaagtagggtcggacgtctctggctgggggtgggatgcagcctccggtgcgccctcagcagtgaccctcgtgtgtgcctctctcttcctttcgcagctgctgccgcccacccctcgtcttctggctgcctccctctttgtgccccacaggctccccctctccacctcctggggcccatcatgaatggtgccccttccccagaggacggggcctccccctcgtctcccccgctgcccccacccccgccccctagttggcgggagttctgtgagtcccacgcccgggctgcggctctggactttgcccgccgttttcgcctctacctggcctcccacccccaatatgcggggcccggggccgaggctgccttctcccgccgttttgctgagctcttcctgcagcactttgaagccgaggtggcccgggcctctggctccctgtcgccacccatcctggctcccctgagccctggtgcggagatttcgccacatgacctgtcccttgagagctgcagggtgggtgggcccctggctgtgctgggcccttctcgatcatctgaggacctggccggccccctcccttcctcagtctcttcctcctctacaacctcctccaagccgaagctcaagaagcgcttttccctgcgttcagtgggtcgctctgtccgaggctcagtccgtggcatcctgcagtggcgggggaccgttgaccctccctcctccgctgggcccctggagacctcgtcaggccccccagtcttaggtggaaacagcaactccaactcctctggcggggctgggaccgttggtaggggactggtcagtgatggaacgtcccctggggaaagatggactcaccgttttgagaggctgagactcagtcggggagggggcgccttgaaggatggagcagggatggtgcagagggaagagctgctgagtttcatgggggctgaggaggcagcccctgacccagccggagtgggccggggaggaggggtggctgggcctccttcagggggaggagggcagcctcagtggcagaagtgtcgcctgctgcttcgaagtgaaggagaaggaggaggaggaagtcgcctggagttctttgtaccacccaaggcctctcggccccgactcagcatcccctgctcttctatcacagacgtccggacaaccacagccctggagatgcctgaccgggagaacacgtttgtggttaaggtggaaggtccatccgagtatatcatggagacagtggatgcccagcatgtgaaggcctgggtgtctgacatccaagaatgcctgagcccaggaccctgccctgctaccagtccccgccccatgaccctccctctggcccctgggacctcattccttacaagggagaacacagacagcctggagctgtcctgcctgaatcactcggagagtctacccagccaggacctgctgcttggacccagcgagagcaatgaccgcctgtcgcagggggcatatgggggcctctcagaccgcccctcggcatccatctcccccagctctgcctccattgccgcctcccattttgactcgatggaactgcttcccccagagttgcccccccgcatccccattgaagagggacccccaacagggacagttcatcccctctcagccccctaccctcccttggacactccggaaacagccacagggtccttcctgttccagggggagccagagggcggtgagggggaccagcccctctcagggtatccttggttccacgggatgctctctcggctcaaggctgcacagttggtgctgactggcggcactggctcccacggtgtcttcctggtgcgccagagtgagacaaggcggggtgaatacgtcctcaccttcaacttccagggcaaggccaagcacctgcgtttgtcgctgaacgaggagggtcagtgccgggtccagcacctgtggttccagtccattttcgatatgctcgagcacttccgggtgcaccccatccctttggagtcgggaggctccagtgatgttgtccttgtcagctatgtcccatcctcccagcgacagcagggccgggagcaggctgggagccatgcgggggtgtgcgagggagatggatgccaccccgatgcctcctgcaccctcatgcccttcggagcgagtgactgtgtaaccgaccacctcccatgacccaccccagccccctgaacccccttcatggacagatcccccacagcctggggcagaagaggcgtcgagggcgccagaagtggcggcagcagcagccgcagcagccaaagagaggcaagagaaagagaaagcgggcggtggaggggtcccggaagagctggtccccgtggttgagctggtccccgtggttgaattggaagaggccatagccccaggctcagaggcccagggcgctgggtctggtggggacgcgggggtgcccccaatggtgcagctgcagcagtcaccactagggggtgatggagaggaagggggccaccccagggccattaacaaccagtactccttcgtgtgagccaaccccacccgctccaccctttttaaaccccccagccctgctcgtgagattgggctgggtagggacagaggaggccgaaatccctcccccatgcttcctgacccttgttggccaagggcatctttgatggtacaagcagaggctcgggagaggctcccgtcacacactacaggtcccctccccagggcaggggatttgggctccatgagctccttgaggggctcttctggtcagccccaccctgggggccatttccccattaactacccccagcccgaggcagggtgagggggaagggctgtcagttacattaaggtggttgttgttgttgttttaaacaaaatggagaagcataaataaataaaaaggtttatctcggttctatcgtg

SEQ ID NO: 27887 - DNA, 3088 bp, Homo sapiens
  source 1..3088: mol_type = unassigned DNA
aagtatgaaggtgcccttccctcccgccgctgttctctatggtctcttccttcagcgacgggaaagggggtcctgacgcctgcgcggaaccgggctgggcgctcgtcgcgtagtgggtgggggcgcagggagcgggagccgccgccgccgccgccgccgccggagctaacctcggggaccgagatgcagctgctgccgcccacccctcgtcttctggctgcctccctctttgtgccccacaggctccccctctccacctcctggggcccatcatgaatggtgccccttccccagaggacggggcctccccctcgtctcccccgctgcccccacccccgccccctagttggcgggagttctgtgagtcccacgcccgggctgcggctctggactttgcccgccgttttcgcctctacctggcctcccacccccaatatgcggggcccggggccgaggctgccttctcccgccgttttgctgagctcttcctgcagcactttgaagccgaggtggcccgggcctctggctccctgtcgccacccatcctggctcccctgagccctggtgcggagatttcgccacatgacctgtcccttgagagctgcagggtgggtgggcccctggctgtgctgggcccttctcgatcatctgaggacctggccggccccctcccttcctcagtctcttcctcctctacaacctcctccaagccgaagctcaagaagcgcttttccctgcgttcagtgggtcgctctgtccgaggctcagtccgtggcatcctgcagtggcgggggaccgttgaccctccctcctccgctgggcccctggagacctcgtcaggccccccagtcttaggtggaaacagcaactccaactcctctggcggggctgggaccgttggtaggggactggtcagtgatggaacgtcccctggggaaagatggactcaccgttttgagaggctgagactcagtcggggagggggcgccttgaaggatggagcagggatggtgcagagggaagagctgctgagtttcatgggggctgaggaggcagcccctgacccagccggagtgggccggggaggaggggtggctgggcctccttcagggggaggagggcagcctcagtggcagaagtgtcgcctgctgcttcgaagtgaaggagaaggaggaggaggaagtcgcctggagttctttgtaccacccaaggcctctcggccccgactcagcatcccctgctcttctatcacagacgtccggacaaccacagccctggagatgcctgaccgggagaacacgtttgtggttaaggtggaaggtccatccgagtatatcatggagacagtggatgcccagcatgtgaaggcctgggtgtctgacatccaagaatgcctgagcccaggaccctgccctgctaccagtccccgccccatgaccctccctctggcccctgggacctcattccttacaagggagaacacagacagcctggagctgtcctgcctgaatcactcggagagtctacccagccaggacctgctgcttggacccagcgagagcaatgaccgcctgtcgcagggggcatatgggggcctctcagaccgcccctcggcatccatctcccccagctctgcctccattgccgcctcccattttgactcgatggaactgcttcccccagagttgcccccccgcatccccattgaagagggacccccaacagggacagttcatcccctctcagccccctaccctcccttggacactccggaaacagccacagggtccttcctgttccagggggagccagagggcggtgagggggaccagcccctctcagggtatccttggttccacgggatgctctctcggctcaaggctgcacagttggtgctgactggcggcactggctcccacggtgtcttcctggtgcgccagagtgagacaaggcggggtgaatacgtcctcaccttcaacttccagggcaaggccaagcacctgcgtttgtcgctgaacgaggagggtcagtgccgggtccagcacctgtggttccagtccattttcgatatgctcgagcacttccgggtgcaccccatccctttggagtcgggaggctccagtgatgttgtccttgtcagctatgtcccatcctcccagcgacagcagggtgagcagagcaggtctgcaggggaggaggtgcccgtgcacccaagaagtgaggccgggagcaggctgggagccatgcgggggtgtgcgagggagatggatgccaccccgatgcctcctgcaccctcatgcccttcggagcgagtgactgtgtaaccgaccacctcccatgacccaccccagccccctgaacccccttcatggacagatcccccacagcctggggcagaagaggcgtcgagggcgccagaagtggcggcagcagcagccgcagcagccaaagagaggcaagagaaagagaaagcgggcggtggaggggtcccggaagagctggtccccgtggttgagctggtccccgtggttgaattggaagaggccatagccccaggctcagaggcccagggcgctgggtctggtggggacgcgggggtgcccccaatggtgcagctgcagcagtcaccactagggggtgatggagaggaagggggccaccccagggccattaacaaccagtactccttcgtgtgagccaaccccacccgctccaccctttttaaaccccccagccctgctcgtgagattgggctgggtagggacagaggaggccgaaatccctcccccatgcttcctgacccttgttggccaagggcatctttgatggtacaagcagaggctcgggagaggctcccgtcacacactacaggtcccctccccagggcaggggatttgggctccatgagctccttgaggggctcttctggtcagccccaccctgggggccatttccccattaactacccccagcccgaggcagggtgagggggaagggctgtcagttacattaaggtggttgttgttgttgttttaaacaaaatggagaagcataaataaataaaaaggtttatctcggttctatcgtg

SEQ ID NO: 27888 - DNA, 3134 bp, Homo sapiens
  source 1..3134: mol_type = unassigned DNA
aagtaccttttccctctccgcgacccggccctggcgcccgagaggattcctgggtgggggtgggcgtggagggccgggggctggagaggcactcggccccggagagtgcagcagacagggctggtcccgaggtggatgcggccccggaaaatgggcggctggggggtgtccagggagtagggtcggatcggagtatatggaccaccgggcccggagggtccgagccgagagcggagcctgcaccctccacctcccgcccttcgggaaatatcagaactgagccaggagctgctgccgcccacccctcgtcttctggctgcctccctctttgtgccccacaggctccccctctccacctcctggggcccatcatgaatggtgccccttccccagaggacggggcctccccctcgtctcccccgctgcccccacccccgccccctagttggcgggagttctgtgagtcccacgcccgggctgcggctctggactttgcccgccgttttcgcctctacctggcctcccacccccaatatgcggggcccggggccgaggctgccttctcccgccgttttgctgagctcttcctgcagcactttgaagccgaggtggcccgggcctctggctccctgtcgccacccatcctggctcccctgagccctggtgcggagatttcgccacatgacctgtcccttgagagctgcagggtgggtgggcccctggctgtgctgggcccttctcgatcatctgaggacctggccggccccctcccttcctcagtctcttcctcctctacaacctcctccaagccgaagctcaagaagcgcttttccctgcgttcagtgggtcgctctgtccgaggctcagtccgtggcatcctgcagtggcgggggaccgttgaccctccctcctccgctgggcccctggagacctcgtcaggccccccagtcttaggtggaaacagcaactccaactcctctggcggggctgggaccgttggtaggggactggtcagtgatggaacgtcccctggggaaagatggactcaccgttttgagaggctgagactcagtcggggagggggcgccttgaaggatggagcagggatggtgcagagggaagagctgctgagtttcatgggggctgaggaggcagcccctgacccagccggagtgggccggggaggaggggtggctgggcctccttcagggggaggagggcagcctcagtggcagaagtgtcgcctgctgcttcgaagtgaaggagaaggaggaggaggaagtcgcctggagttctttgtaccacccaaggcctctcggccccgactcagcatcccctgctcttctatcacagacgtccggacaaccacagccctggagatgcctgaccgggagaacacgtttgtggttaaggtggaaggtccatccgagtatatcatggagacagtggatgcccagcatgtgaaggcctgggtgtctgacatccaagaatgcctgagcccaggaccctgccctgctaccagtccccgccccatgaccctccctctggcccctgggacctcattccttacaagggagaacacagacagcctggagctgtcctgcctgaatcactcggagagtctacccagccaggacctgctgcttggacccagcgagagcaatgaccgcctgtcgcagggggcatatgggggcctctcagaccgcccctcggcatccatctcccccagctctgcctccattgccgcctcccattttgactcgatggaactgcttcccccagagttgcccccccgcatccccattgaagagggacccccaacagggacagttcatcccctctcagccccctaccctcccttggacactccggaaacagccacagggtccttcctgttccagggggagccagagggcggtgagggggaccagcccctctcagggtatccttggttccacgggatgctctctcggctcaaggctgcacagttggtgctgactggcggcactggctcccacggtgtcttcctggtgcgccagagtgagacaaggcggggtgaatacgtcctcaccttcaacttccagggcaaggccaagcacctgcgtttgtcgctgaacgaggagggtcagtgccgggtccagcacctgtggttccagtccattttcgatatgctcgagcacttccgggtgcaccccatccctttggagtcgggaggctccagtgatgttgtccttgtcagctatgtcccatcctcccagcgacagcagggccgggagcaggctgggagccatgcgggggtgtgcgagggagatggatgccaccccgatgcctcctgcaccctcatgcccttcggagcgagtgactgtgtaaccgaccacctcccatgacccaccccagccccctgaacccccttcatggacagatcccccacagcctggggcagaagaggcgtcgagggcgccagaagtggcggcagcagcagccgcagcagccaaagagaggcaagagaaagagaaagcgggcggtggaggggtcccggaagagctggtccccgtggttgagctggtccccgtggttgaattggaagaggccatagccccaggctcagaggcccagggcgctgggtctggtggggacgcgggggtgcccccaatggtgcagctgcagcagtcaccactagggggtgatggagaggaagggggccaccccagggccattaacaaccagtactccttcgtgtgagccaaccccacccgctccaccctttttaaaccccccagccctgctcgtgagattgggctgggtagggacagaggaggccgaaatccctcccccatgcttcctgacccttgttggccaagggcatctttgatggtacaagcagaggctcgggagaggctcccgtcacacactacaggtcccctccccagggcaggggatttgggctccatgagctccttgaggggctcttctggtcagccccaccctgggggccatttccccattaactacccccagcccgaggcagggtgagggggaagggctgtcagttacattaaggtggttgttgttgttgttttaaacaaaatggagaagcataaataaataaaaaggtttatctcggttctatcgtg

SEQ ID NO: 27889 - DNA, 1532 bp, Homo sapiens
  source 1..1532: mol_type = unassigned DNA
cttcagcgacgggaaagggggtcctgacgcctgcgcggaaccgggctgggcgctcgtcgcgtagtgggtgggggcgcagggagcgggagccgccgccgccgccgccgccgccggagctaacctcggggaccgagatgcagacgtccggacaaccacagccctggagatgcctgaccgggagaacacgtttgtggttaaggtggaaggtccatccgagtatatcatggagacagtggatgcccagcatgtgaaggcctgggtgtctgacatccaagaatgcctgagcccaggaccctgccctgctaccagtccccgccccatgaccctccctctggcccctgggacctcattccttacaagggagaacacagacagcctggagctgtcctgcctgaatcactcggagagtctacccagccaggacctgctgcttggacccagcgagagcaatgaccgcctgtcgcagggggcatatgggggcctctcagaccgcccctcggcatccatctcccccagctctgcctccattgccgcctcccattttgactcgatggaactgcttcccccagagttgcccccccgcatccccattgaagagggacccccaacagggacagttcatcccctctcagccccctaccctcccttggacactccggaaacagccacagggtccttcctgttccagggggagccagagggcggtgagggggaccagcccctctcagggtatccttggttccacgggatgctctctcggctcaaggctgcacagttggtgctgactggcggcactggctcccacggtgtcttcctggtgcgccagagtgagacaaggcggggtgaatacgtcctcaccttcaacttccagggcaaggccaagcacctgcgtttgtcgctgaacgaggagggtcagtgccgggtccagcacctgtggttccagtccattttcgatatgctcgagcacttccgggtgcaccccatccctttggagtcgggaggctccagtgatgttgtccttgtcagctatgtcccatcctcccagcgacagcagggccgggagcaggctgggagccatgcgggggtgtgcgagggagatggatgccaccccgatgcctcctgcaccctcatgcccttcggagcgagtgactgtgtaaccgaccacctcccatgacccaccccagccccctgaacccccttcatggacagatcccccacagcctggggcagaagaggcgtcgagggcgccagaagtggcggcagcagcagccgcagcagccaaagagaggcaagagaaagagaaagcgggcggtggaggggtcccggaagagctggtccccgtggttgagctggtccccgtggttgaattggaagaggccatagccccaggctcagaggcccagggcgctgggtctggtggggacgcgggggtgcccccaatggtgcagctgcagcagtcaccactagggggtgatggagaggaagggggccaccccagggccattaacaaccagtactccttcgtgtgagcc

SEQ ID NO: 27890 - DNA, 1488 bp, Homo sapiens
  source 1..1488: mol_type = unassigned DNA
aaggccggttctctatggtcgacatcgcccctttgtcccgaatttcctccgggaggacgctctggtgggatccaagcacttcccccgctgcgtctgtggtcgcttttaggtgcaactggagaaggcactgaagccctacgagattcacaccgtcttcggtctcctggggtcggcgccgagtgggaggatggcggaagcctctcggccccgactcagcatcccctgctcttctatcacagacgtccggacaaccacagccctggagatgcctgaccgggagaacacgtttgtggttaaggtggaaggtccatccgagtatatcatggagacagtggatgcccagcatgtgaaggcctgggtgtctgacatccaagaatgcctgagcccaggaccctgccctgctaccagtccccgccccatgaccctccctctggcccctgggacctcattccttacaagggagaacacagacagcctggagctgtcctgcctgaatcactcggagagtctacccagccaggacctgctgcttggacccagcgagagcaatgaccgcctgtcgcagggggcatatgggggcctctcagaccgcccctcggcatccatctcccccagctctgcctccattgccgcctcccattttgactcgatggaactgcttcccccagagttgcccccccgcatccccattgaagagggacccccaacagggacagttcatcccctctcagccccctaccctcccttggacactccggaaacagccacagggtccttcctgttccagggggagccagagggcggtgagggggaccagcccctctcagggtatccttggttccacgggatgctctctcggctcaaggctgcacagttggtgctgactggcggcactggctcccacggtgtcttcctggtgcgccagagtgagacaaggcggggtgaatacgtcctcaccttcaacttccagggcaaggccaagcacctgcgtttgtcgctgaacgaggagggtcagtgccgggtccagcacctgtggttccagtccattttcgatatgctcgagcacttccgggtgcaccccatccctttggagtcgggaggctccagtgatgttgtccttgtcagctatgtcccatcctcccagcgacagcagggtgagcagagcaggtctgcaggggaggaggtgcccgtgcacccaagaagtgaggccgggagcaggctgggagccatgcgggggtgtgcgagggagatggatgccaccccgatgcctcctgcaccctcatgcccttcggagcgagtgactgtgtaaccgaccacctcccatgacccaccccagccccctgaacccccttcatggacagatcccccacagcctggggcagaagaggcgtcgagggcgccagaagtggcggcagcagcagccgcagcagccaaagagaggcaagagaaagagaaagcgggcggtggaggggtcccggaagagctggt

SEQ ID NO: 27891 - DNA, 5406 bp, Homo sapiens
  source 1..5406: mol_type = unassigned DNA
cccgggccaccgcctccgcccggctgcccgcccggactgtcgcggcccgcggtggcgacggcggccgctgcaaagtttccccggcggcggcggcccgggggcgcatcctcccgcaactgtcaagcgctggcggcggaaatgatgaggcgctggccattttccgagcccgggtttcctgcctgagccccgctcgagcgagccgcgagcgaggagccggcgggcgggagaggacgcgcccagggcgggggcccgcccgccccctcgggatttcgagggcccgggggcgcgcgacgccatgggccggccgggcccagagctcctgtctctcagcccggccgcaccacctgggtctccgccatgaacgggcctgccctgcagccctcctcgccctcttccgcgccctcagcctccccggcggcggccccgcggggctggagcgagttctgtgagttgcacgccgtagcggcggcccgggagctggcccgccagtactggctgttcgcccgggagcatccgcagcacgcgccgctgcgcgccgagctggtgtcgctgcagttcaccgacctcttccagcgctacttctgccgcgaggtgcgcgacggacgggcgccgggccgcgactaccgggacacaggccgtgggcccccagccaaggccgaggcgtccccggagccaggccccggccccgccgcccctggcctgcccaaggcccgcagctctgaggagctggccccgccgcggccgcccgggccctgctccttccagcactttcgccgcagcctccgccacatcttccgccgccgctcggccggggagctgccagcggcccacaccgctgccgcccccgggacccccggagaggctgctgagacccccgcccggcctggcctggccaagaagttcctgccctggagcctggcccgggagccgccacccgaggcgctgaaggaggcggtgctgcgctacagcctggccgacgaggcctccatggacagcggggcacgctggcagcgcgggaggctggcgctgcgccgggccccgggccccgatggccccgaccgcgtgctggagctcttcgacccacccaagagttcaaggcccaagctacaagcagcttgctccagcatccaggaggtccggtggtgcacacggcttgagatgcctgacaacctttacacctttgtgctgaaggtgaaggaccggacagacatcatctttgaggtgggagacgagcagcagctgaattcatggatggctgagctctcggagtgcacaggccgagggctggagagcacagaagcagagatgcatattccctcagccctagagcctagcacgtccagctccccaaggggcagcacagattcccttaaccaaggtgcttctcctggggggctgctggacccggcctgccagaagacggaccatttcctgtcctgctacccctggttccacggccccatctccagagtgaaagcagctcagctggttcagctgcagggccctgatgctcatggagtgttcctggtgcggcagagcgagacgcggcgtggggaatacgtgctcactttcaactttcaggggatagccaagcacctgcgcctgtcgctgacagagcggggccagtgccgtgtgcagcacctccactttccctcggtcgtggacatgctccaccacttccagcgctcgcccatcccactcgagtgcggcgccgcctgtgatgtccggctctccagctacgtggtagtcgtctcccaaccaccaggttcctgcaacacggtcctcttccctttctcccttcctcactgggattcagagtcccttcctcactggggttcagagttgggccttccccaccttagttcttctggctgtccccgggggctcagcccagagggtctcccagggcgatcctcaccccccgagcagatcttccacctggtgccttcgcccgaagaactggccaacagcctgcagcacctggagcatgagcctgtgaatcgagcccgggactcggactacgaaatggactcatcctcccggagccacctgcgggccatagacaatcagtacacacctctctgaccagtgaggaattccaggcctcaacagctgcccttgaggagcacaggcagaagtgtgaacttgtgaatgtaattgatctttccttccttccagagaaagatttaagggacactgttaactgctcgtgccagtttggaagtgacccttctattaggcctgttgaagggccctcctgtaggtttcatctatccacctggctttctccttattgtttacagatgtagttcttgttagaggatgccgctagctcctgcccggggtccctatgcccagtccccgttactcttagagaaaggagttggggtgagggccagagctggcagtggaaacttgttctctttttcactgacactgtcacagcggatgacagactttctacggggaggagggggggatcatcaggaagcccagaacactaacaagcggttctcccatctaccgtcagtccacatggcaggtctgctgtgtccacaccacagatgaccacatctaatcctgcttctactctcagctttaggacaaaagctctgtcagaggcacaagctgaaggtcaaaaatgatttaaaacattttacctcagactaatttctttaaaggattcaggttcaaaacttaaccactgcttatttcagtgcactgtttcaactaacacccatgctatttttgtagtcagaaacagctatgcaaaccctacctaatttacagtctgagccagcatgctggcttgtctactgcatcctcgggacagtcacctgccactgagtggccactgtccttcctaaatgtcaagaagtgaagtatgtcaccctttcagggaaattcaggcaattactgaaataggagggtggcaagaacagttctatcctggtgccttacgaataaaaaactggattctggtttacagcagctttacagtgatagttaaattaactggggctaggggaagagcaagcaaaaagggaagaaggactcctaggccctttctagtaaatccttcagcaacaaggctggcttggtgccctccaagcatctaatggcttattaaattatcccacaagtgggttttaggctccttttttgagccaaaatggaagctgggaatctggtgccataactaatgagaaactcctttaatagcccacaatcagtgttctgttctagctggctactgcttcactggattgagaatctatctatctccttgcacacatgggcacacacaatctccaccatccagggaggtcctgaagtcaaatctctatctatacaagtgatacaattcatagggggctggctcctcccagaacctgtctggaggctcagaaacgggggcagtgacagtggagtcagctgctcttgggtgccagcagagccattcagtacaacccccaggctcacagcagtggcttctaggaaactgggagtttagatcagctttacagatacatcgatcagaggctaaaatgaaacctcagcctaaaactcataggactgactgcctgggaggagggttaggtctgcttcttccacttatacttagtctctgtgctccaagaggtcaaatttttgcttctagaatttccttggggtctttcagagggtgggggaacaaacccctatgcacttttcttttttttttttttgagatggagtttctcttgtcaaccgggctggagtgcagtggtgcaatcttggctcactgcaacctccaccttcctggttcaagcgattctgcctcgacctctcaagtagctgggattacaagcaccagccaccatgcctggctaattttgtatttttagtagagacagggtttcaccatgttggccaggctggtctcgaatgtctgacctcaggtgatccacccgccttggcctcccaaagtgctgggattacaggcgcgagccaccgcgcccagcctacaccacttttagtaccaacactcttgggtgatttcatggaccctaaagcagacctgacactgatccagatttgcagtccatttttaaggacacctgtctttatttcctcaaagtcaagcagctttctctggaaaatgaatgctaattagtgtgaaccaaaagagtaagtaagagtctgaagtttttttaaaggagaaagcttattatggaaagtcactggtcctcccctccgcacaggaaaggtacccagtagataatgaaccaaattaagttccctccctccagccagaagttaaacatctgggatatgacgtcttcatgccaggggcactcatttcttagcagcctctctacatacatctctcaggtggtgccaagaggcacaccaggtagagcaaacttagcagctctgactaacaggctgcaaagtgcaagttcagattctgtggcagagatttggaaggcacccacctccagactgcttcccgtccaagttaccaggacagctcaaaaacatgctgacagaaaactcccatggctctaggaagaagtgacactaagccaacacctttctttatgtgggagcagaatcagctgatgaaggggtgggcagcagtgtggggcaggcaccccactggctgcagctagcccaccataggcacagcacatcccaccactctccttccagtcctgaccaggccccagccggcaacttctaccgagagccatggctcaacaccaaactggacagtagacatcatgatccctccagttagctctaattacagaccccaccagtacagcttgacagctcccggcaccatcccttccttcatctgacttattgaacttttacaaactaacagtcaccagcaccaaagaattaagtcaactaacctgccttgaattttagaccagcaatccatatggctttatctggtataaatcttctgcctttgatcatttctggaccgtaggaaaaaggaatagcaatcattaaaatcttgggccagagaacactatttttacataacagtttcttaacctaaagtcaaggccttggactcttccctgagggttgcctgagattccttcatgctttctattcaggactaagtcccttactgcaaatgtgttagctctaacatctcccacaagctagaggaacttgcgagtatattaacaaggacacatctgacatcctgtgtttggttagaatatacagcacattgtgataacataaagtggattcatcttgtatcattataggcagaaggtatttggcaaatttttatgtattgttttatgtactgtacaagtaacttattcttgaataatgcaaattttgctataatgtacaaattgctatatgtgaattaaaaagttttcagaatcttga

SEQ ID NO: 27892 - DNA, 2062 bp, Homo sapiens
  source 1..2062: mol_type = unassigned DNA
atagtaatgagagtccgtgccgggtggagctcagaaggacatgggattcccggtgctgtgccgtggctggaggaggacctggcctggctgtgccagttggctgggagcccctccaccccagaagcccttgctctcacctcttcttctgaatcatcgttcttcgaagagttcaaggcccaagctacaagcagcttgctccagcatccaggaggtccggtggtgcacacggcttgagatgcctgacaacctttacacctttgtgctgaaggtgaaggaccggacagacatcatctttgaggtgggagacgagcagcagctgaattcatggatggctgagctctcggagtgcacaggccgagggctggagagcacagaagcagagatgcatattccctcagccctagagcctagcacgtccagctccccaaggggcagcacagattcccttaaccaaggtgcttctcctggggggctgctggacccggcctgccagaagacggaccatttcctgtcctgctacccctggttccacggccccatctccagagtgaaagcagctcagctggttcagctgcagggccctgatgctcatggagtgttcctggtgcggcagagcgagacgcggcgtggggaatacgtgctcactttcaactttcaggggatagccaagcacctgcgcctgtcgctgacagagcggggccagtgccgtgtgcagcacctccactttccctcggtcgtggacatgctccaccacttccagcgctcgcccatcccactcgagtgcggcgccgcctgtgatgtccggctctccagctacgtggtagtcgtctcccaaccaccaggttcctgcaacacggtcctcttccctttctcccttcctcactgggattcagagtcccttcctcactggggttcagagttgggccttccccaccttagttcttctggctgtccccgggggctcagcccagagggtctcccagggcgatcctcaccccccgagcagatcttccacctggtgccttcgcccgaagaactggccaacagcctgcagcacctggagcatgagcctgtgaatcgagcccgggactcggactacgaaatggactcatcctcccggagccacctgcgggccatagacaatcagtacacacctctctgaccagtgaggaattccaggcctcaacagctgcccttgaggagcacaggcagaagtgtgaacttgtgaatgtaattgatctttccttccttccagagaaagatttaagggacactgttaactgctcgtgccagtttggaagtgacccttctattaggcctgttgaagggccctcctgtaggtttcatctatccacctggctttctccttattgtttacagatgtagttcttgttagaggatgccgctagctcctgcccggggtccctatgcccagtccccgttactcttagagaaaggagttggggtgagggccagagctggcagtggaaacttgttctctttttcactgacactgtcacagcggatgacagactttctacggggaggagggggggatcatcaggaagcccagaacactaacaagcggttctcccatctaccgtcagtccacatggcaggtctgctgtgtccacaccacagatgaccacatctaatcctgcttctactctcagctttaggacaaaagctctgtcagaggcacaagctgaaggtcaaaaatgatttaaaacattttacctcagactaatttctttaaaggattcaggttcaaaacttaaccactgcttatttcagtgcactgtttcaactaacacccatgctatttttgtagtcagaaacagctatgcaaaccctacctaatttacagtctgagccagcatgctggcttgtctactgcatcctcgggacagtcacctgccactgagtggccactgtccttcctaaatgtcaagaagtgaagtatgtcaccctttcagggaaattcaggcaattactgaaataggagggtggcaagaacagttctatcctggtgccttacgaataaaaaactggattctggttt

SEQ ID NO: 27893 - DNA, 3227 bp, Homo sapiens
  source 1..3227: mol_type = unassigned DNA
agaagcccgctcgcccgctgccgagtggcagtcacgactgtgaggtcgccggcgaggtggccgcgggcgcggcggggcggggcagggcgcactctcctccacgcccgcggaagtgccggggaggtgggcagggcggggagggagagggagcgaggctggaggagggcacgtcggcgcctcggcgaggatgggagtccccaggacccggagctgagcagcctggcgcgcggcgggcagggcgcgcaggacagaagcctcgctgttcctccgggagcccaacaccgttcccgcgcggccacgatgatccctccgagcagcccccgcgaggacggcgtggacgggctgcccaaggaggcggtgggcgccgagcaaccgccctctcctgcatccaccagcagccaggaatccaagctccagaaactaaaacgatcactttctttcaagaccaagagtttacggagcaaaagtgctgacaacttcttccagcgaaccaacagcgaagacatgaaactgcaagcacacatggtggctgagatcagccccagctccagcccactccctgctccaggaagcctgacgtccacacccgccagggctggtctgcatccaggtggcaaggctcatgcctttcaggaatacatcttcaagaagcccactttctgtgatgtctgcaaccacatgatagtgggaacaaatgctaagcatggactgcgctgcaaagcctgtaagatgagcatccaccacaagtgcacagatggcctggcaccccagcggtgcatgggcaagctgccaaaggggtttcggcgttactacagctcccccttgctcattcatgaacagtttggctgcattaaagaagttatgcccattgcctgtggcaataaggtggaccctgtctacgagaccctccgcttcggcacctccctggcccagaggacaaagaagggcagctccggcagtggctctgactcacctcacagaacctctacttcagatcttgtggaggttcctgaggaagccaatgggccaggaggcgggtatgacctaaggaaacgcagcaacagcgtgtttacatatccagaaaatggcactgatgatttcagagatccagcgaagaacataaaccaccagggatctctttccaaagacccattacagatgaacacctatgttgccttgtacaaatttgtaccacaggagaatgaagatttggaaatgaggccaggagacataattactcttttagaggattccaatgaagactggtggaaagggaaaattcaagacagaattggcttctttccagccaactttgttcagagactacaacaaaatgagaagatttttagatgtgttagaaccttcattgggtgtaaggaacaggggcagataacactgaaagagaatcagatctgcgtgagttctgaagaagaacaagatggttttatcagagtcctcagtggaaaaaagaaaggcctcatcccccttgatgtactagaaaacatctgattgctggctcctcctccgtttgcagtaggcaagctctgctgcgatgcctctgcctcatctcacactgcgtcaacccaaaggagctgccgcactgacccagccccccaggaaacagtgagacaagaatcaagtatctgagactgtggagtaatagccacaaaacagagggcccactgcacagcatatccaggctgccacaggtggggacgaggctgagagagtcagcaggcagagccagatgccatgcttggcagcagcagtaggactataaaccacagctgtcccccaggatcccactcctttcctgtctgtgtggtgtaagttaacacactggagtgtgctccagtttgcagggtagcccagtgcaaggttcagatccatgtagctaagtattatcctgcttccagacctatgtcaccagtaccaatcagtcagtgtcatcacatttcaggccccaagcaatctctgtgcaaagcatcagaaagacctgcttcccagcccccagcattccagtgctctccaggcttcctctctttgtgattgtgctgtccagagtgtccagcttgttctttctttctcttcagtcctctgagtacatctggtggtgtgcattagatgtgagggctatgttgacatggcatcacctccaaagacctgacctgcctaaagactgatgacaggccatccttcctgctgttctaggtactggcctgggtgacagagcaggacatgagacatagatacagtggggaggagaagtggggaaaggtggagcagagagttcttacttattgaagattatacagccctttcggttatgaagtccctgcttgaaggcaatggacctggggaagagactatcacaaaaagtctccattttcattttacatcctctctattggaggcagcacttttccctcatgctgtcctataggactccactttgaaggttgtgcctacgttgcagggaactaggaacatggaggggaaccaacaacagcatcttagaagaaatgtagccaaattggagtccattcttctttagggcagtatatgaaatcctagcagatgtaaaatggaaaagaatcctaatgcttcttccttcagaaagtagaggaactaggggcccaattagcatcatctaggggaatctctattactctgtacttatactaatgtttacaagaatgcaatatactgtgatgccttcctactcaagcctcctagcattcaaacttccatcctattagtcattaacatggttaaacttcaattcacaatcaccttggaatcaatgtcagtttgatttattttgttacagagcaataaaatcattagaacaatggtttttaaaagacttaagtggatgcatcctatgcatgtaagcattatttcccaaaccaaagcatcattcatctccatttatttcttttgttcccgctcagtgtgaagttgggaactgagaggggatggctgctggtttcacagaagtttggatgccttactcttatcttaaagccagcatccagaatttcctccctctctgatgccacatgcaaaaccaggtgtacgatgtcaagatggattctttgagagccagggtagatcatatgactgcctttctgtaaaattggatgcctagtacaaatgctctttgcctctaattcagtattccatttaataaaaacaatacagtggctggaaaggagcatcagaaa

SEQ ID NO: 27894 - DNA, 1630 bp, Homo sapiens
  source 1..1630: mol_type = unassigned DNA
gcgaggatgggagtccccaggacccggagctgagcagcctggcgcgcggcgggcagggcgcgcaggacagaagcctcgctgttcctccgggagcccaacaccgttcccgcgcggccacgatgatccctccgaggcggtgggcgccgagcaaccgccctctcctgcatccaccagcagccaggaatccaagctccagaaactaaaacgatcactttctttcaagaccaagagtttacggagcaaaagtgctgacaacttcttccagcgaaccaacagcgaagacatgaaactgcaagcacacatggtggctgagatcagccccagctccagcccactccctgctccaggaagcctgacgtccacacccgccagggctggtctgcatccaggtggcaaggctcatgcctttcaggaatacatcttcaagaagcccactttctgtgatgtctgcaaccacatgatagtgggaacaaatgctaagcatggactgcgctgcaaagcctgtaagatgagcatccaccacaagtgcacagatggcctggcaccccagcggtgcatgggcaagctgccaaaggggtttcggcgttactacagctcccccttgctcattcatgaacagtttggctgcattaaagaagttatgcccattgcctgtggcaataaggtggaccctgtctacgagaccctccgcttcggcacctccctggcccagaggacaaagaagggcagctccggcagtggctctgactcacctcacagaacctctacttcagatcttgtggaggttcctgaggaagccaatgggccaggaggcgggtatgacctaaggaaacgcagcaacagcgtgtttacatatccagaaaatggcactgatgatttcagagatccagcgaagaacataaaccaccagggatctctttccaaagacccattacagatgaacacctatgttgccttgtacaaatttgtaccacaggagaatgaagatttggaaatgaggccaggagacataattactcttttagaggattccaatgaagactggtggaaagggaaaattcaagacagaattggcttctttccagccaactttgttcagagactacaacaaaatgagaagatttttagatgtgttagaaccttcattgggtgtaaggaacaggggcagataacactgaaagagaatcagatctgcgtgagttctgaagaagaacaagatggttttatcagagtcctcagtggaaaaaagaaaggcctcatcccccttgatgtactagaaaacatctgattgctggctcctcctccgtttgcagtaggcaagctctgctgcgatgcctctgcctcatctcacactgcgtcaacccaaaggagctgccgcactgacccagccccccaggaaacagtgagacaagaatcaagtatctgagactgtggagtaatagccacaaaacagagggcccactgcacagcatatccaggctgccacaggtggggacgaggctgagagagtcagcaggcagagccagatgccatgcttggcagcagcagtaggactataaaccacagctgtcccccaggatcccactcctttcctgtctgtgtggtgtaagttaacacactggagtgtgct

SEQ ID NO: 27895 - DNA, 4422 bp, Homo sapiens
  source 1..4422: mol_type = unassigned DNA
gtggccataatagcaggcaactttgagctggcagaatacatcaagaaccacaaggaaacagacattgtgcccttccgagaggccccggcgtactccaaccgccggcggcggccccccaacacgctggccgccccccgggtcctgctgcgctccaacagtgacaacaacctcaatgccagcgctcccgactgggccgtctgctccacggccacctcgcaccgcagcctgtcaccccagctgctgcagcagatgcccagcaagcccgagggggccgcgaagaccattgggagctacgtgcccgggccccgcagccggtccccatcgctcaacaggctgggcggcgcaggcgaggacggcaagaggccgcagcctctctggcatgtcgggtcgccttttgctcttggtgccaacaaggactcactctcggccttcgagtacccggggcccaagcggaagctctacagtgccgtgcccgggaggctcttcgtcgctgtcaagccataccaaccccaagtggacggcgagatcccccttcaccgcggtgacagggtcaaagttctgagcatcggtgaagggggcttctgggaaggcagcgcccgcggccacatcggatggtttccggcggagtgcgtggaggaggtccagtgtaagcccagggacagccaggcagaaacccgcgctgaccgcagcaagaagcttttcaggcactacaccgtgggctcctatgacagcttcgacacttccagtgactgcattattgaggagaagacggtggtcctgcagaaaaaagacaatgagggctttggattcgtgcttcgaggggccaaagctgacacacccattgaagaattcacaccaacaccggctttcccagccctacagtacctggagtccgtggatgaaggtggggtggcgtggcaagccggactaaggaccggggacttcttgattgaggttaacaatgagaatgttgtcaaagtcggccacaggcaggtggtgaacatgatccggcagggagggaatcacctggtccttaaggtggtcacggtgaccaggaatctggaccccgacgacaccgccaggaagaaagctcccccgcctccaaagcgggcaccgaccacagccctcaccctgcgctccaagtccatgacctcggagctggaggagctcgtggataaagataaacccgaggagatagtcccggcctccaagccctcccgcgctgctgagaacatggctgtggaaccgagggtggcgaccatcaagcagcggcccagcagccggtgcttcccggcgggctcagacatgaactctgtgtacgaacgccaaggaatcgccgtgatgacgcccactgttcctgggagcccaaaagccccgtttctgggcatccctcgaggtacgatgcgaaggcagaaatcaatagacagcagaatctttctatcaggaataacagaggaagagcggcagtttctggctcctccaatgctgaagttcaccagaagcctgtccatgccggacacctctgaggacatcccccctccaccgcagtctgtgcccccgtccccaccaccaccttccccaaccacttacaactgccccaagtccccaactccaagagtctacgggacgattaagcctgcgttcaatcagaattctgccgccaaggtgtcccccgccaccaggtccgacaccgtggccaccatgatgagggagaaggggatgtacttcaggagagagctggaccgctactccttggactctgaagacctctacagtcggaatgccggcccgcaagccaacttccgcaacaagagaggccagatgccagaaaacccatactcagaggtggggaagatcgccagcaaagccgtctacgtccccgccaagcccgccaggcggaaggggatgctggtgaagcagtccaacgtggaggacagccccgagaagacgtgctccatccctatcccgaccatcatcgtgaaggagccgtccaccagcagcagcggcaagagcagccagggcagcagcatggagatcgacccccaggccccggagccaccgagccagctgcggcctgacgaaagcctgaccgtcagcagcccctttgccgccgccatcgccggagccgtccgcgaccgtgagaagcggctggaagccaggaggaactccccggccttcctctccacagacctgggggatgaggatgtgggcctggggccacccgcccccaggacgcggccctccatgttccccgaggagggggattttgctgacgaggacagcgctgagcagctgtcatcccccatgccgagtgccacgcccagggagcccgaaaaccatttcgtgggtggcgccgaggccagtgctccgggtgaggctgggaggccgctgaattccacgtccaaagcccaggggcccgagagcagcccagcagtgccctccgcgagcagcggcacagccggccccgggaattatgtccacccactcacagggcggctgcttgatcccagctccccgctggccctggcactctccgcaagggaccgagccatgaaggagtctcaacagggacccaaaggggaggcccccaaggccgacctcaacaaacctctttacattgataccaaaatgcggcccagcctggatgccggcttccctacggtcaccaggcagaacacccggggacccctgaggcggcaggagacggagaacaagtacgagaccgacctgggccgagaccggaaaggcgatgacaagaagaacatgctgatcgacatcatggacacgtcccagcagaagtcggctggcctgctgatggtgcacaccgtggacgccactaagctggacaacgccctgcaggaagaggacgagaaggcagaggtggagatgaagccagacagctcgccgtccgaggtgccagaaggtgtttccgaaaccgaaggtgctttacagatctccgctgcccccgagcccaccaccgtgcccggcagaaccatcgtcgcggtgggctccatggaagaggcggtgattttgccattccgcatccctcctccccctctggcatccgtggacttggatgaggattttatttttacagagccattgcctcctcccctggaatttgcaaatagttttgatatccccgatgaccgggcagcttctgtcccggctctctcagacttagtgaagcagaagaaaagcgacacccctcagtccccttcgttgaactccagccaaccaaccaactctgcagacagcaagaagccagccagtctttcaaactgtctgcctgcctcattcctgccaccccctgaaagctttgacgccgtcgccgactctgggatcgaggaggtggacagccggagtagcagcgaccaccacctcgagacgaccagcactatctccaccgtgtctagcatctccaccctgtcttccgaaggtggagagaatgtggacacctgcacagtctatgcagatgggcaagcatttatggttgacaaacccccagtacctcctaagccaaaaatgaagcccatcattcacaaaagcaatgcactttatcaagacgcgctcgtggaagaagatgtagatagctttgttatccccccgcccgctcccccgcccccgccgggcagtgcccagcctgggatggccaaggttctccagccaaggacctccaagttgtggggcgacgtcacagagatcaaaagcccgattctctcaggcccaaaggcaaacgttattagtgaattgaactctatcctacagcaaatgaaccgagagaaattggcaaagccgggggaaggactggattcaccaatgggagccaagtccgccagcctcgctccaagaagcccggagatcatgagcaccatctcaggtacacggagcacgacggtcaccttcactgttcgccccggcacctcccagcccatcaccctgcagagccggccccccgactatgaaagcaggacctcaggaacaagacgtgccccaagccctgtggtctcgccaacagagatgaacaaagagaccctgcccgcccccctgtctgctgccaccgcctctccttctcccgctctctcagatgtctttagccttccaagccagcccccttctggggatctatttggcttgaacccagcgggacgcagtaggtcgccatccccctcgatactgcaacagccaatctcaaataagccttttacaactaaacctgtccacctgtggactaaaccagatgtggccgattggctggaaagtctaaacttgggtgaacataaagaggccttcatggacaatgagatcgatggcagtcacttaccaaacctgcagaaggaggacctcatcgatcttggggtaactcgagtcgggcacagaatgaacatagaaagggctttgaaacagctgctggacagataa

SEQ ID NO: 27896 - DNA, 8987 bp, Homo sapiens
  source 1..8987: mol_type = unassigned DNA
atgccgcgcagcccaacatccagcgaggacgagatggcccagagcttctccgactactccgtggggtcggagtcagacagctccaaagaagagaccatctatgacacgatccgggccactgcggagaagccgggcggtgccaggacggaggagagccagggcaacacgctggtgatccgcgtggtcatccatgacctgcagcagacgaaatgcattcgatttaacccggatgccacagtgtgggttgcaaagcagcggatcctgtgtacattaacccagagtttgaaagatgtcctgaactacggcctgttccagccggccagcaatgggcgtgacggcaagttcctggatgaggagcggctcctgcgcgagtacccacagcccgtgggtgagggcgttccttccctggagtttcgatacaagaagcgggtgtataaacaagccagtctcgatgagaaacagttggccaagctccacacgaagaccaatctgaagaaatgcatggatcacattcagcatcgcttggtggagaagatcaccaagatgctggaccgaggcctggatcccaatttccacgacccggagaccggagagacccccctgaccttagccgctcagctggacgactctgtggaggtcatcaaagctctcaaaaatggtggagctcacctggacttccgtgccaaagatgggatgaccgccctacacaaagctgcccgagcgaggaaccaagttgccctgaagacccttttagagcttggtgcatccccagattataaagacagttacggcctcaccccgctgtatcacacagccatcgtcggaggtgatccctactgctgcgagcttctcctgcacgaacacgccactgtgtgctgcaaagatgagaacggctggcacgagatccaccagtctaggtgctggggacacatcagtgagccacaccacactctgctctctggaagtgcacgaagtcaacaaagccgaagtgcttcctctgcactccatgtctgtgctatgtattcatctttttcctgtgtcagaatctcgttgctttttcatggccgaataactgaattaaaacagtacaaaaagagcacccccttccaggtggccataatagcaggcaactttgagctggcagaatacatcaagaaccacaaggaaacagacattgtgcccttccgagaggccccggcgtactccaaccgccggcggcggccccccaacacgctggccgccccccgggtcctgctgcgctccaacagtgacaacaacctcaatgccagcgctcccgactgggccgtctgctccacggccacctcgcaccgcagcctgtcaccccagctgctgcagcagatgcccagcaagcccgagggggccgcgaagaccattgggagctacgtgcccgggccccgcagccggtccccatcgctcaacaggctgggcggcgcaggcgaggacggcaagaggccgcagcctctctggcatgtcgggtcgccttttgctcttggtgccaacaaggactcactctcggccttcgagtacccggggcccaagcggaagctctacagtgccgtgcccgggaggctcttcgtcgctgtcaagccataccaaccccaagtggacggcgagatcccccttcaccgcggtgacagggtcaaagttctgagcatcggtgaagggggcttctgggaaggcagcgcccgcggccacatcggatggtttccggcggagtgcgtggaggaggtccagtgtaagcccagggacagccaggcagaaacccgcgctgaccgcagcaagaagcttttcaggcactacaccgtgggctcctatgacagcttcgacacttccagtgactgcattattgaggagaagacggtggtcctgcagaaaaaagacaatgagggctttggattcgtgcttcgaggggccaaagctgacacacccattgaagaattcacaccaacaccggctttcccagccctacagtacctggagtccgtggatgaaggtggggtggcgtggcaagccggactaaggaccggggacttcttgattgaggttaacaatgagaatgttgtcaaagtcggccacaggcaggtggtgaacatgatccggcagggagggaatcacctggtccttaaggtggtcacggtgaccaggaatctggaccccgacgacaccgccaggaagaaagctcccccgcctccaaagcgggcaccgaccacagccctcaccctgcgctccaagtccatgacctcggagctggaggagctcgtggataaaggggttattaggaaggtatcagataaacccgaggagatagtcccggcctccaagccctcccgcgctgctgagaacatggctgtggaaccgagggtggcgaccatcaagcagcggcccagcagccggtgcttcccggcgggctcagacatgaactctgtgtacgaacgccaaggaatcgccgtgatgacgcccactgttcctgggagcccaaaagccccgtttctgggcatccctcgaggtacgatgcgaaggcagaaatcaatagacagcagaatctttctatcaggaataacagaggaagagcggcagtttctggctcctccaatgctgaagttcaccagaagcctgtccatgccggacacctctgaggacatcccccctccaccgcagtctgtgcccccgtccccaccaccaccttccccaaccacttacaactgccccaagtccccaactccaagagtctacgggacgattaagcctgcgttcaatcagaattctgccgccaaggtgtcccccgccaccaggtccgacaccgtggccaccatgatgagggagaaggggatgtacttcaggagagagctggaccgctactccttggactctgaagacctctacagtcggaatgccggcccgcaagccaacttccgcaacaagagaggccagatgccagaaaacccatactcagaggtggggaagatcgccagcaaagccgtctacgtccccgccaagcccgccaggcggaaggggatgctggtgaagcagtccaacgtggaggacagccccgagaagacgtgctccatccctatcccgaccatcatcgtgaaggagccgtccaccagcagcagcggcaagagcagccagggcagcagcatggagatcgacccccaggccccggagccaccgagccagctgcggcctgacgaaagcctgaccgtcagcagcccctttgccgccgccatcgccggagccgtccgcgaccgtgagaagcggctggaagccaggaggaactccccggccttcctctccacagacctgggggatgaggatgtgggcctggggccacccgcccccaggacgcggccctccatgttccccgaggagggggattttgctgacgaggacagcgctgagcagctgtcatcccccatgccgagtgccacgcccagggagcccgaaaaccatttcgtgggtggcgccgaggccagtgctccgggtgaggctgggaggccgctgaattccacgtccaaagcccaggggcccgagagcagcccagcagtgccctccgcgagcagcggcacagccggccccgggaattatgtccacccactcacagggcggctgcttgatcccagctccccgctggccctggcactctccgcaagggaccgagccatgaaggagtctcaacagggacccaaaggggaggcccccaaggccgacctcaacaaacctctttacattgataccaaaatgcggcccagcctggatgccggcttccctacggtcaccaggcagaacacccggggacccctgaggcggcaggagacggagaacaagtacgagaccgacctgggccgagaccggaaaggcgatgacaagaagaacatgctgatcgacatcatggacacgtcccagcagaagtcggctggcctgctgatggtgcacaccgtggacgccactaagctggacaacgccctgcaggaagaggacgagaaggcagaggtggagatgaagccagacagctcgccgtccgaggtgccagaaggtgtttccgaaaccgaaggtgctttacagatctccgctgcccccgagcccaccaccgtgcccggcagaaccatcgtcgcggtgggctccatggaagaggcggtgattttgccattccgcatccctcctccccctctggcatccgtggacttggatgaggattttatttttacagagccattgcctcctcccctggaatttgcaaatagttttgatatccccgatgaccgggcagcttctgtcccggctctctcagacttagtgaagcagaagaaaagcgacacccctcagtccccttcgttgaactccagccaaccaaccaactctgcagacagcaagaagccagccagtctttcaaactgtctgcctgcctcattcctgccaccccctgaaagctttgacgccgtcgccgactctgggatcgaggaggtggacagccggagtagcagcgaccaccacctcgagacgaccagcactatctccaccgtgtctagcatctccaccctgtcttccgaaggtggagagaatgtggacacctgcacagtctatgcagatgggcaagcatttatggttgacaaacccccagtacctcctaagccaaaaatgaagcccatcattcacaaaagcaatgcactttatcaagacgcgctcgtggaagaagatgtagatagctttgttatccccccgcccgctcccccgcccccgccgggcagtgcccagcctgggatggccaaggttctccagccaaggacctccaagttgtggggcgacgtcacagagatcaaaagcccgattctctcaggcccaaaggcaaacgttattagtgaattgaactctatcctacagcaaatgaaccgagagaaattggcaaagccgggggaaggactggattcaccaatgggagccaagtccgccagcctcgctccaagaagcccggagatcatgagcaccatctcaggtacacggagcacgacggtcaccttcactgttcgccccggcacctcccagcccatcaccctgcagagccggccccccgactatgaaagcaggacctcaggaacaagacgtgccccaagccctgtggtctcgccaacagagatgaacaaagagaccctgcccgcccccctgtctgctgccaccgcctctccttctcccgctctctcagatgtctttagccttccaagccagcccccttctggggatctatttggcttgaacccagcgggacgcagtaggtcgccatccccctcgatactgcaacagccaatctcaaataagccttttacaactaaacctgtccacctgtggactaaaccagatgtggccgattggctggaaagtctaaacttgggtgaacataaagaggccttcatggacaatgagatcgatggcagtcacttaccaaacctgcagaaggaggacctcatcgatcttggggtaactcgagtcgggcacagaatgaacatagaaagggctttgaaacagctgctggacagataaggacggctgctctccacctcgcagactgctcttgttataagtagagatgggctcgtgctgaaacatctgaatgccaagcgaagtctgtgagcatcaaccccactccatgggtttgtctcctggtacccaaagaaatactgagttgtgtccacaacatggctgggtcttcagacccctggctcaccatgtgggtgtcttgggcagtttctatcacacatgggacaaggggagggagtttttctaacatggaaaaagattctcagcctgccgcccagcatgcaggtggcctcgctttgccgggtccgagaggctccccgtcaattttgcacgggatcctagctcttgtaggcagacaccagtgcactctagatacctcctgagacctccgtcctctgctttccgggcagctctcaccaccccaggccccggcatgaggcctttcctcagtcctgtggcctctcagaggacacctgatgctcacctgcccctctttctcctgcacttggcttgcagtgagatgctcccagatgcatttgtccagtgccccatcatgggcctgaaaggcagagaaactttttcctacacagattcttttccccatctcctcctgtggtttgcatccatggctctttggccatgaggttcctggcagtgctgggagtttggatgggatcgtgcccagctttgcttagctttctttatttctgcaaatctgttagcataattccaaggtggccaagcagatgtcacatggagttagtcaaagcacaaagtcacgattccacaatggaggggagacctggccaagggagccagccagcgtgcaactgcccaagctccaggtctccaggacaagagcagttgtctgccatgagcacccatccaggatggagaataagggcttctctgcctctcagaattctttttaattgaagatgtcttgagctctgcaaagatcagagcaggtgagcatccactttgacatgaaggacaagaagacgcatggctcatggcgggcacatgcggctgccagtgagacagcgtctcctctgggagctgggcgggcacagcatcctcagttctgtgcccagccaagggtgagcatctctgctgagacagtccttttgctctcggaggccagggaagatggtacttagaggcttttcccctatcgctctgggtgtctaggaatcccaccagcttgtcttaacagtacaacagcttctttgaggacccagtgggtatggagtatagacagaacccagggttgagaacagaaggtgggcggcaggatcagagtgaaagcagaggcgtgaggagaggaaagcagggaggtctcctgggctgccaggtcagcctctctggcaaggctttcttgagccccgcccctttctttccccggagtccctccaccccataacaatacctcgaatttccaaaagaggtcaccagatgcacatgggccgcaaaacacacagtcaggcttccagcacattctcccccatttggaggatactcgaatgtcaggtttttggttttattattatttcagaactagctcagcccatctctaattataaaacatggttttgttttttttttttcctttttttcttgattaggtctggaacagctctagaatgaacacataaaatttagcaatttaaaatctttctttactgcaagtttaaatagttgtacagatagtttataagcacaatattttaagaaaaaaaagtggctggtctactaggcagcctttgtgccacttcagtgctagaaagttaaagaaaaaaaaacttttgtgatttaataatactatttctgtggaataattataaaagtatgacctttttaaatcaaccttatttggatgcatctgaaccagcagagctgtgttatattttctatctttgctagaacttcgtcattgaaggacaatttcttcaaagtggttacaattcataatgcagcagtttctccaaaaacaaaaacaaaacacacaccacacacacgcgcttttccagtcacacacccctgatgttggaaccaagtttttggaccttctgttccaaaaccttttgcaggtcaatctttgtatttgaaatgatccaatccaacttgaagtcaattgaatattaaggcgctttacttccgtgtgctttcagtttttccatcatgagatgaatgagcattactctagataaatttcaagacaggatactacaggtggcctgctgaggctgccccatattttagaaaatgtaaaaatggtggtttggccattaatttgtcttccatttgatgataccgcaaaattccgtgagtccattcctttggcatggcactttccctgggcctacagttggtattacctctgtgctcagtgccaggcaaaacactagctcaaaggagagtcaaggaaaccgctggcagacgataaccagtcgaaactcgtgacttcggtttgttgaactttggcagccagttggtgagggccagatgttattccctttcttaaagatactccaagccacatgccactaaccacaagcaagctggctgcaagactaaagagctgataacatagtttatttttacactgtcttattatagagaagtaatagacctatcagaacctgcactgaccaacaaataaacacatgttgccaagatgaatcggtctctatctctatctgcttattttggtactgaaagcaatagttcctcattcaaatcaccacccactgttctccccctttgggacatgttaggacgaggccctattccatgcccctctttaatggtggaacaaatgttaaactgctcatctaaagatcatgttgatattattccaggttttaagatcaacttttgttacatactgtaatttaaataaactgcatttacatgcctagtttctgtaatattgtgtatacaaaacccaaatctctcaaaatgtaaattatgtatacctgccaagataccttttccagggtgtctgcgcacattttaagttaattcacataatataaaaattactcaatgtgactgttgatttgctgaactttacatatcacaaagtgaattatttgtgatactttagttaataaaatggtaaatttttttctcagttattgaacaagcaagcattatccagttgatctggcaatgactttttgtgtgtgggccacaatattgattttcccattaacaatttttttttgttttttaaatactaatatgtttcacactatagtttgtgtaacaacacgtgttcgcattatctatgttgctgttacttttgtgcttttattctttttagactttataaaaaaaaaaaaaagctcctgtaatttgcactttctcccaatccttaaatctcttgtatggcaaccaaaattactgtaaaaaaataaatatactattgcact

SEQ ID NO: 27897 - DNA, 897 bp, Homo sapiens
  source 1..897: mol_type = unassigned DNA
tcctttcctccatgctgcctggatctggcgagctggggtgattaattggctatgatgatgaacgtccccggcggaggagcggccgcggtgatgatgacgggctacaataatggtcgctgtccccggaattctctctacagtgactgcattattgaggagaagacggtggtcctgcagaaaaaagacaatgagggctttggattcgtgcttcgaggggccaaagctgacacacccattgaagaattcacaccaacaccggctttcccagccctacagtacctggagtccgtggatgaaggtggggtggcgtggcaagccggactaaggaccggggacttcttgattgaggttaacaatgagaatgttgtcaaagtcggccacaggcaggtggtgaacatgatccggcagggagggaatcacctggtccttaaggtggtcacggtgaccaggaatctggaccccgacgacaccgccaggaagaaagctcccccgcctccaaagcgggcaccgaccacagccctcaccctgcgctccaagtccatgacctcggagctggaggagctcgtggataaaggggttattaggaagggaaaggataaacccgaggagatagtcccggcctccaagccctcccgcgctgctgagaacatggctgtggaaccgagggtggcgaccatcaagcagcggcccagcagccggtgcttcccggcgggctcagacatgaactctgtgtacgaacgccaaggaatcgccgtgatgacgcccactgttcctgggagcccaaaagccccgtttctgggcatccctcgaggtacgatgcgaaggcagaaatcaataggtaagaagtgtggcactcccccacagaagttgcccctgggctttcaaacacagccttag

SEQ ID NO: 27898 - DNA, 7198 bp, Homo sapiens
  source 1..7198: mol_type = unassigned DNA
atgatgaacgtccccggcggaggagcggccgcggtgatgatgacgggctacaataatggtcgctgtccccggaattctctctacagtgactgcattattgaggagaagacggtggtcctgcagaaaaaagacaatgagggctttggattcgtgcttcgaggggccaaagctgacacacccattgaagaattcacaccaacaccggctttcccagccctacagtacctggagtccgtggatgaaggtggggtggcgtggcaagccggactaaggaccggggacttcttgattgaggttaacaatgagaatgttgtcaaagtcggccacaggcaggtggtgaacatgatccggcagggagggaatcacctggtccttaaggtggtcacggtgaccaggaatctggaccccgacgacaccgccaggaagaaagctcccccgcctccaaagcgggcaccgaccacagccctcaccctgcgctccaagtccatgacctcggagctggaggagctcgtggataaagataaacccgaggagatagtcccggcctccaagccctcccgcgctgctgagaacatggctgtggaaccgagggtggcgaccatcaagcagcggcccagcagccggtgcttcccggcgggctcagacatgaactctgtgtacgaacgccaaggaatcgccgtgatgacgcccactgttcctgggagcccaaaagccccgtttctgggcatccctcgaggtacgatgcgaaggcagaaatcaatagacagcagaatctttctatcaggaataacagaggaagagcggcagtttctggctcctccaatgctgaagttcaccagaagcctgtccatgccggacacctctgaggacatcccccctccaccgcagtctgtgcccccgtccccaccaccaccttccccaaccacttacaactgccccaagtccccaactccaagagtctacgggacgattaagcctgcgttcaatcagaattctgccgccaaggtgtcccccgccaccaggtccgacaccgtggccaccatgatgagggagaaggggatgtacttcaggagagagctggaccgctactccttggactctgaagacctctacagtcggaatgccggcccgcaagccaacttccgcaacaagagaggccagatgccagaaaacccatactcagaggtggggaagatcgccagcaaagccgtctacgtccccgccaagcccgccaggcggaaggggatgctggtgaagcagtccaacgtggaggacagccccgagaagacgtgctccatccctatcccgaccatcatcgtgaaggagccgtccaccagcagcagcggcaagagcagccagggcagcagcatggagatcgacccccaggccccggagccaccgagccagctgcggcctgacgaaagcctgaccgtcagcagcccctttgccgccgccatcgccggagccgtccgcgaccgtgagaagcggctggaagccaggaggaactccccggccttcctctccacagacctgggggatgaggatgtgggcctggggccacccgcccccaggacgcggccctccatgttccccgaggagggggattttgctgacgaggacagcgctgagcagctgtcatcccccatgccgagtgccacgcccagggagcccgaaaaccatttcgtgggtggcgccgaggccagtgctccgggtgaggctgggaggccgctgaattccacgtccaaagcccaggggcccgagagcagcccagcagtgccctccgcgagcagcggcacagccggccccgggaattatgtccacccactcacagggcggctgcttgatcccagctccccgctggccctggcactctccgcaagggaccgagccatgaaggagtctcaacagggacccaaaggggaggcccccaaggccgacctcaacaaacctctttacattgataccaaaatgcggcccagcctggatgccggcttccctacggtcaccaggcagaacacccggggacccctgaggcggcaggagacggagaacaagtacgagaccgacctgggccgagaccggaaaggcgatgacaagaagaacatgctgatcgacatcatggacacgtcccagcagaagtcggctggcctgctgatggtgcacaccgtggacgccactaagctggacaacgccctgcaggaagaggacgagaaggcagaggtggagatgaagccagacagctcgccgtccgaggtgccagaaggtgtttccgaaaccgaaggtgctttacagatctccgctgcccccgagcccaccaccgtgcccggcagaaccatcgtcgcggtgggctccatggaagaggcggtgattttgccattccgcatccctcctccccctctggcatccgtggacttggatgaggattttatttttacagagccattgcctcctcccctggaatttgcaaatagttttgatatccccgatgaccgggcagcttctgtcccggctctctcagacttagtgaagcagaagaaaagcgacacccctcagtccccttcgttgaactccagccaaccaaccaactctgcagacagcaagaagccagccagtctttcaaactgtctgcctgcctcattcctgccaccccctgaaagctttgacgccgtcgccgactctgggatcgaggaggtggacagccggagtagcagcgaccaccacctcgagacgaccagcactatctccaccgtgtctagcatctccaccctgtcttccgaaggtggagagaatgtggacacctgcacagtctatgcagatgggcaagcatttatggttgacaaacccccagtacctcctaagccaaaaatgaagcccatcattcacaaaagcaatgcactttatcaagacgcgctcgtggaagaagatgtagatagctttgttatccccccgcccgctcccccgcccccgccgggcagtgcccagcctgggatggccaaggttctccagccaaggacctccaagttgtggggcgacgtcacagagatcaaaagcccgattctctcaggcccaaaggcaaacgttattagtgaattgaactctatcctacagcaaatgaaccgagagaaattggcaaagccgggggaaggactggattcaccaatgggagccaagtccgccagcctcgctccaagaagcccggagatcatgagcaccatctcaggtacacggagcacgacggtcaccttcactgttcgccccggcacctcccagcccatcaccctgcagagccggccccccgactatgaaagcaggacctcaggaacaagacgtgccccaagccctgtggtctcgccaacagagatgaacaaagagaccctgcccgcccccctgtctgctgccaccgcctctccttctcccgctctctcagatgtctttagccttccaagccagcccccttctggggatctatttggcttgaacccagcgggacgcagtaggtcgccatccccctcgatactgcaacagccaatctcaaataagccttttacaactaaacctgtccacctgtggactaaaccagatgtggccgattggctggaaagtctaaacttgggtgaacataaagaggccttcatggacaatgagatcgatggcagtcacttaccaaacctgcagaaggaggacctcatcgatcttggggtaactcgagtcgggcacagaatgaacatagaaagggctttgaaacagctgctggacagataaggacggctgctctccacctcgcagactgctcttgttataagtagagatgggctcgtgctgaaacatctgaatgccaagcgaagtctgtgagcatcaaccccactccatgggtttgtctcctggtacccaaagaaatactgagttgtgtccacaacatggctgggtcttcagacccctggctcaccatgtgggtgtcttgggcagtttctatcacacatgggacaaggggagggagtttttctaacatggaaaaagattctcagcctgccgcccagcatgcaggtggcctcgctttgccgggtccgagaggctccccgtcaattttgcacgggatcctagctcttgtaggcagacaccagtgcactctagatacctcctgagacctccgtcctctgctttccgggcagctctcaccaccccaggccccggcatgaggcctttcctcagtcctgtggcctctcagaggacacctgatgctcacctgcccctctttctcctgcacttggcttgcagtgagatgctcccagatgcatttgtccagtgccccatcatgggcctgaaaggcagagaaactttttcctacacagattcttttccccatctcctcctgtggtttgcatccatggctctttggccatgaggttcctggcagtgctgggagtttggatgggatcgtgcccagctttgcttagctttctttatttctgcaaatctgttagcataattccaaggtggccaagcagatgtcacatggagttagtcaaagcacaaagtcacgattccacaatggaggggagacctggccaagggagccagccagcgtgcaactgcccaagctccaggtctccaggacaagagcagttgtctgccatgagcacccatccaggatggagaataagggcttctctgcctctcagaattctttttaattgaagatgtcttgagctctgcaaagatcagagcaggtgagcatccactttgacatgaaggacaagaagacgcatggctcatggcgggcacatgcggctgccagtgagacagcgtctcctctgggagctgggcgggcacagcatcctcagttctgtgcccagccaagggtgagcatctctgctgagacagtccttttgctctcggaggccagggaagatggtacttagaggcttttcccctatcgctctgggtgtctaggaatcccaccagcttgtcttaacagtacaacagcttctttgaggacccagtgggtatggagtatagacagaacccagggttgagaacagaaggtgggcggcaggatcagagtgaaagcagaggcgtgaggagaggaaagcagggaggtctcctgggctgccaggtcagcctctctggcaaggctttcttgagccccgcccctttctttccccggagtccctccaccccataacaatacctcgaatttccaaaagaggtcaccagatgcacatgggccgcaaaacacacagtcaggcttccagcacattctcccccatttggaggatactcgaatgtcaggtttttggttttattattatttcagaactagctcagcccatctctaattataaaacatggttttgttttttttttttcctttttttcttgattaggtctggaacagctctagaatgaacacataaaatttagcaatttaaaatctttctttactgcaagtttaaatagttgtacagatagtttataagcacaatattttaagaaaaaaaagtggctggtctactaggcagcctttgtgccacttcagtgctagaaagttaaagaaaaaaaaacttttgtgatttaataatactatttctgtggaataattataaaagtatgacctttttaaatcaaccttatttggatgcatctgaaccagcagagctgtgttatattttctatctttgctagaacttcgtcattgaaggacaatttcttcaaagtggttacaattcataatgcagcagtttctccaaaaacaaaaacaaaacacacaccacacacacgcgcttttccagtcacacacccctgatgttggaaccaagtttttggaccttctgttccaaaaccttttgcaggtcaatctttgtatttgaaatgatccaatccaacttgaagtcaattgaatattaaggcgctttacttccgtgtgctttcagtttttccatcatgagatgaatgagcattactctagataaatttcaagacaggatactacaggtggcctgctgaggctgccccatattttagaaaatgtaaaaatggtggtttggccattaatttgtcttccatttgatgataccgcaaaattccgtgagtccattcctttggcatggcactttccctgggcctacagttggtattacctctgtgctcagtgccaggcaaaacactagctcaaaggagagtcaaggaaaccgctggcagacgataaccagtcgaaactcgtgacttcggtttgttgaactttggcagccagttggtgagggccagatgttattccctttcttaaagatactccaagccacatgccactaaccacaagcaagctggctgcaagactaaagagctgataacatagtttatttttacactgtcttattatagagaagtaatagacctatcagaacctgcactgaccaacaaataaacacatgttgccaagatgaatcggtctctatctctatctgcttattttggtactgaaagcaatagttcctcattcaaatcaccacccactgttctccccctttgggacatgttaggacgaggccctattccatgcccctctttaatggtggaacaaatgttaaactgctcatctaaagatcatgttgatattattccaggttttaagatcaacttttgttacatactgtaatttaaataaactgcatttacatgcctagtttctgtaatattgtgtatacaaaacccaaatctctcaaaatgtaaattatgtatacctgccaagataccttttccagggtgtctgcgcacattttaagttaattcacataatataaaaattactcaatgtgactgttgatttgctgaactttacatatcacaaagtgaattatttgtgatactttagttaataaaatggtaaatttttttctcagttattgaacaagcaagcattatccagttgatctggcaatgactttttgtgtgtgggccacaatattgattttcccattaacaatttttttttgttttttaaatactaatatgtttcacactatagtttgtgtaacaacacgtgttcgcattatctatgttgctgttacttttgtgcttttattctttttagactttataaaaaaaaaaaaaagctcctgtaatttgcactttctcccaatccttaaatctcttgtatggcaaccaaaattactgtaaaaaaataaatatactattgcactaa

SEQ ID NO: 27899 - DNA, 2047 bp, Homo sapiens
  source 1..2047: mol_type = unassigned DNA
atgatgaacgtccccggcggaggagcggccgcggtgatgatgacgggctacaataatggtcgctgtccccggaattctctctacagtgactgcattattgaggagaagacggtggtcctgcagaaaaaagacaatgagggctttggattcgtgcttcgaggggccaaagctgacacacccattgaagaattcacaccaacaccggctttcccagccctacagtacctggagtccgtggatgaaggtggggtggcgtggcaagccggactaaggaccggggacttcttgattgaggttaacaatgagaatgttgtcaaagtcggccacaggcaggtggtgaacatgatccggcagggagggaatcacctggtccttaaggtggtcacggtgaccaggaatctggaccccgacgacaccgccaggaagaaagctcccccgcctccaaagcgggcaccgaccacagccctcaccctgcgctccaagtccatgacctcggagctggaggagctcgtggataaagcctcggtccggaagaagaaggataaacccgaggagatagtcccggcctccaagccctcccgcgctgctgagaacatggctgtggaaccgagggtggcgaccatcaagcagcggcccagcagccggtgcttcccggcgggctcagacatgaactctgtgtacgaacgccaaggaatcgccgtgatgacgcccactgttcctgggagcccaaaagccccgtttctgggcatccctcgaggtacgatgcgaaggcagaaatcaataggtaagaagtgtggcactcccccacagaagttgcccctgggctttcaaacacagccttaggcccctcaggaattctgagccctgggcctctcacagttgccttggcgtcccaccccagcaaggccctgccagcccacccaccagagggtgggaacctggccttgcccactagggagccattggaacatctgagtggcatgaaactcatcccccctgaaggacacaaaatctagggtggcttctgtcatcttgaagcccagttatctgtgataattccagcagggtaaagcgggagggtgggcggggtggtgcgagccaacccccctcccccaccctgccctgctcagggtgggaagggtaagtgggttccctgcattccccagccaccaccaggcctggagtatgagctcagcagatgtacttccaagggtggttgggtcaggtctcgaaatgaaataatgtactgtgtgttgcagaaaactgccttcctttcttcttaatgtcacaattattcctattgaccctgttgcaggcaaaggtacacttgaccttgagacaaggtcacacttgaccctttgagacagtccctttgtgagataattcagcattgcctttactgtgtcaattctggtagaagctaaggcccttgccctgtgagagttgtggaggcaaccctgggactctggtctgcccagcccaccccaggggcactgtcctgtgtgttctggaaatgcctctgggctgctgtgcaaaagcgcagcgtgcttgtgagtctcaggtggataactgtaggcagtcactaggcagtaagtggccgtggaggtggtgtctgctgtgcttaaagctccccctgcaccagcaaactcagggaaagctgcgtatttgtcttgcggttactggttaataacaactgatttcctcctgtcagacagcagaatctttctatcaggttagtgaaccttacggtttggaatctgtaatctgaatgtaacccagtttactttataaggtgtattcttaaattagtactccttgggaacagaattgccagacagccaactcagagtgactggtcaatggagaacactttgaacgagccatctttgcaatgccaaaatgtcctcccacaaggagtatgttaaatttggaatacccttatcgaatggaagttttcattggaataaattattgtagtttgtcctaggactttttttcatttcaagtaatttattttgctacctctttgaaaacctgcatgctccca

SEQ ID NO: 27900 - DNA, 7884 bp, Homo sapiens
  source 1..7884: mol_type = unassigned DNA
atataatgagcggaccgctgccaaagtcagagggaaaatgaagtctttgttaaatgccttcaccaagaaggaagtgcccttccgagaggccccggcgtactccaaccgccggcggcggccccccaacacgctggccgccccccgggtcctgctgcgctccaacagtgacaacaacctcaatgccagcgctcccgactgggccgtctgctccacggccacctcgcaccgcagcctgtcaccccagctgctgcagcagatgcccagcaagcccgagggggccgcgaagaccattgggagctacgtgcccgggccccgcagccggtccccatcgctcaacaggctgggcggcgcaggcgaggacggcaagaggccgcagcctctctggcatgtcgggtcgccttttgctcttggtgccaacaaggactcactctcggccttcgagtacccggggcccaagcggaagctctacagtgccgtgcccgggaggctcttcgtcgctgtcaagccataccaaccccaagtggacggcgagatcccccttcaccgcggtgacagggtcaaagttctgagcatcggtgaagggggcttctgggaaggcagcgcccgcggccacatcggatggtttccggcggagtgcgtggaggaggtccagtgtaagcccagggacagccaggcagaaacccgcgctgaccgcagcaagaagcttttcaggcactacaccgtgggctcctatgacagcttcgacacttccagtgactgcattattgaggagaagacggtggtcctgcagaaaaaagacaatgagggctttggattcgtgcttcgaggggccaaagctgacacacccattgaagaattcacaccaacaccggctttcccagccctacagtacctggagtccgtggatgaaggtggggtggcgtggcaagccggactaaggaccggggacttcttgattgaggttaacaatgagaatgttgtcaaagtcggccacaggcaggtggtgaacatgatccggcagggagggaatcacctggtccttaaggtggtcacggtgaccaggaatctggaccccgacgacaccgccaggaagaaagctcccccgcctccaaagcgggcaccgaccacagccctcaccctgcgctccaagtccatgacctcggagctggaggagctcgtggataaagcctcggtccggaagaagaaggataaacccgaggagatagtcccggcctccaagccctcccgcgctgctgagaacatggctgtggaaccgagggtggcgaccatcaagcagcggcccagcagccggtgcttcccggcgggctcagacatgaactctgtgtacgaacgccaaggaatcgccgtgatgacgcccactgttcctgggagcccaaaagccccgtttctgggcatccctcgaggtacgatgcgaaggcagaaatcaatagacagcagaatctttctatcaggaataacagaggaagagcggcagtttctggctcctccaatgctgaagttcaccagaagcctgtccatgccggacacctctgaggacatcccccctccaccgcagtctgtgcccccgtccccaccaccaccttccccaaccacttacaactgccccaagtccccaactccaagagtctacgggacgattaagcctgcgttcaatcagaattctgccgccaaggtgtcccccgccaccaggtccgacaccgtggccaccatgatgagggagaaggggatgtacttcaggagagagctggaccgctactccttggactctgaagacctctacagtcggaatgccggcccgcaagccaacttccgcaacaagagaggccagatgccagaaaacccatactcagaggtggggaagatcgccagcaaagccgtctacgtccccgccaagcccgccaggcggaaggggatgctggtgaagcagtccaacgtggaggacagccccgagaagacgtgctccatccctatcccgaccatcatcgtgaaggagccgtccaccagcagcagcggcaagagcagccagggcagcagcatggagatcgacccccaggccccggagccaccgagccagctgcggcctgacgaaagcctgaccgtcagcagcccctttgccgccgccatcgccggagccgtccgcgaccgtgagaagcggctggaagccaggaggaactccccggccttcctctccacagacctgggggatgaggatgtgggcctggggccacccgcccccaggacgcggccctccatgttccccgaggagggggattttgctgacgaggacagcgctgagcagctgtcatcccccatgccgagtgccacgcccagggagcccgaaaaccatttcgtgggtggcgccgaggccagtgctccgggtgaggctgggaggccgctgaattccacgtccaaagcccaggggcccgagagcagcccagcagtgccctccgcgagcagcggcacagccggccccgggaattatgtccacccactcacagggcggctgcttgatcccagctccccgctggccctggcactctccgcaagggaccgagccatgaaggagtctcaacagggacccaaaggggaggcccccaaggccgacctcaacaaacctctttacattgataccaaaatgcggcccagcctggatgccggcttccctacggtcaccaggcagaacacccggggacccctgaggcggcaggagacggagaacaagtacgagaccgacctgggccgagaccggaaaggcgatgacaagaagaacatgctgatcgacatcatggacacgtcccagcagaagtcggctggcctgctgatggtgcacaccgtggacgccactaagctggacaacgccctgcaggaagaggacgagaaggcagaggtggagatgaagccagacagctcgccgtccgaggtgccagaaggtgtttccgaaaccgaaggtgctttacagatctccgctgcccccgagcccaccaccgtgcccggcagaaccatcgtcgcggtgggctccatggaagaggcggtgattttgccattccgcatccctcctccccctctggcatccgtggacttggatgaggattttatttttacagagccattgcctcctcccctggaatttgcaaatagttttgatatccccgatgaccgggcagcttctgtcccggctctctcagacttagtgaagcagaagaaaagcgacacccctcagtccccttcgttgaactccagccaaccaaccaactctgcagacagcaagaagccagccagtctttcaaactgtctgcctgcctcattcctgccaccccctgaaagctttgacgccgtcgccgactctgggatcgaggaggtggacagccggagtagcagcgaccaccacctcgagacgaccagcactatctccaccgtgtctagcatctccaccctgtcttccgaaggtggagagaatgtggacacctgcacagtctatgcagatgggcaagcatttatggttgacaaacccccagtacctcctaagccaaaaatgaagcccatcattcacaaaagcaatgcactttatcaagacgcgctcgtggaagaagatgtagatagctttgttatccccccgcccgctcccccgcccccgccgggcagtgcccagcctgggatggccaaggttctccagccaaggacctccaagttgtggggcgacgtcacagagatcaaaagcccgattctctcaggcccaaaggcaaacgttattagtgaattgaactctatcctacagcaaatgaaccgagagaaattggcaaagccgggggaaggactggattcaccaatgggagccaagtccgccagcctcgctccaagaagcccggagatcatgagcaccatctcaggtacacggagcacgacggtcaccttcactgttcgccccggcacctcccagcccatcaccctgcagagccggccccccgactatgaaagcaggacctcaggaacaagacgtgccccaagccctgtggtctcgccaacagagatgaacaaagagaccctgcccgcccccctgtctgctgccaccgcctctccttctcccgctctctcagatgtctttagccttccaagccagcccccttctggggatctatttggcttgaacccagcgggacgcagtaggtcgccatccccctcgatactgcaacagccaatctcaaataagccttttacaactaaacctgtccacctgtggactaaaccagatgtggccgattggctggaaagtctaaacttgggtgaacataaagaggccttcatggacaatgagatcgatggcagtcacttaccaaacctgcagaaggaggacctcatcgatcttggggtaactcgagtcgggcacagaatgaacatagaaagggctttgaaacagctgctggacagataaggacggctgctctccacctcgcagactgctcttgttataagtagagatgggctcgtgctgaaacatctgaatgccaagcgaagtctgtgagcatcaaccccactccatgggtttgtctcctggtacccaaagaaatactgagttgtgtccacaacatggctgggtcttcagacccctggctcaccatgtgggtgtcttgggcagtttctatcacacatgggacaaggggagggagtttttctaacatggaaaaagattctcagcctgccgcccagcatgcaggtggcctcgctttgccgggtccgagaggctccccgtcaattttgcacgggatcctagctcttgtaggcagacaccagtgcactctagatacctcctgagacctccgtcctctgctttccgggcagctctcaccaccccaggccccggcatgaggcctttcctcagtcctgtggcctctcagaggacacctgatgctcacctgcccctctttctcctgcacttggcttgcagtgagatgctcccagatgcatttgtccagtgccccatcatgggcctgaaaggcagagaaactttttcctacacagattcttttccccatctcctcctgtggtttgcatccatggctctttggccatgaggttcctggcagtgctgggagtttggatgggatcgtgcccagctttgcttagctttctttatttctgcaaatctgttagcataattccaaggtggccaagcagatgtcacatggagttagtcaaagcacaaagtcacgattccacaatggaggggagacctggccaagggagccagccagcgtgcaactgcccaagctccaggtctccaggacaagagcagttgtctgccatgagcacccatccaggatggagaataagggcttctctgcctctcagaattctttttaattgaagatgtcttgagctctgcaaagatcagagcaggtgagcatccactttgacatgaaggacaagaagacgcatggctcatggcgggcacatgcggctgccagtgagacagcgtctcctctgggagctgggcgggcacagcatcctcagttctgtgcccagccaagggtgagcatctctgctgagacagtccttttgctctcggaggccagggaagatggtacttagaggcttttcccctatcgctctgggtgtctaggaatcccaccagcttgtcttaacagtacaacagcttctttgaggacccagtgggtatggagtatagacagaacccagggttgagaacagaaggtgggcggcaggatcagagtgaaagcagaggcgtgaggagaggaaagcagggaggtctcctgggctgccaggtcagcctctctggcaaggctttcttgagccccgcccctttctttccccggagtccctccaccccataacaatacctcgaatttccaaaagaggtcaccagatgcacatgggccgcaaaacacacagtcaggcttccagcacattctcccccatttggaggatactcgaatgtcaggtttttggttttattattatttcagaactagctcagcccatctctaattataaaacatggttttgttttttttttttcctttttttcttgattaggtctggaacagctctagaatgaacacataaaatttagcaatttaaaatctttctttactgcaagtttaaatagttgtacagatagtttataagcacaatattttaagaaaaaaaagtggctggtctactaggcagcctttgtgccacttcagtgctagaaagttaaagaaaaaaaaacttttgtgatttaataatactatttctgtggaataattataaaagtatgacctttttaaatcaaccttatttggatgcatctgaaccagcagagctgtgttatattttctatctttgctagaacttcgtcattgaaggacaatttcttcaaagtggttacaattcataatgcagcagtttctccaaaaacaaaaacaaaacacacaccacacacacgcgcttttccagtcacacacccctgatgttggaaccaagtttttggaccttctgttccaaaaccttttgcaggtcaatctttgtatttgaaatgatccaatccaacttgaagtcaattgaatattaaggcgctttacttccgtgtgctttcagtttttccatcatgagatgaatgagcattactctagataaatttcaagacaggatactacaggtggcctgctgaggctgccccatattttagaaaatgtaaaaatggtggtttggccattaatttgtcttccatttgatgataccgcaaaattccgtgagtccattcctttggcatggcactttccctgggcctacagttggtattacctctgtgctcagtgccaggcaaaacactagctcaaaggagagtcaaggaaaccgctggcagacgataaccagtcgaaactcgtgacttcggtttgttgaactttggcagccagttggtgagggccagatgttattccctttcttaaagatactccaagccacatgccactaaccacaagcaagctggctgcaagactaaagagctgataacatagtttatttttacactgtcttattatagagaagtaatagacctatcagaacctgcactgaccaacaaataaacacatgttgccaagatgaatcggtctctatctctatctgcttattttggtactgaaagcaatagttcctcattcaaatcaccacccactgttctccccctttgggacatgttaggacgaggccctattccatgcccctctttaatggtggaacaaatgttaaactgctcatctaaagatcatgttgatattattccaggttttaagatcaacttttgttacatactgtaatttaaataaactgcatttacatgcctagtttctgtaatattgtgtatacaaaacccaaatctctcaaaatgtaaattatgtatacctgccaagataccttttccagggtgtctgcgcacattttaagttaattcacataatataaaaattactcaatgtgactgttgatttgctgaactttacatatcacaaagtgaattatttgtgatactttagttaataaaatggtaaatttttttctcagttattgaacaagcaagcattatccagttgatctggcaatgactttttgtgtgtgggccacaatattgattttcccattaacaatttttttttgttttttaaatactaatatgtttcacactatagtttgtgtaacaacacgtgttcgcattatctatgttgctgttacttttgtgcttttattctttttagactttataaaaaaaaaaaaaagctcctgtaatttgcactttctcccaatccttaaatctcttgtatggcaaccaaaattactgtaaaaaaataaatatactattgcact

SEQ ID NO: 27901 - DNA, 939 bp, Homo sapiens
  source 1..939: mol_type = unassigned DNA
ctcctcctgcaccctcgctgcctcctttcctccatgctgcctggatctggcgagctggggtgattaattggctatgatgatgaacgtccccggcggaggagcggccgcggtgatgatgacgggctacaataatggtcgctgtccccggaattctctctacagtgactgcattattgaggagaagacggtggtcctgcagaaaaaagacaatgagggctttggattcgtgcttcgaggggccaaagctgacacacccattgaagaattcacaccaacaccggctttcccagccctacagtacctggagtccgtggatgaaggtggggtggcgtggcaagccggactaaggaccggggacttcttgattgaggttaacaatgagaatgttgtcaaagtcggccacaggcaggtggtgaacatgatccggcagggagggaatcacctggtccttaaggtggtcacggtgaccaggaatctggaccccgacgacaccgccaggaagaaagctcccccgcctccaaagcgggcaccgaccacagccctcaccctgcgctccaagtccatgacctcggagctggaggagctcgataaacccgaggagatagtcccggcctccaagccctcccgcgctgctgagaacatggctgtggaaccgagggtggcgaccatcaagcagcggcccagcagccggtgcttcccggcgggctcagacatgaactctgtgtacgaacgccaaggaatcgccgtgatgacgcccactgttcctgggagcccaaaagccccgtttctgggcatccctcgaggtacgatgcgaaggcagaaatcaataggtaagaagtgtggcactcccccacagaagttgcccctgggctttcaaacacagccttaggcccctcaggaattctgagccctgggcctctcacagttgccttggcgtcc

SEQ ID NO: 27902 - DNA, 8829 bp, Homo sapiens
  source 1..8829: mol_type = unassigned DNA
tcctttcctccatgctgcctggatctggcgagctggggtgattaattggctatgatgatgaacgtccccggcggaggagcggccgcggtgatgatgacgggctacaataatggtcgctgtccccggaattctctctacagtgactgcattattgaggagaagacggtggtcctgcagaaaaaagacaatgagggctttggattcgtgcttcgaggggccaaagctgacacacccattgaagaattcacaccaacaccggctttcccagccctacagtacctggagtccgtggatgaaggtggggtggcgtggcaagccggactaaggaccggggacttcttgattgaggttaacaatgagaatgttgtcaaagtcggccacaggcaggtggtgaacatgatccggcagggagggaatcacctggtccttaaggtggtcacggtgaccaggaatctggaccccgacgacaccgccaggaagaaagctcccccgcctccaaagcgggcaccgaccacagccctcaccctgcgctccaagtccatgacctcggagctggaggagctcgtggataaagataaacccgaggagatagtcccggcctccaagccctcccgcgctgctgagaacatggctgtggaaccgagggtggcgaccatcaagcagcggcccagcagccggtgcttcccggcgggctcagacatgaactctgtgtacgaacgccaaggaatcgccgtgatgacgcccactgttcctgggagcccaaaagccccgtttctgggcatccctcgaggtacgatgcgaaggcagaaatcaatagacagcagaatctttctatcaggaataacagaggaagagcggcagtttctggctcctccaatgctgaagttcaccagaagcctgtccatgccggacacctctgaggacatcccccctccaccgcagtctgtgcccccgtccccaccaccaccttccccaaccacttacaactgccccaagtccccaactccaagagtctacgggacgattaagcctgcgttcaatcagaattctgccgccaaggtgtcccccgccaccaggtccgacaccgtggccaccatgatgagggagaaggggatgtacttcaggagagagctggaccgctactccttggactctgaagacctctacagtcggaatgccggcccgcaagccaacttccgcaacaagagaggccagatgccagaaaacccatactcagaggtggggaagatcgccagcaaagccgtctacgtccccgccaagcccgccaggcggaaggggatgctggtgaagcagtccaacgtggaggacagccccgagaagacgtgctccatccctatcccgaccatcatcgtgaaggagccgtccaccagcagcagcggcaagagcagccagggcagcagcatggagatcgacccccaggccccggagccaccgagccagctgcggcctgacgaaagcctgaccgtcagcagcccctttgccgccgccatcgccggagccgtccgcgaccgtgagaagcggctggaagccaggaggaactccccggccttcctctccacagacctgggggatgaggatgtgggcctggggccacccgcccccaggacgcggccctccatgttccccgaggagggggattttgctgacgaggacagcgctgagcagctgtcatcccccatgccgagtgccacgcccagggagcccgaaaaccatttcgtgggtggcgccgaggccagtgctccgggtgaggctgggaggccgctgaattccacgtccaaagcccaggggcccgagagcagcccagcagtgccctccgcgagcagcggcacagccggccccgggaattatgtccacccactcacagggcggctgcttgatcccagctccccgctggccctggcactctccgcaagggaccgagccatgaaggagtctcaacagggacccaaaggggaggcccccaaggccgacctcaacaaacctctttacattgataccaaaatgcggcccagcctggatgccggcttccctacggtcaccaggcagaacacccggggacccctgaggcggcaggagacggagaacaagtacgagaccgacctgggccgagaccggaaaggcgatgacaagaagaacatgctgatcgacatcatggacacgtcccagcagaagtcggctggcctgctgatggtgcacaccgtggacgccactaagctggacaacgccctgcaggaagaggacgagaaggcagaggtggagatgaagccagacagctcgccgtccgaggtgccagaaggtgtttccgaaaccgaaggtgctttacagatctccgctgcccccgagcccaccaccgtgcccggcagaaccatcgtcgcggtgggctccatggaagaggcggtgattttgccattccgcatccctcctccccctctggcatccgtggacttggatgaggattttatttttacagagccattgcctcctcccctggaatttgcaaatagttttgatatccccgatgaccgggcagcttctgtcccggctctctcagacttagtgaagcagaagaaaagcgacacccctcagtccccttcgttgaactccagccaaccaaccaactctgcagacagcaagaagccagccagtctttcaaactgtctgcctgcctcattcctgccaccccctgaaagctttgacgccgtcgccgactctgggatcgaggaggtggacagccggagtagcagcgaccaccacctcgagacgaccagcactatctccaccgtgtctagcatctccaccctgtcttccgaaggtggagagaatgtggacacctgcacagtctatgcagatgggcaagcatttatggttgacaaacccccagtacctcctaagccaaaaatgaagcccatcattcacaaaagcaatgcactttatcaagacgcgctcgtggaagaagatgtagatagctttgttatccccccgcccgctcccccgcccccgccgggcagtgcccagcctgggatggccaaggttctccagccaaggacctccaagttgtggggcgacgtcacagagatcaaaagcccgattctctcaggcccaaaggcaaacgttattagtgaattgaactctatcctacagcaaatgaaccgagagaaattggcaaagccgggggaaggactggattcaccaatgggagccaagtccgccagcctcgctccaagaagcccggagatcatgagcaccatctcaggtacacggagcacgacggtcaccttcactgttcgccccggcacctcccagcccatcaccctgcagagccggccccccgactatgaaagcaggacctcaggaacaagacgtgccccaagccctgtggtctcgccaacagagatgaacaaagagaccctgcccgcccccctgtctgctgccaccgcctctccttctcccgctctctcagatgtctttagccttccaagccagcccccttctggggatctatttggcttgaacccagcgggacgcagtaggtcgccatccccctcgatactgcaacagccaatctcaaataagccttttacaactaaacctgtccacctgtggactaaaccagatgtggccgattggctggaaagtctaaacttgggtgaacataaagaggccttcatggacaatgagatcgatggcagtcacttaccaaacctgcagaaggaggacctcatcgatcttggggtaactcgagtcgggcacagaatgaacatagaaagggctttgaaacagctgctggacagataaggacggctgctctccacctcgcagactgctcttgttataagtagagatgggctcgtgctgaaacatctgaatgccaagcgaagtctgtgagcatcaaccccactccatgggtttgtctcctggtacccaaagaaatactgagttgtgtccacaacatggctgggtcttcagacccctggctcaccatgtgggtgtcttgggcagtttctatcacacatgggacaaggggagggagtttttctaacatggaaaaagattctcagcctgccgcccagcatgcaggtggcctcgctttgccgggtccgagaggctccccgtcaattttgcacgggatcctagctcttgtaggcagacaccagtgcactctagatacctcctgagacctccgtcctctgctttccgggcagctctcaccaccccaggccccggcatgaggcctttcctcagtcctgtggcctctcagaggacacctgatgctcacctgcccctctttctcctgcacttggcttgcagtgagatgctcccagatgcatttgtccagtgccccatcatgggcctgaaaggcagagaaactttttcctacacagattcttttccccatctcctcctgtggtttgcatccatggctctttggccatgaggttcctggcagtgctgggagtttggatgggatcgtgcccagctttgcttagctttctttatttctgcaaatctgttagcataattccaaggtggccaagcagatgtcacatggagttagtcaaagcacaaagtcacgattccacaatggaggggagacctggccaagggagccagccagcgtgcaactgcccaagctccaggtctccaggacaagagcagttgtctgccatgagcacccatccaggatggagaataagggcttctctgcctctcagaattctttttaattgaagatgtcttgagctctgcaaagatcagagcaggtgagcatccactttgacatgaaggacaagaagacgcatggctcatggcgggcacatgcggctgccagtgagacagcgtctcctctgggagctgggcgggcacagcatcctcagttctgtgcccagccaagggtgagcatctctgctgagacagtccttttgctctcggaggccagggaagatggtacttagaggcttttcccctatcgctctgggtgtctaggaatcccaccagcttgtcttaacagtacaacagcttctttgaggacccagtgggtatggagtatagacagaacccagggttgagaacagaaggtgggcggcaggatcagagtgaaagcagaggcgtgaggagaggaaagcagggaggtctcctgggctgccaggtcagcctctctggcaaggctttcttgagccccgcccctttctttccccggagtccctccaccccataacaatacctcgaatttccaaaagaggtcaccagatgcacatgggccgcaaaacacacagtcaggcttccagcacattctcccccatttggaggatactcgaatgtcaggtttttggttttattattatttcagaactagctcagcccatctctaattataaaacatggttttgttttttttttttcctttttttcttgattaggtctggaacagctctagaatgaacacataaaatttagcaatttaaaatctttctttactgcaagtttaaatagttgtacagatagtttataagcacaatattttaagaaaaaaaagtggctggtctactaggcagcctttgtgccacttcagtgctagaaagttaaagaaaaaaaaacttttgtgatttaataatactatttctgtggaataattataaaagtatgacctttttaaatcaaccttatttggatgcatctgaaccagcagagctgtgttatattttctatctttgctagaacttcgtcattgaaggacaatttcttcaaagtggttacaattcataatgcagcagtttctccaaaaacaaaaacaaaacacacaccacacacacgcgcttttccagtcacacacccctgatgttggaaccaagtttttggaccttctgttccaaaaccttttgcaggtcaatctttgtatttgaaatgatccaatccaacttgaagtcaattgaatattaaggcgctttacttccgtgtgctttcagtttttccatcatgagatgaatgagcattactctagataaatttcaagacaggatactacaggtggcctgctgaggctgccccatattttagaaaatgtaaaaatggtggtttggccattaatttgtcttccatttgatgataccgcaaaattccgtgagtccattcctttggcatggcactttccctgggcctacagttggtattacctctgtgctcagtgccaggcaaaacactagctcaaaggagagtcaaggaaaccgctggcagacgataaccagtcgaaactcgtgacttcggtttgttgaactttggcagccagttggtgagggccagatgttattccctttcttaaagatactccaagccacatgccactaaccacaagcaagctggctgcaagactaaagagctgataacatagtttatttttacactgtcttattatagagaagtaatagacctatcagaacctgcactgaccaacaaataaacacatgttgccaagatgaatcggtctctatctctatctgcttattttggtactgaaagcaatagttcctcattcaaatcaccacccactgttctccccctttgggacatgttaggacgaggccctattccatgcccctctttaatggtggaacaaatgttaaactgctcatctaaagatcatgttgatattattccaggttttaagatcaacttttgttacatactgtaatttaaataaactgcatttacatgcctagtttctgtaatattgtgtatacaaaacccaaatctctcaaaatgtaaattatgtatacctgccaagataccttttccagggtgtctgcgcacattttaagttaattcacataatataaaaattactcaatgtgactgttgatttgctgaactttacatatcacaaagtgaattatttgtgatactttagttaataaaatggtaaatttttttctcagttattgaacaagcaagcattatccagttgatctggcaatgactttttgtgtgtgggccacaatattgattttcccattaacaatttttttttgttttttaaatactaatatgtttcacactatagtttgtgtaacaacacgtgttcgcattatctatgttgctgttacttttgtgcttttattctttttagactttataaaaaaaaaaaaaagctcctgtaatttgcactttctcccaatccttaaatctcttgtatggcaaccaaaattactgtaaaaaaataaatatactattgcactaaggttgtggttctgattgcaaacaaacagtgaacactgtctgaattaaacaaaaagctgcccgacttgcaatctaatgtagattatctcaggcattgtggccagctctgcctctctaaaactgaccagaaaaatctctctcatcgagtaaacaggctcctgtcactgagctaatctgccttggttccatttccttattctcaatttatcaatggatacgtgcatgttatttcagaattatgcaaaacgtcaaaatctgcttctgtgaccgctgctataggcgtggagctgaggctcggcttttccttttgttctgggtggaagcagcggtgccgcggagggccagccagatccggacccttcccttagggtccagtctccccacaccccagcagggtgtcttctagccataaggccaagggagtggcagaactgggccgcctctctggttgacaagcaaaccacatgctaaggcttggagcaagagagaatttgtgtctattggcaaagaactaagccaggaagacatgggccatccctccgctttagggaagcatattttaaacctaaacgttgaacttcttctttggcctcaccagtgaaaacttgttgtctttagttcctaaagtttcttctactttggcacattccccagttgagcagcagcctctatgcttccacgttcaggaaaaattccagtcctcatatcttttgtagttcaccctcaagctctcccgcttcaccatccaatagtttctcccaaaccttggcacccccctagactttgcttccaatggtttcttccagaccacttttcctagatgaatatattcgtttaccttactaggaaaattattggaagattttttcttttacttgaaattggaggcattttaataactggcgaactggaatgtgtttctgtatttgtagacaaccatgaacccatgcaagtaggtgaacattccacagtggctgggtgaccacagcagctgcatgcagacaggactgcccgtgctttgtggggaatcagagaatttccaaacttgtttctcagacttccgcagatctcatcactttgatttctaatccatgctgtattggtgattttgtttatcgttcctgtaacttgttctacattccacagtctttaccgttttatgttcaaaattacaacaatccctgtccattgattccactctggaactctttgttcatgccaattttgaaattttaatacgagccttcaaataaacacagaaaagaaaaaaaaaaaggaaaaaaaataaagtgtgtgccttgggtgttttgaacctgatctgcataaaaccatattgtattcaaatgctgtatctttcatgaaaggataaatatatcttcaatgtattaatgtagctgataaaatagttatagtgccttgttttctgaactgagaagcccatatcaatgcacaacgtaaagaaaggacggttcgagctatgaaatgttgaggacacctacacgtgattctggagcctttctcatcataagactgtggaaaatacacagtcgtttaagttaaaaataaaaagtaaattga

SEQ ID NO: 27903 - DNA, 912 bp, Homo sapiens
  source 1..912: mol_type = unassigned DNA
atgccgcgcagcccaacatccagcgaggacgagatggcccagagcttctccgactactccgtggggtcggagtcagacagctccaaagaagagaccatctatgacacgatccgggccactgcggagaagccgggcggtgccaggacggaggagagccagggcaacacgctggtgatccgcgtggtcatccatgacctgcagcagacgaaatgcattcgatttaacccggatgccacagtgtgggttgcaaagcagcggatcctgtgtacattaacccagagtttgaaagatgtcctgaactacggcctgttccagccggccagcaatgggcgtgacggcaagttcctggatgaggagcggctcctgcgcgagtacccacagcccgtgggtgagggcgttccttccctggagtttcgatacaagaagcgggtgtataaacaagccagtctcgatgagaaacagttggccaagctccacacgaagaccaatctgaagaaatgcatggatcacattcagcatcgcttggtggagaagatcaccaagatgctggaccgaggcctggatcccaatttccacgacccggagaccggagagacccccctgaccttagccgctcagctggacgactctgtggaggtcatcaaagctctcaaaaatggtggagctcacctggacttccgtgccaaagatgggatgaccgccctacacaaagctgcccgagcgaggaaccaagttgccctgaagacccttttagagcttggtgcatccccagattataaagacagttacggcctcaccccgctgtatcacacagccatcgtcggaggtgatccctactgctgcgagcttctcctgcacgaacacgccactgtgtgctgcaaagatgagaacggctggcacgagatccaccag

SEQ ID NO: 27904 - DNA, 7145 bp, Homo sapiens
  source 1..7145: mol_type = unassigned DNA
atggacggccccggggccagcgccgtggtcgtgcgcgtcggcatcccggacctgcagcagacgaagtgcctgcgcctggacccggccgcgcccgtgtgggccgccaagcagcgcgtgctctgcgccctcaaccacagcctccaggacgcgctcaactatgggcttttccagccgccctcccggggccgcgccggcaagttcctggatgaggagcggctcctgcaggagtacccgcccaacctggacacgcccctgccctacctggagtttcgatacaagcggcgagtttatgcccagaacctcatcgatgataagcagtttgcaaagcttcacacaaaggcgaacctgaagaagttcatggactacgtccagctgcatagcacggacaaggtggcacgcctgttggacaaggggctggaccccaacttccatgaccctgactcaggagagtgccccctgagcctcgcagcccagctggacaacgccacggacctgctaaaggtgctgaagaatggtggtgcccacctggacttccgcactcgcgatgggctcactgccgtgcactgtgccacacgccagcggaatgcggcagcactgacgaccctgctggacctgggggcttcacctgactacaaggacagccgcggcttgacacccctctaccacagcgccctggggggtggggatgccctctgctgtgagctgcttctccacgaccacgctcagctggggatcaccgacgagaatggctggcaggagatccaccaggcctgccgctttgggcacgtgcagcatctggagcacctgctgttctatggggcagacatgggggcccagaacgcctcggggaacacagccctgcacatctgtgccctctacaaccaggagagctgtgctcgtgtcctgctcttccgtggagctaacagggatgtccgcaactacaacagccagacagccttccaggtggccatcatcgcagggaactttgagcttgcagaggttatcaagacccacaaagactcggatgttgtaccattcagggaaacccccagctatgcgaagcggcggcgactggctggccccagtggcttggcatcccctcggcctctgcagcgctcagccagcgatatcaacctgaagggggaggcacagccagcagcttctcctggaccctcgctgagaagcctcccccaccagctgctgctccagcggctgcaagaggagaaagatcgtgaccgggatgccgaccaggagagcaacatcagtggccctttagcaggcagggccggccaaagcaagatcagcgatccgggccctggacctggaggggtggggggggcgcccctccctccccctggcgcgcccaggagctgtattcgaattcgagctcggttccccgcgccccctgcgccccccgcaccgccgccccggggcccgaagcggaaactttacagcgccgtccccggccgcaagttcatcgccgtgaaggcgcacagcccgcagggtgaaggcgagatcccgctgcaccgcggcgaggccgtgaaggtgctcagcattggggagggcggtttctgggagggaaccgtgaaaggccgcacgggctggttcccggccgactgcgtggaggaagtgcagatgaggcagcatgacacacggcctgaaacgcgggaggaccggacgaagcggctctttcggcactacacagtgggctcctacgacagcctcacctcacacagcgattatgtcattgatgacaaagtggctgtcctgcagaaacgggaccacgagggctttggttttgtgctccggggagccaaagcagagacccccatcgaggagttcacgcccacgccagccttcccggcgctgcagtatctcgagtcggtggacgtggagggtgtggcctggagggccgggctgcgcacgggagacttcctcatcgaggtgaacggggtgaacgtggtgaaggtcggacacaagcaggtggtggctctgattcgccagggtggcaaccgcctcgtcatgaaggttgtgtctgtgacaaggaagccagaagaggacggggctcggcgcagagccccaccgccccccaagagggcccccagcaccacactgaccctgcgctccaagtccatgacagctgagctcgaggaacttgcctccattcggagaagaaaaggggagaagctggacgagatgctggcagccgccgcagagccaacgctgcggccagacatcgcagacgcagactccagagccgccaccgtcaaacagaggcccaccagtcggaggatcacacccgccgagattagctcattgtttgaacgccagggcctcccaggcccagagaagctgccgggctccttgcggaaggggattccacggaccaagtctgtaggggaggacgagaagctggcgtccctgctggaagggcgcttcccgcggagcacctcgatgcaagacccggtgcgcgagggtcgcggcatcccgcccccgccgcagaccgcgccgcctcccccgcccgcgccctactacttcgactcggggccgcccccggccttctcgccgccgcccccgccgggccgcgcctacgacacggtgcgctccagcttcaagcccggcctggaggcgcgcctgggcgcgggcgctgccggcctgtacgagccgggcgcggccctcggcccgctgccgtatcccgagcggcagaagcgcgcgcgctccatgatcatcctgcaggactcggcgcccgagtcgggcgacgcccctcgacccccgcccgcggccaccccgcccgagcgacccaagcgccggccgcggccgcccggccccgacagcccctacgccaacctgggcgccttcagcgccagcctcttcgctccgtccaagccgcagcgccgcaagagccccctggtgaagcagctgcaggtggaggacgcgcaggagcgcgcggccctggccgtgggcagccccggtcccggcggcggcagcttcgcccgcgagccctccccgacccaccgcggtccgcgcccgggtggcctcgactacggcgcgggcgatggcccggggctcgcgttcggcggcccgggcccggccaaggaccggcggctggaggagcggcgccgctccactgtgttcctgtccgtgggggccatcgagggcagcgcccccggcgcggatctgccatccctacagccctcccgctccatcgacgagcgcctcctggggaccggccccaccgccggccgcgacctgctgctgccctccccggtgtctgccctgaagccgttggtcagcggcccgagcctggggccctcgggttccaccttcatccacccactcaccggcaaacccctggaccccagctcacccctggcccttgccctggctgcccgagagcgagctctggcctcccaggcgccctcccggtcccccacacccgtgcacagtcccgacgccgaccgccccggacccctgtttgtggatgtacaggcccgggacccagagcgagggtccctggcttccccggctttctccccacggagcccagcctggattcctgtgcctgctcgcagggaggcagagaaggtcccccgggaggagcggaagtcacccgaggacaagaagtccatgatcctcagcgtcctggacacatccctgcagcggccagctggcctcatcgttgtgcacgccaccagcaacgggcaggagcccagcaggctggggggggccgaagaggagcgcccgggcaccccggagttggccccggcccccatgcagtcagcggctgtggcagagcccctgcccagcccccgggcccagccccctggtggcaccccggcagacgccgggccaggccagggcagctcagaggaagagccagagctggtgtttgctgtgaacctgccacctgcccagctgtcgtccagcgatgaggagaccagggaggagctggcccgaattgggttggtgccaccccctgaagagtttgccaacggggtcctgctggccaccccactcgctggcccgggcccctcgcccaccacggtgcccagcccggcctcagggaagcccagcagtgagccaccccctgcccctgagtctgcagccgactctggggtggaggaggctgacacacgcagctccagcgacccccacctggagaccacaagcaccatctccacggtgtccagcatgtccaccttgagctcggagagcggggaactcactgacacccacacctccttcgctgacggacacacttttctactcgagaagccaccagtgcctcccaagcccaagctcaagtccccgctggggaaggggccggtgaccttcagggacccgctgctgaagcagtcctcggacagcgagctcatggcccagcagcaccacgccgcctctgccgggctggcctctgccgccgggcctgcccgccctcgctacctcttccagagaaggtccaagctatggggggaccccgtggagagccgggggctccctgggcctgaagacgacaaaccaactgtgatcagtgagctcagctcccgcctgcagcagctgaacaaggacacgcgttccctgggggaggaaccagttggtggcctgggcagcctgctggaccctgccaagaagtcgcccatcgcagcagctcggctcttcagcagcctcggtgagctgagctccatttcagcgcagcgcagccccgggggcccgggcggcggggcctcgtactcggtgaggcccagtggccgctaccccgtggcgagacgcgccccgagcccggtgaagcccgcgtcgctggagcgggtggaggggctgggggcgggcgcggggggcgcagggcggcccttcggcctcacgccccccaccatcctcaagtcgtccagcctctccatcccgcacgagcccaaggaggtgcgcttcgtggtgcgcagcgtgagcgcgcgcagtcgctccccctcgccgtcgccgctgccctcgcccgcgtccggccccggccccggcgcccccggcccacgccgacccttccagcagaagccgctgcagctctggagcaagttcgacgtgggcgactggctggagagcatccacctaggcgagcaccgcgaccgcttcgaggaccatgagatagaaggcgcgcacctacccgcgcttaccaaggacgacttcgtggagctgggcgtcacgcgcgtgggccaccgcatgaacatcgagcgcgcgctcaggcagctggacggcagctgacgccccacccccactcccgccccggccgtgccctgccggcagggccccccacccccaccccgggccgcgggctcggcctgccccttacgacggcgcccgggccaggaatgttgcatgaatcgtcctgtttgctgttgctcggagactcgccctgtacattgcttagtgccctcaccggccgcccagcccacccagcgcacagtcaggaagggcgtggaccagggaggctggggcgggaggtgccgggggtggggtgccctagcgtgaccacctccttcgcagctcctggtggccattctcccagagggggaacctagtccagcatgcgaggtcaggacccgccttggtgactcggggggaggggggagacattgggattctcgatgggggccaaggagcccccctgttttgcatattttaatccactctatatttggaacgagaaaaggaacaaatatctctgtccgtaatagtttcctctcccctcccttctacttccactggtcccactgcagctgcccagtcttccatctccggcccctcactgccactgccaccccacaacggggcaggggacgctccagctggtctggggttggccagggccctagtggcccgccctggggccccagctcggcccctcgcctcgctgagctctagtgtgccccaccgacccttcaggtgctgctcgtggtgggaggggcggcaggccgcgggtcctgctgtgcacccgcgggaccagccggcctgggagaccatcggccgggggggatgagggcagggccctgccgctccaccgcagccatcttcctcacagggtctctccccaaggagggggctagcttggtccccatgctcttgggcaactacagcagagaagcctccctgccttggaccccaaagtctcctgtcctgccctttatgtgtgtgggtgaaactgggtgcgtctgagcacgtgggagccgtgtgtgtgcctgattactgagtggccaccaggggccgctctggactagcgcggggccgtggaggcgtgcaccgtgtgcatgcgtggggtgtacctgtgagagcaccctgtctcctcttccaaagaaagtcagaggccatcctgcaccctgggtccagctgtttgcccagcctgtccttccagagcctcacccagcctgagcggggttccctggtgaatccctgctgcttggggaggccccaagggccccttggaggcagcgcccccaccttgggcttctgagggcatcatagggggacccctagagtcagttcaccacaggccctggggagagtcaaagacccccgagggtgcccagccccccacactgtgactcctcacactcagcgatgacctgtggggtggggggccctgggacgtttttaaacctagggtttggagtctggactaagctccatccacgtcactcacaagtttctgtttatatttctagctttttttaataaaataaaaaaaaaaagaaaacagaagttttcacaacccaggggcctggcacgccggtctgtgcctgcccgccccgccctggcccaccggccccactccctgggcacagagtcacacccactcatccttccgccaacagtccaggtcacacagcagcagtcactgtaacagactgccacatacacactcggtctcacactcacctgtgggttttggttccgttcaatttgggtttttaactttacagggtcagttccgcttcacctccttttgtatggagttccatccggggggtttcaccccctgctccagtcctgaggcctcctgaccctgacgttgtgatacgccccacagagatctatgtttcttatattattattattgataataattattataatattattatgtaataaatttataagaaatgaag

SEQ ID NO: 27905 - DNA, 7130 bp, Homo sapiens
  source 1..7130: mol_type = unassigned DNA
atggacggccccggggccagcgccgtggtcgtgcgcgtcggcatcccggacctgcagcagacgaagtgcctgcgcctggacccggccgcgcccgtgtgggccgccaagcagcgcgtgctctgcgccctcaaccacagcctccaggacgcgctcaactatgggcttttccagccgccctcccggggccgcgccggcaagttcctggatgaggagcggctcctgcaggagtacccgcccaacctggacacgcccctgccctacctggagtttcgatacaagcggcgagtttatgcccagaacctcatcgatgataagcagtttgcaaagcttcacacaaaggcgaacctgaagaagttcatggactacgtccagctgcatagcacggacaaggtggcacgcctgttggacaaggggctggaccccaacttccatgaccctgactcaggagagtgccccctgagcctcgcagcccagctggacaacgccacggacctgctaaaggtgctgaagaatggtggtgcccacctggacttccgcactcgcgatgggctcactgccgtgcactgtgccacacgccagcggaatgcggcagcactgacgaccctgctggacctgggggcttcacctgactacaaggacagccgcggcttgacacccctctaccacagcgccctggggggtggggatgccctctgctgtgagctgcttctccacgaccacgctcagctggggatcaccgacgagaatggctggcaggagatccaccaggcctgccgctttgggcacgtgcagcatctggagcacctgctgttctatggggcagacatgggggcccagaacgcctcggggaacacagccctgcacatctgtgccctctacaaccaggagagctgtgctcgtgtcctgctcttccgtggagctaacagggatgtccgcaactacaacagccagacagccttccaggtggccatcatcgcagggaactttgagcttgcagaggttatcaagacccacaaagactcggatgttgtaccattcagggaaacccccagctatgcgaagcggcggcgactggctggccccagtggcttggcatcccctcggcctctgcagcgctcagccagcgatatcaacctgaagggggaggcacagccagcagcttctcctggaccctcgctgagaagcctcccccaccagctgctgctccagcggctgcaagaggagaaagatcgtgaccgggatgccgaccaggagagcaacatcagtggccctttagcaggcagggccggccaaagcaagatcagcgagcctggcgcgcccaggagctgtattcgaattcgagctcggttccccgcgccccctgcgccccccgcaccgccgccccggggcccgaagcggaaactttacagcgccgtccccggccgcaagttcatcgccgtgaaggcgcacagcccgcagggtgaaggcgagatcccgctgcaccgcggcgaggccgtgaaggtgctcagcattggggagggcggtttctgggagggaaccgtgaaaggccgcacgggctggttcccggccgactgcgtggaggaagtgcagatgaggcagcatgacacacggcctgaaacgcgggaggaccggacgaagcggctctttcggcactacacagtgggctcctacgacagcctcacctcacacagcgattatgtcattgatgacaaagtggctgtcctgcagaaacgggaccacgagggctttggttttgtgctccggggagccaaagcagagacccccatcgaggagttcacgcccacgccagccttcccggcgctgcagtatctcgagtcggtggacgtggagggtgtggcctggagggccgggctgcgcacgggagacttcctcatcgaggtgaacggggtgaacgtggtgaaggtcggacacaagcaggtggtggctctgattcgccagggtggcaaccgcctcgtcatgaaggttgtgtctgtgacaaggaagccagaagaggacggggctcggcgcagagccccaccgccccccaagagggcccccagcaccacactgaccctgcgctccaagtccatgacagctgagctcgaggaacttggtgagtggcgggggagggaggggagcgagaagctggacgagatgctggcagccgccgcagagccaacgctgcggccagacatcgcagacgcagactccagagccgccaccgtcaaacagaggcccaccagtcggaggatcacacccgccgagattagctcattgtttgaacgccagggcctcccaggcccagagaagctgccgggctccttgcggaaggggattccacggaccaagtctgtaggggaggacgagaagctggcgtccctgctggaagggcgcttcccgcggagcacctcgatgcaagacccggtgcgcgagggtcgcggcatcccgcccccgccgcagaccgcgccgcctcccccgcccgcgccctactacttcgactcggggccgcccccggccttctcgccgccgcccccgccgggccgcgcctacgacacggtgcgctccagcttcaagcccggcctggaggcgcgcctgggcgcgggcgctgccggcctgtacgagccgggcgcggccctcggcccgctgccgtatcccgagcggcagaagcgcgcgcgctccatgatcatcctgcaggactcggcgcccgagtcgggcgacgcccctcgacccccgcccgcggccaccccgcccgagcgacccaagcgccggccgcggccgcccggccccgacagcccctacgccaacctgggcgccttcagcgccagcctcttcgctccgtccaagccgcagcgccgcaagagccccctggtgaagcagctgcaggtggaggacgcgcaggagcgcgcggccctggccgtgggcagccccggtcccggcggcggcagcttcgcccgcgagccctccccgacccaccgcggtccgcgcccgggtggcctcgactacggcgcgggcgatggcccggggctcgcgttcggcggcccgggcccggccaaggaccggcggctggaggagcggcgccgctccactgtgttcctgtccgtgggggccatcgagggcagcgcccccggcgcggatctgccatccctacagccctcccgctccatcgacgagcgcctcctggggaccggccccaccgccggccgcgacctgctgctgccctccccggtgtctgccctgaagccgttggtcagcggcccgagcctggggccctcgggttccaccttcatccacccactcaccggcaaacccctggaccccagctcacccctggcccttgccctggctgcccgagagcgagctctggcctcccaggcgccctcccggtcccccacacccgtgcacagtcccgacgccgaccgccccggacccctgtttgtggatgtacaggcccgggacccagagcgagggtccctggcttccccggctttctccccacggagcccagcctggattcctgtgcctgctcgcagggaggcagagaaggtcccccgggaggagcggaagtcacccgaggacaagaagtccatgatcctcagcgtcctggacacatccctgcagcggccagctggcctcatcgttgtgcacgccaccagcaacgggcaggagcccagcaggctggggggggccgaagaggagcgcccgggcaccccggagttggccccggcccccatgcagtcagcggctgtggcagagcccctgcccagcccccgggcccagccccctggtggcaccccggcagacgccgggccaggccagggcagctcagaggaagagccagagctggtgtttgctgtgaacctgccacctgcccagctgtcgtccagcgatgaggagaccagggaggagctggcccgaattgggttggtgccaccccctgaagagtttgccaacggggtcctgctggccaccccactcgctggcccgggcccctcgcccaccacggtgcccagcccggcctcagggaagcccagcagtgagccaccccctgcccctgagtctgcagccgactctggggtggaggaggctgacacacgcagctccagcgacccccacctggagaccacaagcaccatctccacggtgtccagcatgtccaccttgagctcggagagcggggaactcactgacacccacacctccttcgctgacggacacacttttctactcgagaagccaccagtgcctcccaagcccaagctcaagtccccgctggggaaggggccggtgaccttcagggacccgctgctgaagcagtcctcggacagcgagctcatggcccagcagcaccacgccgcctctgccgggctggcctctgccgccgggcctgcccgccctcgctacctcttccagagaaggtccaagctatggggggaccccgtggagagccgggggctccctgggcctgaagacgacaaaccaactgtgatcagtgagctcagctcccgcctgcagcagctgaacaaggacacgcgttccctgggggaggaaccagttggtggcctgggcagcctgctggaccctgccaagaagtcgcccatcgcagcagctcggtgtcgatcccccatggtcgggctcaggctcttcagcagcctcggtgagctgagctccatttcagcgcagcgcagccccgggggcccgggcggcggggcctcgtactcggtgaggcccagtggccgctaccccgtggcgagacgcgccccgagcccggtgaagcccgcgtcgctggagcgggtggaggggctgggggcgggcgcggggggcgcagggcggcccttcggcctcacgccccccaccatcctcaagtcgtccagcctctccatcccgcacgagcccaaggaggtgcgcttcgtggtgcgcagcgtgagcgcgcgcagtcgctccccctcgccgtcgccgctgccctcgcccgcgtccggccccggccccggcgcccccggcccacgccgacccttccagcagaagccgctgcagctctggagcaagttcgacgtgggcgactggctggagagcatccacctaggcgagcaccgcgaccgcttcgaggaccatgagatagaaggcgcgcacctacccgcgcttaccaaggacgacttcgtggagctgggcgtcacgcgcgtgggccaccgcatgaacatcgagcgcgcgctcaggcagctggacggcagctgacgccccacccccactcccgccccggccgtgccctgccggcagggccccccacccccaccccgggccgcgggctcggcctgccccttacgacggcgcccgggccaggaatgttgcatgaatcgtcctgtttgctgttgctcggagactcgccctgtacattgcttagtgccctcaccggccgcccagcccacccagcgcacagtcaggaagggcgtggaccagggaggctggggcgggaggtgccgggggtggggtgccctagcgtgaccacctccttcgcagctcctggtggccattctcccagagggggaacctagtccagcatgcgaggtcaggacccgccttggtgactcggggggaggggggagacattgggattctcgatgggggccaaggagcccccctgttttgcatattttaatccactctatatttggaacgagaaaaggaacaaatatctctgtccgtaatagtttcctctcccctcccttctacttccactggtcccactgcagctgcccagtcttccatctccggcccctcactgccactgccaccccacaacggggcaggggacgctccagctggtctggggttggccagggccctagtggcccgccctggggccccagctcggcccctcgcctcgctgagctctagtgtgccccaccgacccttcaggtgctgctcgtggtgggaggggcggcaggccgcgggtcctgctgtgcacccgcgggaccagccggcctgggagaccatcggccgggggggatgagggcagggccctgccgctccaccgcagccatcttcctcacagggtctctccccaaggagggggctagcttggtccccatgctcttgggcaactacagcagagaagcctccctgccttggaccccaaagtctcctgtcctgccctttatgtgtgtgggtgaaactgggtgcgtctgagcacgtgggagccgtgtgtgtgcctgattactgagtggccaccaggggccgctctggactagcgcggggccgtggaggcgtgcaccgtgtgcatgcgtggggtgtacctgtgagagcaccctgtctcctcttccaaagaaagtcagaggccatcctgcaccctgggtccagctgtttgcccagcctgtccttccagagcctcacccagcctgagcggggttccctggtgaatccctgctgcttggggaggccccaagggccccttggaggcagcgcccccaccttgggcttctgagggcatcatagggggacccctagagtcagttcaccacaggccctggggagagtcaaagacccccgagggtgcccagccccccacactgtgactcctcacactcagcgatgacctgtggggtggggggccctgggacgtttttaaacctagggtttggagtctggactaagctccatccacgtcactcacaagtttctgtttatatttctagctttttttaataaaataaaaaaaaaaagaaaacagaagttttcacaacccaggggcctggcacgccggtctgtgcctgcccgccccgccctggcccaccggccccactccctgggcacagagtcacacccactcatccttccgccaacagtccaggtcacacagcagcagtcactgtaacagactgccacatacacactcggtctcacactcacctgtgggttttggttccgttcaatttgggtttttaactttacagggtcagttccgcttcacctccttttgtatggagttccatccggggggtttcaccccctgctccagtcctgaggcctcctgaccctgacgttgtgatacgccccacagagatctatgtttcttatattattattattgataataattattataatattattatgtaataaatttataagaaatgaag

SEQ ID NO: 27906 - DNA, 7777 bp, Homo sapiens
  source 1..7777: mol_type = unassigned DNA
agtgcgcgccgagcgaagggcggcggcggtggcggcggcggctcgtgctcggccccggctgcgattgcgctcagctccaggttccctgcccgcggcggcgcgcccccagcgctccctgcaccccgcgccacccgcacccgcgctcggcccgctgcgggcggaggagcggccatgccgccgcggcgcagcatcgtggaggtgaaggtgctagacgtgcagaagcggcgggtgcccaacaagcattatgtctacatcatccgggtcacgtggtccagcggctccaccgaggccatttaccggcgctacagcaagttttttgacctccagatgcagatgttggacaaatttcccatggaaggaggacagaaggaccccaagcagcggatcatcccctttctgccaggtaagattctcttcagacgaagccacatccgggacgtggctgtcaaacgcctgataccaattgatgaatactgtaaggccctcatccagctgcccccctacatctctcagtgtgatgaggtgctgcagttctttgagacaagacctgaggacctgaatccccccaaagaggagcacattgggaaaaagaaatctgggggtgaccaaacctcagtggaccccatggtcctggagcagtatgtggtggtagccaactaccagaagcaggagagttcggagatcagcctcagcgtggggcaggtggtggacatcatcgagaagaatgagtcaggttggtggttcgtcagcactgccgaggagcaaggctgggtccctgcaacgtgcctcgaaggccaggatggggtgcaggatgagttttctctgcagcctgaagaagaggagaagtacacagtcatctacccgtacacagctcgggaccaggatgaaatgaacctggagagaggggctgtggtggaggtcatccagaaaaacctggaaggctggtggaagatcaggtaccagggcaaagaaggctgggcccccgcctcctacctaaagaagaacagtggggagcccttgcccccgaagccaggccctggctcaccctcccacccgggtgcccttgacttggatggtgtttcccggcagcagaacgcggtgggcagggagaaggagctgctcagcagccagagggacgggcggtttgaaggccgcccggtgcccgacggtgacgccaagcagagatcaccaaagatgaggcagagaccccctcctcgccgggacatgaccattcctcgaggcctcaacctgccgaagccgcccatcccgccccaagtggaggaagagtattacaccatcgccgaattccagacaaccatcccagacggcatcagcttccaggcaggcctgaaggtcgaggtgatcgagaaaaacttgagtggctggtggtacattcagattgaagataaggaagggtgggccccggccaccttcattgacaagtacaagaagacgagcaacgcgtcgagacccaactttctggctcccctgccccacgaggtgacccagctccggctgggggaagcagcagcgctggagaacaacacgggcagcgaagccacgggcccctcccggcccctgcctgacgcaccgcatggtgtcatggactcggggttgccatggtctaaagactggaagggcagtaaggatgtcctgaggaaggcatcttcagacatgtctgcgtcagcaggctacgaggagatctcagaccccgacatggaggagaagcccagcctccctccgcggaaagaatccatcatcaagtcggagggggagctgctggagcgggagcgggagcggcagaggacggagcagctccggggccccactcccaagcctccgggcgtgattttgccgatgatgccagccaaacacatccctccagcccgggacagcaggaggccagagcccaaacctgacaaaagcagactgttccagctgaaaaatgacatggggctggagtgtggccacaaggtcttggccaaggaagtgaagaagcccaacctccggcccatctccaaatccaaaactgacctgccagaggagaagccagatgccactccccagaatcccttcttgaagtccagacctcaggttaggccaaaaccagctccttcccccaaaacggagccacctcagggcgaagaccaagtcgacatctgcaacctcaggagtaagctcaggcctgccaagtcccaagacaagtccttgttggatggggagggcccccaggcagtagggggccaagacgtggccttcagccgaagcttcctcccaggagaggggcctggccgcgcccaggacaggacgggcaaacaggatggtctcagcccaaaagagatttcctgcagagcccctccgaggccagccaagaccacagatcctgtgtctaagagcgtgcctgttcctctccaagaggctccccagcagagacctgtggtcccaccccgcagaccacctcccccaaagaaaacctcttcgtcatccaggccgctcccagaggtcagaggtccacagtgtgaaggccacgaaagcagggcagctcccaccccaggccgtgctctcctcgtccctccaaaagccaaaccttttctctccaactctttggggggccaggatgacacgcgaggcaaaggcagcctggggccatgggggaccggcaagattggagaaaacagggagaaagcagctgcagcctctgtccccaatgccgacggcctgaaggactctttgtatgtggccgtggccgactttgaaggagacaaagacaccagcagcttccaggaagggacagtgtttgaagtccgggagaagaacagcagtggctggtggttctgccaggtcctgagcggagccccttcctgggaagggtggattccttccaactatctcagaaagaagccgtagccgactccctttctgcctagagggcccgctggtccttgctggctttacccacgtatttaatacgcctcttaatttatcattctccacgcagcttccaaggcagacagactctggggtactgtgacttcttgcctcccatgggtggagagtgagtttcggacacctcgggcgcccctgggcctgatccctcctatcacagcatcactggaggctcagaacccacagcctttgctttctgtccatgtcagcatccctgccttaagagaactcctcctggccaatggcattgccacccagcagtgggaccaagactctccaagacctccaggactggatcccattgcctggagaaactccagcaagggtctctcatggcttggacatggcacagtaaggggcagccaacccagtccatgatgacttttgctccaacttcttcatgtttctaaaagcccagtggctttattcactcctcctaaattgcctgctaccagaaggaacttcatcctgaagaaatgcattccattaccagttccagggaaagtgtccccttccccaaagcctcaggcccgtgggcctctgaggttccactggatgcggctcccccaggagtgggcctggagatccgctcagccgccctgcctcccaccttctatcttgggaccgtggtcagccctgaagggtggttccagccccgcgtatgctgcgctttgctgctgcaggctccggtccctccagggcttttcaatgagagttcccaccccaacttggagcatttcatttttgcctacctaaagcaagaatctcaaagtttgtttgaataagaggcccattcacaagtcgtgcccttgtgagcacccctttgctgagtgcctcgtgggtgccaaacactgtacttggcgctttgcattcatgctttgaccctcacaacctccctttatagatgaggaaattcacgctccatgtgcccaaggacacaccagccaggaggaagagggaagaggatttgagtccaggcctgcctgacttcagtgcctgtgccctcccctctgtaaaagacaaaccaggcagggaagagatagaagctggctaagtggtggccaagtggcttcattgtgaggggggtgagggggcattcgtggctgctcccacacccaccatccctccagcccacagcagcctataccaaaggctgccctggactcaacagctgcatctccatgacaggagaatgccagggtcctggtggttgacacagagccctgttccctcttctaagctgttgccccctggggaatagagcttatggagcaacgggagctgaggtggcctcgagggccagcctggagggctctgagcatagcatgcagcggtcccatagggaggcaggtaaccaagggccaggcagagctgcttcctgtgcctctccggcatttgtaatgtttttttcttttttcacgcactgccaaatctgttttctcccttgaagaaacccagggcagatgtggtcatctgtcaaactgaggtctggagaggcatgactaaatcactgcagaagcaaaatcaggacccagcatttctagctcccagcccagagtaagagagcagagcagaaccccttcccattctacccgaccgaggcagccctgccctgccctgccccgcccctccccaccctgccctgccccagagatctccagttcacagtgttcatcaggcgagatacttttggacccacaaagccagttttttggggggatgctcagtgtctacctgcagtgccaaagttttgcttgaacagccctcttctgccgcgcctcccagctccaccccctatcacgtgggtgctggctgcttctgcgtgaggagcttcctctgatcacctgtagcatctttagtgccttcgtccagtcggcctgcaaatcccatttcccagagaggcttgggcagggcccacttgccacttggccctgtgcccagagcgttgggggcagatggcagccaggggaagaagggaggtggggaagggccgccaccgcttgagggtcccctcccttgagaggaggccccatggcagttttcctgagttcttgatccactttggtttaaacaacttttgtgaagctatgtgagatttgactgcatttcaaaagacaaaacacatgtttttttctgatttgctctttgcctttcagcgacgctttcagatactttgtgagtgtctactctgtgctaggtgctgagtagactgggatgtgtgtggctccatccctggctggaagagctttgagtcctgtctgctgacttcactgaaggagtttctctcttgcttcattccttcctcccgggggtcagctgggtaggagcagacttgccctgccttcctctaggcagaaagttttcctgcaaatgaaagaatctgccattctcttttgctatgatgatgatgattattctgacatgacccgcgggtactgaagccacagtcctctctgttcactgttctctccttgagtcatatctatggcctgaggacgtctgtatccagctccttttcctacaatggtagacacttccccaggcagtgggtgggtcagggtggccagtcactctcctagctgtccttgcctggggacttagatttaccccatccaggactgtggtcgctattctgtgagcgattgatggcgcatatgcagaactcccctggagtcatggctctagaaagtgtccaggcccatcgtgacaatggtgccaagcaccgggctggtgaccagtgcctaaacacacacgctcctttaatccttacggcaagcctgtgaggcggataggaccagccctgatctatagtgagaaaattaaggttcagagggagaaggtccaaatagtggccaagctgggactgagatctcgagtttgggtttgtttggttttgttgttgttgttctttccctcgtgtccatgacttttctctgccattagcagggaagtgtgcggagggcttccagggaatcaagtgaccctccctctgaatttcggtgcctcttccccccgccccttgctcacacatttcagtaggtcacaggccaaatggcagcccaaaaggtgggcagagatttttttttcttcccctcacccctgcttattaacacaattgtgacaactactttaccttacatcccagggcaaacggacagcttgcggtacctccaaaaatttggaaaaccctgagtctaagaccacctcttgataaaagaggcctttgctcacatgttctgctcggaatctttctttgccattggtgggtgtatgtcgtcccagctgagactgcgggagagctgagctccagcttaaaccgcttttaatggcccttccctactgggggatcgctggagcccatgccaggttacggtagtcattttaaacctctgccacaaggccacgccatagaatcaatttccaagtcaatgttcttggccctaaaatgtttgcgcccactgaggatttcattaccaggtggaagatgggggaacatatgccacgttaaagagcaagtgctgagtgtgccaggacttgagaaggaccttaggctgaggagtggacagtctggtatttatttcgcctctcccaagtacccagcacagagtgggaaaaagaagaaactgctcctgccttccagtagctggcaacttgacatcaagaacaaaaacattcgtagctggacccccgtcctttcatcgtgcccaagtcttacatgttggcttaagctgcccccttggaggccgtacctttctctttggactgtgacagtggacacctaacagcctgagccatgtgtggctgtcttatcccccaagggttgtccaggcccgttctgcagggctgttgtgtagactgcagacatccatacctcaccacagaccaaagatgacctcgtgtcagactgtgggctgatgagaggtagagcagcatgcatcgaggcctgagggtgcagggcgccctctcttggcctggaggaattgctcctaactagagtaagtttccacgagggtcccaggcagagctgcagagctggaaccggaggctccacagtccttgcctgctcatggacctccttcagagcacctttctacagactggactgcccagctccgtggggtggcatctggtttctggtgctattctgccaagttatcgagctcctcctcatgtttcaacattccatcttcccgtttctatcctcgactccaaagtaagccttcttagctccaatcagggatgaggggctcaacctcttctgtcctcaaagaggccaaacgcagtgccacagtcggtagccttcacttttagatgtcctattcatgtaaaaaagaaggtgcccccaccaggcttacatcagcaataagcaattctaatgcaacgatggtgtccacattttaccccagtgtgtgcccatgtatgcctttgtgcccgtgtaattattgttagcgcccctttcacttagaggggtgatgataaactgtggccaccttgattacaacccacatttcctgctttggggagcttccaagtaacaggccatttcttacctccctccaggaacagtgggcactgcccaccacctcgtgtctgctcataggatgacgctggagatccccacacttactctaccctcttggcaaattggcattccggtggtggtttttgtttcctttaacacattaaataaatgagtatataggatgtgaggggaggggtgagaacaactagctgtagcatgtgtaggctatatactttaccatttgacttctttcctttttttttttttaaataaaaaaagtgcttgactggtttcaagcttcatcatgaa

SEQ ID NO: 27907 - DNA, 3276 bp, Homo sapiens
  source 1..3276: mol_type = unassigned DNA
gtgttcccaagggcctcggccagggtaggatggtacacacatgggtggctgcttctgcatccccagggagcggagtctgacccggggcccaggtaaagaaactccttccaaggatccaactgtatcgagtgagtgtatagcctcatctgaatacaaggaaaaatgttttctgccacagaacattaatccagacctgacactctccttctgtgtaaagagccgctccaggaggtgtgtaaatggacccctacaggaagctgctcggaggcggctctgggcactggagaatgaggaccaggaggtgcgcatgctgtttaaggtattataaaaaaaccaggccgggtgcggtggctcacgcctgtaatcccagcactttgggaggccaaggacctctcagcaaggttggtcagtatccagtctcagagggcccagtttctcatcaccttcaagaccatggaggaaatctggaagttctccacctaccttaatttaggctacgtatccatgtgtctagaacatctcctctttgaccacaagtactggctcaactgcatattggtggaggatacagagatccaagtgtctgtagatgataaacacctggaaacaatatacctgggactcctgatacaggaaggccacttcttctgcagagccctgtgctccgtgactccaccagccgagaaggaaggggaatgcttgacactttgcaagaatgagttaatctcagtgaagatggcagaagctggctccgagttggaaggcgtgtctttggtgacaggtcagcggggcctggtactggtgtcagccttggagcctctgcctctccctttccaccagtggttcctaaagaattatccaggaagctgtggcctttccaggaagagggattggacaggctcctatcagattggcagaggacgctgtaaggccttgacgggttatgagccaggagaaaaggatgaactgaatttctaccagggagaaagcattgagatcatcggctttgtcatacctgggcttcagtggttcattggaaagtcgacaagttcaggacaagtgggctttgtccccaccaggaacatagatcctgattcttattccccaatgagcaggaactctgcctttctcagtgatgaggagagatgctccctgttggccctgggaagtgataagcagactgagtgttccagcttcctccacactcttgctcgcactgacatcacatctgtctaccggctcagtgggtttgaatccatccagaatcctccaaatgatctgagtgcatcccagcctgaaggtttcaaggaggtcaggcctggcagagcctgggaggagcatcaggccgtggggtccagacagtccagcagctctgaggactccagcctggaggaggagctcctctcggccacctcagacagctatcgcctgccggagcctgatgaccttgatgacccggaactgctcatggacctaagcactggtcaggaggaggaggctgagaacttcgcccccatattggcttttctggatcatgagggttatgctgaccactttaagagtctctatgacttctccttctctttcctcacttcttccttttatagcttctctgaggaggatgagtttgtggcctacctggaggcatcaagaaagtgggccaagaagagccacatgacctgggcccatgcccgtctctgcttcctcctgggccggctgagcatcaggaaggtcaaactctctcaggccagggtgtacttcgaggaggccatccacattctcaatggagcatttgaggacctatccttggtggccactctgtacatcaatttggctgccatctacctgaaacagaggctgagacataaaggctccgccctgttggaaaaggcaggtgccctgctggcctgcctgcctgaccgtgagtctagtgccaagcatgaactcgacgtggtggcctacgtgctgcgccaggggattgtggtgggcagcagcccgctggaggccagggcctgctttctggccatccgcttgctcctgagcctaggccggcacgaggaggtcctgccctttgccgagcgcctgcagctcctctctggacaccctcctgcctctgaggctgtggccagtgttttgagttttctgtatgacaagaaatatcttccacaccttgcagtggcctctgtccagcaacatggtatccagagtgcccaagggatgtctcttcctatttggcaggtccaccttgtcctccagaacacaaccaagctccttggctttccttccccaggctggggtgaagtttctgccttggcctgcccaatgctcagacaggccctggctgcctgtgaggaactagcagaccggagcacccagagggccctgtgtctcatcctttccaaagtgtacctcgagcacaggtctcctgacggtgccatccactacctgagccaggccttggtgctagggcagctgctgggtgagcaggaatcctttgagtcttctctctgcctggcatgggcctatctcttagccagccaggccaagaaggctttggatgtgcttgagccactgctatgctccctgaaggagacagagagtctcactcaaaggggagtcatctataacctcctgggacttgcactccaaggtgaaggccgggtgaacagggcagccaagagctatcttcgggccttgaacagagcccaggaggtgggagatgtgcataaccaggcagtggctatggccaatcttggccacctgagccttaagtcctgggctcagcatccagccagaaactatctcctgcaggctgtacgactctattgtgaacttcaggccagtaaggagacagacatggaattagtacaggtgtttctctggttggcccaagttctggtgtctggacaccagctgacccatggccttctttgttatgaaatggcattgctgtttggcttaaggcatcgacatctaaagagtaagtatgtcccatgctgctgggaagctatagagaaaagtgttggatcaagttttatccatttcctatctcaagtcatctcattcatgtccctgctttgtgttcaggtcagcttcaggccaccaaatccctctgccatttctacagctctgtgtccccaaaccctgaggcatgcatcacctaccatgagcactggctggccctggctcagcaactcagggaccgggagatggaagggaggctgctggagtccctggggcagctttatcggaacctaaataccgccaggtgagtca

SEQ ID NO: 27908 - DNA, 2681 bp, Homo sapiens
  source 1..2681: mol_type = unassigned DNA
attatccatgtaacagccatagcacaatcctgggtacatggtaagtccttggtaagtgttgcctgtgccacactattattatattacaggtgctgttgttccccaagtgtaaagtaaatgatattttattctcttcataagctatgttcccattgcaaaaggactgtgccctgaattttaaattagttaatttttagttaaaagtgcattttcccatgaagctaaaatgtaaatgaaggtcaggttcccattaccctaactcagaacatagctgaatatcttgtgtttatgtcaaaagctagtgggaaacaataatagtcatcagaacagataaatggcagaataaaaaagatttaaaaacccctcatcttgaatgttggtgtttgaagaaaagcaggtttgatagagaagccttgattagatgtaagggtaaatgtaatattctgtgatgattccaggagggtcttctgggcattttcaagggcatcgggtgtggatgataccggactttattttgtctaattgcattcttgagagagccttccctcttttccctacctttttccttattgcataggatctcatctgagtgactgtgtgctaatctcaggaaaggccttggaggccccaggcagttcctctgagcactctttatccctcactggatgggagctgaagggaggttgtatgcatcctttatataagtacttcccctgtggctgatttttccatatcagagaattttctctctcttagattttcttttttaattttggcttttggctctttgaagcttaaaagtgatgtttttagatggtatcccacagccaccttgcaaatattccaaagacatgattgtaagcctttgttccctgtaaaagattgctctgtattaaaacaaatccaccaaacaacaagtcatagacccgttagaaaccagcattctaaagcatggtttaagtgtgaacaggtgtttgtagcttatctgagactgacagtaggtaaaggggccaaggagagactgctacatggtggtacccaagataattctctgaagagagagacttttgtgtgaggaagacatttattatacagagtgatttattgcaattcttagctactccatcaagctagacttgtcaccatgtcccattaaaagggtttaagaagaattctttctcagaatcctgcattacagtagcatctgcaataaggagaaaattttcttctgggaatcactccaggaaaccttgacccatcctctacttagtcactcttatagagccctgcattttcttttgtagcatttatgacatgtgtaatgttacatttgtttgtgggattatttaaggaatgtctgtcatgtgagacaataagctttatgagtacaggcacctcttctgtcttatttcctatgccccagcacagtccctgacatctagtagaccttcaaaaagttttatggaatgaatgagtgaacaaatgatgcaaagtgttggttgcaggatatctctctcagtcttccaattcttaggagatcagaggcaagagctggtggcctttcaccgcctggctacagtgtactactccctgcacatgtatgagatggctgaggactgctacctgaagaccctgtccctctgtccaccatggctgcagagtcccaaggaggccctgtactatgccaaggtgtattatcgcctgggcagactcaccttctgccagctgaaggatgcccatgatgccactgagtacttccttctggccctggcagcagcggtcctgctgggtgatgaggagcttcaggacaccattaggagcaggctggacaacatctgccagagccccctgtggcacagcaggccctccgggtgctcctcagagagggcgcggtggctgagtggtggtggcctggccctctgaggaaagctgtcctgtctctggacatttggcatggccagactctgaccccactgccctaggctcttaaatactcattgggagggtccgagtccttacctggcctagccccctcatttcacaagaagaagaatgaagtccaggaggagaagggctcattgcaggccacagaaagatttgatggtgcagcgatgagaattcctggttccaggctttgcatctggagcctttaccggttgactgttgccttccacacaaacagcctctgaaaagcactttctccatacataattctggagaagatgagggatcttgccctccaggagccttccttcctcccccaatgaggaaatcagtcactgcactggtgcaaaggcaagcagattggaatttgtgctcttcaccgattttctcagggaaagaccccttccccttgccagcagaggaacctgtagttttttccatttctttcttcagaaccaaagtatgtatcactcctcatgctcacagggattgacaggagagaattcaccaggatcttagctcaaaagacacagcctcagaatggccagatggattgcacgaaacctgacttggattcaccatcttcctcctgccataaggctgtgctcccacataacctcccagaagctccagggaagctttccaagagcaaaggcttggaaattgaatgttaagaaaattatgacataaattacatgtaaatagtgtatatgattaaatattgtccagttacattt

SEQ ID NO: 27909 - DNA, 4059 bp, Homo sapiens
  source 1..4059: mol_type = unassigned DNA
agggaggaggcgggaggagggacaccgttgggaggctgtcccttgcagcactcttctggcctgtgttcccaagggcctcggccagggtaggatggtacacacatgggtggctgcttctgcatccccagggagcggagtctgacccggggcccaggtaaagaaactccttccaaggatccaactgtatcgagtgagtgtatagcctcatctgaatacaaggaaaaatgttttctgccacagaacattaatccagacctgacactctccttctgtgtaaagagccgctccaggaggtgtgtaaatggacccctacaggaagctgctcggaggcggctctgggcactggagaatgaggaccaggaggtgcgcatgctgtttaaggacctctcagcaaggttggtcagtatccagtctcagagggcccagtttctcatcaccttcaagaccatggaggaaatctggaagttctccacctaccttaatttaggctacgtatccatgtgtctagaacatctcctctttgaccacaagtactggctcaactgcatattggtggaggatacagagatccaagtgtctgtagatgataaacacctggaaacaatatacctgggactcctgatacaggaaggccacttcttctgcagagccctgtgctccgtgactccaccagccgagaaggaaggggaatgcttgacactttgcaagaatgagttaatctcagtgaagatggcagaagctggctccgagttggaaggcgtgtctttggtgacaggtcagcggggcctggtactggtgtcagccttggagcctctgcctctccctttccaccagtggttcctaaagaattatccaggaagctgtggcctttccaggaagagggattggacaggctcctatcagattggcagaggacgctgtaaggccttgacgggttatgagccaggagaaaaggatgaactgaatttctaccagggagaaagcattgagatcatcggctttgtcatacctgggcttcagtggttcattggaaagtcgacaagttcaggacaagtgggctttgtccccaccaggaacatagatcctgattcttattccccaatgagcaggaactctgcctttctcagtgatgaggagagatgctccctgttggccctgggaagtgataagcagactgagtgttccagcttcctccacactcttgctcgcactgacatcacatctgtctaccggctcagtgggtttgaatccatccagaatcctccaaatgatctgagtgcatcccagcctgaaggtttcaaggaggtcaggcctggcagagcctgggaggagcatcaggccgtggggtccagacagtccagcagctctgaggactccagcctggaggaggagctcctctcggccacctcagacagctatcgcctgccggagcctgatgaccttgatgacccggaactgctcatggacctaagcactggtcaggaggaggaggctgagaacttcgcccccatattggcttttctggatcatgagggttatgctgaccactttaagagtctctatgacttctccttctctttcctcacttcttccttttatagcttctctgaggaggatgagtttgtggcctacctggaggcatcaagaaagtgggccaagaagagccacatgacctgggcccatgcccgtctctgcttcctcctgggccggctgagcatcaggaaggtcaaactctctcaggccagggtgtacttcgaggaggccatccacattctcaatggagcatttgaggacctatccttggtggccactctgtacatcaatttggctgccatctacctgaaacagaggctgagacataaaggctccgccctgttggaaaaggcaggtgccctgctggcctgcctgcctgaccgtgagtctagtgccaagcatgaactcgacgtggtggcctacgtgctgcgccaggggattgtggtgggcagcagcccgctggaggccagggcctgctttctggccatccgcttgctcctgagcctaggccggcacgaggaggtcctgccctttgccgagcgcctgcagctcctctctggacaccctcctgcctctgaggctgtggccagtgttttgagttttctgtatgacaagaaatatcttccacaccttgcagtggcctctgtccagcaacatggtatccagagtgcccaagggatgtctcttcctatttggcaggtccaccttgtcctccagaacacaaccaagctccttggctttccttccccaggctggggtgaagtttctgccttggcctgcccaatgctcagacaggccctggctgcctgtgaggaactagcagaccggagcacccagagggccctgtgtctcatcctttccaaagtgtacctcgagcacaggtctcctgacggtgccatccactacctgagccaggccttggtgctagggcagctgctgggtgagcaggaatcctttgagtcttctctctgcctggcatgggcctatctcttagccagccaggccaagaaggctttggatgtgcttgagccactgctatgctccctgaaggagacagagagtctcactcaaaggggagtcatctataacctcctgggacttgcactccaaggtgaaggccgggtgaacagggcagccaagagctatcttcgggccttgaacagagcccaggaggtgggagatgtgcataaccaggcagtggctatggccaatcttggccacctgagccttaagtcctgggctcagcatccagccagaaactatctcctgcaggctgtacgactctattgtgaacttcaggccagtaaggagacagacatggaattagtacaggtgtttctctggttggcccaagttctggtgtctggacaccagctgacccatggccttctttgttatgaaatggcattgctgtttggcttaaggcatcgacatctaaagagtcagcttcaggccaccaaatccctctgccatttctacagctctgtgtccccaaaccctgaggcatgcatcacctaccatgagcactggctggccctggctcagcaactcagggaccgggagatggaagggaggctgctggagtccctggggcagctttatcggaacctaaataccgccaggtccctcaggaggtcactcacatgcatcaaggagagcctgcgtatcttcattgacctgggggagacagacaaggctgctgaggcctggcttggggcggggcgactccactacctcatgcaggaagacgagctggtggagctgtgcctgcaggcagccatccagacagccctgaagtcagaggagcctttgctggctctcaaactttatgaagaagcaggtgatgtgttcttcaatgggacccgccacaggcatcatgcagtggagtactaccgagctggagctgttcctttagcaaggaggttgaaggcggtgagaactgagctccggattttcaataagctgacagagctgcagattagcctcgaaggctatgagaaggctttggaatttgccaccctggccgccaggctcagcacagtcacaggagatcagaggcaagagctggtggcctttcaccgcctggctacagtgtactactccctgcacatgtatgagatggctgaggactgctacctgaagaccctgtccctctgtccaccatggctgcagagtcccaaggaggccctgtactatgccaaggtgtattatcgcctgggcagactcaccttctgccagctgaaggatgcccatgatgccactgagtacttccttctggccctggcagcagcggtcctgctgggtgatgaggagcttcaggacaccattaggagcaggctggacaacatctgccagagccccctgtggcacagcaggccctccgggtgctcctcagagagggcgcggtggctgagtggtggtggcctggccctctgaggaaagctgtcctgtctctggacatttggcatggccagactctgaccccactgccctaggctcttaaatactcattgggagggtccgagt

SEQ ID NO: 27910 - DNA, 4153 bp, Homo sapiens
  source 1..4153: mol_type = unassigned DNA
tgcaagaatgagttaatctcagtgaagatggcagaagctggctccgagttggaaggcgtgtctttggtgacaggtcagcggggcctggtactggtgtcagccttggagcctctgcctctccctttccaccagtggttcctaaagaattatccaggaagctgtggcctttccaggaagagggattggacaggctcctatcagattggcagaggacgctgtaaggccttgacgggttatgagccaggagaaaaggatgaactgaatttctaccagggagaaagcattgagatcatcggctttgtcatacctgggcttcagtggttcattggaaagtcgacaagttcaggacaagtgggctttgtccccaccaggaacatagatcctgattcttattccccaatgacttggtgtgtttcttcaatatgaagattcatgtctttcttcaattctggaaaattttcagtccttcttcctttgaatattgcctctctctcgttctttttagtctctcttctggaattcctattagaggagcaggaactctgcctttctcagtgatgaggagagatgctccctgttggccctgggaagtgataagcagactgagtgttccagcttcctccacactcttgctcgcactgacatcacatctgtctaccggctcagtgggtttgaatccatccagaatcctccaaatgatctgagtgcatcccagcctgaaggtttcaaggaggtcaggcctggcagagcctgggaggagcatcaggccgtggggtccagacagtccagcagctctgaggactccagcctggaggaggagctcctctcggccacctcagacagctatcgcctgccggagcctgatgaccttgatgacccggaactgctcatggacctaagcactggtcaggaggaggaggctgagaacttcgcccccatattggcttttctggatcatgagggttatgctgaccactttaagagtctctatgacttctccttctctttcctcacttcttccttttatagcttctctgaggaggatgagtttgtggcctacctggaggcatcaagaaagtgggccaagaagagccacatgacctgggcccatgcccgtctctgcttcctcctgggccggctgagcatcaggaaggtcaaactctctcaggccagggtgtacttcgaggaggccatccacattctcaatggagcatttgaggacctatccttggtggccactctgtacatcaatttggctgccatctacctgaaacagaggctgagacataaaggctccgccctgttggaaaaggcaggtgccctgctggcctgcctgcctgaccgtgagtctagtgccaagcatgaactcgacgtggtggcctacgtgctgcgccaggggattgtggtgggcagcagcccgctggaggccagggcctgctttctggccatccgcttgctcctgagcctaggccggcacgaggaggtcctgccctttgccgagcgcctgcagctcctctctggacaccctcctgcctctgaggctgtggccagtgttttgagttttctgtatgacaagaaatatcttccacaccttgcagtggcctctgtccagcaacatggtatccagagtgcccaagggatgtctcttcctatttggcaggtccaccttgtcctccagaacacaaccaagctccttggctttccttccccaggctggggtgaagtttctgccttggcctgcccaatgctcagacaggccctggctgcctgtgaggaactagcagaccggagcacccagagggccctgtgtctcatcctttccaaagtgtacctcgagcacaggtctcctgacggtgccatccactacctgagccaggccttggtgctagggcagctgctgggtgagcaggaatcctttgagtcttctctctgcctggcatgggcctatctcttagccagccaggccaagaaggctttggatgtgcttgagccactgctatgctccctgaaggagacagagagtctcactcaaaggggagtcatctataacctcctgggacttgcactccaaggtgaaggccgggtgaacagggcagccaagagctatcttcgggccttgaacagagcccaggaggtgggagatgtgcataaccaggcagtggctatggccaatcttggccacctgagccttaagtcctgggctcagcatccagccagaaactatctcctgcaggctgtacgactctattgtgaacttcaggccagtaaggagacagacatggaattagtacaggtgtttctctggttggcccaagttctggtgtctggacaccagctgacccatggccttctttgttatgaaatggcattgctgtttggcttaaggcatcgacatctaaagagtcagcttcaggccaccaaatccctctgccatttctacagctctgtgtccccaaaccctgaggcatgcatcacctaccatgagcactggctggccctggctcagcaactcagggaccgggagatggaagggaggctgctggagtccctggggcagctttatcggaacctaaataccgccaggtccctcaggaggtcactcacatgcatcaaggagagcctgcgtatcttcattgacctgggggagacagacaaggctgctgaggcctggcttggggcggggcgactccactacctcatgcaggaagacgagctggtggagctgtgcctgcaggcagccatccagacagccctgaagtcagaggagcctttgctggctctcaaactttatgaagaagcaggtgatgtgttcttcaatgggacccgccacaggcatcatgcagtggagtactaccgagctggagctgttcctttagcaaggaggttgaaggcggtgagaactgagctccggattttcaataagctgacagagctgcagattagcctcgaaggctatgagaaggctttggaatttgccaccctggccgccaggctcagcacagtcacagaggcaagagctggtggcctttcaccgcctggctacagtgtactactccctgcacatgtatgagatggctgaggactgctacctgaagaccctgtccctctgtccaccatggctgcagagtcccaaggaggccctgtactatgccaaggtgtattatcgcctgggcagactcaccttctgccagctgaaggatgcccatgatgccactgagtacttccttctggccctggcagcagcggtcctgctgggtgatgaggagcttcaggacaccattaggagcaggctggacaacatctgccagagccccctgtggcacagcaggccctccgggtgctcctcagagagggcgcggtggctgagtggtggtggcctggccctctgaggaaagctgtcctgtctctggacatttggcatggccagactctgaccccactgccctaggctcttaaatactcattgggagggtccgagtccttacctggcctagccccctcatttcacaagaagaagaatgaagtccaggaggagaagggctcattgcaggccacagaaagatttgatggtgcagcgatgagaattcctggttccaggctttgcatctggagcctttaccggttgactgttgccttccacacaaacagcctctgaaaagcactttctccatacataattctggagaagatgagggatcttgccctccaggagccttccttcctcccccaatgaggaaatcagtcactgcactggtgcaaaggcaagcagattggaatttgtgctcttcaccgattttctcagggaaagaccccttccccttgccagcagaggaacctgtagttttttccatttctttcttcagaaccaaagtatgtatcactcctcatgctcacagggattgacaggagagaattcaccaggatcttagctcaaaagacacagcctcagaatggccagatggattgcacgaaacctgacttggattcaccatcttcctcctgccataaggctgtgctcccacataacctcccagaagctccagggaagctttccaagagcaaaggcttggaaattgaatgttaagaaaattatgacataaattacatgtaaatagtgtatatgattaaatattgtccagttacatttacacac

SEQ ID NO: 27911 - DNA, 1251 bp, Homo sapiens
  source 1..1251: mol_type = unassigned DNA
gctgcttttatcgaccaatcaaatattttcctgacagatcccaaaatattcctgggccaatggagggaggagcccaagatgcctctgctgctccttggagagacagagcctcttaagttggagcgggactgccggagcccagtggacccctgggctgctgccagccccgacctggcacttgcttgcctgtgtcactgtcaggatttgtctagcggcgcattccctgacaggggtgtgttggggggagtcctctttccaactgtcgaaatggttatcaaagtgtttgttgctacatcttctgggtccatagcgattaggaagaaacagcaagaagtagtgggttttttggaagcgaataaaatcgactttaaggaattagatattgctggagatgaagacaacaggaggtggatgagagagaatgttcctggagagaaaaaacctcaaaatgggattcctttgcctccccagatcttcaatgaggagcagtactgtggggattttgactctttcttctctgcaaaagaagagaatattatttattccttccttggtttggctcctcctccagactcaaagggatcagagaaggctgaagaaggtggagaaactgaggcacaaaaagagggcagtgaagatgtgggcaacctccctgaagcccaggagaagaatgaagaagaaggagagacagccacagaagagacggaagaaatagccatggagggtgcggaaggggaagccgaggaggaggaagaaactgcagaaggagaagagcctggagaagacgaagattcctaggccttttcatgcttcatttcttccacttctccagaaaatggaagctatgaagcaacatttcaaatgtctctccacaaaccaaactcaacagaatactttggcttgaagccggcacacccagggttactgaggacttatgctgcctgacctggttagatgtacatggaggtatctcccgaatcatacaaaattaaatgtgaagaccgtttatgcataccttcatgtgcctgacagtcttggcttttgaagatttttttttcttttttgctctgcatagctagaccatcttattaataatactctgaaaaaaatgatttcaaggcatggaagttctctgtgatacaacaatagtatttcttcaaatgcgccttatgctacttatctcagaaacaggttttaaaatgaagtgctttccagagaaccatcatataaataaagattaatagaaaaata

SEQ ID NO: 27912 - DNA, 780 bp, Homo sapiens
  source 1..780: mol_type = unassigned DNA
tgtagacgtctgtaaacgatcctcctgccgtccctgttcggcgcccgggaccctgccttcccgcgtggccgcaccgagacgagggagcctgtcacgcgctctggcgctctcctgacctcttaaggctctgtcagtcttagattaggaagaaacagcaagaagtagtgggttttttggaagcgaataaaatcgactttaaggaattagatattgctggagatgaagacaacaggaggtggatgagagagaatgttcctggagagaaaaaacctcaaaatgggattcctttgcctccccagatcttcaatgaggagcagtactgtggggattttgactctttcttctctgcaaaagaagagaatattatttattccttccttggtttggctcctcctccagactcaaagggatcagagaaggctgaagaaggtggagaaactgaggcacaaaaagagggcagtgaagatgtgggcaacctccctgaagcccaggagaagaatgaagaagaaggagagacagccacagaagagacggaagaaatagccatggagggtgcggaaggggaagccgaggaggaggaagaaactgcagaaggagaagagcctggagaagacgaagattcctaggccttttcatgcttcatttcttccacttctccagaaaatggaagctatgaagcaacatttcaaatgtctctccacaaaccaaactcaacagaatactttggcttgaagccggcacacccagggttactgaggacttatgctgcctgacctggtt

SEQ ID NO: 27913 - DNA, 816 bp, Homo sapiens
  source 1..816: mol_type = unassigned DNA
ggcggggaggggcgtcttgggcctggagattaggaagaaacagcaagaagtagtgggttttttggaagcgaataaaatcgactttaaggaattagatattgctggagatgaagacaacaggaggtggatgagagagaatgttcctggagagaaaaaacctcaaaatgggattcctttgcctccccagatcttcaatgaggagcagtactgtggggattttgactctttcttctctgcaaaagaagagaatattatttattccttccttggtttggctcctcctccagactcaaagggatcagagaaggctgaagaaggtggagaaactgaggcacaaaaagagggcagtgaagatgtgggcaacctccctgaagcccaggagaagaatgaagaagaaggagagacagccacagaagagacggaagaaatagccatggagggtgcggaaggggaagccgaggaggaggaagaaactgcagaaggagaagagcctggagaagacgaagattcctaggccttttcatgcttcatttcttccacttctccagaaaatggaagctatgaagcaacatttcaaatgtctctccacaaaccaaactcaacagaatactttggcttgaagccggcacacccagggttactgaggacttatgctgcctgacctggttagatgtacatggaggtatctcccgaatcatacaaaattaaatgtgaagaccgtttatgcataccttcatgtgcctgacagtcttggcttttgaagatttttttttcttttttgctctgcatagctagaccatcttattaataatactc

SEQ ID NO: 27914 - DNA, 1014 bp, Homo sapiens
  source 1..1014: mol_type = unassigned DNA
caggagccgcggcggggaggggcgtcttgggcctggaggtcagtgtggcctcgcgtttgtcttcggtgacgggaaattaggaagaaacagcaagaagtagtgggttttttggaagcgaataaaatcgactttaaggaattagatattgctggagatgaagacaacaggaggtggatgagagagaatgttcctggagagaaaaaacctcaaaatgggattcctttgcctccccagatcttcaatgaggagcagtactgtggggattttgactctttcttctctgcaaaagaagagaatattatttattccttccttggtttggctcctcctccagactcaaagggatcagagaaggctgaagaaggtggagaaactgaggcacaaaaagagggcagtgaagatgtgggcaacctccctgaagcccaggagaagaatgaagaagaaggagagacagccacagaagagacggaagaaatagccatggagggtgcggaaggggaagccgaggaggaggaagaaactgcagaaggagaagagcctggagaagacgaagattcctaggccttttcatgcttcatttcttccacttctccagaaaatggaagctatgaagcaacatttcaaatgtctctccacaaaccaaactcaacagaatactttggcttgaagccggcacacccagggttactgaggacttatgctgcctgacctggttagatgtacatggaggtatctcccgaatcatacaaaattaaatgtgaagaccgtttatgcataccttcatgtgcctgacagtcttggcttttgaagatttttttttcttttttgctctgcatagctagaccatcttattaataatactctgaaaaaaatgatttcaaggcatggaagttctctgtgatacaacaatagtatttcttcaaatgcgccttatgctacttatctcagaaacaggttttaaaatgaagtgctttccagagaaccatcatataaataaagattaatagaaaaata

SEQ ID NO: 27915 - DNA, 585 bp, Homo sapiens
  source 1..585: mol_type = unassigned DNA
tgagtttcttgtgtagacgtctgtaaacgatcctcctgccgtccctgttcggcgcccgggaccctgccttcccgcgtggccgcaccgagacgagggagcctgtcacgcgctctggcgctctcctgacctcttaaggctctgtcagtcttaggtaacttgagtcagtagattaggaagaaacagcaagaagtagtgggttttttggaagcgaataaaatcgactttaaggaattagatattgctggagatgaagacaacaggaggtggatgagagagaatgttcctggagagaaaaaacctcaaaatgggattcctttgcctccccagatcttcaatgaggagcagtactgtggggattttgactctttcttctctgcaaaagaagagaatattatttattccttccttggtttggctcctcctccagactcaaagggatcagagaaggctgaagaaggtggagaaactgaggcacaaaaagagggcagtgaagatgtgggcaacctccctgaagcccaggagaagaatgaagaagaaggagagacagccacagaagagacggaagaaatagccatggagggtgcg

SEQ ID NO: 27916 - DNA, 5273 bp, Homo sapiens
  source 1..5273: mol_type = unassigned DNA
tcatttttccccctccccattctgttagaagcttctgccaaccatgattcatggaatgatttttttgagctgagtaatctgtggctttgcagtttccttgctttctttccttagctaaatctcttctagtgttagcaaagtatttagcacaggaaagatcttataaaatgaaataatgcatgtaatgatgcattttccaagtagatgattttaacaaaccgtaagcttttatgcctgtccttcattgtgtcttttctgcctctgtcaggcgaactgtgatgaagagccttatacttaggaagacacaactacctttgaacagtcctttgtgaaatctaatgatcgcaacgaacgaaataaaccagaacatcgttcttcaagccaaggacccttgtcatccattagagcggtaatcaagagatcttctcggacttctattcagagtgaacttcatcgagatagaaggcgcccagagatcaccattgtggcagctgagccactgaggccagcctcgtggtttccaggaaccccacccccaggactgggatttcctacatcatctgcagcaggctcttggaggcctaatgagctggttcctgctgagctcccaccatcttatgaacaagttataaaagaaatcaaccaagttcaagttaatactacaaataataataatgctgctgctactccaaggcacactattacttctgcaactcagactgacttttcagaagaaatagacaacgatctgcctcaaagttttgttttggtctcgtcagcactacaggcacctctcaagcctcttcagcctttctcagcagtctcgtctggcaatcttccaacaaatgtggcacctttaatcgtctttgatatttctgaagaaccgaattgtccagaaaaccccagtgctacaagatgtccagtgccaaaaccaagatcaaaaagcaacctcagaccaatacccagagattctcacattaaagagcaaagtcaacagaaaatcagcccagcagccgtaggagaggagtcatccccaggccggccccagtctctgctggacaacgctagcacctcagacagtcaggcagtgatgaacattatgaacacagaacaaagccaaaatagtattgtttccagaattaaagtgtttgagggtcagacaaacatagaaacctcaggactgcccaagaaaccagaaattactccacgttcacttcctccaaagcctactgtttcctcagggaaaccttctgtagctcccaaaccagctgctaacagagcttctggagagtgggactctgggactgagaacagactcaaggtgacctccaaggaaggactcaccccataccctcccctgcaagaagcgggaagcatcccagtaaccaaacctgaattgccaaagaaaccaaaccctggccttatacgaagtgttaatcctgagattccgggaagagggcccctggctgagagctctgatagtgggaagaaagtgccaactcctgccccgcggcctttgctgctgaagaaatctgtttcctcagaaaaccccacctacccttcagctccactgaaacctgtcactgttcctccccgactcgcaggggcatcacaagccaaagcatacaagtcactgggagaagggcccccagccaaccccccagttccagttctgcagagcaagcccttggtggacatcgatctcatcagctttgatgatgatgttttgcccaccccatcggggaacctggctgaagaatctgttggttcagagatggttctagatccctttcagctccctgcaaaaacagaaccaataaaagaacgagcagttcaaccagcacccaccaggaagcccactgtaattcgaattccagccaaaccaggaaaatgtttacatgaggatccacaaagtccacctcctctccctgctgaaaaacctattggaaacactttcagtacagtatctggaaagctcagtaatgttgagagaactagaaacttggaatccaaccacccaggtcaaacaggaggttttgtgcgagtacccccaaggttgccaccgagacctgtgaatggaaaaaccattccaactcaacagcctccaaccaaggtgccccctgagagaccacctcccccaaagctttctgcaaccagaagatctaataagaaactgccttttaatcgatcctcttctgacatggatcttcagaaaaaacaaagtaacttggcaactggactctcaaaagccaagagtcaagtttttaaaaatcaagatccggtgctaccccctcgtcccaaaccaggacaccctctctacagtaaatacatgctgtctgtgcctcatggaattgccaatgaagatattgtctctcaaaaccccggagaactctcttgtaagcgtggggatgtacttgtgatgctgaagcagacggaaaataattacttggagtgccaaaagggagaagacactggcagagttcacctgtctcaaatgaagattatcactccacttgatgaacatcttagaagcagaccaaacgatccaagccacgctcagaagcctgttgacagtggtgctcctcatgctgtcgttcttcatgatttcccagcagagcaagttgatgatttgaacctcacttctggagaaattgtttatcttctggagaagatagatacagattggtacagagggaactgtagaaaccagattggcatatttcctgccaactatgtcaaagtgattattgatatcccagaaggaggaaatgggaaaagagaatgtgtttcatctcattgtgttaaaggctcaagatgtgttgctcggtttgaatatattggagagcagaaggatgagttgagtttctcagagggagaaattattattcttaaagagtatgtgaatgaggaatgggccagaggagaagttcgaggcagaactgggattttccccctgaactttgtggagcctgttgaggattatcccacctctggtgcaaatgttttaagcacaaaggtaccactgaaaaccaaaaaagaagattctggctcaaactctcaggttaacagtcttccggcagaatggtgtgaagctcttcacagttttacagcagagaccagtgatgacttatcattcaagaggggagaccggatccagattctggaacgtctggattctgactggtgcaggggcagactgcaggacagggaggggatcttcccagcagtgtttgtgaggccctgcccagctgaggcaaaaagtatgttggccatagtaccgaaggggaggaaggccaaagccttatatgatttccgaggggagaatgaagatgaactttccttcaaggctggagatataataacagagctggaatctgtagatgatgactggatgagtggagaacttatgggaaaatctggaatatttcccaaaaactacatacagtttctacagatcagctagaggagaagcttgtctgtgttccttggcacaagaactcacttgaactatcaccttgactatcagatatgtttttgcactattttttttaactgaaaaagaaatatctaagctgtacatggtacactagaattttctgaaagcagaaaacgttcagattttgtagttaattttcattacaatagaaacatgcacatggaaacccatgagctaggattctaccgaggaaaacatctagtgggattagcaaggtgaagggaaagcatctggtggcatggcagcatggggaggctcacacacagaagttgcacgtggacatctgttttaatcagcacaagtgaattaaccatgcttcttcatttttttactttagttaaaaaagaggacatttaatattctacatgctgtaactatcaggacatggttagcaatctcaatttcatttttgatattcaaattaattcttacagcttgagcatatcagccttattaccagagcaaatccttccttcagatgggatagtttactgactagttggagcatttgtaagcacatggtgaaatcagcccctgcccaccaaaataatctttatgttaccaagtgattcccatttgtctaaggatttgaagggggtctaaattggatgtatcttacttagtctaaagaaccaaaaccatccctgaaatgccttgctaatacaactaatccttccatatatgtgccatacttatttttttcctcagtgtatactttatgttaacagggttattacaaagcacattttctgaatctgcaatcattcctttgacaattactggacccaaaggaaaattcattttctttgcattattccagtaatatataaaaactgtgtcttgttatagtagtacattatgaatcacatataaaatcttacaatacagaacaactgttaagatggaaaacagtgccaaacctccacagctcatttctttgtaatataatcagaatgaaaaataatttaagaggacagaagactggtacttttttgttttattttttctctagcttatccctgcacaattattagagtgaatgaaaaaccactttcctgctttccattgttataaattctaagcttaagataaaagtggttctttacatgactgaatcaattacaatttatgggctagagccaaataggttgaagacaatcatccaaacagatcaatggaatagaatttcattggaaatgtaaaacactttcccaacaatggtcatgactttcttctgtttttgagaagagtttcatatgctggaccacattttagcttttattgttttttttttcccattgtccaaaaagttaagcaacaagtggccacacttttacgtgactacaacctggagttctgcaaagaaggtaatatttacttggtctttgactaaagttatctccccattctatggttacattttattttggactatggggacttctaatacgttttggtaaagaagagagtataaagaaaattcttgtcaaatttcactcaaaagtaatttcatgagaaatcaatgatttaaagcattatccaaattaaattatcatttgcagcaaactgtacaacagcaggaaggatatggaatggaacatgaggtatatatctttgcctttataattttaacatcttatattgaagattctgaaaacctatctttattagaggaaaatctcaatcttcagttttggccttctgtcagcagaatgataagtgcaatagttgtaaatctacttgacactgtaataaactgaactgaactttcaaagtc

SEQ ID NO: 27917 - DNA, 4888 bp, Homo sapiens
  source 1..4888: mol_type = unassigned DNA
ccagaacatcgttcttcaagccaaggacccttgtcatccattagagcggtaatcaagagatcttctcggacttctattcagagtgaacttcatcgagatagaaggcgcccagagatcaccattgtggcagctgagccactgaggccagcctcgtggtttccaggaaccccacccccaggactgggatttcctacatcatctgcagcaggctcttggaggcctaatgagctggttcctgctgagctcccaccatcttatgaacaagttataaaagaaatcaaccaagttcaagttaatactacaaataataataatgctgctgctactccaaggcacactattacttctgcaactcagactgacttttcagaagaaatagacaacgatctgcctcaaacactacaggcacctctcaagcctcttcagcctttctcagcagtctcgtctggcaatcttccaacaaatgtggcacctttaatcgtctttgatatttctgaagaaccgaattgtccagaaaaccccagtgctacaagatgtccagtgccaaaaccaagatcaaaaagcaacctcagaccaatacccagagattctcacattaaagagcaaagtcaacagaaaatcagcccagcagccgtaggagaggagtcatccccaggccggccccagtctctgctggacaacgctagcacctcagacagtcaggcagtgatgaacattatgaacacagaacaaagccaaaatagtattgtttccagaattaaagtgtttgagggtcagacaaacatagaaacctcaggactgcccaagaaaccagaaattactccacgttcacttcctccaaagcctactgtttcctcagggaaaccttctgtagctcccaaaccagctgctaacagagcttctggagagtgggactctgggactgagaacagactcaaggtgacctccaaggaaggactcaccccataccctcccctgcaagaagcgggaagcatcccagtaaccaaacctgaattgccaaagaaaccaaaccctggccttatacgaagtgttaatcctgagattccgggaagagggcccctggctgagagctctgatagtgggaagaaagtgccaactcctgccccgcggcctttgctgctgaagaaatctgtttcctcagaaaaccccacctacccttcagctccactgaaacctgtcactgttcctccccgactcgcaggggcatcacaagccaaagcatacaagtcactgggagaagggcccccagccaaccccccagttccagttctgcagagcaagcccttggtggacatcgatctcatcagctttgatgatgatgttttgcccaccccatcggggaacctggctgaagaatctgttggttcagagatggttctagatccctttcagctccctgcaaaaacagaaccaataaaagaacgagcagttcaaccagcacccaccaggaagcccactgtaattcgaattccagccaaaccaggaaaatgtttacatgaggatccacaaagtccacctcctctccctgctgaaaaacctattggaaacactttcagtacagtatctggaaagctcagtaatgttgagagaactagaaacttggaatccaaccacccaggtcaaacaggaggttttgtgcgagtacccccaaggttgccaccgagacctgtgaatggaaaaaccattccaactcaacagcctccaaccaaggtgccccctgagagaccacctcccccaaagctttctgcaaccagaagatctaataagaaactgccttttaatcgatcctcttctgacatggatcttcagaaaaaacaaagtaacttggcaactggactctcaaaagccaagagtcaagtttttaaaaatcaagatccggtgctaccccctcgtcccaaaccaggacaccctctctacagtaaatacatgctgtctgtgcctcatggaattgccaatgaagatattgtctctcaaaaccccggagaactctcttgtaagcgtggggatgtacttgtgatgctgaagcagacggaaaataattacttggagtgccaaaagggagaagacactggcagagttcacctgtctcaaatgaagattatcactccacttgatgaacatcttagaagcagaccaaacgatccaagccacgctcagaagcctgttgacagtggtgctcctcatgctgtcgttcttcatgatttcccagcagagcaagttgatgatttgaacctcacttctggagaaattgtttatcttctggagaagatagatacagattggtacagagggaactgtagaaaccagattggcatatttcctgccaactatgtcaaagtgattattgatatcccagaaggaggaaatgggaaaagagaatgtgtttcatctcattgtgttaaaggctcaagatgtgttgctcggtttgaatatattggagagcagaaggatgagttgagtttctcagagggagaaattattattcttaaagagtatgtgaatgaggaatgggccagaggagaagttcgaggcagaactgggattttccccctgaactttgtggagcctgttgaggattatcccacctctggtgcaaatgttttaagcacaaaggtaccactgaaaaccaaaaaagaagattctggctcaaactctcaggttaacagtcttccggcagaatggtgtgaagctcttcacagttttacagcagagaccagtgatgacttatcattcaagaggggagaccggatccagattctggaacgtctggattctgactggtgcaggggcagactgcaggacagggaggggatcttcccagcagtgtttgtgaggccctgcccagctgaggcaaaaagtatgttggccatagtaccgaaggggaggaaggccaaagccttatatgatttccgaggggagaatgaagatgaactttccttcaaggctggagatataataacagagctggaatctgtagatgatgactggatgagtggagaacttatgggaaaatctggaatatttcccaaaaactacatacagtttctacagatcagctagaggagaagcttgtctgtgttccttggcacaagaactcacttgaactatcaccttgactatcagatatgtttttgcactattttttttaactgaaaaagaaatatctaagctgtacatggtacactagaattttctgaaagcagaaaacgttcagattttgtagttaattttcattacaatagaaacatgcacatggaaacccatgagctaggattctaccgaggaaaacatctagtgggattagcaaggtgaagggaaagcatctggtggcatggcagcatggggaggctcacacacagaagttgcacgtggacatctgttttaatcagcacaagtgaattaaccatgcttcttcatttttttactttagttaaaaaagaggacatttaatattctacatgctgtaactatcaggacatggttagcaatctcaatttcatttttgatattcaaattaattcttacagcttgagcatatcagccttattaccagagcaaatccttccttcagatgggatagtttactgactagttggagcatttgtaagcacatggtgaaatcagcccctgcccaccaaaataatctttatgttaccaagtgattcccatttgtctaaggatttgaagggggtctaaattggatgtatcttacttagtctaaagaaccaaaaccatccctgaaatgccttgctaatacaactaatccttccatatatgtgccatacttatttttttcctcagtgtatactttatgttaacagggttattacaaagcacattttctgaatctgcaatcattcctttgacaattactggacccaaaggaaaattcattttctttgcattattccagtaatatataaaaactgtgtcttgttatagtagtacattatgaatcacatataaaatcttacaatacagaacaactgttaagatggaaaacagtgccaaacctccacagctcatttctttgtaatataatcagaatgaaaaataatttaagaggacagaagactggtacttttttgttttattttttctctagcttatccctgcacaattattagagtgaatgaaaaaccactttcctgctttccattgttataaattctaagcttaagataaaagtggttctttacatgactgaatcaattacaatttatgggctagagccaaataggttgaagacaatcatccaaacagatcaatggaatagaatttcattggaaatgtaaaacactttcccaacaatggtcatgactttcttctgtttttgagaagagtttcatatgctggaccacattttagcttttattgttttttttttcccattgtccaaaaagttaagcaacaagtggccacacttttacgtgactacaacctggagttctgcaaagaaggtaatatttacttggtctttgactaaagttatctccccattctatggttacattttattttggactatggggacttctaatacgttttggtaaagaagagagtataaagaaaattcttgtcaaatttcactcaaaagtaatttcatgagaaatcaatgatttaaagcattatccaaattaaattatcatttgcagcaaactgtacaacagcaggaaggatatggaatggaacatgaggtatatatctttgcctttataattttaacatcttatattgaagattctgaaaacctatctttattagaggaaaatctcaatcttcagttttggccttctgtcagcagaatgataagtgcaatagttgtaaatctacttgacactgtaataaactgaactgaactttcaaa

SEQ ID NO: 27918 - DNA, 5284 bp, Homo sapiens
  source 1..5284: mol_type = unassigned DNA
gaaatccaacttctgaaatgttctgggtggtagatagttaagggtgaagctgtattggtcttagtatttgcagatgttgtagctgactgctcatttttccccctccccattctgttagaagcttctgccaaccatgattcatggaatgatttttttgagctgagtaatctgtggctttgcagtttccttgctttctttccttagctaaatctcttctagtgttagcaaagtatttagcacaggaaagatcttataaaatgaaataatgcatgtaatgatgcattttccaagtagatgattttaacaaaccgtaagcttttatgcctgtccttcattgtgtcttttctgcctctgtcaggcgaactgtgatgaagagccttatacttaggaagacacaactacctttgaacagtcctttgtgaaatctaatgatcgcaacgaacgaaataaaccagaacatcgttcttcaagccaaggacccttgtcatccattagagcggtaatcaagagatcttctcggacttctattcagagtgaacttcatcgagatagaaggcgcccagagatcaccattgtggcagctgagccactgaggccagcctcgtggtttccaggaaccccacccccaggactgggatttcctacatcatctgcagcaggctcttggaggcctaatgagctggttcctgctgagctcccaccatcttatgaacaagttataaaagaaatcaaccaagttcaagttaatactacaaataataataatgctgctgctactccaaggcacactattacttctgcaactcagactgacttttcagaagaaatagacaacgatctgcctcaaagtaatgcaacactacaggcacctctcaagcctcttcagcctttctcagcagtctcgtctggcaatcttccaacaaatgtggcacctttaatcgtctttgatatttctgaagaaccgaattgtccagaaaaccccagtgctacaagatgtccagtgccaaaaccaagatcaaaaagcaacctcagaccaatacccagagattctcacattaaagagcaaagtcaacagaaaatcagcccagcagccgtaggagaggagtcatccccaggccggccccagtctctgctggacaacgctagcacctcagacagtcaggcagtgatgaacattatgaacacagaacaaagccaaaatagtattgtttccagaattaaagtgtttgagggtcagacaaacatagaaacctcaggactgcccaagaaaccagaaattactccacgttcacttcctccaaagcctactgtttcctcagggaaaccttctgtagctcccaaaccagctgctaacagagcttctggagagtgggactctgggactgagaacagactcaaggtgacctccaaggaaggactcaccccataccctcccctgcaagaagcgggaagcatcccagtaaccaaacctgaattgccaaagaaaccaaaccctggccttatacgaagtgttaatcctgagattccgggaagagggcccctggctgagagctctgatagtgggaagaaagtgccaactcctgccccgcggcctttgctgctgaagaaatctgtttcctcagaaaaccccacctacccttcagctccactgaaacctgtcactgttcctccccgactcgcaggggcatcacaagccaaagcatacaagtcactgggagaagggcccccagccaaccccccagttccagttctgcagagcaagcccttggtggacatcgatctcatcagctttgatgatgatgttttgcccaccccatcggggaacctggctgaagaatctgttggttcagagatggttctagatccctttcagctccctgcaaaaacagaaccaataaaagaacgagcagttcaaccagcacccaccaggaagcccactgtaattcgaattccagccaaaccaggaaaatgtttacatgaggatccacaaagtccacctcctctccctgctgaaaaacctattggaaacactttcagtacagtatctggaaagctcagtaatgttgagagaactagaaacttggaatccaaccacccaggtcaaacaggaggttttgtgcgagtacccccaaggttgccaccgagacctgtgaatggaaaaaccattccaactcaacagcctccaaccaaggtgccccctgagagaccacctcccccaaagctttctgcaaccagaagatctaataagaaactgccttttaatcgatcctcttctgacatggatcttcagaaaaaacaaagtaacttggcaactggactctcaaaagccaagagtcaagtttttaaaaatcaagatccggtgctaccccctcgtcccaaaccaggacaccctctctacagtaaatacatgcgtggggatgtacttgtgatgctgaagcagacggaaaataattacttggagtgccaaaagggagaagacactggcagagttcacctgtctcaaatgaagattatcactccacttgatgaacatcttagaagcagaccaaacgatccaagccacgctcagaagcctgttgacagtggtgctcctcatgctgtcgttcttcatgatttcccagcagagcaagttgatgatttgaacctcacttctggagaaattgtttatcttctggagaagatagatacagattggtacagagggaactgtagaaaccagattggcatatttcctgccaactatgtcaaagtgattattgatatcccagaaggaggaaatgggaaaagagaatgtgtttcatctcattgtgttaaaggctcaagatgtgttgctcggtttgaatatattggagagcagaaggatgagttgagtttctcagagggagaaattattattcttaaagagtatgtgaatgaggaatgggccagaggagaagttcgaggcagaactgggattttccccctgaactttgtggagcctgttgaggattatcccacctctggtgcaaatgttttaagcacaaaggtaccactgaaaaccaaaaaagaagattctggctcaaactctcaggttaacagtcttccggcagaatggtgtgaagctcttcacagttttacagcagagaccagtgatgacttatcattcaagaggggagaccggatccagattctggaacgtctggattctgactggtgcaggggcagactgcaggacagggaggggatcttcccagcagtgtttgtgaggccctgcccagctgaggcaaaaagtatgttggccatagtaccgaaggggaggaaggccaaagccttatatgatttccgaggggagaatgaagatgaactttccttcaaggctggagatataataacagagctggaatctgtagatgatgactggatgagtggagaacttatgggaaaatctggaatatttcccaaaaactacatacagtttctacagatcagctagaggagaagcttgtctgtgttccttggcacaagaactcacttgaactatcaccttgactatcagatatgtttttgcactattttttttaactgaaaaagaaatatctaagctgtacatggtacactagaattttctgaaagcagaaaacgttcagattttgtagttaattttcattacaatagaaacatgcacatggaaacccatgagctaggattctaccgaggaaaacatctagtgggattagcaaggtgaagggaaagcatctggtggcatggcagcatggggaggctcacacacagaagttgcacgtggacatctgttttaatcagcacaagtgaattaaccatgcttcttcatttttttactttagttaaaaaagaggacatttaatattctacatgctgtaactatcaggacatggttagcaatctcaatttcatttttgatattcaaattaattcttacagcttgagcatatcagccttattaccagagcaaatccttccttcagatgggatagtttactgactagttggagcatttgtaagcacatggtgaaatcagcccctgcccaccaaaataatctttatgttaccaagtgattcccatttgtctaaggatttgaagggggtctaaattggatgtatcttacttagtctaaagaaccaaaaccatccctgaaatgccttgctaatacaactaatccttccatatatgtgccatacttatttttttcctcagtgtatactttatgttaacagggttattacaaagcacattttctgaatctgcaatcattcctttgacaattactggacccaaaggaaaattcattttctttgcattattccagtaatatataaaaactgtgtcttgttatagtagtacattatgaatcacatataaaatcttacaatacagaacaactgttaagatggaaaacagtgccaaacctccacagctcatttctttgtaatataatcagaatgaaaaataatttaagaggacagaagactggtacttttttgttttattttttctctagcttatccctgcacaattattagagtgaatgaaaaaccactttcctgctttccattgttataaattctaagcttaagataaaagtggttctttacatgactgaatcaattacaatttatgggctagagccaaataggttgaagacaatcatccaaacagatcaatggaatagaatttcattggaaatgtaaaacactttcccaacaatggtcatgactttcttctgtttttgagaagagtttcatatgctggaccacattttagcttttattgttttttttttcccattgtccaaaaagttaagcaacaagtggccacacttttacgtgactacaacctggagttctgcaaagaaggtaatatttacttggtctttgactaaagttatctccccattctatggttacattttattttggactatggggacttctaatacgttttggtaaagaagagagtataaagaaaattcttgtcaaatttcactcaaaagtaatttcatgagaaatcaatgatttaaagcattatccaaattaaattatcatttgcagcaaactgtacaacagcaggaaggatatggaatggaacatgaggtatatatctttgcctttataattttaacatcttatattgaagattctgaaaacctatctttattagaggaaaatctcaatcttcagttttggccttctgtcagcagaatgataagtgcaatagttgtaaatctacttgacactgtaataaactgaactgaactttcaaagtccc

SEQ ID NO: 27919 - DNA, 5096 bp, Homo sapiens
  source 1..5096: mol_type = unassigned DNA
tcatttttccccctccccattctgttagaagcttctgccaaccatgattcatggaatgatttttttgagctgagtaatctgtggctttgcagtttccttgctttctttccttagctaaatctcttctagtgttagcaaagtatttagcacaggaaagatcttataaaatgaaataatgcatgtaatgatgcattttccaagtagatgattttaacaaaccgtaagcttttatgcctgtccttcattgtgtcttttctgcctctgtcaggcgaactgtgatgaagagccttatacttaggaagacacaactacctttgaacagtcctttgtgaaatctaatgatcgcaacgaacgaaataaaccagaacatcgttcttcaagccaaggacccttgtcatccattagagcggtaatcaagagatcttctcggacttctattcagagtgaacttcatcgagatagaaggcgcccagagatcaccattgtggcagctgagccactgaggccagcctcgtggtttccaggaaccccacccccaggactgggatttcctacatcatctgcagcaggctcttggaggcctaatgagctggttcctgctgagctcccaccatcttatgaacaagttataaaagaaatcaaccaagttcaagttaatactacaaataataataatgctgctgctactccaaggcacactattacttctgcaactcagactgacttttcagaagaaatagacaacgatctgcctcaaagttttgttttggtctcgtcagcactacaggcacctctcaagcctcttcagcctttctcagcagtctcgtctggcaatcttccaacaaatgtggcacctttaatcgtctttgatatttctgaagaaccgaattgtccagaaaaccccagtgctacaagatgtccagtgccaaaaccaagatcaaaaagcaacctcagaccaatacccagagattctcacattaaagagcaaagtcaacagaaaatcagcccagcagccgtaggagaggagtcatccccaggccggccccagtctctgctggacaacgctagcacctcagacagtcaggcagtgatgaacattatgaacacagaacaaagccaaaatagtattgtttccagaattaaagtgtttgagggtcagacaaacatagaaacctcaggactgcccaagaaaccagaaattactccacgttcacttcctccaaagcctactgtttcctcagggaaaccttctgtagctcccaaaccagctgctaacagagcttctggagagtgggactctgggactgagaacagactcaaggtgacctccaaggaaggactcaccccataccctcccctgcaagaagcgggaagcatcccagtaaccaaacctgaattgccaaagaaaccaaaccctggccttatacgaagtgttaatcctgagattccgggaagagggcccctggctgagagctctgatagtgggaagaaagtgccaactcctgccccgcggcctttgctgctgaagaaatctgtttcctcagaaaaccccacctacccttcagctccactgaaacctgtcactgttcctccccgactcgcaggggcatcacaagccaaagcatacaagtcactgggagaagggcccccagccaaccccccagttccagttctgcagagcaagcccttggtggacatcgatctcatcagctttgatgatgatgttttgcccaccccatcggggaacctggctgaagaatctgttggttcagagatggttctaggtttacatgaggatccacaaagtccacctcctctccctgctgaaaaacctattggaaacactttcagtacagtatctggaaagctcagtaatgttgagagaactagaaacttggaatccaaccacccaggtcaaacaggaggttttgtgcgagtacccccaaggttgccaccgagacctgtgaatggaaaaaccattccaactcaacagcctccaaccaaggtgccccctgagagaccacctcccccaaagctttctgcaaccagaagatctaataagaaactgccttttaatcgatcctcttctgacatggatcttcagaaaaaacaaagtaacttggcaactggactctcaaaagccaagagtcaagtttttaaaaatcaagatccggtgctaccccctcgtcccaaaccaggacaccctctctacagtaaatacatgcgtggggatgtacttgtgatgctgaagcagacggaaaataattacttggagtgccaaaagggagaagacactggcagagttcacctgtctcaaatgaagattatcactccacttgatgaacatcttagaagcagaccaaacgatccaagccacgctcagaagcctgttgacagtggtgctcctcatgctgtcgttcttcatgatttcccagcagagcaagttgatgatttgaacctcacttctggagaaattgtttatcttctggagaagatagatacagattggtacagagggaactgtagaaaccagattggcatatttcctgccaactatgtcaaagtgattattgatatcccagaaggaggaaatgggaaaagagaatgtgtttcatctcattgtgttaaaggctcaagatgtgttgctcggtttgaatatattggagagcagaaggatgagttgagtttctcagagggagaaattattattcttaaagagtatgtgaatgaggaatgggccagaggagaagttcgaggcagaactgggattttccccctgaactttgtggagcctgttgaggattatcccacctctggtgcaaatgttttaagcacaaaggtaccactgaaaaccaaaaaagaagattctggctcaaactctcaggttaacagtcttccggcagaatggtgtgaagctcttcacagttttacagcagagaccagtgatgacttatcattcaagaggggagaccggatccagattctggaacgtctggattctgactggtgcaggggcagactgcaggacagggaggggatcttcccagcagtgtttgtgaggccctgcccagctgaggcaaaaagtatgttggccatagtaccgaaggggaggaaggccaaagccttatatgatttccgaggggagaatgaagatgaactttccttcaaggctggagatataataacagagctggaatctgtagatgatgactggatgagtggagaacttatgggaaaatctggaatatttcccaaaaactacatacagtttctacagatcagctagaggagaagcttgtctgtgttccttggcacaagaactcacttgaactatcaccttgactatcagatatgtttttgcactattttttttaactgaaaaagaaatatctaagctgtacatggtacactagaattttctgaaagcagaaaacgttcagattttgtagttaattttcattacaatagaaacatgcacatggaaacccatgagctaggattctaccgaggaaaacatctagtgggattagcaaggtgaagggaaagcatctggtggcatggcagcatggggaggctcacacacagaagttgcacgtggacatctgttttaatcagcacaagtgaattaaccatgcttcttcatttttttactttagttaaaaaagaggacatttaatattctacatgctgtaactatcaggacatggttagcaatctcaatttcatttttgatattcaaattaattcttacagcttgagcatatcagccttattaccagagcaaatccttccttcagatgggatagtttactgactagttggagcatttgtaagcacatggtgaaatcagcccctgcccaccaaaataatctttatgttaccaagtgattcccatttgtctaaggatttgaagggggtctaaattggatgtatcttacttagtctaaagaaccaaaaccatccctgaaatgccttgctaatacaactaatccttccatatatgtgccatacttatttttttcctcagtgtatactttatgttaacagggttattacaaagcacattttctgaatctgcaatcattcctttgacaattactggacccaaaggaaaattcattttctttgcattattccagtaatatataaaaactgtgtcttgttatagtagtacattatgaatcacatataaaatcttacaatacagaacaactgttaagatggaaaacagtgccaaacctccacagctcatttctttgtaatataatcagaatgaaaaataatttaagaggacagaagactggtacttttttgttttattttttctctagcttatccctgcacaattattagagtgaatgaaaaaccactttcctgctttccattgttataaattctaagcttaagataaaagtggttctttacatgactgaatcaattacaatttatgggctagagccaaataggttgaagacaatcatccaaacagatcaatggaatagaatttcattggaaatgtaaaacactttcccaacaatggtcatgactttcttctgtttttgagaagagtttcatatgctggaccacattttagcttttattgttttttttttcccattgtccaaaaagttaagcaacaagtggccacacttttacgtgactacaacctggagttctgcaaagaaggtaatatttacttggtctttgactaaagttatctccccattctatggttacattttattttggactatggggacttctaatacgttttggtaaagaagagagtataaagaaaattcttgtcaaatttcactcaaaagtaatttcatgagaaatcaatgatttaaagcattatccaaattaaattatcatttgcagcaaactgtacaacagcaggaaggatatggaatggaacatgaggtatatatctttgcctttataattttaacatcttatattgaagattctgaaaacctatctttattagaggaaaatctcaatcttcagttttggccttctgtcagcagaatgataagtgcaatagttgtaaatctacttgacactgtaataaactgaactgaactttcaaagtc

SEQ ID NO: 27920 - DNA, 4195 bp, Homo sapiens
  source 1..4195: mol_type = unassigned DNA
cccagtgctacaagatgtccagtgccaaaaccaagatcaaaaagcaacctcagaccaatacccagagattctcacattaaagagcaaagtcaacagaaaatcagcccagcagccgtaggagaggagtcatccccaggccggccccagtctctgctggacaacgctagcacctcagacagtcaggcagtgatgaacattatgaacacagaacaaagccaaaatagtattgtttccagaattaaagtgtttgagggtcagacaaacatagaaacctcaggactgcccaagaaaccagaaattactccacgttcacttcctccaaagcctactgtttcctcagggaaaccttctgtagctcccaaaccagctgctaacagagcttctggagagtgggactctgggactgagaacagactcaaggtgacctccaaggaaggactcaccccataccctcccctgcaagaagcgggaagcatcccagtaaccaaacctgaattgccaaagaaaccaaaccctggccttatacgaagtgttaatcctgagattccgggaagagggcccctggctgagagctctgatagtgggaagaaagtgccaactcctgccccgcggcctttgctgctgaagaaatctgtttcctcagaaaaccccacctacccttcagctccactgaaacctgtcactgttcctccccgactcgcaggggcatcacaagccaaagcatacaagtcactgggagaagggcccccagccaaccccccagttccagttctgcagagcaagcccttggtggacatcgatctcatcagctttgatgatgatgttttgcccaccccatcggggaacctggctgaagaatctgttggttcagagatggttctaggtttacatgaggatccacaaagtccacctcctctccctgctgaaaaacctattggaaacactttcagtacagtatctggaaagctcagtaatgttgagagaactagaaacttggaatccaaccacccaggtcaaacaggaggttttgtgcgagtacccccaaggttgccaccgagacctgtgaatggaaaaaccattccaactcaacagcctccaaccaaggtgccccctgagagaccacctcccccaaagctttctgcaaccagaagatctaataagaaactgccttttaatcgatcctcttctgacatggatcttcagaaaaaacaaagtaacttggcaactggactctcaaaagccaagagtcaagtttttaaaaatcaagatccggtgctaccccctcgtcccaaaccaggacaccctctctacagtaaatacatgcgtggggatgtacttgtgatgctgaagcagacggaaaataattacttggagtgccaaaagggagaagacactggcagagttcacctgtctcaaatgaagattatcactccacttgatgaacatcttagaagcagaccaaacgatccaagccacgctcagaagcctgttgacagtggtgctcctcatgctgtcgttcttcatgatttcccagcagagcaagttgatgatttgaacctcacttctggagaaattgtttatcttctggagaagatagatacagattggtacagagggaactgtagaaaccagattggcatatttcctgccaactatgtcaaagtgattattgatatcccagaaggaggaaatgggaaaagagaatgtgtttcatctcattgtgttaaaggctcaagatgtgttgctcggtttgaatatattggagagcagaaggatgagttgagtttctcagagggagaaattattattcttaaagagtatgtgaatgaggaatgggccagaggagaagttcgaggcagaactgggattttccccctgaactttgtggagcctgttgaggattatcccacctctggtgcaaatgttttaagcacaaaggtaccactgaaaaccaaaaaagaagattctggctcaaactctcaggttaacagtcttccggcagaatggtgtgaagctcttcacagttttacagcagagaccagtgatgacttatcattcaagaggggagaccggatccagattctggaacgtctggattctgactggtgcaggggcagactgcaggacagggaggggatcttcccagcagtgtttgtgaggccctgcccagctgaggcaaaaagtatgttggccatagtaccgaaggggaggaaggccaaagccttatatgatttccgaggggagaatgaagatgaactttccttcaaggctggagatataataacagagctggaatctgtagatgatgactggatgagtggagaacttatgggaaaatctggaatatttcccaaaaactacatacagtttctacagatcagctagaggagaagcttgtctgtgttccttggcacaagaactcacttgaactatcaccttgactatcagatatgtttttgcactattttttttaactgaaaaagaaatatctaagctgtacatggtacactagaattttctgaaagcagaaaacgttcagattttgtagttaattttcattacaatagaaacatgcacatggaaacccatgagctaggattctaccgaggaaaacatctagtgggattagcaaggtgaagggaaagcatctggtggcatggcagcatggggaggctcacacacagaagttgcacgtggacatctgttttaatcagcacaagtgaattaaccatgcttcttcatttttttactttagttaaaaaagaggacatttaatattctacatgctgtaactatcaggacatggttagcaatctcaatttcatttttgatattcaaattaattcttacagcttgagcatatcagccttattaccagagcaaatccttccttcagatgggatagtttactgactagttggagcatttgtaagcacatggtgaaatcagcccctgcccaccaaaataatctttatgttaccaagtgattcccatttgtctaaggatttgaagggggtctaaattggatgtatcttacttagtctaaagaaccaaaaccatccctgaaatgccttgctaatacaactaatccttccatatatgtgccatacttatttttttcctcagtgtatactttatgttaacagggttattacaaagcacattttctgaatctgcaatcattcctttgacaattactggacccaaaggaaaattcattttctttgcattattccagtaatatataaaaactgtgtcttgttatagtagtacattatgaatcacatataaaatcttacaatacagaacaactgttaagatggaaaacagtgccaaacctccacagctcatttctttgtaatataatcagaatgaaaaataatttaagaggacagaagactggtacttttttgttttattttttctctagcttatccctgcacaattattagagtgaatgaaaaaccactttcctgctttccattgttataaattctaagcttaagataaaagtggttctttacatgactgaatcaattacaatttatgggctagagccaaataggttgaagacaatcatccaaacagatcaatggaatagaatttcattggaaatgtaaaacactttcccaacaatggtcatgactttcttctgtttttgagaagagtttcatatgctggaccacattttagcttttattgttttttttttcccattgtccaaaaagttaagcaacaagtggccacacttttacgtgactacaacctggagttctgcaaagaaggtaatatttacttggtctttgactaaagttatctccccattctatggttacattttattttggactatggggacttctaatacgttttggtaaagaagagagtataaagaaaattcttgtcaaatttcactcaaaagtaatttcatgagaaatcaatgatttaaagcattatccaaattaaattatcatttgcagcaaactgtacaacagcaggaaggatatggaatggaacatgaggtatatatctttgcctttataattttaacatcttatattgaagattctgaaaacctatctttattagaggaaaatctcaatcttcagttttggccttctgtcagcagaatgataagtgcaatagttgtaaatctacttgacactgtaataaactgaactgaactttcaaagtc

SEQ ID NO: 27921 - DNA, 5204 bp, Homo sapiens
  source 1..5204: mol_type = unassigned DNA
tcatttttccccctccccattctgttagaagcttctgccaaccatgattcatggaatgatttttttgagctgagtaatctgtggctttgcagtttccttgctttctttccttagctaaatctcttctagtgttagcaaagtatttagcacaggaaagatcttataaaatgaaataatgcatgtaatgatgcattttccaagtagatgattttaacaaaccgtaagcttttatgcctgtccttcattgtgtcttttctgcctctgtcaggcgaactgtgatgaagagccttatacttaggaagacacaactacctttgaacagtcctttgtgaaatctaatgatcgcaacgaacgaaataaaccagaacatcgttcttcaagccaaggacccttgtcatccattagagcggtaatcaagagatcttctcggacttctattcagagtgaacttcatcgagatagaaggcgcccagagatcaccattgtggcagctgagccactgaggccagcctcgtggtttccaggaaccccacccccaggactgggatttcctacatcatctgcagcaggctcttggaggcctaatgagctggttcctgctgagctcccaccatcttatgaacaagttataaaagaaatcaaccaagttcaagttaatactacaaataataataatgctgctgctactccaaggcacactattacttctgcaactcagactgacttttcagaagaaatagacaacgatctgcctcaaagttttgttttggtctcgtcagcactacaggcacctctcaagcctcttcagcctttctcagcagtctcgtctggcaatcttccaacaaatgtggcacctttaatcgtctttgatatttctgaagaaccgaattgtccagaaaaccccagtgctacaagatgtccagtgccaaaaccaagatcaaaaagcaacctcagaccaatacccagagattctcacattaaagagcaaagtcaacagaaaatcagcccagcagccgtaggagaggagtcatccccaggccggccccagtctctgctggacaacgctagcacctcagacagtcaggcagtgatgaacattatgaacacagaacaaagccaaaatagtattgtttccagaattaaagtgtttgagggtcagacaaacatagaaacctcaggactgcccaagaaaccagaaattactccacgttcacttcctccaaagcctactgtttcctcagggaaaccttctgtagctcccaaaccagctgctaacagagcttctggagagtgggactctgggactgagaacagactcaaggtgacctccaaggaaggactcaccccataccctcccctgcaagaagcgggaagcatcccagtaaccaaacctgaattgccaaagaaaccaaaccctggccttatacgaagtgttaatcctgagattccgggaagagggcccctggctgagagctctgatagtgggaagaaagtgccaactcctgccccgcggcctttgctgctgaagaaatctgtttcctcagaaaaccccacctacccttcagctccactgaaacctgtcactgttcctccccgactcgcaggggcatcacaagccaaagcatacaagtcactgggagaagggcccccagccaaccccccagttccagttctgcagagcaagcccttggtggacatcgatctcatcagctttgatgatgatgttttgcccaccccatcggggaacctggctgaagaatctgttggttcagagatggttctagatccctttcagctccctgcaaaaacagaaccaataaaagaacgagcagttcaaccagcacccaccaggaagcccactgtaattcgaattccagccaaaccaggaaaatgtttacatgaggatccacaaagtccacctcctctccctgctgaaaaacctattggaaacactttcagtacagtatctggaaagctcagtaatgttgagagaactagaaacttggaatccaaccacccaggtcaaacaggaggttttgtgcgagtacccccaaggttgccaccgagacctgtgaatggaaaaaccattccaactcaacagcctccaaccaaggtgccccctgagagaccacctcccccaaagctttctgcaaccagaagatctaataagaaactgccttttaatcgatcctcttctgacatggatcttcagaaaaaacaaagtaacttggcaactggactctcaaaagccaagagtcaagtttttaaaaatcaagatccggtgctaccccctcgtcccaaaccaggacaccctctctacagtaaatacatgcgtggggatgtacttgtgatgctgaagcagacggaaaataattacttggagtgccaaaagggagaagacactggcagagttcacctgtctcaaatgaagattatcactccacttgatgaacatcttagaagcagaccaaacgatccaagccacgctcagaagcctgttgacagtggtgctcctcatgctgtcgttcttcatgatttcccagcagagcaagttgatgatttgaacctcacttctggagaaattgtttatcttctggagaagatagatacagattggtacagagggaactgtagaaaccagattggcatatttcctgccaactatgtcaaagtgattattgatatcccagaaggaggaaatgggaaaagagaatgtgtttcatctcattgtgttaaaggctcaagatgtgttgctcggtttgaatatattggagagcagaaggatgagttgagtttctcagagggagaaattattattcttaaagagtatgtgaatgaggaatgggccagaggagaagttcgaggcagaactgggattttccccctgaactttgtggagcctgttgaggattatcccacctctggtgcaaatgttttaagcacaaaggtaccactgaaaaccaaaaaagaagattctggctcaaactctcaggttaacagtcttccggcagaatggtgtgaagctcttcacagttttacagcagagaccagtgatgacttatcattcaagaggggagaccggatccagattctggaacgtctggattctgactggtgcaggggcagactgcaggacagggaggggatcttcccagcagtgtttgtgaggccctgcccagctgaggcaaaaagtatgttggccatagtaccgaaggggaggaaggccaaagccttatatgatttccgaggggagaatgaagatgaactttccttcaaggctggagatataataacagagctggaatctgtagatgatgactggatgagtggagaacttatgggaaaatctggaatatttcccaaaaactacatacagtttctacagatcagctagaggagaagcttgtctgtgttccttggcacaagaactcacttgaactatcaccttgactatcagatatgtttttgcactattttttttaactgaaaaagaaatatctaagctgtacatggtacactagaattttctgaaagcagaaaacgttcagattttgtagttaattttcattacaatagaaacatgcacatggaaacccatgagctaggattctaccgaggaaaacatctagtgggattagcaaggtgaagggaaagcatctggtggcatggcagcatggggaggctcacacacagaagttgcacgtggacatctgttttaatcagcacaagtgaattaaccatgcttcttcatttttttactttagttaaaaaagaggacatttaatattctacatgctgtaactatcaggacatggttagcaatctcaatttcatttttgatattcaaattaattcttacagcttgagcatatcagccttattaccagagcaaatccttccttcagatgggatagtttactgactagttggagcatttgtaagcacatggtgaaatcagcccctgcccaccaaaataatctttatgttaccaagtgattcccatttgtctaaggatttgaagggggtctaaattggatgtatcttacttagtctaaagaaccaaaaccatccctgaaatgccttgctaatacaactaatccttccatatatgtgccatacttatttttttcctcagtgtatactttatgttaacagggttattacaaagcacattttctgaatctgcaatcattcctttgacaattactggacccaaaggaaaattcattttctttgcattattccagtaatatataaaaactgtgtcttgttatagtagtacattatgaatcacatataaaatcttacaatacagaacaactgttaagatggaaaacagtgccaaacctccacagctcatttctttgtaatataatcagaatgaaaaataatttaagaggacagaagactggtacttttttgttttattttttctctagcttatccctgcacaattattagagtgaatgaaaaaccactttcctgctttccattgttataaattctaagcttaagataaaagtggttctttacatgactgaatcaattacaatttatgggctagagccaaataggttgaagacaatcatccaaacagatcaatggaatagaatttcattggaaatgtaaaacactttcccaacaatggtcatgactttcttctgtttttgagaagagtttcatatgctggaccacattttagcttttattgttttttttttcccattgtccaaaaagttaagcaacaagtggccacacttttacgtgactacaacctggagttctgcaaagaaggtaatatttacttggtctttgactaaagttatctccccattctatggttacattttattttggactatggggacttctaatacgttttggtaaagaagagagtataaagaaaattcttgtcaaatttcactcaaaagtaatttcatgagaaatcaatgatttaaagcattatccaaattaaattatcatttgcagcaaactgtacaacagcaggaaggatatggaatggaacatgaggtatatatctttgcctttataattttaacatcttatattgaagattctgaaaacctatctttattagaggaaaatctcaatcttcagttttggccttctgtcagcagaatgataagtgcaatagttgtaaatctacttgacactgtaataaactgaactgaactttcaaagtc

SEQ ID NO: 27922 - DNA, 5107 bp, Homo sapiens
  source 1..5107: mol_type = unassigned DNA
agccatttgcttcctgagtggccacattccagctgtgcagactggtcatagcacatctgccaatcagaacaggccctggagggaagcccttggatactgagtcttgtttacatgcatcgtgactctgtttctcccttcctcttgtgtgttgtaccactaggaagattagtggggaaatttgctattacatgcctaagtaaactatgtaactaggatcacagccacaggaaatgatgttctggacagagttttagctcggctttagccacagatcgcaacgaacgaaataaaccagaacatcgttcttcaagccaaggacccttgtcatccattagagcggtaatcaagagatcttctcggacttctattcagagtgaacttcatcgagatagaaggcgcccagagatcaccattgtggcagctgagccactgaggccagcctcgtggtttccaggaaccccacccccaggactgggatttcctacatcatctgcagcaggctcttggaggcctaatgagctggttcctgctgagctcccaccatcttatgaacaagttataaaagaaatcaaccaagttcaagttaatactacaaataataataatgctgctgctactccaaggcacactattacttctgcaactcagactgacttttcagaagaaatagacaacgatctgcctcaaacactacaggcacctctcaagcctcttcagcctttctcagcagtctcgtctggcaatcttccaacaaatgtggcacctttaatcgtctttgatatttctgaagaaccgaattgtccagaaaaccccagtgctacaagatgtccagtgccaaaaccaagatcaaaaagcaacctcagaccaatacccagagattctcacattaaagagcaaagtcaacagaaaatcagcccagcagccgtaggagaggagtcatccccaggccggccccagtctctgctggacaacgctagcacctcagacagtcaggcagtgatgaacattatgaacacagaacaaagccaaaatagtattgtttccagaattaaagtgtttgagggtcagacaaacatagaaacctcaggactgcccaagaaaccagaaattactccacgttcacttcctccaaagcctactgtttcctcagggaaaccttctgtagctcccaaaccagctgctaacagagcttctggagagtgggactctgggactgagaacagactcaaggtgacctccaaggaaggactcaccccataccctcccctgcaagaagcgggaagcatcccagtaaccaaacctgaattgccaaagaaaccaaaccctggccttatacgaagtgttaatcctgagattccgggaagagggcccctggctgagagctctgatagtgggaagaaagtgccaactcctgccccgcggcctttgctgctgaagaaatctgtttcctcagaaaaccccacctacccttcagctccactgaaacctgtcactgttcctccccgactcgcaggggcatcacaagccaaagcatacaagtcactgggagaagggcccccagccaaccccccagttccagttctgcagagcaagcccttggtggacatcgatctcatcagctttgatgatgatgttttgcccaccccatcggggaacctggctgaagaatctgttggttcagagatggttctagatccctttcagctccctgcaaaaacagaaccaataaaagaacgagcagttcaaccagcacccaccaggaagcccactgtaattcgaattccagccaaaccaggaaaatgtttacatgaggatccacaaagtccacctcctctccctgctgaaaaacctattggaaacactttcagtacagtatctggaaagctcagtaatgttgagagaactagaaacttggaatccaaccacccaggtcaaacaggaggttttgtgcgagtacccccaaggttgccaccgagacctgtgaatggaaaaaccattccaactcaacagcctccaaccaaggtgccccctgagagaccacctcccccaaagctttctgcaaccagaagatctaataagaaactgccttttaatcgatcctcttctgacatggatcttcagaaaaaacaaagtaacttggcaactggactctcaaaagccaagagtcaagtttttaaaaatcaagatccggtgctaccccctcgtcccaaaccaggacaccctctctacagtaaatacatgcgtggggatgtacttgtgatgctgaagcagacggaaaataattacttggagtgccaaaagggagaagacactggcagagttcacctgtctcaaatgaagattatcactccacttgatgaacatcttagaagcagaccaaacgatccaagccacgctcagaagcctgttgacagtggtgctcctcatgctgtcgttcttcatgatttcccagcagagcaagttgatgatttgaacctcacttctggagaaattgtttatcttctggagaagatagatacagattggtacagagggaactgtagaaaccagattggcatatttcctgccaactatgtcaaagtgattattgatatcccagaaggaggaaatgggaaaagagaatgtgtttcatctcattgtgttaaaggctcaagatgtgttgctcggtttgaatatattggagagcagaaggatgagttgagtttctcagagggagaaattattattcttaaagagtatgtgaatgaggaatgggccagaggagaagttcgaggcagaactgggattttccccctgaactttgtggagcctgttgaggattatcccacctctggtgcaaatgttttaagcacaaaggtaccactgaaaaccaaaaaagaagattctggctcaaactctcaggttaacagtcttccggcagaatggtgtgaagctcttcacagttttacagcagagaccagtgatgacttatcattcaagaggggagaccggatccagattctggaacgtctggattctgactggtgcaggggcagactgcaggacagggaggggatcttcccagcagtgtttgtgaggccctgcccagctgaggcaaaaagtatgttggccatagtaccgaaggggaggaaggccaaagccttatatgatttccgaggggagaatgaagatgaactttccttcaaggctggagatataataacagagctggaatctgtagatgatgactggatgagtggagaacttatgggaaaatctggaatatttcccaaaaactacatacagtttctacagatcagctagaggagaagcttgtctgtgttccttggcacaagaactcacttgaactatcaccttgactatcagatatgtttttgcactattttttttaactgaaaaagaaatatctaagctgtacatggtacactagaattttctgaaagcagaaaacgttcagattttgtagttaattttcattacaatagaaacatgcacatggaaacccatgagctaggattctaccgaggaaaacatctagtgggattagcaaggtgaagggaaagcatctggtggcatggcagcatggggaggctcacacacagaagttgcacgtggacatctgttttaatcagcacaagtgaattaaccatgcttcttcatttttttactttagttaaaaaagaggacatttaatattctacatgctgtaactatcaggacatggttagcaatctcaatttcatttttgatattcaaattaattcttacagcttgagcatatcagccttattaccagagcaaatccttccttcagatgggatagtttactgactagttggagcatttgtaagcacatggtgaaatcagcccctgcccaccaaaataatctttatgttaccaagtgattcccatttgtctaaggatttgaagggggtctaaattggatgtatcttacttagtctaaagaaccaaaaccatccctgaaatgccttgctaatacaactaatccttccatatatgtgccatacttatttttttcctcagtgtatactttatgttaacagggttattacaaagcacattttctgaatctgcaatcattcctttgacaattactggacccaaaggaaaattcattttctttgcattattccagtaatatataaaaactgtgtcttgttatagtagtacattatgaatcacatataaaatcttacaatacagaacaactgttaagatggaaaacagtgccaaacctccacagctcatttctttgtaatataatcagaatgaaaaataatttaagaggacagaagactggtacttttttgttttattttttctctagcttatccctgcacaattattagagtgaatgaaaaaccactttcctgctttccattgttataaattctaagcttaagataaaagtggttctttacatgactgaatcaattacaatttatgggctagagccaaataggttgaagacaatcatccaaacagatcaatggaatagaatttcattggaaatgtaaaacactttcccaacaatggtcatgactttcttctgtttttgagaagagtttcatatgctggaccacattttagcttttattgttttttttttcccattgtccaaaaagttaagcaacaagtggccacacttttacgtgactacaacctggagttctgcaaagaaggtaatatttacttggtctttgactaaagttatctccccattctatggttacattttattttggactatggggacttctaatacgttttggtaaagaagagagtataaagaaaattcttgtcaaatttcactcaaaagtaatttcatgagaaatcaatgatttaaagcattatccaaattaaattatcatttgcagcaaactgtacaacagcaggaaggatatggaatggaacatgaggtatatatctttgcctttataattttaacatcttatattgaagattctgaaaacctatctttattagaggaaaatctcaatcttcagttttggccttctgtcagcagaatgataagtgcaatagttgtaaatctacttgacactgtaataaactgaactgaactttc

SEQ ID NO: 27923 - DNA, 3027 bp, Homo sapiens
  source 1..3027: mol_type = unassigned DNA
aaagcggttggcagcagcggcgcttggaggaaaggaagccggttggagggcgcagcgcacccctgctgcgcggaggagggggctgagctgaactcagcagaagttacatgcacaaggcaaaaattctgacgttctcaagagaccagctctgcccccgtggctcaactgaccctaccatgtggacgctgctcctccaggtgggaactggagttttgaaataaaatggatgatttgacgttacttgatcttctggagtgccctgtgtgctttgagaagctcgatgtcacagccaaagtcctcccttgccagcacaccttctgcaaaccatgtctacagagggttttcaaggcccacaaagagctgcggtgccccgaatgcaggacgcctgtgttttccaacattgaggcgctgccggccaacctgctgctcgtgcgccttctggatggagtgcgctcagggcagagctccgggagagggggctccttccgcaggcctggcacgatgaccttgcaggatggcaggaaaagcaggaccaaccccagacgtctgcaggccagtcctttccggctagtgcctaatgtcagaatccacatggatggggtgcctcgagcaaaggccttatgcaactacagagggcagaatcccggtgacctaaggtttaataagggagatatcatccttctccggagacagcttgatgagaattggtaccagggggaaatcaatggcatcagcgggaacttcccagccagctccgtggaagtcatcaagcagctgccccagccgcccccgctctgcagggccctctacaacttcgacctacgaggcaaggacaagagtgagaaccaggattgcctgaccttcctcaaggacgatatcatcactgtgatcagccgagtggatgagaactgggcagaaggcaagttaggagataaagtaggcatcttccctatcttgtttgtagagccaaacctcaccgcaagacaccttttagagaagaacaaaggtcgccagtcatcccgcacaaaaaacctgtccctggtgtcctcgtcctccagaggcaacacgtctaccctccgtaggggcccagggtccaggaggaaggtgcctgggcagttttccatcacaacagccttgaacactctcaaccggatggtccattctccttcagggcgccatatggtagagatcagcaccccagtgctcatcagctccagcaacccctctgtgatcacccagcccatggagaaagcagacgttccttccagctgtgtgggacaggtcagcacttatcaccccgcacctgtctctccaggacattccacagccgtggtcagtctgcctggctcccagcaacacctctcagcgaacatgtttgtagccctgcactcctactcagcccatggacccgatgagctggacctgcaaaagggagaaggcgtcagggtcctggggaagtgccaggacggctggctcaggggcgtctccttggtcaccgggcgagtcggcatcttcccaaacaattacgtcatccccattttcagaaagacctctagttttccagactcccggagccctggtctctacaccacatggacgttatccacctcctctgtgtcctcccaaggcagcatttcagaaggtgatccacggcaaagccgtcccttcaaatccgtctttgtgcccactgccatagtcaaccccgtgagaagcacagccggccctgggactttaggacaagggtctcttcggaaagggcggagcagcatgagaaagaatggatccctgcagagacccctccagtccgggatccccactctcgtggtaggctccctcagacgcagccccaccatggtccttcggcctcagcagttccaattctaccagccacaggggatcccctcctccccctcagccgtggtggtggagatggggtccaagcctgccctcacgggggagcccgccctcacgtgcatcagcaggggcagtgaggcctggatccactccgcggccagctccctcattatggaagacaaagaaatccccatcaagagtgagcctctgccaaaaccgcccgcatctgccccaccatccatcctggtgaaaccagaaaactcaagaaatggcatcgaaaagcaagtcaaaaccgtgagatttcagaattacagccctcctcccaccaaacattacacctcccatcccacctccggaaagcctgaacagccagccaccctcaaggcgtcccagcctgaagcagcgtccttgggcccagagatgaccgtcctatttgcccaccgaagtggctgccactccggacagcagacagacctccggagaaagtcagctcttggcaaggccacaaccctggtgtccactgcctcaggcacgcagaccgtgtttcccagcaaatgaacctacgggtggcttttcctagaccccaaagaggtgaattgcatttaaatacagtctgcctccactgagggcatcctgccattctttggggacttgagcatgggtccttgttcttcctatttcacctccaggaaagcaaaagtgggagcagaaattcctgccctgggtgggaggatagatggcgtggccttccaaacatacaaacataatgatttgatgccacaaagctcgcttactcagaccaaggagtgaaaaattgtcgtgcccactttatgccccagcatggagtatgtggcctcttgtcatccccgtgttactgtgtagaatttctatggtgtcctaaagggggctgcagcaggggtgtgacaacggtgggattgttggcgttgcttctttgaccttacaatatcctcaacaagcattagaacaacttctgccatcttctggggcctgtacactggccactagtagctgccatatctttttccctctgtaaagtcataatcctggctgcaaagggaggatttctgcgcggggtgtgaggtggatactttgaacattctgagaacccaataaaactagaaggagccagcttcctgagtatgctccacttaa

SEQ ID NO: 27924 - DNA, 5607 bp, Homo sapiens
  source 1..5607: mol_type = unassigned DNA
cctaccatgtggacgctgctcctccaggtgggaactggagttttgaaataaaatggatgatttgacgttacttgatcttctggagtgccctgtgtgctttgagaagctcgatgtcacagccaaagtcctcccttgccagcacaccttctgcaaaccatgtctacagagggttttcaaggcccacaaagagctgcggtgccccgaatgcaggacgcctgtgttttccaacattgaggcgctgccggccaacctgctgctcgtgcgccttctggatggagtgcgctcagggcagagctccgggagagggggctccttccgcaggcctggcacgatgaccttgcaggatggcaggaaaagcaggaccaaccccagacgtctgcaggccagtcctttccggctagtgcctaatgtcagaatccacatggatggggtgcctcgagcaaaggccttatgcaactacagagggcagaatcccggtgacctaaggtttaataagggagatatcatccttctccggagacagcttgatgagaattggtaccagggggaaatcaatggcatcagcgggaacttcccagccagctccgtggaagtcatcaagcagctgccccagccgcccccgctctgcagggccctctacaacttcgacctacgaggcaaggacaagagtgagaaccaggattgcctgaccttcctcaaggacgatatcatcactgtgatcagccgagtggatgagaactgggcagaaggcaagttaggagataaagtaggcatcttccctatcttgtttgtagagccaaacctcaccgcaagacaccttttagagaagaacaaaggtcgccagtcatcccgcacaaaaaacctgtccctggtgtcctcgtcctccagaggcaacacgtctaccctccgtaggggcccagggtccaggaggaaggtgcctgggcagttttccatcacaacagccttgaacactctcaaccggatggtccattctccttcagggcgccatatggtagagatcagcaccccagtgctcatcagctccagcaacccctctgtgatcacccagcccatggagaaagcagacgttccttccagctgtgtgggacaggtcagcacttatcaccccgcacctgtctctccaggacattccacagccgtggtcagtctgcctggctcccagcaacacctctcagcgaacatgtttgtagccctgcactcctactcagcccatggacccgatgagctggacctgcaaaagggagaaggcgtcagggtcctggggaagtgccaggacggctggctcaggggcgtctccttggtcaccgggcgagtcggcatcttcccaaacaattacgtcatccccattttcagaaagacctctagttttccagactcccggagccctggtctctacaccacatggacgttatccacctcctctgtgtcctcccaaggcagcatttcagaaggtgatccacggcaaagccgtcccttcaaatccgtctttgtgcccactgccatagtcaaccccgtgagaagcacagccggccctgggactttaggacaagggtctcttcggaaagggcggagcagcatgagaaagaatggatccctgcagagacccctccagtccgggatccccactctcgtggtaggctccctcagacgcagccccaccatggtccttcggcctcagcagttccaattctaccagccacaggggatcccctcctccccctcagccgtggtggtggagatggggtccaagcctgccctcacgggggagcccgccctcacgtgcatcagcaggggcagtgaggcctggatccactccgcggccagctccctcattatggaagacaaagaaatccccatcaagagtgagcctctgccaaaaccgcccgcatctgccccaccatccatcctggtgaaaccagaaaactcaagaaatggcatcgaaaagcaagtcaaaaccgtgagatttcagaattacagccctcctcccaccaaacattacacctcccatcccacctccggaaagcctgaacagccagccaccctcaaggcgtcccagcctgaagcagcgtccttgggcccagagatgaccgtcctatttgcccaccgaagtggctgccactccggacagcagacagacctccggagaaagtcagctcttggcaaggccacaaccctggtgtccactgcctcaggcacgcagaccgtgtttcccagcaaatgaacctacgggtggcttttcctagaccccaaagagagcctgccttggtcatcttcccaggaggaattcatgacaactgggatgcagaagagagcaaatgatctgctgggatggaaactgctcaatggagagtttgtggactgcatgatattccttgaacatcagggatggtacagggataccaatagtctggcctccaagacaggagagtaataggaggaagagcaaatctgtcttcacctgcagtattaatgggtggtgggccagaatggaggaaagcaagtgagtcatgtgctgctacaggttacaccaaactcccatccctctgttactcactgctgttgtcaaagccaaactttatcttgctaatttctcacagcttggcacctaacaaatgacaaggcaggacatccaatgccttcgagctctgtggtctggcctgtctctccagatcagatttagagtgaggtagcagatgacataatattctctttggtgttcaatccgaagaggccaatgcttcagcacaatgtcccctagccatcacccccagcccgactccccaccaagcatcctgcatccctctgccacatcttcattcttttccattctgtcttttccccgataccttctgaccccagggatttctaatagagcataatgatcaagaaaataaagacctggtacataaagagtctcagaaaaaaaatccatgatgttatatgaaagataccaaactgcaatgcttacaaagaggctatttcaagtagaaagatataaatatcacttataaccatgcatcctttatgttcataaataagtcatcataaagaacaagccattagaagacattctaatccttgtttttaaaaaaaagactataatctaagatacaattctaaaattactgtgctaacctgcaagagacattgctcacataaatgaaattcatatataccgtgatgttatttgaaccatatattttcatcttctcctcctctcttaagacatcaataagaatttgatttttaaaggcacatgctgctctgattatcaaagacaataacacaaatgcagcatcactgggatatgtcggttgttttaaagttcagatcctaattttactgaggaagcatcctcagtttttcatccagccctgcttgtaaacaggatccagcatcagccagaccatgagcagagtaaggattgcatctggaggttacagaaatgttttcttctatgtgaagctatcacatgcaggggttaaacaggcagccatcttttaatgcgatgaataatttggacttcttagccacacccttgtctcggttaaccacaggaggaggtgacaatacaccacaagaagccccagagttctggctttatctgccaagtggtaggtgagaagggaagaggtgggattgagcacactggctatttataccttgtcttcaaagccctcttagtcacatttccatcttcatgcattggcttctgccttacaattgagcaataggaaaccaccactcctaatttttgcacgtgctgctttttaagtctctgggaactttccatgaggtatagtggagggtttcataaggatttagctcttccttcgaacctgcttggccgataaaccagatatttttttaaaacacagcatacagattccaaatgatcaaggatcaaaaagtgttggggatgtcaggaaggatgcaaggatgggcttgaatgatcacaatgagtcaacccagaaatgtgcagtagaatagtttgctaatggtgacatctgagttgcatctcccggaaatattgtttcttattattacactttgggtcgggggaaggggtgttaagggtaaaaagaggaaggagcaaatagataaagagaaaaattcatgcctccaggaaacataagcagaaaaactatagacttgtgtctctgcttatttttttaagtacagtgtttttaatagaccaaagagaatctctatgagttaatatgtatgtgaataatgtttataaaaggggtataatgtgttagtcattatggaatattgtataaataaaccttccatatataaaacatataaaaaatgattgcttagggcagtggacacttaaggacttccaaacctttcatatcttcatcccaaaaaatagagcgttccagggctggcaacttatttccttagtatattccactgtaaagccaagaggtgtgggggcttgttttctggttttgtaatttgtaataatccgtatggattactgtaaaatgtctgttgcatgtgtgttggtgttggtgttggtgttgtttacccacatggagtcatcagagatttgttccacactttgtatcctggaaaaccaaaaggaattttcttttcttcgagacagagtctcgctctgtcgcccaggctggagtgcagtggtgccatcttggctcactgcaacctccgcctcccgaattcaagtgattctcctgcctcagcctcccgagtagctgggactacaggtgcgtgccaccttgccctgctaattttttgtatttttagtagagacggggtctcaccgtgttagccaggattgtctcgatctcctgaccttgtgatctgcccgcctcggcctcccaaagtgctgggattacagacgtgagccaccatgcccggcctggaattttctagtaagaagaaaaacatacagaatatgtcttcactgttgggtaactctcaaatttgtagcaatccagattttttgtaaaactgtgctaatgggatatttaatgtcagagttattgtctctcacttcaatatctagtactggataatgtttctcctgggagcacgtatttttttttcaagtcctcttttcctggacttaacatgttcttctagaagacaccagaagtcatgaccctaagccccctcccttcaggaccactttctaccatcggttttcaaaaaactatccacatgttaattctgttttatgttctgtgattctgtggtagactcagtgctttcagagtccagagcttgacttgggttagtggccttaatgaagtgctaaatttgctctttaccgcgagactgatcagaagaagcaaaaggggaaagggggctagaggtccactcgcaccttttacatcagacaagaggaggactgtgccagaaatctgtgcatgaaacaccatctgctcttcatgcagggaggggtcaaccgtgtgaacgtgcagagattactcgagccttctttgccaaaaatatgcattcttcccagctgtaagcgtgtgaagccaaatatgtcttttagcatgaaacaataaaaacatgtttattttcacttaataggttattccccaggcc

SEQ ID NO: 27925 - DNA, 1372 bp, Homo sapiens
  source 1..1372: mol_type = unassigned DNA
acttttggggaccttcatttaggtgagctgccacgtccggaggagggcagcaagaatgaaagacctctagttttccagactcccggagccctggtctctacaccacatggacgttatccacctcctctgtgtcctcccaaggcagcatttcagaaggtgatccacggcaaagccgtcccttcaaatccgtctttgtgcccactgccatagtcaaccccgtgagaagcacagccggccctgggactttaggacaagggtctcttcggaaagggcggagcagcatgagaaagaatggatccctgcagagacccctccagtccgggatccccactctcgtggtaggctccctcagacgcagccccaccatggtccttcggcctcagcagttccaattctaccagccacaggggatcccctcctccccctcagccgtggtggtggagatggggtccaagcctgccctcacgggcagtgaggcctggatccactccgcggccagctccctcattatggaagacaaagaaatccccatcaagagtgagcctctgccaaaaccgcccgcatctgccccaccatccatcctggtgaaaccagaaaactcaagaaatggcatcgaaaagcaagtcaaaaccgtgagatttcagaattacagccctcctcccaccaaacattacacctcccatcccacctccggaaagcctgaacagccagccaccctcaaggcgtcccagcctgaagcagcgtccttgggcccagagatgaccgtcctatttgcccaccgaagtggctgccactccggacagcagacagacctccggagaaagtcagctcttggcaaggccacaaccctggtgtccactgcctcaggcacgcagaccgtgtttcccagcaaatgaacctacgggtggcttttcctagaccccaaagagagcctgccttggtcatcttcccaggaggaattcatgacaactgggatgcagaagagagcaaatgatctgctgggatggaaactgctcaatggagagtttgtggactgcatgatattccttgaacatcagggatggtacagggataccaatagtctggcctccaagacaggagagtaataggaggaagagcaaatctgtcttcacctgcagtattaatgggtggtgggccagaatggaggaaagcaagtgagtcatgtgctgctacaggttacaccaaactcccatccctctgttactcactgctgttgtcaaagccaaactttatcttgctaatttctcacagcttggcacctaacaaatgacaaggcaggacatccaatgccttcgagctctgtggtctggcctgtctctccagatcagatttagagtgaggtagcagatga

SEQ ID NO: 27926 - DNA, 9211 bp, Homo sapiens
  source 1..9211: mol_type = unassigned DNA
cagccgggtgacccaggccgaggccggcagaagacagcctgatgccttgaagacttcctcttgcacttttgttggagggtgctggtttgctaaaagcagagagtatttttctttttatttattttgtttttaattttttaattttagctccagctcagttgcccagactggagagcagtggccaatcatagcttactgcctcctggaactcctggctcaatcgatcctcctggataagcctcctccgggtactatagcttcatggcggctgaagagatgcattggcctgtccctatgaaggccattggtgcccagaacctgctaaccatgcctgggggcgtggccaaggctggctacctgcacaagaagggcggtacccagctgcagctgctgaaatggcccctgcgctttgtcatcatccacaaacgctgcgtctactacttcaagagtagcacctctgcctccccgcagggcgccttctccctgagtggctataaccgggtgatgcgggcggctgaggagaccacgtccaacaacgttttccccttcaagatcatccatatcagcaagaagcaccgcacgtggttcttctcggcctcctccgaggaggagcgcaagagctggatggccttgctgcgcagggagattggccacttccacgaaaagaaagacctgcccttggacaccagcgactccagctcggacacagacagcttctacggcgcagttgagcggcctgtggatatcagcctttccccgtaccccacggacaatgaagactatgagcacgacgatgaggatgactcctacctggagcctgactccccggagcccggaaggcttgaggatgccctgatgcacccaccggcttacccaccacccccagtgcccacgcccaggaagccagccttctctgacatgccccgggcccactcctttacctccaagggccccggtcccctactgccacccccgccccctaagcacggcctcccagatgttggcctggctgctgaggactccaagagggacccactgtgcccgaggcgggctgagccttgccccagggtacctgctaccccccgaaggatgagcgatccccctctgagcaccatgcccaccgcacccggcctccggaaacccccttgcttccgggagagtgccagccccagcccggagccctggacccctggccacggggcctgctccacttccagtgctgccatcatggccactgccacctccagaaactgtgacaaactcaagtccttccacctgtccccccgaggaccacccacatctgagcccccacctgtgccagccaacaagcccaagttcctgaagatagctgaagaggaccccccaagggaggcagccatgcccggactctttgtgccccccgtggctccccggcctcctgcgctgaagctgccagtgcctgaggccatggcgcggcccgcagtcctgcccaggccagagaagccgcagctcccgcacctccagcgatcaccccccgatgggcagagtttcaggagcttctcctttgaaaagccccggcaaccctcacaggctgacactggcggggacgactcggacgaggactatgagaaggtgccactgcccaactcggtcttcgtcaacaccacggagtcctgcgaagtggaaaggttgttcaaggctacaagcccccggggagagccccaggatggactctactgcatccggaactcctctaccaagtcggggaaggtcctggttgtgtgggacgaaacctctaacaaagtgaggaactatcgcatttttgagaaggactctaagttctacctggagggcgaggtcctgtttgtgagtgtgggcagcatggtggagcactaccacacccacgtgctgcccagccaccagagcctgctgctgcggcacccctacggctacactgggcctaggtgatggcagtccatgtggctgccaggccaaggcagtcacaggggccctgaccccaggccacacagacggacatgggcccacatgggagggtgagcaggagcaaggctgtgcttgcctagggcctctgtgatggacatctcgtaggacccagccagtctcatccagcaggttgggttctagggctgaaccaggcgccaggctccagaggacgaagggactctgttgccccacactaacttgccctgtcccaatcccagaaacccaggaccaagctgtgcctgggctccaaggacaggaacactggtccccccatcacactcacccctaagtgggctgggagccaggcagggccagggcagctgggtgggggccggggctggccctgggacccccaggaacgctaagacacaggctccagtaggggctgttgcctccaataaagcagcagtgagctttgccttggtggctggggcttgattgggaaggaggggattaccagcttactgggtgcccatgctgatgtctaagtggtgaccgcagcagtacccgggaaccccaacagttggttgtcttgtcttccagggtgcaggtcactgagtgacttccccagggtgcacagcgagtaacagatcaggacccaaacttgggcagtctgggctgggagcccacaccccactcaccagttctgctgcctcaggtcaggccagggcagtgctgctgcagagctagaaggccctgcagctacagctgcttcattccctgcattagtgcctggttactgggtacctcctgagtggctgtccccgttccagaacttgcatacactgagcgggctacagagctagaaggccctgcagctacagctgcttcattccctgcattagcgagcagttattgggtacctcctgcatgcctggtcccattccagacaggggcctctggcctggctgagttcacagcccagtctggggacagctgggtatgaggtgcttacggcacagtgtccagggcagctgggtgtgcagggactgggggctcccggaagattttttggaggaagtaacagctacgatgggatgggaacagtggaccctaagcaggccaagggtgcgtagggacggtggtacccagatgcccaagtcttccaggcaatacctggctcaggcccagccccaatccatccccttactttctgccatggagttccagcaggtcactctccctggcacaccttccaggctggatttttaatgaaacagactcagggaggtaggggctggcagggaccctagaatccttgtgatttttcttagcaccttatgtcagggaaacctaaactgaggtcagcacttgggcccactgacagtgactgactgggggagaaggtcctgcagcccccttcccctgggtgtgttctggggacctgtggtttgctggcggaaacaagtgatgaggctggttagcggatgtgggaggctgtgaccccagggggccatagggtgcggtggaactgcaggccctgcagatgacggcagccagctgcttccaggaaccaggtgtccaaggccacctctgcaggggtttcctcttcagcctgcctggggtgagaggtcagtgcaccacagccgaggctggagcacagggagcttctgttgttctgatctatctctggaaaaccagccattcctcctccctgcagtcagaattctttgccctgtctgacctgaacttgcttagggagtcatgccactccccactgtggccatagtttctcttcctgtaaaattttattattttagttttttgtttttgagatgtagtctcaccctgtcgcccaggctggagtgcaatgccgtgatctccgctcactgccacctccgcctctctagttcaagcgattttcctgcctcagcctcccgagtagctgggattccaggcgcccgccaccacgcctggctaattttttgtatttttagtagagacgggattttatcatgttggccaggctggtctcgaactcctgacctcaggtgatctgcccaccttggcctcccaaagtgctgggattacaggcatgagccactgtgcctggccccttcctgtaaaatttttaaatggagaattgggtgcgagatgtggtttccagcctggtgcctggggtgctgagctagtgagtggtgcagtccaggacacctttgctttatgtcacttacacggtcacctggagccggctcaagtggctaaagcatcctggggcccagagccaggtgataggtccctctggccaactggacagttgaggcctgtggttacccgaagcccagctggggccctggtccagcctcgcctcccagactctgcacctgctagcacagctgtccacgtctgtgtgagctgctctaggccgagggcctcagtttcaagagtgtgttggggtgggatggggcaggccgtggtcctccagcatgaagaaggagccatgaggagttcccatgacctcccgagacttgccataagtgttctagtccacatataagggtagggttgggattaccatttactgaccacatctgtgaggtgccgagctgggtgcttgacatcatttgcttggagaagcagctgctagtagacccattttacaggtgagagaaccaagtctcacagaggcctgggttcaagtcccacctctgccactaactggcatgtgaccctatctatccttcactgctctgagcctagaccctggcccctgcctggctccctgccaggctccctgccacccctcacgacctctgatggtcgttgtgggggtctcttgcctggctcccagggctagggttagggctctggaggtgctttcactcaaccaagggggccacagcactggggagtgaaactgccccgcctcaccctgcgttgccctctgggtctgtgagggtgggctggcaggaggcctaggccttgccctaggggcagtcctgcttcctcattttatagatagggaaactgaggctttgggaggactcactgacatacctaccttcaagatgagttcaggtgggctcagttctggggcttgggaaaagggccccagtggctttgggaagcacccccagcccagggtgaaacatgcttcttctcttcctgtggttccatccgaaggattgtggtgagccccgtgccttcagttaataaagatttgtattgtgaaaagattttttcttttttttttgggacacagtctcactctgtcgcccaggctagagtggattggcgtgatctcggctcaatgcaaatctccagggttcaatcgattctcctgcctcaccctcccatgtagctgggattacagctgcctgccaaatttttgtatttttagtggaaccggggtttcaccatgttggccaggctggtcttgaactcctgacctcaactgatccgcccaccttggcctcccaagtgctgggattacaggcgcgagccacggcgcccagccttgaaaagatgtttttagaaccagaagaaacctcggttcccactgatccttctgggccacgttgtgcggagctcccctgctggttggggctcagcgcagccccagggaggtgcttcctgcacctcaggatgggcgagggtgggcattgggggagagggggacctgggacctgcggcttagttccctgaggcaggcagggcttattggggccatttcatagaaaggcagattgaagctcagcagggaagaggcttttgagggtgatccaggcgctggagggatggcctaggacaccagggtcacaccaggaacatgggagggccgtgcttgtctctagacgaggggaatgggggaagggccacaacctctgtttctgtgacccagcagcatcaagcccctcgctgggcacctcgcacacaccccctgccttatctctgcctgcacgccctgttccctccacctagactgcctgctgagggggcagtgccaggaggttgcctgtccttggggaagaggggcagtgaccctgtgaagatgcttgacagacaacccccaccacctcagaagtgtgtgtgagtggtgaacccttttaagccatcttccagccattctcactggagggagatttgatgggtacagagcagacccctacctgtctaccctccttcggacccctaggaagcttcgcaggccttccaggctgccagacagctgccctggcgttgccgtctgcttcttccctggccccactctgaggggctcagagctgaggcagaatccctttttcattcatttcctgcagaataaaacaacatacagaaaagtgaataaaacataaatgcacaacctaacacactgttaggaagtgaacgatctgcaaccaccatcaggaaatagttttgccagcacccaagtgccctcccctcacagtgtcacttccggcctctctgccctggcttatgtgagtcttgtgttcttgtttttctaaaaagtcttcagcacccaattatgcaggcattgcagtattttcctgtttctgtgctttatccccttgaatcatacagatgcaaattctggcagctggcttctttggctcgttattatgtctgtgagatttattcatgttgctgtgcgtagtatagtttgtgcatgttcattgctaaaaacttccattgtttggctgtatcgtagttcacagattcatttcactgtcagtcaagcttgtccaatgcatgcagcccaggatgcctttgaatgtggcccaacacaaatttgtaaactttcttaaaacattataaagatttttgtttgcgatttttttttttagctcatcagctatagttagtggtagtgtattttatgcgtgacccgagacagttcttccggtatggtccatggaagccaaaagattggacatgcctgctgtagatggacagttggtttgtttctagtttggggtaactacacacaatgctgctagcaacagttttgtccatgtctctgatgcacgtgtgttttttgcaaatggtgcacaaatttttctagggtttgtactcaggagtctgactcctgggttctagggtatgaagatctttctaaatattgttctagtttacgtgcccaccagcagtaaaacagaattcccttgccttcccatccttggcagacatttcacttttgccagtctggtggggtgtatagttatggccttaatttgcatttagctaattaccaaggagattgagcatatttttatgtttttattaaccattttgattttgtctcctgtgaagtgtctatcatcttttgcccattttttaacttgttgtctttttctttttcttttctttttttttttttctgagacagggtctcactctgttgccctggctggagtgcagtggtgcaatctcagctcactgcagccttgagtcaggctcaggtgattctctcacctcagcctcccaagtagctgggaccacaggcccacaccaccaagcccagctaattttttgtatttttaagtagagacgggtttcatcatgttatgcaggctgctctcaaactcttgagctcaagcgatctgctggcctcagcctcccaaagttgggattataggcgtgagctaccagattttttcttattaatctaataattctttgtatagtcttgatattatccataatgtgtattgcaaatatcttctctaactctggcttgactgtttatggtgtcctttttttttggggggggttttttgagacaaggtcttgctctgtcacccaggctggagtgttatggcacaatcttggcttattgcagcctcaattcctaggcttaaacagtcctcccacctcagcctcctgagtagccggaactacagtcacgcacttccatgtccagataattttttttttttttttagagataggatcttactatgccccagctggtctcaaactcctagactcaatgagcctcccatcttgacctcccaaagtgctgggagtacaggcatgagccactgtgcatgccagttcttatttttaatgcagttgaattgatcagtgttttcattttggttagtgctttttgtggcttaagaaattctttccaggctgggtacagtggctcacacctgtaatgccagcactttgggggcagaggcaggaggattacttgagctcaggagtttgagaccaacctggacaacatggcgaaacaccatctctacaaaaaatacaaaaattagctggacatggtggtgcgtgcctgtagtcccagctactcaggtggctggggtgagaggattgcttgagcccagaaggtcaaggctgcagtgagctgtgattgtgccactgcacttcagcctgtgagacagagtgagaccctatctcaaaaaaaaccaaaaaaaaaaaaaaaaaaaagaaaaccactgaaattatttccactccaaggtcatgaagatagtctcttagattatattctgaaatccttataaatgtaaatttcatatttaggcctttaattcacctagatttggttttttgcatatggtgtgaggtaaggattcactttcatttttttctctccatagggttacacacctgtcctatcattgtttgtaatctaactttctgcgcccatctgcaatgccacctctgtcatatgtccacatatgacatatgtagatctgttgttggattctttcctctgttccattagtctgtctgttcttgtgccaatatcaagctgtcttcattattatcaattatgtattgagatctgataaagtaagtcttttccaccttatttttcttctttgagagtgtcttgactattctggctctttgtattttcatgtaaggtttttctcccatataagttttaaaatcagcttgtcaattccaacaacaatgatgcacttgatagtttgggaatttattatagctatcaatcagttttgggaaaattgacgtctttacaatattgagttttctgattcatgaacatggtttacctctctttccatttgggtcttctttaaggtttaccaataggattttatatttttgtccattgtggtcttgcttatcttaagtttgatttgtaaatattttatgtttcttttagtctattgtaaattgtgtatttttaatttcatttttttttttgttaatagcatataaaacacaccttgtcttttaactggagcattttgtccattgtgtatttaatgtaattaaatctaccatcttattttatgctaca

SEQ ID NO: 27927 - DNA, 414 bp, Homo sapiens
  source 1..414: mol_type = unassigned DNA
gggcgcgggcgggacggagctgcggcggcggcgggtcccgcgggcgggagcgcctggcggccgagtcaagccgccgcctcgacccagggcccgcgggccaggagagcgctcggcggcttcatggcggctgaagagatgcattggcctgtccctatgaaggccattggtgcccagaacctgctaaccatgcctgggggcgtggccaaggctggctacctgcacaagaagggcggtacccagctgcagctgctgaaatggcccctgcgctttgtcatcatccacaaacgctgcgtctactacttcaagagtagcacctctgcctccccgcagggcgccttctccctgagtggctataaccggcagcccagaccccagccagcccaggccctgtcccaaacagaggctgggccctag

SEQ ID NO: 27928 - DNA, 2318 bp, Homo sapiens
  source 1..2318: mol_type = unassigned DNA
gtgagctgtgggcacagctgtggggcagccaggcgcgtcaggcctcacatgtctgggagatgtaggctgcctgggctggtggcccctgagccgcatggcctccctgggccccaggacaccggccccgagcaggtcacgaggacggagggccatgtgttgggtcagcaccatcagcttcatggcggctgaagagatgcattggcctgtccctatgaaggccattggtgcccagaacctgctaaccatgcctgggggcgtggccaaggctggctacctgcacaagaagggcggtacccagctgcagctgctgaaatggcccctgcgctttgtcatcatccacaaacgctgcgtctactacttcaagagtagcacctctgcctccccgcagggcgccttctccctgagtggctataaccgggtgatgcgggcggctgaggagaccacgtccaacaacgttttccccttcaagatcatccatatcagcaagaagcaccgcacgtggttcttctcggcctcctccgaggaggagcgcaagagctggatggccttgctgcgcagggagattggccacttccacgaaaagaaagacctgcccttggacaccagcgactccagctcggacacagacagcttctacggcgcagttgagcggcctgtggatatcagcctttccccgtaccccacggacaatgaagactatgagcacgacgatgaggatgactcctacctggagcctgactccccggagcccggaaggcttgaggatgccctgatgcacccaccggcttacccaccacccccagtgcccacgcccaggaagccagccttctctgacatgccccgggcccactcctttacctccaagggccccggtcccctactgccacccccgccccctaagcacggcctcccagatgttggcctggctgctgaggactccaagagggacccactgtgcccgaggcgggctgagccttgccccagggtacctgctaccccccgaaggatgagcgatccccctctgagcaccatgcccaccgcacccggcctccggaaacccccttgcttccgggagagtgccagccccagcccggagccctggacccctggccacggggcctgctccacttccagtgctgccatcatggccactgccacctccagaaactgtgacaaactcaagtccttccacctgtccccccgaggaccacccacatctgagcccccacctgtgccagccaacaagcccaagttcctgaagatagctgaagaggaccccccaagggaggcagccatgcccggactctttgtgccccccgtggctccccggcctcctgcgctgaagctgccagtgcctgaggccatggcgcggcccgcagtcctgcccaggccagagaagccgcagctcccgcacctccagcgatcaccccccgatgggcagagtttcaggagcttctcctttgaaaagccccggcaaccctcacaggctgacactggcggggacgactcggacgaggactatgagaaggtgccactgcccaactcggtcttcgtcaacaccacggagtcctgcgaagtggaaaggttgttcaaggctacaagcccccggggagagccccaggatggactctactgcatccggaactcctctaccaagtcggggaaggtcctggttgtgtgggacgaaacctctaacaaagtgaggaactatcgcatttttgagaaggactctaagttctacctggagggcgaggtcctgtttgtgagtgtgggcagcatggtggagcactaccacacccacgtgctgcccagccaccagagcctgctgctgcggcacccctacggctacactgggcctaggtgatggcagtccatgtggctgccaggccaaggcagtcacaggggccctgaccccaggccacacagacggacatgggcccacatgggagggtgagcaggagcaaggctgtgcttgcctagggcctctgtgatggacatctcgtaggacccagccagtctcatccagcaggttgggttctagggctgaaccaggcgccaggctccagaggacgaagggactctgttgccccacactaacttgccctgtcccaatcccagaaacccaggaccaagctgtgcctgggctccaaggacaggaacactggtccccccatcacactcacccctaagtgggctgggagccaggcagggccagggcagctgggtgggggccggggctggccctgggacccccaggaacgctaagacacaggctccagtaggggctgttgcctccaataaagcagcagtgagctttg

SEQ ID NO: 27929 - DNA, 9211 bp, Homo sapiens
  source 1..9211: mol_type = unassigned DNA
acttggtgctgcccagggagcagggaacaggaagtcccgggtggggaggaagcaccggcggccacaggcctcagaagcagcaggagtgagctgtgggcacagctgtggggcagccaggcgcgtcaggcctcacatgtctgggagatgtaggctgcctgggctggtggcccctgagccgcatggcctccctgggccccaggacaccggccccgagcaggtcacgaggacggagggccatgtgttgggtcagcaccatcagcttcatggcggctgaagagatgcattggcctgtccctatgaaggccattggtgcccagaacctgctaaccatgcctgggggcgtggccaaggctggctacctgcacaagaagggcggtacccagctgcagctgctgaaatggcccctgcgctttgtcatcatccacaaacgctgcgtctactacttcaagagtagcacctctgcctccccgcagggcgccttctccctgagtggctataaccgggtgatgcgggcggctgaggagaccacgtccaacaacgttttccccttcaagatcatccatatcagcaagaagcaccgcacgtggttcttctcggcctcctccgaggaggagcgcaagagctggatggccttgctgcgcagggagattggccacttccacgaaaagaaagacctgcccttggacaccagcgactccagctcggacacagacagcttctacggcgcagttgagcggcctgtggatatcagcctttccccgtaccccacggacaatgaagactatgagcacgacgatgaggatgactcctacctggagcctgactccccggagcccggaaggcttgaggatgccctgatgcacccaccggcttacccaccacccccagtgcccacgcccaggaagccagccttctctgacatgccccgggcccactcctttacctccaagggccccggtcccctactgccacccccgccccctaagcacggcctcccagatgttggcctggctgctgaggactccaagagggacccactgtgcccgaggcgggctgagccttgccccagggtacctgctaccccccgaaggatgagcgatccccctctgagcaccatgcccaccgcacccggcctccggaaacccccttgcttccgggagagtgccagccccagcccggagccctggacccctggccacggggcctgctccacttccagtgctgccatcatggccactgccacctccagaaactgtgacaaactcaagtccttccacctgtccccccgaggaccacccacatctgagcccccacctgtgccagccaacaagcccaagttcctgaagatagctgaagaggaccccccaagggaggcagccatgcccggactctttgtgccccccgtggctccccggcctcctgcgctgaagctgccagtgcctgaggccatggcgcggcccgcagtcctgcccaggccagagaagccgcagctcccgcacctccagcgatcaccccccgatgggcagagtttcaggagcttctcctttgaaaagccccggcaaccctcacaggctgacactggcggggacgactcggacgaggactatgagaaggtgccactgcccaactcggtcttcgtcaacaccacggagtcctgcgaagtggaaaggttgttcaaggctacaagcccccggggagagccccaggatggactctactgcatccggaactcctctaccaagtcggggaaggtcctggttgtgtgggacgaaacctctaacaaagtgaggaactatcgcatttttgagaaggactctaagttctacctggagggcgaggtcctgtttgtgagtgtgggcagcatggtggagcactaccacacccacgtgctgcccagccaccagagcctgctgctgcggcacccctacggctacactgggcctaggtgatggcagtccatgtggctgccaggccaaggcagtcacaggggccctgaccccaggccacacagacggacatgggcccacatgggagggtgagcaggagcaaggctgtgcttgcctagggcctctgtgatggacatctcgtaggacccagccagtctcatccagcaggttgggttctagggctgaaccaggcgccaggctccagaggacgaagggactctgttgccccacactaacttgccctgtcccaatcccagaaacccaggaccaagctgtgcctgggctccaaggacaggaacactggtccccccatcacactcacccctaagtgggctgggagccaggcagggccagggcagctgggtgggggccggggctggccctgggacccccaggaacgctaagacacaggctccagtaggggctgttgcctccaataaagcagcagtgagctttgccttggtggctggggcttgattgggaaggaggggattaccagcttactgggtgcccatgctgatgtctaagtggtgaccgcagcagtacccgggaaccccaacagttggttgtcttgtcttccagggtgcaggtcactgagtgacttccccagggtgcacagcgagtaacagatcaggacccaaacttgggcagtctgggctgggagcccacaccccactcaccagttctgctgcctcaggtcaggccagggcagtgctgctgcagagctagaaggccctgcagctacagctgcttcattccctgcattagtgcctggttactgggtacctcctgagtggctgtccccgttccagaacttgcatacactgagcgggctacagagctagaaggccctgcagctacagctgcttcattccctgcattagcgagcagttattgggtacctcctgcatgcctggtcccattccagacaggggcctctggcctggctgagttcacagcccagtctggggacagctgggtatgaggtgcttacggcacagtgtccagggcagctgggtgtgcagggactgggggctcccggaagattttttggaggaagtaacagctacgatgggatgggaacagtggaccctaagcaggccaagggtgcgtagggacggtggtacccagatgcccaagtcttccaggcaatacctggctcaggcccagccccaatccatccccttactttctgccatggagttccagcaggtcactctccctggcacaccttccaggctggatttttaatgaaacagactcagggaggtaggggctggcagggaccctagaatccttgtgatttttcttagcaccttatgtcagggaaacctaaactgaggtcagcacttgggcccactgacagtgactgactgggggagaaggtcctgcagcccccttcccctgggtgtgttctggggacctgtggtttgctggcggaaacaagtgatgaggctggttagcggatgtgggaggctgtgaccccagggggccatagggtgcggtggaactgcaggccctgcagatgacggcagccagctgcttccaggaaccaggtgtccaaggccacctctgcaggggtttcctcttcagcctgcctggggtgagaggtcagtgcaccacagccgaggctggagcacagggagcttctgttgttctgatctatctctggaaaaccagccattcctcctccctgcagtcagaattctttgccctgtctgacctgaacttgcttagggagtcatgccactccccactgtggccatagtttctcttcctgtaaaattttattattttagttttttgtttttgagatgtagtctcaccctgtcgcccaggctggagtgcaatgccgtgatctccgctcactgccacctccgcctctctagttcaagcgattttcctgcctcagcctcccgagtagctgggattccaggcgcccgccaccacgcctggctaattttttgtatttttagtagagacgggattttatcatgttggccaggctggtctcgaactcctgacctcaggtgatctgcccaccttggcctcccaaagtgctgggattacaggcatgagccactgtgcctggccccttcctgtaaaatttttaaatggagaattgggtgcgagatgtggtttccagcctggtgcctggggtgctgagctagtgagtggtgcagtccaggacacctttgctttatgtcacttacacggtcacctggagccggctcaagtggctaaagcatcctggggcccagagccaggtgataggtccctctggccaactggacagttgaggcctgtggttacccgaagcccagctggggccctggtccagcctcgcctcccagactctgcacctgctagcacagctgtccacgtctgtgtgagctgctctaggccgagggcctcagtttcaagagtgtgttggggtgggatggggcaggccgtggtcctccagcatgaagaaggagccatgaggagttcccatgacctcccgagacttgccataagtgttctagtccacatataagggtagggttgggattaccatttactgaccacatctgtgaggtgccgagctgggtgcttgacatcatttgcttggagaagcagctgctagtagacccattttacaggtgagagaaccaagtctcacagaggcctgggttcaagtcccacctctgccactaactggcatgtgaccctatctatccttcactgctctgagcctagaccctggcccctgcctggctccctgccaggctccctgccacccctcacgacctctgatggtcgttgtgggggtctcttgcctggctcccagggctagggttagggctctggaggtgctttcactcaaccaagggggccacagcactggggagtgaaactgccccgcctcaccctgcgttgccctctgggtctgtgagggtgggctggcaggaggcctaggccttgccctaggggcagtcctgcttcctcattttatagatagggaaactgaggctttgggaggactcactgacatacctaccttcaagatgagttcaggtgggctcagttctggggcttgggaaaagggccccagtggctttgggaagcacccccagcccagggtgaaacatgcttcttctcttcctgtggttccatccgaaggattgtggtgagccccgtgccttcagttaataaagatttgtattgtgaaaagattttttcttttttttttgggacacagtctcactctgtcgcccaggctagagtggattggcgtgatctcggctcaatgcaaatctccagggttcaatcgattctcctgcctcaccctcccatgtagctgggattacagctgcctgccaaatttttgtatttttagtggaaccggggtttcaccatgttggccaggctggtcttgaactcctgacctcaactgatccgcccaccttggcctcccaagtgctgggattacaggcgcgagccacggcgcccagccttgaaaagatgtttttagaaccagaagaaacctcggttcccactgatccttctgggccacgttgtgcggagctcccctgctggttggggctcagcgcagccccagggaggtgcttcctgcacctcaggatgggcgagggtgggcattgggggagagggggacctgggacctgcggcttagttccctgaggcaggcagggcttattggggccatttcatagaaaggcagattgaagctcagcagggaagaggcttttgagggtgatccaggcgctggagggatggcctaggacaccagggtcacaccaggaacatgggagggccgtgcttgtctctagacgaggggaatgggggaagggccacaacctctgtttctgtgacccagcagcatcaagcccctcgctgggcacctcgcacacaccccctgccttatctctgcctgcacgccctgttccctccacctagactgcctgctgagggggcagtgccaggaggttgcctgtccttggggaagaggggcagtgaccctgtgaagatgcttgacagacaacccccaccacctcagaagtgtgtgtgagtggtgaacccttttaagccatcttccagccattctcactggagggagatttgatgggtacagagcagacccctacctgtctaccctccttcggacccctaggaagcttcgcaggccttccaggctgccagacagctgccctggcgttgccgtctgcttcttccctggccccactctgaggggctcagagctgaggcagaatccctttttcattcatttcctgcagaataaaacaacatacagaaaagtgaataaaacataaatgcacaacctaacacactgttaggaagtgaacgatctgcaaccaccatcaggaaatagttttgccagcacccaagtgccctcccctcacagtgtcacttccggcctctctgccctggcttatgtgagtcttgtgttcttgtttttctaaaaagtcttcagcacccaattatgcaggcattgcagtattttcctgtttctgtgctttatccccttgaatcatacagatgcaaattctggcagctggcttctttggctcgttattatgtctgtgagatttattcatgttgctgtgcgtagtatagtttgtgcatgttcattgctaaaaacttccattgtttggctgtatcgtagttcacagattcatttcactgtcagtcaagcttgtccaatgcatgcagcccaggatgcctttgaatgtggcccaacacaaatttgtaaactttcttaaaacattataaagatttttgtttgcgatttttttttttagctcatcagctatagttagtggtagtgtattttatgcgtgacccgagacagttcttccggtatggtccatggaagccaaaagattggacatgcctgctgtagatggacagttggtttgtttctagtttggggtaactacacacaatgctgctagcaacagttttgtccatgtctctgatgcacgtgtgttttttgcaaatggtgcacaaatttttctagggtttgtactcaggagtctgactcctgggttctagggtatgaagatctttctaaatattgttctagtttacgtgcccaccagcagtaaaacagaattcccttgccttcccatccttggcagacatttcacttttgccagtctggtggggtgtatagttatggccttaatttgcatttagctaattaccaaggagattgagcatatttttatgtttttattaaccattttgattttgtctcctgtgaagtgtctatcatcttttgcccattttttaacttgttgtctttttctttttcttttctttttttttttttctgagacagggtctcactctgttgccctggctggagtgcagtggtgcaatctcagctcactgcagccttgagtcaggctcaggtgattctctcacctcagcctcccaagtagctgggaccacaggcccacaccaccaagcccagctaattttttgtatttttaagtagagacgggtttcatcatgttatgcaggctgctctcaaactcttgagctcaagcgatctgctggcctcagcctcccaaagttgggattataggcgtgagctaccagattttttcttattaatctaataattctttgtatagtcttgatattatccataatgtgtattgcaaatatcttctctaactctggcttgactgtttatggtgtcctttttttttggggggggttttttgagacaaggtcttgctctgtcacccaggctggagtgttatggcacaatcttggcttattgcagcctcaattcctaggcttaaacagtcctcccacctcagcctcctgagtagccggaactacagtcacgcacttccatgtccagataattttttttttttttttagagataggatcttactatgccccagctggtctcaaactcctagactcaatgagcctcccatcttgacctcccaaagtgctgggagtacaggcatgagccactgtgcatgccagttcttatttttaatgcagttgaattgatcagtgttttcattttggttagtgctttttgtggcttaagaaattctttccaggctgggtacagtggctcacacctgtaatgccagcactttgggggcagaggcaggaggattacttgagctcaggagtttgagaccaacctggacaacatggcgaaacaccatctctacaaaaaatacaaaaattagctggacatggtggtgcgtgcctgtagtcccagctactcaggtggctggggtgagaggattgcttgagcccagaaggtcaaggctgcagtgagctgtgattgtgccactgcacttcagcctgtgagacagagtgagaccctatctcaaaaaaaaccaaaaaaaaaaaaaaaaaaaagaaaaccactgaaattatttccactccaaggtcatgaagatagtctcttagattatattctgaaatccttataaatgtaaatttcatatttaggcctttaattcacctagatttggttttttgcatatggtgtgaggtaaggattcactttcatttttttctctccatagggttacacacctgtcctatcattgtttgtaatctaactttctgcgcccatctgcaatgccacctctgtcatatgtccacatatgacatatgtagatctgttgttggattctttcctctgttccattagtctgtctgttcttgtgccaatatcaagctgtcttcattattatcaattatgtattgagatctgataaagtaagtcttttccaccttatttttcttctttgagagtgtcttgactattctggctctttgtattttcatgtaaggtttttctcccatataagttttaaaatcagcttgtcaattccaacaacaatgatgcacttgatagtttgggaatttattatagctatcaatcagttttgggaaaattgacgtctttacaatattgagttttctgattcatgaacatggtttacctctctttccatttgggtcttctttaaggtttaccaataggattttatatttttgtccattgtggtcttgcttatcttaagtttgatttgtaaatattttatgtttcttttagtctattgtaaattgtgtatttttaatttcatttttttttttgttaatagcatataaaacacaccttgtcttttaactggagcattttgtccattgtgtatttaatgtaattaaatctaccatcttattttatgcta

SEQ ID NO: 27930 - DNA, 2265 bp, Homo sapiens
  source 1..2265: mol_type = unassigned DNA
gggcgcgggcgggacggagctgcggcggcggcgggtcccgcgggcgggagcgcctggcggccgagtcaagccgccgcctcgacccagggcccgcgggccaggagagcgctcggcggcttcatggcggctgaagagatgcattggcctgtccctatgaaggccattggtgcccagaacctgctaaccatgcctgggggcgtggccaaggctggctacctgcacaagaagggcggtacccagctgcagctgctgaaatggcccctgcgctttgtcatcatccacaaacgctgcgtctactacttcaagagtagcacctctgcctccccgcagggcgccttctccctgagtggctataaccgggtgatgcgggcggctgaggagaccacgtccaacaacgttttccccttcaagatcatccatatcagcaagaagcaccgcacgtggttcttctcggcctcctccgaggaggagcgcaagagctggatggccttgctgcgcagggagattggccacttccacgaaaagaaagacctgcccttggacaccagcgactccagctcggacacagacagcttctacggcgcagttgagcggcctgtggatatcagcctttccccgtaccccacggacaatgaagactatgagcacgacgatgaggatgactcctacctggagcctgactccccggagcccggaaggcttgaggatgccctgatgcacccaccggcttacccaccacccccagtgcccacgcccaggaagccagccttctctgacatgccccgggcccactcctttacctccaagggccccggtcccctactgccacccccgccccctaagcacggcctcccagatgttggcctggctgctgaggactccaagagggacccactgtgcccgaggcgggctgagccttgccccagggtacctgctaccccccgaaggatgagcgatccccctctgagcaccatgcccaccgcacccggcctccggaaacccccttgcttccgggagagtgccagccccagcccggagccctggacccctggccacggggcctgctccacttccagtgctgccatcatggccactgccacctccagaaactgtgacaaactcaagtccttccacctgtccccccgaggaccacccacatctgagcccccacctgtgccagccaacaagcccaagttcctgaagatagctgaagaggaccccccaagggaggcagccatgcccggactctttgtgccccccgtggctccccggcctcctgcgctgaagctgccagtgcctgaggccatggcgcggcccgcagtcctgcccaggccagagaagccgcagctcccgcacctccagcgatcaccccccgatgggcagagtttcaggagcttctcctttgaaaagccccggcaaccctcacaggctgacactggcggggacgactcggacgaggactatgagaaggtgccactgcccaactcggtcttcgtcaacaccacggagtcctgcgaagtggaaaggttgttcaaggctacaagcccccggggagagccccaggatggactctactgcatccggaactcctctaccaagtcggggaaggtcctggttgtgtgggacgaaacctctaacaaagtgaggaactatcgcatttttgagaaggactctaagttctacctggagggcgaggtcctgtttgtgagtgtgggcagcatggtggagcactaccacacccacgtgctgcccagccaccagagcctgctgctgcggcacccctacggctacactgggcctaggtgatggcagtccatgtggctgccaggccaaggcagtcacaggggccctgaccccaggccacacagacggacatgggcccacatgggagggtgagcaggagcaaggctgtgcttgcctagggcctctgtgatggacatctcgtaggacccagccagtctcatccagcaggttgggttctagggctgaaccaggcgccaggctccagaggacgaagggactctgttgccccacactaacttgccctgtcccaatcccagaaacccaggaccaagctgtgcctgggctccaaggacaggaacactggtccccccatcacactcacccctaagtgggctgggagccaggcagggccagggcagctgggtgggggccggggctggccctgggacccccaggaacgctaagacacaggctccagtaggggctgttgcctccaataaagcagcagtgagctttgccttg

SEQ ID NO: 27931 - DNA, 727 bp, Homo sapiens
  source 1..727: mol_type = unassigned DNA
cagaagcagcaggagtgagctgtgggcacagctgtggggcagccaggcgcgtcaggcctcacatgtctgggagatgtaggctgcctgggctggtggcccctgagccgcatggcctccctgggccccaggacaccggccccgagcaggtcacgaggacggagggccatgtgttgggtcagcaccatcagctcctgcccatgttaactcagccgacaccgcagcagcatggtgacaggtccccccagggtgtctgcctctacagaggaagggactgaagcacccagagagctggcagcttcatggcggctgaagagatgcattggcctgtccctatgaaggccattggtgcccagaacctgctaaccatgcctgggggcgtggccaaggctggctacctgcacaagaagggcggtacccagctgcagctgctgaaatggcccctgcgctttgtcatcatccacaaacgctgcgtctactacttcaagagtagcacctctgcctccccgcagggcgccttctccctgagtggctataaccgggtgatgcgggcggctgaggagaccacgtccaacaacgttttccccttcaagatcatccatatcagcaagaagcaccgcacgtggttcttctcggcctcctccgaggaggagcgcaagagctggatggccttgctgcgcagggagattggccacttccacgaaaagaaagacctgcccttggacaccag

SEQ ID NO: 27932 - DNA, 551 bp, Homo sapiens
  source 1..551: mol_type = unassigned DNA
agcgcctggcggccgagtcaagccgccgcctcgacccagggcccgcgggccaggagagcgctcggcgggctgacccttggccctctgcctgccctgctggctggctcccactcatcctgcttcatggcggctgaagagatgcattggcctgtccctatgaaggccattggtgcccagaacctgctaaccatgcctgggggcgtggccaaggctggctacctgcacaagaagggcggtacccagctgcagctgctgaaatggcccctgcgctttgtcatcatccacaaacgctgcgtctactacttcaagagtagcacctctgcctccccgcagggcgccttctccctgagtggctataaccgggtgatgcgggcggctgaggagaccacgtccaacaacgttttccccttcaagatcatccatatcagcaagaagcaccgcacgtggttcttctcggcctcctccgaggaggagcgcaagagctggatggccttgctgcgcagggagattggccacttccacgaaaagaaagacctgcccttggacaccag

SEQ ID NO: 27933 - DNA, 9158 bp, Homo sapiens
  source 1..9158: mol_type = unassigned DNA
ggggaggagccggcggctgccaggccagggccggcgggcatggcgggctccgggccgcggccgcggagctggggccggcgggaggcgggcgcccgggacgaggcggcggcggccgggggacgcggcccggggccgtgccggtgctcgcaggggaggcgggcgtggatcgccccggggaagccggccatgcccgccgcgtggacgcccttcatggcggctgaagagatgcattggcctgtccctatgaaggccattggtgcccagaacctgctaaccatgcctgggggcgtggccaaggctggctacctgcacaagaagggcggtacccagctgcagctgctgaaatggcccctgcgctttgtcatcatccacaaacgctgcgtctactacttcaagagtagcacctctgcctccccgcagggcgccttctccctgagtggctataaccgggtgatgcgggcggctgaggagaccacgtccaacaacgttttccccttcaagatcatccatatcagcaagaagcaccgcacgtggttcttctcggcctcctccgaggaggagcgcaagagctggatggccttgctgcgcagggagattggccacttccacgaaaagaaagacctgcccttggacaccagcgactccagctcggacacagacagcttctacggcgcagttgagcggcctgtggatatcagcctttccccgtaccccacggacaatgaagactatgagcacgacgatgaggatgactcctacctggagcctgactccccggagcccggaaggcttgaggatgccctgatgcacccaccggcttacccaccacccccagtgcccacgcccaggaagccagccttctctgacatgccccgggcccactcctttacctccaagggccccggtcccctactgccacccccgccccctaagcacggcctcccagatgttggcctggctgctgaggactccaagagggacccactgtgcccgaggcgggctgagccttgccccagggtacctgctaccccccgaaggatgagcgatccccctctgagcaccatgcccaccgcacccggcctccggaaacccccttgcttccgggagagtgccagccccagcccggagccctggacccctggccacggggcctgctccacttccagtgctgccatcatggccactgccacctccagaaactgtgacaaactcaagtccttccacctgtccccccgaggaccacccacatctgagcccccacctgtgccagccaacaagcccaagttcctgaagatagctgaagaggaccccccaagggaggcagccatgcccggactctttgtgccccccgtggctccccggcctcctgcgctgaagctgccagtgcctgaggccatggcgcggcccgcagtcctgcccaggccagagaagccgcagctcccgcacctccagcgatcaccccccgatgggcagagtttcaggagcttctcctttgaaaagccccggcaaccctcacaggctgacactggcggggacgactcggacgaggactatgagaaggtgccactgcccaactcggtcttcgtcaacaccacggagtcctgcgaagtggaaaggttgttcaaggctacaagcccccggggagagccccaggatggactctactgcatccggaactcctctaccaagtcggggaaggtcctggttgtgtgggacgaaacctctaacaaagtgaggaactatcgcatttttgagaaggactctaagttctacctggagggcgaggtcctgtttgtgagtgtgggcagcatggtggagcactaccacacccacgtgctgcccagccaccagagcctgctgctgcggcacccctacggctacactgggcctaggtgatggcagtccatgtggctgccaggccaaggcagtcacaggggccctgaccccaggccacacagacggacatgggcccacatgggagggtgagcaggagcaaggctgtgcttgcctagggcctctgtgatggacatctcgtaggacccagccagtctcatccagcaggttgggttctagggctgaaccaggcgccaggctccagaggacgaagggactctgttgccccacactaacttgccctgtcccaatcccagaaacccaggaccaagctgtgcctgggctccaaggacaggaacactggtccccccatcacactcacccctaagtgggctgggagccaggcagggccagggcagctgggtgggggccggggctggccctgggacccccaggaacgctaagacacaggctccagtaggggctgttgcctccaataaagcagcagtgagctttgccttggtggctggggcttgattgggaaggaggggattaccagcttactgggtgcccatgctgatgtctaagtggtgaccgcagcagtacccgggaaccccaacagttggttgtcttgtcttccagggtgcaggtcactgagtgacttccccagggtgcacagcgagtaacagatcaggacccaaacttgggcagtctgggctgggagcccacaccccactcaccagttctgctgcctcaggtcaggccagggcagtgctgctgcagagctagaaggccctgcagctacagctgcttcattccctgcattagtgcctggttactgggtacctcctgagtggctgtccccgttccagaacttgcatacactgagcgggctacagagctagaaggccctgcagctacagctgcttcattccctgcattagcgagcagttattgggtacctcctgcatgcctggtcccattccagacaggggcctctggcctggctgagttcacagcccagtctggggacagctgggtatgaggtgcttacggcacagtgtccagggcagctgggtgtgcagggactgggggctcccggaagattttttggaggaagtaacagctacgatgggatgggaacagtggaccctaagcaggccaagggtgcgtagggacggtggtacccagatgcccaagtcttccaggcaatacctggctcaggcccagccccaatccatccccttactttctgccatggagttccagcaggtcactctccctggcacaccttccaggctggatttttaatgaaacagactcagggaggtaggggctggcagggaccctagaatccttgtgatttttcttagcaccttatgtcagggaaacctaaactgaggtcagcacttgggcccactgacagtgactgactgggggagaaggtcctgcagcccccttcccctgggtgtgttctggggacctgtggtttgctggcggaaacaagtgatgaggctggttagcggatgtgggaggctgtgaccccagggggccatagggtgcggtggaactgcaggccctgcagatgacggcagccagctgcttccaggaaccaggtgtccaaggccacctctgcaggggtttcctcttcagcctgcctggggtgagaggtcagtgcaccacagccgaggctggagcacagggagcttctgttgttctgatctatctctggaaaaccagccattcctcctccctgcagtcagaattctttgccctgtctgacctgaacttgcttagggagtcatgccactccccactgtggccatagtttctcttcctgtaaaattttattattttagttttttgtttttgagatgtagtctcaccctgtcgcccaggctggagtgcaatgccgtgatctccgctcactgccacctccgcctctctagttcaagcgattttcctgcctcagcctcccgagtagctgggattccaggcgcccgccaccacgcctggctaattttttgtatttttagtagagacgggattttatcatgttggccaggctggtctcgaactcctgacctcaggtgatctgcccaccttggcctcccaaagtgctgggattacaggcatgagccactgtgcctggccccttcctgtaaaatttttaaatggagaattgggtgcgagatgtggtttccagcctggtgcctggggtgctgagctagtgagtggtgcagtccaggacacctttgctttatgtcacttacacggtcacctggagccggctcaagtggctaaagcatcctggggcccagagccaggtgataggtccctctggccaactggacagttgaggcctgtggttacccgaagcccagctggggccctggtccagcctcgcctcccagactctgcacctgctagcacagctgtccacgtctgtgtgagctgctctaggccgagggcctcagtttcaagagtgtgttggggtgggatggggcaggccgtggtcctccagcatgaagaaggagccatgaggagttcccatgacctcccgagacttgccataagtgttctagtccacatataagggtagggttgggattaccatttactgaccacatctgtgaggtgccgagctgggtgcttgacatcatttgcttggagaagcagctgctagtagacccattttacaggtgagagaaccaagtctcacagaggcctgggttcaagtcccacctctgccactaactggcatgtgaccctatctatccttcactgctctgagcctagaccctggcccctgcctggctccctgccaggctccctgccacccctcacgacctctgatggtcgttgtgggggtctcttgcctggctcccagggctagggttagggctctggaggtgctttcactcaaccaagggggccacagcactggggagtgaaactgccccgcctcaccctgcgttgccctctgggtctgtgagggtgggctggcaggaggcctaggccttgccctaggggcagtcctgcttcctcattttatagatagggaaactgaggctttgggaggactcactgacatacctaccttcaagatgagttcaggtgggctcagttctggggcttgggaaaagggccccagtggctttgggaagcacccccagcccagggtgaaacatgcttcttctcttcctgtggttccatccgaaggattgtggtgagccccgtgccttcagttaataaagatttgtattgtgaaaagattttttcttttttttttgggacacagtctcactctgtcgcccaggctagagtggattggcgtgatctcggctcaatgcaaatctccagggttcaatcgattctcctgcctcaccctcccatgtagctgggattacagctgcctgccaaatttttgtatttttagtggaaccggggtttcaccatgttggccaggctggtcttgaactcctgacctcaactgatccgcccaccttggcctcccaagtgctgggattacaggcgcgagccacggcgcccagccttgaaaagatgtttttagaaccagaagaaacctcggttcccactgatccttctgggccacgttgtgcggagctcccctgctggttggggctcagcgcagccccagggaggtgcttcctgcacctcaggatgggcgagggtgggcattgggggagagggggacctgggacctgcggcttagttccctgaggcaggcagggcttattggggccatttcatagaaaggcagattgaagctcagcagggaagaggcttttgagggtgatccaggcgctggagggatggcctaggacaccagggtcacaccaggaacatgggagggccgtgcttgtctctagacgaggggaatgggggaagggccacaacctctgtttctgtgacccagcagcatcaagcccctcgctgggcacctcgcacacaccccctgccttatctctgcctgcacgccctgttccctccacctagactgcctgctgagggggcagtgccaggaggttgcctgtccttggggaagaggggcagtgaccctgtgaagatgcttgacagacaacccccaccacctcagaagtgtgtgtgagtggtgaacccttttaagccatcttccagccattctcactggagggagatttgatgggtacagagcagacccctacctgtctaccctccttcggacccctaggaagcttcgcaggccttccaggctgccagacagctgccctggcgttgccgtctgcttcttccctggccccactctgaggggctcagagctgaggcagaatccctttttcattcatttcctgcagaataaaacaacatacagaaaagtgaataaaacataaatgcacaacctaacacactgttaggaagtgaacgatctgcaaccaccatcaggaaatagttttgccagcacccaagtgccctcccctcacagtgtcacttccggcctctctgccctggcttatgtgagtcttgtgttcttgtttttctaaaaagtcttcagcacccaattatgcaggcattgcagtattttcctgtttctgtgctttatccccttgaatcatacagatgcaaattctggcagctggcttctttggctcgttattatgtctgtgagatttattcatgttgctgtgcgtagtatagtttgtgcatgttcattgctaaaaacttccattgtttggctgtatcgtagttcacagattcatttcactgtcagtcaagcttgtccaatgcatgcagcccaggatgcctttgaatgtggcccaacacaaatttgtaaactttcttaaaacattataaagatttttgtttgcgatttttttttttagctcatcagctatagttagtggtagtgtattttatgcgtgacccgagacagttcttccggtatggtccatggaagccaaaagattggacatgcctgctgtagatggacagttggtttgtttctagtttggggtaactacacacaatgctgctagcaacagttttgtccatgtctctgatgcacgtgtgttttttgcaaatggtgcacaaatttttctagggtttgtactcaggagtctgactcctgggttctagggtatgaagatctttctaaatattgttctagtttacgtgcccaccagcagtaaaacagaattcccttgccttcccatccttggcagacatttcacttttgccagtctggtggggtgtatagttatggccttaatttgcatttagctaattaccaaggagattgagcatatttttatgtttttattaaccattttgattttgtctcctgtgaagtgtctatcatcttttgcccattttttaacttgttgtctttttctttttcttttctttttttttttttctgagacagggtctcactctgttgccctggctggagtgcagtggtgcaatctcagctcactgcagccttgagtcaggctcaggtgattctctcacctcagcctcccaagtagctgggaccacaggcccacaccaccaagcccagctaattttttgtatttttaagtagagacgggtttcatcatgttatgcaggctgctctcaaactcttgagctcaagcgatctgctggcctcagcctcccaaagttgggattataggcgtgagctaccagattttttcttattaatctaataattctttgtatagtcttgatattatccataatgtgtattgcaaatatcttctctaactctggcttgactgtttatggtgtcctttttttttggggggggttttttgagacaaggtcttgctctgtcacccaggctggagtgttatggcacaatcttggcttattgcagcctcaattcctaggcttaaacagtcctcccacctcagcctcctgagtagccggaactacagtcacgcacttccatgtccagataattttttttttttttttagagataggatcttactatgccccagctggtctcaaactcctagactcaatgagcctcccatcttgacctcccaaagtgctgggagtacaggcatgagccactgtgcatgccagttcttatttttaatgcagttgaattgatcagtgttttcattttggttagtgctttttgtggcttaagaaattctttccaggctgggtacagtggctcacacctgtaatgccagcactttgggggcagaggcaggaggattacttgagctcaggagtttgagaccaacctggacaacatggcgaaacaccatctctacaaaaaatacaaaaattagctggacatggtggtgcgtgcctgtagtcccagctactcaggtggctggggtgagaggattgcttgagcccagaaggtcaaggctgcagtgagctgtgattgtgccactgcacttcagcctgtgagacagagtgagaccctatctcaaaaaaaaccaaaaaaaaaaaaaaaaaaaagaaaaccactgaaattatttccactccaaggtcatgaagatagtctcttagattatattctgaaatccttataaatgtaaatttcatatttaggcctttaattcacctagatttggttttttgcatatggtgtgaggtaaggattcactttcatttttttctctccatagggttacacacctgtcctatcattgtttgtaatctaactttctgcgcccatctgcaatgccacctctgtcatatgtccacatatgacatatgtagatctgttgttggattctttcctctgttccattagtctgtctgttcttgtgccaatatcaagctgtcttcattattatcaattatgtattgagatctgataaagtaagtcttttccaccttatttttcttctttgagagtgtcttgactattctggctctttgtattttcatgtaaggtttttctcccatataagttttaaaatcagcttgtcaattccaacaacaatgatgcacttgatagtttgggaatttattatagctatcaatcagttttgggaaaattgacgtctttacaatattgagttttctgattcatgaacatggtttacctctctttccatttgggtcttctttaaggtttaccaataggattttatatttttgtccattgtggtcttgcttatcttaagtttgatttgtaaatattttatgtttcttttagtctattgtaaattgtgtatttttaatttcatttttttttttgttaatagcatataaaacacaccttgtcttttaactggagcattttgtccattgtgtatttaatgtaattaaatctaccatcttattttatgcta

SEQ ID NO: 27934 - DNA, 557 bp, Homo sapiens
  source 1..557: mol_type = unassigned DNA
actcgaggccagaaagggaagcccctttccagtgggcttcatggcggctgaagagatgcattggcctgtccctatgaaggccattggtgcccagaacctgctaaccatgcctgggggcgtggccaaggctggctacctgcacaagaagggcggtacccagctgcagctgctgaaatggcccctgcgctttgtcatcatccacaaacgctgcgtctactacttcaagagtagcacctctgcctccccgcagggcgccttctccctgagtggctataaccgggtgatgcgggcggctgaggagaccacgtccaacaacgttttccccttcaagatcatccatatcagcaagaagcaccgcacgtggttcttctcggcctcctccgaggaggagcgcaagagctggatggccttgctgcgcagggagattggccacttccacgaaaagaaagacctgcccttggacaccagcgactccagctcggacacagacagcttctacggcgcagttgagcggcctgtggatatcagcctttccccgtaccccacggacaatgaag

SEQ ID NO: 27935 - DNA, 876 bp, Homo sapiens
  source 1..876: mol_type = unassigned DNA
acggggcctgggaaactccaaagccggcgtcaggtcatcgaggcctccgggctgattaggactaatggcgctcaggggtgcagcctcagcctccacccgccacccgtacccgccctgcctcaggacttcgttcctgctgtacccctgctggctgcctgtccccacaggtggctccttcctccccaccggaggagctgctcccaggcgggaccctgggggtggaatctctgaaatgccttcccctcgggaccctcaccgcgactggacttcgctcagcttcagaccctgggctgcagctgcctaatgagcttcatggcggctgaagagatgcattggcctgtccctatgaaggccattggtgcccagaacctgctaaccatgcctgggggcgtggccaaggctggctacctgcacaagaagggcggtacccagctgcagctgctgaaatggcccctgcgctttgtcatcatccacaaacgctgcgtctactacttcaagagtagcacctctgcctccccgcagggcgccttctccctgagtggctataaccgggtgatgcgggcggctgaggagaccacgtccaacaacgttttccccttcaagatcatccatatcagcaagaagcaccgcacgtggttcttctcggcctcctccgaggaggagcgcaagagctggatggccttgctgcgcagggagattggccacttccacgaaaagaaagacctgcccttggacaccagcgactccagctcggacacagacagcttctacggcgcagttgagcggcctgtggatatcagcctttccccgtaccccacggacaatgaagactatgagcacgacgatgaggatgactcctacctggagcctgactcc

SEQ ID NO: 27936 - DNA, 2351 bp, Homo sapiens
  source 1..2351: mol_type = unassigned DNA
ggggaggagccggcggctgccaggccagggccggcgggcatggcgggctccgggccgcggccgcggagctggggccggcgggaggcgggcgcccgggacgaggcggcggcggccgggggacgcggcccggggccgtgccggtgctcgcaggggaggcgggcgtggatcgccccggggaagccggccatgcccgccgcgtggacgcccttcatggcggctgaagagatgcattggcctgtccctatgaaggccattggtgcccagaacctgctaaccatgcctgggggcgtggccaaggctggctacctgcacaagaagggcggtacccagctgcagctgctgaaatggcccctgcgctttgtcatcatccacaaacgctgcgtctactacttcaagagtagcacctctgcctccccgcagggcgccttctccctgagtggctataaccgggtgatgcgggcggctgaggagaccacgtccaacaacgttttccccttcaagatcatccatatcagcaagaagcaccgcacgtggttcttctcggcctcctccgaggaggagcgcaagagctggatggccttgctgcgcagggagattggccacttccacgaaaagaaagacctgcccttggacaccagcgactccagctcggacacagacagcttctacggcgcagttgagcggcctgtggatatcagcctttccccgtaccccacggacaatgaagactatgagcacgacgatgaggatgactcctacctggagcctgactccccggagcccggaaggcttgaggatgccctgatgcacccaccggcttacccaccacccccagtgcccacgcccaggaagccagccttctctgacatgccccgggcccactcctttacctccaagggccccggtcccctactgccacccccgccccctaagcacggcctcccagatgttggcctggctgctgaggactccaagagggacccactgtgcccgaggcgggctgagccttgccccagggtacctgctaccccccgaaggatgagcgatccccctctgagcaccatgcccaccgcacccggcctccggaaacccccttgcttccgggagagtgccagccccagcccggagccctggacccctggccacggggcctgctccacttccagtgctgccatcatggccactgccacctccagaaactgtgacaaactcaagtccttccacctgtccccccgaggaccacccacatctgagcccccacctgtgccagccaacaagcccaagttcctgaagatagctgaagaggaccccccaagggaggcagccatgcccggactctttgtgccccccgtggctccccggcctcctgcgctgaagctgccagtgcctgaggccatggcgcggcccgcagtcctgcccaggccagagaagccgcagctcccgcacctccagcgatcaccccccgatgggcagagtttcaggagcttctcctttgaaaagccccggcaaccctcacaggctgacactggcggggacgactcggacgaggactatgagaaggtgccactgcccaactcggtcttcgtcaacaccacggagtcctgcgaagtggaaaggttgttcaaggctacaagcccccggggagagccccaggatggactctactgcatccggaactcctctaccaagtcggggaaggtcctggttgtgtgggacgaaacctctaacaaagtgaggaactatcgcatttttgagaaggactctaagttctacctggagggcgaggtcctgtttgtgagtgtgggcagcatggtggagcactaccacacccacgtgctgcccagccaccagagcctgctgctgcggcacccctacggctacactgggcctaggtgatggcagtccatgtggctgccaggccaaggcagtcacaggggccctgaccccaggccacacagacggacatgggcccacatgggagggtgagcaggagcaaggctgtgcttgcctagggcctctgtgatggacatctcgtaggacccagccagtctcatccagcaggttgggttctagggctgaaccaggcgccaggctccagaggacgaagggactctgttgccccacactaacttgccctgtcccaatcccagaaacccaggaccaagctgtgcctgggctccaaggacaggaacactggtccccccatcacactcacccctaagtgggctgggagccaggcagggccagggcagctgggtgggggccggggctggccctgggacccccaggaacgctaagacacaggctccagtaggggctgttgcctccaataaagcagcagtgagctttgc

SEQ ID NO: 27937 - DNA, 688 bp, Homo sapiens
  source 1..688: mol_type = unassigned DNA
cttgaaattcatagaaccgggtgcaagacataacagccctctgtgtggcctcagatggcagagcagggtggcagcagctgccctggcaggaagagcatgctgcttcatggcggctgaagagatgcattggcctgtccctatgaaggccattggtgcccagaacctgctaaccatgcctgggggcgtggccaaggctggctacctgcacaagaagggcggtacccagctgcagctgctgaaatggcccctgcgctttgtcatcatccacaaacgctgcgtctactacttcaagagtagcacctctgcctccccgcagggcgccttctccctgagtggctataaccgggtgatgcgggcggctgaggagaccacgtccaacaacgttttccccttcaagatcatccatatcagcaagaagcaccgcacgtggttcttctcggcctcctccgaggaggagcgcaagagctggatggccttgctgcgcagggagattggccacttccacgaaaagaaagacctgcccttggacaccagcgactccagctcggacacagacagcttctacggcgcagttgagcggcctgtggatatcagcctttccccgtaccccacggacaatgaagactatgagcacgacgatgaggatgactcctacctggagcctgactccccggagcccggaaggctt

SEQ ID NO: 27938 - DNA, 609 bp, Homo sapiens
  source 1..609: mol_type = unassigned DNA
aaatgctgctctgtgctgggcctgacacccagggtgcaggttgtttcatggtttgctagggagaagccgagtattcagaggtggccctgcggggaggcagcagggagcttcctcccagggatgcagctgaccttgcgctggagccagagagccctggcctctgaccacaggatgggagggcaggagcagtggaagcttcatggcggctgaagagatgcattggcctgtccctatgaaggccattggtgcccagaacctgctaaccatgcctgggggcgtggccaaggctggctacctgcacaagaagggcggtacccagctgcagctgctgaaatggcccctgcgctttgtcatcatccacaaacgctgcgtctactacttcaagagtagcacctctgcctccccgcagggcgccttctccctgagtggctataaccgggtgatgcgggcggctgaggagaccacgtccaacaacgttttccccttcaagatcatccatatcagcaagaagcaccgcacgtggttcttctcggcctcctccgaggaggagcgcaagagctggatggccttgctgcgcagggagattggccacttccacgaaaagaaaga

SEQ ID NO: 27939 - DNA, 5044 bp, Homo sapiens
  source 1..5044: mol_type = unassigned DNA
gaaacagagacaagcaccccaacagtagggtgcttcgaggtcctggaggggagccctggccctgtggagagagaccgagtcgtgcagcgtccgtggcctgcatttgaaactgaagggcaagaggctggtgagatccgagagtcatgccgctgcgtggaggaacatgctgaacctctggaggaacggctctacctccagcgtctcccttctctcctggacagaaggccgtgtcctgggacttctctgatggcgagaggctgcggctgtaccaggaagaaatatgaagccttagcggctttacccgggaagcgagtttcgagatggcggctcagcggatccgagcggccaactccaatggcctccctcgctgcaagtcagaggggaccctgattgacctgagcgaagggttttcagagacgagctttaatgacatcaaagtgccttctcccagtgccttgctcgtagacaaccccacacctttcggaaatgcaaaggaagtgattgcgatcaaggactattgccccaccaacttcaccacactgaagttctccaagggcgaccatctctacgtcttggacacatctggcggtgagtggtggtacgcacacaacaccaccgaaatgggctacatcccctcctcctatgtgcagcccttgaactaccggaactcaacactgagtgacagcggtatgattgataatcttccagacagcccagacgaggtagccaaggagctggagctgctcgggggatggacagatgacaaaaaagtaccaggcagaatgtacagtaataaccctttctggaatggggtccagaccaatccatttctgaatgggaacgtgcccgtcatgcccagcctggatgagctgaatcccaaaagtactgtggatttgctcctttttgacgcaggtacatcctccttcaccgaatccagctcagccaccacgaatagcactggcaacatcttcgatgagcttccagtcacaaacggactccacgcagagccgccggtcaggcgggacaaccccttcttcagaagcaagcgctcctacagtctctcggaactctccgtcctccaagccaagtccgatgctcccacatcgtcgagtttcttcaccggcttgaaatcacctgcccccgagcaatttcagagccgggaggattttcgaactgcctggctaaaccacaggaagctggcccggtcttgccacgacctggacttgcttggccaaagccctggttggggccagacccaagccgtggagacaaacatcgtgtgcaagctggatagctccgggggtgctgtccagcttcctgacaccagcatcagcatccacgtgcccgagggccacgtcgcccctggggagacccagcagatctccatgaaagccctgctggaccccccgctggagctcaacagtgacaggtcctgcagcatcagccctgtgctggaggtcaagctgagcaacctggaggtgaaaacctctatcatcttggagatgaaagtgtcagccgagataaaaaatgacctttttagcaaaagcacagtgggcctccagtgcctgaggagcgactcgaaggaagggccatatgtctccgtcccgctcaactgcagctgtggggacacggtccaggcacagctgcacaacctggagccctgtatgtacgtggctgtcgtggcccatggcccaagcatcctctacccttccaccgtgtgggacttcatcaataaaaaagtcacagtgggtctctacggccctaaacacatccacccatccttcaagacggtagtgaccatttttgggcatgactgtgccccaaagacgctcctggtcagcgaggtcacacgccaggcacccaaccctgccccggtggccctgcagctgtgggggaagcaccagttcgttttgtccaggccccaggatctcaaggtctgtatgttttccaatatgacgaattacgaggtcaaagccagcgagcaggccaaagtggtgcgaggattccagctgaagctgggcaaggtgagccgcctgatcttccccatcacctcccagaaccccaacgagctctctgacttcacgctgcgggttcaggtgaaggacgaccaggaggccatcctcacccagttttgtgtccagactcctcagccaccccctaaaagtgccatcaagccttccgggcaaaggaggtttctcaagaagaacgaagtcgggaaaatcatcctgtccccgtttgccaccactacaaagtacccgactttccaggaccgcccggtgtccagcctcaagtttggtaagttgctcaagactgtggtgcggcagaacaagaaccactacctgctggagtacaagaagggcgacgggatcgccctgctcagcgaggagcgggtcaggctccggggccagctgtggaccaaggagtggtacatcggctactaccagggcagggtgggcctcgtgcacaccaagaacgtgctggtggtcggcagggcccggcccagcctgtgctcgggccccgagctgagcacctcggtgctgctggagcagatcctgcggccctgcaaattcctcacgtacatctatgcctccgtgaggaccctgctcatggagaacatcagcagctggcgctccttcgctgacgccctgggctacgtgaacctgccgctcacctttttctgccgggcagagctggatagtgagcccgagcgggtggcgtccgtcctagaaaagctgaaggaggactgtaacaacactgagaacaaagaacggaagtccttccagaaggagcttgtgatggccctactgaagatggactgccagggcctggtggtcagactcatccaggactttgtgctcctgaccacggctgtagaggtggcccagcgctggcgggagctggctgagaagctggccaaggtctccaagcagcagatggacgcctacgagtctccccaccgggacaggaacggggttgtggacagcgaggccatgtggaagcctgcgtatgacttcttactcacctggagccatcagatcggggacagctaccgggatgtcatccaggagctgcacctgggcctggacaagatgaaaaaccccatcaccaagcgctggaagcacctcactgggactctgatcttggtgaactccctggacgttctgagagcagccgccttcagccctgcggaccaggacgacttcgtgatttgaatgggtcccctcccctcctgctgctctggagtgcaagccctcttctgccctgcgtgccctgctgtcaccgcggagctgaagagggaggaaggggcggctgctcagacagatttagggcccgccagctaggctacacccatcatgcgccgccctcctccatcgagggagaggcctgaagggactgcctactgcagctcgttgccaatcacatagctttctatttgttaagtataaatttaaatttaaaatcacttttttaacgaatggggggaagggatctatgagaaaggtggtatctaatttttttatggaccataaaggtttaaaagaaaataggggcacaggctgttgaggtttttatgttgttatagacctttttaaattatgttagagatgtatataggtatttaaaggtcactgggagcgtttctgattcccggccacactttgcatttcaacactcagcccggaaagatgctcgttcggttgttggacctctttcactccctgcgtgtaagaaggtgaatcacgtgggaaaaagtggcttttcagtaaacgggtacagctcattctttctgagaaggccccaggtcctgctccctcctcggatttgattgtcttccgtgctttgcctcactcgtagtaaatgaccatccatagaatatgtgaatctttggtgagcttcagtgggcagagtgaagtcccgcattagcatttaggtgccctgagctgtttctgccaatagattagaaagcagccatgagttgacagtctttagggcccctgccagtgtgcaattagtcattgacaagaacaatgccatttgagagtgaggtggtccctgctgctacgaggccattgtactgttttttccttgaggtcaaagcagtgcttcccatagagtttgctgcctcttctgtggacaggaagaaaacttcatgaccgaatcagagccttggtggccactgactctcgtgcttattgcagatgctgtggttggcctcacaagcaacgccttatgctgatgtgcagaggtgccagctgccatttgccaaactctgcatttcatttcatctaaggcttaacccctcttccttcctggtgtacctgtgtctcctcggaaggaagtcatagtttagatgaaaccattttttgtacaatgtaaagatcatctgagcaagatgagcattttgtaaaaatgaaaatgtgactcacataaaatcaggaacttgacacagtgttgcattaataactttagggtgcagacatgctgtgtgaatctcacaatgcgtcgtagatgtcgcgtgttggaagggagcaggaggaaggactgatactggcaaatcagtagagtgaggtgatccttagcaacgtgccaggacacttcctgtgtgcctgcagttgtcagggaccatttgggatcccgaatctcattctctaaaactgctttcttgaaacatgttacttccttagtataatcaatgtatactcccttactggcctgaaacgttgtatagctacttattcagatactgaagaccaacggactgaaaaaaagaacaaacattagctattttatgctgcaagaaccaggacacacaattcgccaatcatcccaccatataaccttcgattgtgcttctcaactccaccccataatttctcccagagaccatctatcaccttttccccaaagaagaaacaaaaccagttgcaccttaaaccatggatattttttcctcaggggctttaaatagtttcctatgcaacgtgtcttgtagcacaaataaaattctacaaaagttgcagtaaattttatttggatattttaa

SEQ ID NO: 27940 - DNA, 5194 bp, Homo sapiens
  source 1..5194: mol_type = unassigned DNA
cgcccaggcgcgggaccaccctccgcccgccgaggcgggggcccagcgcgcccggcactctcggcggtccgggcccctcgccactaccgccgccgccgccgccgtgagtcccgcggagccgcgcgcgcccccggctgggccgagccgctggccgacgagcggagcctcaggagccggcggggacgccatgcgagccagcgtctcccttctctcctggacagaaggccgtgtcctgggacttctctgatggcgagaggctgcggctgtaccaggaagaaacatattgccgagtggatgccgccgcgcagcgtgtttgcttgaggcagaagcttcagcatctgctgggataactggaggaagaaatatgaagccttagcggctttacccgggaagcgagtttcgagatggcggctcagcggatccgagcggccaactccaatggcctccctcgctgcaagtcagaggggaccctgattgacctgagcgaagggttttcagagacgagctttaatgacatcaaagtgccttctcccagtgccttgctcgtagacaaccccacacctttcggaaatgcaaaggaagtgattgcgatcaaggactattgccccaccaacttcaccacactgaagttctccaagggcgaccatctctacgtcttggacacatctggcggtgagtggtggtacgcacacaacaccaccgaaatgggctacatcccctcctcctatgtgcagcccttgaactaccggaactcaacactgagtgacagcggtatgattgataatcttccagacagcccagacgaggtagccaaggagctggagctgctcgggggatggacagatgacaaaaaagtaccaggcagaatgtacagtaataaccctttctggaatggggtccagaccaatccatttctgaatgggaacgtgcccgtcatgcccagcctggatgagctgaatcccaaaagtactgtggatttgctcctttttgacgcaggtacatcctccttcaccgaatccagctcagccaccacgaatagcactggcaacatcttcgatgagcttccagtcacaaacggactccacgcagagccgccggtcaggcgggacaaccccttcttcagaagcaagcgctcctacagtctctcggaactctccgtcctccaagccaagtccgatgctcccacatcgtcgagtttcttcaccggcttgaaatcacctgcccccgagcaatttcagagccgggaggattttcgaactgcctggctaaaccacaggaagctggcccggtcttgccacgacctggacttgcttggccaaagccctggttggggccagacccaagccgtggagacaaacatcgtgtgcaagctggatagctccgggggtgctgtccagcttcctgacaccagcatcagcatccacgtgcccgagggccacgtcgcccctggggagacccagcagatctccatgaaagccctgctggaccccccgctggagctcaacagtgacaggtcctgcagcatcagccctgtgctggaggtcaagctgagcaacctggaggtgaaaacctctatcatcttggagatgaaagtgtcagccgagataaaaaatgacctttttagcaaaagcacagtgggcctccagtgcctgaggagcgactcgaaggaagggccatatgtctccgtcccgctcaactgcagctgtggggacacggtccaggcacagctgcacaacctggagccctgtatgtacgtggctgtcgtggcccatggcccaagcatcctctacccttccaccgtgtgggacttcatcaataaaaaagtcacagtgggtctctacggccctaaacacatccacccatccttcaagacggtagtgaccatttttgggcatgactgtgccccaaagacgctcctggtcagcgaggtcacacgccaggcacccaaccctgccccggtggccctgcagctgtgggggaagcaccagttcgttttgtccaggccccaggatctcaaggtctgtatgttttccaatatgacgaattacgaggtcaaagccagcgagcaggccaaagtggtgcgaggattccagctgaagctgggcaaggtgagccgcctgatcttccccatcacctcccagaaccccaacgagctctctgacttcacgctgcgggttcaggtgaaggacgaccaggaggccatcctcacccagttttgtgtccagactcctcagccaccccctaaaagtgccatcaagccttccgggcaaaggaggtttctcaagaagaacgaagtcgggaaaatcatcctgtccccgtttgccaccactacaaagtacccgactttccaggaccgcccggtgtccagcctcaagtttggtaagttgctcaagactgtggtgcggcagaacaagaaccactacctgctggagtacaagaagggcgacgggatcgccctgctcagcgaggagcgggtcaggctccggggccagctgtggaccaaggagtggtacatcggctactaccagggcagggtgggcctcgtgcacaccaagaacgtgctggtggtcggcagggcccggcccagcctgtgctcgggccccgagctgagcacctcggtgctgctggagcagatcctgcggccctgcaaattcctcacgtacatctatgcctccgtgaggaccctgctcatggagaacatcagcagctggcgctccttcgctgacgccctgggctacgtgaacctgccgctcacctttttctgccgggcagagctggatagtgagcccgagcgggtggcgtccgtcctagaaaagctgaaggaggactgtaacaacactgagaacaaagaacggaagtccttccagaaggagcttgtgatggccctactgaagatggactgccagggcctggtggtcagactcatccaggactttgtgctcctgaccacggctgtagaggtggcccagcgctggcgggagctggctgagaagctggccaaggtctccaagcagcagatggacgcctacgagtctccccaccgggacaggaacggggttgtggacagcgaggccatgtggaagcctgcgtatgacttcttactcacctggagccatcagatcggggacagctaccgggatgtcatccaggagctgcacctgggcctggacaagatgaaaaaccccatcaccaagcgctggaagcacctcactgggactctgatcttggtgaactccctggacgttctgagagcagccgccttcagccctgcggaccaggacgacttcgtgatttgaatgggtcccctcccctcctgctgctctggagtgcaagccctcttctgccctgcgtgccctgctgtcaccgcggagctgaagagggaggaaggggcggctgctcagacagatttagggcccgccagctaggctacacccatcatgcgccgccctcctccatcgagggagaggcctgaagggactgcctactgcagctcgttgccaatcacatagctttctatttgttaagtataaatttaaatttaaaatcacttttttaacgaatggggggaagggatctatgagaaaggtggtatctaatttttttatggaccataaaggtttaaaagaaaataggggcacaggctgttgaggtttttatgttgttatagacctttttaaattatgttagagatgtatataggtatttaaaggtcactgggagcgtttctgattcccggccacactttgcatttcaacactcagcccggaaagatgctcgttcggttgttggacctctttcactccctgcgtgtaagaaggtgaatcacgtgggaaaaagtggcttttcagtaaacgggtacagctcattctttctgagaaggccccaggtcctgctccctcctcggatttgattgtcttccgtgctttgcctcactcgtagtaaatgaccatccatagaatatgtgaatctttggtgagcttcagtgggcagagtgaagtcccgcattagcatttaggtgccctgagctgtttctgccaatagattagaaagcagccatgagttgacagtctttagggcccctgccagtgtgcaattagtcattgacaagaacaatgccatttgagagtgaggtggtccctgctgctacgaggccattgtactgttttttccttgaggtcaaagcagtgcttcccatagagtttgctgcctcttctgtggacaggaagaaaacttcatgaccgaatcagagccttggtggccactgactctcgtgcttattgcagatgctgtggttggcctcacaagcaacgccttatgctgatgtgcagaggtgccagctgccatttgccaaactctgcatttcatttcatctaaggcttaacccctcttccttcctggtgtacctgtgtctcctcggaaggaagtcatagtttagatgaaaccattttttgtacaatgtaaagatcatctgagcaagatgagcattttgtaaaaatgaaaatgtgactcacataaaatcaggaacttgacacagtgttgcattaataactttagggtgcagacatgctgtgtgaatctcacaatgcgtcgtagatgtcgcgtgttggaagggagcaggaggaaggactgatactggcaaatcagtagagtgaggtgatccttagcaacgtgccaggacacttcctgtgtgcctgcagttgtcagggaccatttgggatcccgaatctcattctctaaaactgctttcttgaaacatgttacttccttagtataatcaatgtatactcccttactggcctgaaacgttgtatagctacttattcagatactgaagaccaacggactgaaaaaaagaacaaacattagctattttatgctgcaagaaccaggacacacaattcgccaatcatcccaccatataaccttcgattgtgcttctcaactccaccccataatttctcccagagaccatctatcaccttttccccaaagaagaaacaaaaccagttgcaccttaaaccatggatattttttcctcaggggctttaaatagtttcctatgcaacgtgtcttgtagcacaaataaaattctacaaaagttgcagtaaattttatttggatattttaacctgttaagtgtgtgtgtgttttctgtacccaaccagactttaaataaaacaaacatgaaacctaa

SEQ ID NO: 27941 - DNA, 5231 bp, Homo sapiens
  source 1..5231: mol_type = unassigned DNA
accttaagagggacaactgaaacagagacaagcaccccaacagtagggtgcttcgaggtcctggaggggagccctggccctgtggagagagaccgagtcgtgcagcgtccgtggcctgcatttgaaactgaagggcaagaggctggtgagatccgagagtcatgccgctgcgtggaggaacatgctgaacctctggaggaacggctctacctccaggtcaggctggaggcttttgcatttggtttggcgaggagagacagcaggatttctgggtgccggacatgcttctcggtcagagctgcgtctcccttctctcctggacagaaggccgtgtcctgggacttctctgatggcgagaggctgcggctgtaccaggaagaaacatattgccgagtggatgccgccgcgcagcgtgtttgcttgaggcagaagcttcagcatctgctgggataactggaggaagaaatatgaagccttagcggctttacccgggaagcgagtttcgagatggcggctcagcggatccgagcggccaactccaatggcctccctcgctgcaagtcagaggggaccctgattgacctgagcgaagggttttcagagacgagctttaatgacatcaaagtgccttctcccagtgccttgctcgtagacaaccccacacctttcggaaatgcaaaggaagtgattgcgatcaaggactattgccccaccaacttcaccacactgaagttctccaagggcgaccatctctacgtcttggacacatctggcggtgagtggtggtacgcacacaacaccaccgaaatgggctacatcccctcctcctatgtgcagcccttgaactaccggaactcaacactgagtgacagcggtatgattgataatcttccagacagcccagacgaggtagccaaggagctggagctgctcgggggatggacagatgacaaaaaagtaccaggcagaatgtacagtaataaccctttctggaatggggtccagaccaatccatttctgaatgggaacgtgcccgtcatgcccagcctggatgagctgaatcccaaaagtactgtggatttgctcctttttgacgcaggtacatcctccttcaccgaatccagctcagccaccacgaatagcactggcaacatcttcgatgagcttccagtcacaaacggactccacgcagagccgccggtcaggcgggacaaccccttcttcagaagcaagcgctcctacagtctctcggaactctccgtcctccaagccaagtccgatgctcccacatcgtcgagtttcttcaccggcttgaaatcacctgcccccgagcaatttcagagccgggaggattttcgaactgcctggctaaaccacaggaagctggcccggtcttgccacgacctggacttgcttggccaaagccctggttggggccagacccaagccgtggagacaaacatcgtgtgcaagctggatagctccgggggtgctgtccagcttcctgacaccagcatcagcatccacgtgcccgagggccacgtcgcccctggggagacccagcagatctccatgaaagccctgctggaccccccgctggagctcaacagtgacaggtcctgcagcatcagccctgtgctggaggtcaagctgagcaacctggaggtgaaaacctctatcatcttggagatgaaagtgtcagccgagataaaaaatgacctttttagcaaaagcacagtgggcctccagtgcctgaggagcgactcgaaggaagggccatatgtctccgtcccgctcaactgcagctgtggggacacggtccaggcacagctgcacaacctggagccctgtatgtacgtggctgtcgtggcccatggcccaagcatcctctacccttccaccgtgtgggacttcatcaataaaaaagtcacagtgggtctctacggccctaaacacatccacccatccttcaagacggtagtgaccatttttgggcatgactgtgccccaaagacgctcctggtcagcgaggtcacacgccaggcacccaaccctgccccggtggccctgcagctgtgggggaagcaccagttcgttttgtccaggccccaggatctcaaggtctgtatgttttccaatatgacgaattacgaggtcaaagccagcgagcaggccaaagtggtgcgaggattccagctgaagctgggcaaggtgagccgcctgatcttccccatcacctcccagaaccccaacgagctctctgacttcacgctgcgggttcaggtgaaggacgaccaggaggccatcctcacccagttttgtgtccagactcctcagccaccccctaaaagtgccatcaagccttccgggcaaaggaggtttctcaagaagaacgaagtcgggaaaatcatcctgtccccgtttgccaccactacaaagtacccgactttccaggaccgcccggtgtccagcctcaagtttggtaagttgctcaagactgtggtgcggcagaacaagaaccactacctgctggagtacaagaagggcgacgggatcgccctgctcagcgaggagcgggtcaggctccggggccagctgtggaccaaggagtggtacatcggctactaccagggcagggtgggcctcgtgcacaccaagaacgtgctggtggtcggcagggcccggcccagcctgtgctcgggccccgagctgagcacctcggtgctgctggagcagatcctgcggccctgcaaattcctcacgtacatctatgcctccgtgaggaccctgctcatggagaacatcagcagctggcgctccttcgctgacgccctgggctacgtgaacctgccgctcacctttttctgccgggcagagctggatagtgagcccgagcgggtggcgtccgtcctagaaaagctgaaggaggactgtaacaacactgagaacaaagaacggaagtccttccagaaggagcttgtgatggccctactgaagatggactgccagggcctggtggtcagactcatccaggactttgtgctcctgaccacggctgtagaggtggcccagcgctggcgggagctggctgagaagctggccaaggtctccaagcagcagatggacgcctacgagtctccccaccgggacaggaacggggttgtggacagcgaggccatgtggaagcctgcgtatgacttcttactcacctggagccatcagatcggggacagctaccgggatgtcatccaggagctgcacctgggcctggacaagatgaaaaaccccatcaccaagcgctggaagcacctcactgggactctgatcttggtgaactccctggacgttctgagagcagccgccttcagccctgcggaccaggacgacttcgtgatttgaatgggtcccctcccctcctgctgctctggagtgcaagccctcttctgccctgcgtgccctgctgtcaccgcggagctgaagagggaggaaggggcggctgctcagacagatttagggcccgccagctaggctacacccatcatgcgccgccctcctccatcgagggagaggcctgaagggactgcctactgcagctcgttgccaatcacatagctttctatttgttaagtataaatttaaatttaaaatcacttttttaacgaatggggggaagggatctatgagaaaggtggtatctaatttttttatggaccataaaggtttaaaagaaaataggggcacaggctgttgaggtttttatgttgttatagacctttttaaattatgttagagatgtatataggtatttaaaggtcactgggagcgtttctgattcccggccacactttgcatttcaacactcagcccggaaagatgctcgttcggttgttggacctctttcactccctgcgtgtaagaaggtgaatcacgtgggaaaaagtggcttttcagtaaacgggtacagctcattctttctgagaaggccccaggtcctgctccctcctcggatttgattgtcttccgtgctttgcctcactcgtagtaaatgaccatccatagaatatgtgaatctttggtgagcttcagtgggcagagtgaagtcccgcattagcatttaggtgccctgagctgtttctgccaatagattagaaagcagccatgagttgacagtctttagggcccctgccagtgtgcaattagtcattgacaagaacaatgccatttgagagtgaggtggtccctgctgctacgaggccattgtactgttttttccttgaggtcaaagcagtgcttcccatagagtttgctgcctcttctgtggacaggaagaaaacttcatgaccgaatcagagccttggtggccactgactctcgtgcttattgcagatgctgtggttggcctcacaagcaacgccttatgctgatgtgcagaggtgccagctgccatttgccaaactctgcatttcatttcatctaaggcttaacccctcttccttcctggtgtacctgtgtctcctcggaaggaagtcatagtttagatgaaaccattttttgtacaatgtaaagatcatctgagcaagatgagcattttgtaaaaatgaaaatgtgactcacataaaatcaggaacttgacacagtgttgcattaataactttagggtgcagacatgctgtgtgaatctcacaatgcgtcgtagatgtcgcgtgttggaagggagcaggaggaaggactgatactggcaaatcagtagagtgaggtgatccttagcaacgtgccaggacacttcctgtgtgcctgcagttgtcagggaccatttgggatcccgaatctcattctctaaaactgctttcttgaaacatgttacttccttagtataatcaatgtatactcccttactggcctgaaacgttgtatagctacttattcagatactgaagaccaacggactgaaaaaaagaacaaacattagctattttatgctgcaagaaccaggacacacaattcgccaatcatcccaccatataaccttcgattgtgcttctcaactccaccccataatttctcccagagaccatctatcaccttttccccaaagaagaaacaaaaccagttgcaccttaaaccatggatattttttcctcaggggctttaaatagtttcctatgcaacgtgtcttgtagcacaaataaaattctacaaaagttgcagtaaattttatttggatattttaa

SEQ ID NO: 27942 - DNA, 593 bp, Homo sapiens
  source 1..593: mol_type = unassigned DNA
gtgagtcccgcggagccgcgcgcgcccccggctgggccgagccgctggccgacgagcggagcctcaggagccggcggggacgccatgcgagccaggaagaaacatattgccgagtggatgccgccgcgcagcgtgtttgcttgaggcagaagcttcagcatctgctgggataactggaggaagaaatatgaagccttagcggctttacccgggaagcgagtttcgagatggcggctcagcggatccgagcggccaactccaatggcctccctcgctgcaagtcagaggggaccctgattgacctgagcgaagggttttcagagacgagctttaatgacatcaaagtgccttctcccagtgccttgctcgtagacaaccccacacctttcggaaatgcaaaggaagtgattgcgatcaaggactattgccccaccaacttcaccacactgaagttctccaagggcgaccatctctacgtcttggacacatctggcggtgagtggtggtacgcacacaacaccaccgaaatgggctacatcccctcctcctatgtgcagcccttgaactaccggaactcaacactgagtgacagc

SEQ ID NO: 27943 - DNA, 2055 bp, Homo sapiens
  source 1..2055: mol_type = unassigned DNA
gggaccaccctccgcccgccgaggcgggggcccagcgcgcccggcactctcggcggtccgggcccctcgccactaccgccgccgccgccgccgtgagtcccgcggagccgcgcgcgcccccggctgggccgagccgctggccgacgagcggagcctcaggagccggcggggacgccatgcgagccagcgtctcccttctctcctggacagaaggccgtgtcctgggacttctctgatggcgagaggctgcggctgtaccaggaagaaacatattgccgagtggatgccgccgcgcagcgtgtttgcttgaggcagaagcttcagcatctgctgggataactggaggaagaaatatgaagccttagcggctttacccgggaagcgagtttcgagatggcggctcagcggatccgagcggccaactccaatggcctccctcgctgcaagtcagaggggaccctgattgacctgagcgaagggttttcagagacgagctttaatgacatcaaagtgccttctcccagtgccttgctcgtagacaaccccacacctttcggaaatgcaaaggaagtgattgcgatcaaggactattgccccaccaacttcaccacactgaagttctccaagggcgaccatctctacgtcttggacacatctggcggtgagtggtggtacgcacacaacaccaccgaaatgggctacatcccctcctcctatgtgcagcccttgaactaccggaactcaacactgagtgacagcggtatgattgataatcttccagacagcccagacgaggtagccaaggagctggagctgctcgggggatggacagatgacaaaaaagtaccaggcagaatgtacagtaataaccctttctggaatggggtccagaccaatccatttctgaatgggaacgtgcccgtcatgcccagcctggatgagctgaatcccaaaagtactgtggatttgctcctttttgacgcaggtacatcctccttcaccgaatccagctcagccaccacgaatagcactggcaacatcttcgatgagcttccagtcacaaacggactccacgcagagccgccggtcaggcgggacaaccccttcttcagaagcaagcgctcctacagtctctcggaactctccgtcctccaagccaagtccgatgctcccacatcgtcgagtttcttcaccggcttgaaatcacctgcccccgagcaatttcagagccgggaggattttcgaactgcctggctaaaccacaggaagctggcccggtcttgccacgacctggacttgcttggccaaagccctggttggggccagacccaagccgtggagacaaacatcgtgtgcaagctggatagctccgggggtgctgtccagcttcctgacaccagcatcagcatccacgtgcccgagggccacgtcgcccctggggagacccagcagatctccatgaaagccctgctggaccccccgctggagctcaacagtgacaggtcctgcagcatcagccctgtgctggaggtcaagctgagcaacctggaggtgaaaacctctatcatcttggagatgaaagtgtcagccgagataaaaaatgacctttttagcaaaagcacagtgggcctccagtgcctgaggagcgactcgaaggaagggccatatgtctccgtcccgctcaactgcagctgtggggacacggtccaggcacagctgcacaacctggagccctgtatgtacgtggctgtcgtggcccatggcccaagcatcctctacccttccaccgtgtgggacttcatcaataaaaaagtcacagtgggtctctacggccctaaacacatccacccatccttcaagacggtagtgaccatttttgggcatgactgtgccccaaagacgctcctggtcagcgaggtcacacgccaggcacccaaccctcccatcaccaagcgctggaagcacctcactgggactctgatcttggtgaactccctggacgttctgagagcagccgccttcagccctgcggaccaggacgacttcgtgatttga

SEQ ID NO: 27944 - DNA, 570 bp, Homo sapiens
  source 1..570: mol_type = unassigned DNA
aacagagacaagcaccccaacagtagggtgcttcgaggtcctggaggggagccctggccctgtggagagagaccgagtcgtgcagcgtccgtggcctgcatttgaaactgaagggcaagaggctggtgagatccgagagtcatgccgctgcgtggaggaacatgctgaacctctggaggaacggctctacctccagcgtctcccttctctcctggacagaaggccgtgtcctgggacttctctgatggcgagaggctgcggctgtaccaggaagaaacatattgccgagtggatgccgccgcgcagcgtgtttgcttgaggcagaagcttcagcatctgctgggataactggaggaagaaatatgaagccttagcggctttacccgggaagcgagtttcgagatggcggctcagcggatccgagcggccaactccaatggcctccctcgctgcaagtcagaggggaccctgattgacctgagcgaagggttttcagagacgagctttaatgacatcaaagtgccttctcccagtgccttgctcgtagacaaccccacacctttcggaaat

SEQ ID NO: 27945 - DNA, 829 bp, Homo sapiens
  source 1..829: mol_type = unassigned DNA
cgcagttggctggtgtttgtttgcacaaggattctttggtaacaatctgcagtcggtttctggcggaatgtgaggtgaagtcacgactgactttcgggatggagcgtctcccttctctcctggacagaaggccgtgtcctgggacttctctgatggcgagaggctgcggctgtaccaggaagaaacatattgccgagtggatgccgccgcgcagcgtgtttgcttgaggcagaagcttcagcatctgctgggataactggaggaagaaatatgaagccttagcggctttacccgggaagcgagtttcgagatggcggctcagcggatccgagcggccaactccaatggcctccctcgctgcaagtcagaggggaccctgattgacctgagcgaagggttttcagagacgagctttaatgacatcaaagtgccttctcccagtgccttgctcgtagacaaccccacacctttcggaaatgcaaaggaagtgattgcgatcaaggactattgccccaccaacttcaccacactgaagttctccaagggcgaccatctctacgtcttggacacatctggcggtgagtggtggtacgcacacaacaccaccgaaatgggctacatcccctcctcctatgtgcagcccttgaactaccggaactcaacactgagtgacagcggtatgattgataatcttccagacagcccagacgaggtagccaaggagctggagctgctcgggggatggacagatgacaaaaaagtaccaggcagaatgtacagtaataaccctttctggaatggggtccagaccaatccatttctgaatggg

SEQ ID NO: 27946 - DNA, 500 bp, Homo sapiens
  source 1..500: mol_type = unassigned DNA
agcacagcagcaggggaagaggacagtgaggctgggatgcagcctccatgcagcctgtcgctttctccacaggagctctggcctgggccagactgccgagtcaccctgattcaggagtaggcgtctcccttctctcctggacagaaggccgtgtcctgggacttctctgatggcgagaggctgcggctgtaccaggaagaaacatattgccgagtggatgccgccgcgcagcgtgtttgcttgaggcagaagcttcagcatctgctgggataactggaggaagaaatatgaagccttagcggctttacccgggaagcgagtttcgagatggcggctcagcggatccgagcggccaactccaatggcctccctcgctgcaagtcagaggggaccctgattgacctgagcgaagggttttcagagacgagctttaatgacatcaaagtgccttctcccagtgccttgctcgtagacaaccccacacctttcggaaatgcaaa

SEQ ID NO: 27947 - DNA, 1766 bp, Homo sapiens
  source 1..1766: mol_type = unassigned DNA
acatccacccatccttcaagacggtagtgaccatttttgggcatgactgtgccccaaagacgctcctggtcagcgaggtcacacgccaggcacccaaccctgccccggtggccctgcagctgtgggggaagcaccagttcgttttgtccaggccccaggatctcaaggtctgtatgttttccaatatgacgaattacgaggtcaaagccagcgagcaggccaaagtggtgcgaggattccagctgaagctgggcaaggtgagccgcctgatcttccccatcacctcccagaaccccaacgagctctctgacttcacgctgcgggttcaggtgaaggacgaccaggaggccatcctcacccagttttgtgtccagactcctcagccaccccctaaaagtgccatcaagccttccgggcaaaggaggtttctcaagaagaacgaagtcgggaaaatcatcctgtccccgtttgccaccactacaaagtacccgactttccaggaccgcccggtgtccagcctcaagtttggtaagttgctcaagactgtggtgcggcagaggagcgggtcaggctccggggccagctgtggaccaaggagtggtacatcggctactaccagggcagggtgggcctcgtgcacaccaagaacgtgctggtggtcggcagggcccggcccagcctgtgctcgggccccgagctgagcacctcggtgctgctggagcagatcctgcggccctgcaaattcctcacgtacatctatgcctccgtgaggaccctgctcatggagaacatcagcagctggcgctccttcgctgacgccctgggctacgtgaacctgccgctcacctttttctgccgggcagagctggatagtgagcccgagcgggtggcgtccgtcctagaaaagctgaaggaggactgtaacaacactgagaacaaagaacggaagtccttccagaaggagcttgtgatggccctactgaagatggactgccagggcctggtggtcagactcatccaggactttgtgctcctgaccacggctgtagaggtggcccagcgctggcgggagctggctgagaagctggccaaggtctccaagcagcagatggacgcctacgagtctccccaccgggacaggaacggggttgtggacagcgaggccatgtggaagcctgcgtatgacttcttactcacctggagccatcagatcggggacagctaccgggatgtcatccaggagctgcacctgggcctggacaagatgaaaaaccccatcaccaagcgctggaagcacctcactgggactctgatcttggtgaactccctggacgttctgagagcagccgccttcagccctgcggaccaggacgacttcgtgatttgaatgggtcccctcccctcctgctgctctggagtgcaagccctcttctgccctgcgtgccctgctgtcaccgcggagctgaagagggaggaaggggcggctgctcagacagatttagggcccgccagctaggctacacccatcatgcgccgccctcctccatcgagggagaggcctgaagggactgcctactgcagctcgttgccaatcacatagctttctatttgttaagtataaatttaaatttaaaatcacttttttaacgaatggggggaagggatctatgagaaaggtggtatctaatttttttatggaccataaaggtttaaaagaaaataggggcacaggctgttgaggtttttatgttgttatagaccttttt

SEQ ID NO: 27948 - DNA, 2017 bp, Homo sapiens
  source 1..2017: mol_type = unassigned DNA
ccgcatcggcgagctgcgtctcccgggtgtcggccccggcggctccccgaccgtgcccggctgtggcgaggcggctccagcccagcctgtggcagccgcgacccccggggcgctccggagcccactgcgcggcgcgcgtgccggctgcctgcatggacgcggcactgaagcggagccgctcggaggagccagccgaaatcctgccgcctgcccgggacgaggaggaggaggaggaagaggggatggagcaggggctggaggaggaagaagaggtggatccccggatccagggagaactggagaagttaaatcagtccacggatgatatcaacagacgggagactgaacttgaggatgctcgtcagaagttccgctctgttctggttgaagcaacggtgaaactggatgaactggtgaagaaaattggcaaagctgtggaagactccaagccctactgggaggcacggagggtggcgaggcaggctcagctggaagctcagaaagccacgcaggacttccagagggccacagaggtgctccgtgccgccaaggagaccatctccctggccgagcagcggctgctggaggatgacaagcggcagttcgactccgcctggcaggagatgctgaatcacgccactcagagggtcatggaggcggagcagaccaagaccaggagcgagctggtgcataaggagacggcagccaggtacaatgccgccatgggccgcatgcgacagctggagaagaaactcaagagagccatcaacaagtccaagccttattttgaactcaaggcaaagtactatgtgcagctcgagcaactgaaaaagactgtggatgacctgcaggccaaactgaccctggcaaaaggcgagtacaagatggccctgaagaacctggagatgatctcagatgagatccacgagcggcggcgctccagtgccatggggcctcggggatgcggtgttggtgctgagggcagcagcacatctgtggaggatctgccagggagcaaacctgagcctgatgccatttctgtggcctcggaggcctttgaagatgacagctgtagcaactttgtgtctgaagatgactcggaaacccagtccgtgtccagctttagttcaggaccaacaagcccgtctgagatgcctgaccagttccctgcggttgtgaggcctggcagcctggatctgcccagccctgtgtccctgtcagagtttgggatgatgttcccagtgttgggccctcgaagtgaatgcagcggggcctcctcccctgaatgtgaagtagaacgaggagacagggcagaaggggcagagaataaaacaagtgacaaagccaacaacaaccggggcctcagcagtagcagtggcagtggtggcagcagtaagagccaaagcagcacctcccctgagggccaggccttggagaaccggatgaagcagctctccctacagtgctcaaagggaagagatggaattattgctgacataaaaatggtgcagattggctgattcatcctgggccctggccgatgtgcatatcaacatttatacatggaactggagaacattgtgccaataatcatttaatatatgccaaatcttacacgtctactctaaactgctctaatgaagtttcagtgaccttgagggctaaagattgttcttctgggtaagagctcttgggctggtttttcagagcagagttcttgttgtgggtagactgtgactaggttcacagcctttgtggaacattccgtataacggcattgtggaagcaataactagttcctatgaaagaaccagagctgggaagatggctgggaagccaggccaaagtgggggcaacagcttgcttctctttctcttctcaccctcagtttgtatgggaaaatggagatgtcctctccactttatcccacgatatctaaatgaaaaagaaagaaaacccacacacaaagcaaaaactcaagtattaagagcacatatttttgacccagtggaggctt

SEQ ID NO: 27949 - DNA, 903 bp, Homo sapiens
  source 1..903: mol_type = unassigned DNA
aggcttttttttttttttttttttttgagacagagtctcactttgttgcccaggctggagtgcagtggcacgatcttggcttgctgcaacctccacctcctggattcaagtgattctcctgcctcagcctcccgagtagctgggagtacaggctcccacaaccatgcccagctaatttttgtatttaggtagaggcggggtttcaccatgttggccaagctggtcttgaactcctggcctcaagtgatccacccgccttggccttccatagtgctgggattacaggtgtgttactgcgcccagcccataagctgccttttaaaattttctccatggagctcttcccatgaaagctgttagtgtctgtaagtcatgaaggctcagctggaagctcagaaagccacgcaggacttccagagggccacagaggtgctccgtgccgccaaggagaccatctccctggccgagcagcggctgctggaggatgacaagcggcagttcgactccgcctggcaggagatgctgaatcacgccactcagagggtcatggaggcggagcagaccaagaccaggagcgagctggtgcataaggagacggcagccaggtacaatgccgccatgggccgcatgcgacagctggagaagaaactcaagagagccatcaacaagtccaagccttattttgaactcaaggcaaagtactatgtgcagctcgagcaactgaaaaagactgtggatgacctgcaggccaaactgaccctggcaaaaggcgagtacaagatggccctgaagaacctggagatgatctcagatgagatccacgagcggcggcgctccagtgccatggggcctcggggatgcggtgttggtgctgagggcagcagcacatctgtggaggatctg

SEQ ID NO: 27950 - DNA, 2822 bp, Homo sapiens
  source 1..2822: mol_type = unassigned DNA
gcgctgactgccgcggcagaaagggggcggccgcgcccatttcctctgctccgccgcggccggaggtatccgcatcggcgagctgcgtctcccgggtgtcggccccggcggctccccgaccgtgcccggctgtggcgaggcggctccagcccagcctgtggcagccgcgacccccggggcgctccggagcccactgcgcggcgcgcgtgccggctgcctgcatggacgcggcactgaagcggagccgctcggaggagccagccgaaatcctgccgcctgcccgggacgaggaggaggaggaggaagaggggatggagcaggggctggaggaggaagaagaggtggatccccggatccagggagaactggagaagttaaatcagtccacggatgatatcaacagacgggagactgaacttgaggatgctcgtcagaagttccgctctgttctggttgaagcaacggtgaaactggatgaactggtgaagaaaattggcaaagctgtggaagactccaagccctactgggaggcacggagggtggcgaggcaggctcagctggaagctcagaaagccacgcaggacttccagagggccacagaggtgctccgtgccgccaaggagaccatctccctggccgagcagcggctgctggaggatgacaagcggcagttcgactccgcctggcaggagatgctgaatcacgccactcagagggtcatggaggcggagcagaccaagaccaggagcgagctggtgcataaggagacggcagccaggtacaatgccgccatgggccgcatgcgacagctggagaagaaactcaagagagccatcaacaagtccaagccttattttgaactcaaggcaaagtactatgtgcagctcgagcaactgaaaaagactgtggatgacctgcaggccaaactgaccctggcaaaaggcgagtacaagatggccctgaagaacctggagatgatctcagatgagatccacgagcggcggcgctccagtgccatggggcctcggggatgcggtgttggtgctgagggcagcagcacatctgtggaggatctgccagggagcaaacctgagcctgatgccatttctgtggcctcggaggcctttgaagatgacagctgtagcaactttgtgtctgaagatgactcggaaacccagtccgtgtccagctttagttcaggaccaacaagcccgtctgagatgcctgaccagttccctgcggttgtgaggcctggcagcctggatctgcccagccctgtgtccctgtcagagtttgggatgatgttcccagtgttgggccctcgaagtgaatgcagcggggcctcctcccctgaatgtgaagtagaacgaggagacagggcagaaggggcagagaataaaacaagtgacaaagccaacaacaaccggggcctcagcagtagcagtggcagtggtggcagcagtaagagccaaagcagcacctcccctgagggccaggccttggagaaccggatgaagcagctctccctacagtgctcaaagggaagagatggaattattgctgacataaaaatggtgcagattggctgattcatcctgggccctggccgatgtgcatatcaacatttatacatggaactggagaacattgtgccaataatcatttaatatatgccaaatcttacacgtctactctaaactgctctaatgaagtttcagtgaccttgagggctaaagattgttcttctgggtaagagctcttgggctggtttttcagagcagagttcttgttgtgggtagactgtgactaggttcacagcctttgtggaacattccgtataacggcattgtggaagcaataactagttcctatgaaagaaccagagctgggaagatggctgggaagccaggccaaagtgggggcaacagcttgcttctctttctcttctcaccctcagtttgtatgggaaaatggagatgtcctctccactttatcccacgatatctaaatgaaaaagaaagaaaacccacacacaaagcaaaaactcaagtattaagagcacatatttttgacccagtggaggcttaaaaaaaaaaaaatccaagaacacaattcattttcaccacctctggtgttcagagggggcttttaaaaaagcgtgtatgctgggatacccattaaaaccattttctagaaggctaccatgagctgcactttttggggtgggaaaggtgaatgccagtggggatgcggggggatgagggtaggagggacttatagaaggggatttgtggctgtgggggagaaggttctacagcataagccttatcctgccagccaaggggatttattctaagagaagtgcatgtgaagaatggttgccactgttattagattgacaagatgttaatttctctgtaggttgtaactttaaaaataaatgaaattatttaagggttatgctgcactagtattccttagaggaaacagttctttaaagttaggaaagggagtaggcaggcatgtgttggcaaaggctgttaatagtagttaagtgttaagactgcttttctttaacgttttcatggtaatgcatatttagagcactgtatttttgtcttgttaagaaaatttagcatttctaaaagaaaaaagcaaccctctttcaaactgttaattctgtcacagcctgtatattttagtcatttgtaaatctcttcatacaatagtgacttcttttttgactgatacagtatcttaattacaaggttattttgtacttgtcttaatacactaagtgtaataaaaacggcttgagaaaa

SEQ ID NO: 27951 - DNA, 1880 bp, Homo sapiens
  source 1..1880: mol_type = unassigned DNA
gagaaagccttgctatggatgtgacatttgggctgagatgtggatgatgagaaggagtcaggcagccgtgccctggaggagatagcgatgcagacagcagaagccctgaggacagagccagctgacagcccatgtggtgccagaggggagaactggagaagttaaatcagtccacggatgatatcaacagacgggagactgaacttgaggtccagtaggtgtttgcagatcccttcttaagcctcaactgtgtttcctcggtttcccctggctgcaggatgctcgtcagaagttccgctctgttctggttgaagcaacggtgaaactggatgaactggtgaagaaaattggcaaagctgtggaagactccaagccctactgggaggcacggagggtggcgaggcaggctcagctggaagctcagaaagccacgcaggacttccagagggccacagaggtgctccgtgccgccaaggagaccatctccctggccgagcagcggctgctggaggatgacaagcggcagttcgactccgcctggcaggagatgctgaatcacgccactcagagggtcatggaggcggagcagaccaagaccaggagcgagctggtgcataaggagacggcagccaggtacaatgccgccatgggccgcatgcgacagctggagaagaaactcaagagagccatcaacaagtccaagccttattttgaactcaaggcaaagtactatgtgcagctcgagcaactgaaaaagactgtggatgacctgcaggccaaactgaccctggcaaaaggcgagtacaagatggccctgaagaacctggagatgatctcagatgagatccacgagcggcggcgctccagtgccatggggcctcggggatgcggtgttggtgctgagggcagcagcacatctgtggaggatctgccagggagcaaacctgagcctgatgccatttctgtggcctcggaggcctttgaagatgacagctgtagcaactttgtgtctgaagatgactcggaaacccagtccgtgtccagctttagttcaggaccaacaagcccgtctgagatgcctgaccagttccctgcggttgtgaggcctggcagcctggatctgcccagccctgtgtccctgtcagagtttgggatgatgttcccagtgttgggccctcgaagtgaatgcagcggggcctcctcccctgaatgtgaagtagaacgaggagacagggcagaaggggcagagaataaaacaagtgacaaagccaacaacaaccggggcctcagcagtagcagtggcagtggtggcagcagtaagagccaaagcagcacctcccctgagggccaggccttggagaaccggatgaagcagctctccctacagtgctcaaagggaagagatggaattattgctgacataaaaatggtgcagattggctgattcatcctgggccctggccgatgtgcatatcaacatttatacatggaactggagaacattgtgccaataatcatttaatatatgccaaatcttacacgtctactctaaactgctctaatgaagtttcagtgaccttgagggctaaagattgttcttctgggtaagagctcttgggctggtttttcagagcagagttcttgttgtgggtagactgtgactaggttcacagcctttgtggaacattccgtataacggcattgtggaagcaataactagttcctatgaaagaaccagagctgggaagatggctgggaagccaggccaaagtgggggcaacagcttgcttctctttctcttctcaccctcagtttgtatgggaaaatggagatgtcctctccactttatcccacgatatctaaatgaaaaagaaagaaaa

SEQ ID NO: 27952 - DNA, 826 bp, Homo sapiens
  source 1..826: mol_type = unassigned DNA
tagctgggagtacaggctcccacaaccatgcccagctaatttttgtatttaggtagaggcggggtttcaccatgttggccaagctggtcttgaactcctggcctcaagtgatccacccgccttggccttccatagtgctgggattacaggtgtgttactgcgcccagcccataagctgccttttaaaattttctccatggagctcttcccatgaaagctgttagtgtctgtaagtcatgaagagatctggttctcttatttggaactcatcagatacatggcagagggtgtgaagaggtgctgggcccgtggtacagcagccacctttcagaaggccgtcaaaagagcatcttttcttgcttgaagaaataagggattcataactgaagcagagagaactgggagaagagagtttacccttaaatgttgctgaattgaaatactaaaaaattcctaaaaaggcaaatacaaatcccattttaggatcctgtgggattcatcctgtctcctggagttggtgtgaagcatataggctcagctggaagctcagaaagccacgcaggacttccagagggccacagaggtgctccgtgccgccaaggagaccatctccctggccgagcagcggctgctggaggatgacaagcggcagttcgactccgcctggcaggagatgctgaatcacgccactcagagggtcatggaggcggagcagaccaagaccaggagcgagctggtgcataaggagacggcagccaggtacaatgccgccatgggccgcatgcgacagctggagaagaaactcaagagagccatcaacaagtcc

SEQ ID NO: 27953 - DNA, 2190 bp, Homo sapiens
  source 1..2190: mol_type = unassigned DNA
aattcataaattcttggccagagtgtgcccatcaacaggggttacacttgccacctccttaaatcccagctcaatgcattctccatgctcctggctattcagggagaactggagaagttaaatcagtccacggatgatatcaacagacgggagactgaacttgaggatgctcgtcagaagttccgctctgttctggttgaagcaacggtgaaactggatgaactggtgaagaaaattggcaaagctgtggaagactccaagccctactgggaggcacggagggtggcgaggcagagatctggttctcttatttggaactcatcagatacatggcagagggtgtgaagaggtgctgggcccgtggtacagcagccacctttcagaaggccgtcaaaagagcatcttttcttgcttgaagaaataagggattcataactgaagcagagagaactgggagaagagagtttacccttaaatgttgctgaattgaaatactaaaaaattcctaaaaaggcaaatacaaatcccattttaggatcctgtgggattcatcctgtctcctggagttggtgtgaagcatatagaatttcgctcttgtcatccaggctggagtgcaatggcgtgatctcggctcactgcaacctccacctcccaggctcagctggaagctcagaaagccacgcaggacttccagagggccacagaggtgctccgtgccgccaaggagaccatctccctggccgagcagcggctgctggaggatgacaagcggcagttcgactccgcctggcaggagatgctgaatcacgccactcagagggtcatggaggcggagcagaccaagaccaggagcgagctggtgcataaggagacggcagccaggtacaatgccgccatgggccgcatgcgacagctggagaagaaactcaagagagccatcaacaagtccaagccttattttgaactcaaggcaaagtactatgtgcagctcgagcaactgaaaaagactgtggatgacctgcaggccaaactgaccctggcaaaaggcgagtacaagatggccctgaagaacctggagatgatctcagatgagatccacgagcggcggcgctccagtgccatggggcctcggggatgcggtgttggtgctgagggcagcagcacatctgtggaggatctgccagggagcaaacctgagcctgatgccatttctgtggcctcggaggcctttgaagatgacagctgtagcaactttgtgtctgaagatgactcggaaacccagtccgtgtccagctttagttcaggaccaacaagcccgtctgagatgcctgaccagttccctgcggttgtgaggcctggcagcctggatctgcccagccctgtgtccctgtcagagtttgggatgatgttcccagtgttgggccctcgaagtgaatgcagcggggcctcctcccctgaatgtgaagtagaacgaggagacagggcagaaggggcagagaataaaacaagtgacaaagccaacaacaaccggggcctcagcagtagcagtggcagtggtggcagcagtaagagccaaagcagcacctcccctgagggccaggccttggagaaccggatgaagcagctctccctacagtgctcaaagggaagagatggaattattgctgacataaaaatggtgcagattggctgattcatcctgggccctggccgatgtgcatatcaacatttatacatggaactggagaacattgtgccaataatcatttaatatatgccaaatcttacacgtctactctaaactgctctaatgaagtttcagtgaccttgagggctaaagattgttcttctgggtaagagctcttgggctggtttttcagagcagagttcttgttgtgggtagactgtgactaggttcacagcctttgtggaacattccgtataacggcattgtggaagcaataactagttcctatgaaagaaccagagctgggaagatggctgggaagccaggccaaagtgggggcaacagcttgcttctctttctcttctcaccctcagtttgtatgggaaaatggagatgtcctctccactttatcccacgatatctaaatgaaaaagaaagaaaacccacacacaaagcaaaaactcaagtattaagagcacatatttttgacccagtggaggctt

SEQ ID NO: 27954 - DNA, 3997 bp, Homo sapiens
  source 1..3997: mol_type = unassigned DNA
agtttgattccagagccccactcggcggacggaatagacctcagcagcggcgtggtgaggacttagctgggacctggaatcgtatcctcctgtgttttttcagactccttggaaattaaggaatgcaattctgccaccatgatggaaggattgaaaaaacgtacaaggaaggcctttggaatacggaagaaagaaaaggacactgattctacaggttcaccagatagagatggaattcaggggaaaaaaaagacccagaagactcagcttctcctcacctcttgcttctggctcagagccctctcgttaactctgtctcagaagaaaagcaatggggcaccaaatggattttatgcggaaattgattgggaaagatataactcacctgagctggatgaagaaggctacagcatcagacccgaggaacccggctctaccaaaggaaagcacttttattcttcaagtgaatcggaagaagaagaagaatcacataagaaatttaatatcaagattaaaccattgcaatctaaagacattcttaagaatgctgcaactgtagatgaattgaaggcatcaataggcaacatcgcactttccccatcaccagtgaggaaaagtccgaggcgcagcccgggtgcaattaaaaggaacttatccagtgaagaagtggcaagacccaggcgttccacaccaactccagaacttataagcaaaaagcctccagatgacactacggcccttgctcctctctttggcccaccactagaatcagcttttgatgaacagaagacagaagttcttttagatcagcctgagatatggggttcaggccaaccaattaatccaagcatggagtcgccaaagttaacaaggccttttcccactggaacacctccaccactgcctccaaaaaatgtaccagctaccccaccccgaacaggatcccccttaacaattggaccaggaaatgaccagtcagccacagaggtcaaaattgaaaaactaccatccatcaatgacttggacagcatttttgggccagtattgtcccccaagtctgttgctgttaatgctgaagaaaagtgggtccatttttctgatacatccccggaacatgttactccggagttgactccaagggaaaaagtggtgtccccaccagctacaccagacaacccagctgactccccagctccaggccctctcggccccccaggtcccacaggccccccagggcctcctgggcctcctcgcaatgtactatcgccgctcaatttagaagaagtccagaagaaagtcgctgagcagaccttcattaaagatgattacttagaaacaatctcatctcctaaagattttgggttgggacaaagagcaactccacctcccccaccaccacccacctacaggactgtggtttcgtcccccggacctggctcgggccctggtccggggaccaccagtgatgggaaaactgaggctcagagatatcaagtaatttgcccaagtttacaagctggaggcaatgaactggattcatactcaggtgcatcatcccctgctcgaccagccactcctttggttccttgcagaagtaccactccacctccacctcctccccggcctccatcccggccaaagctacctccaggaaaacctggagttggagatgtgtccagaccttttagccctcccattcattcttccagccctcctccaatagcacccttagcgcgggctgaaagcacttcttcaatatcgtcaaccaattccttgagcgcagccaccactcccacagttgagaatgaacagccttccctcgtttggtttgacagaggaaagttttatttgacttttgaaggttcttccaggggacccagccccctaaccatgggagctcaggacactctccctgttgcagcagcatttacagaaacagtcaatgcctatttcaaaggagcagacccaagcaaatgtatcgttaagattaccggagaaatggtgttgtcatttcctgctggcatcaccagacactttgccaacaacccgtccccagctgctctgacttttcgggtgataaatttcagcaggttagaacacgtcctgccaaacccccaacttctctgctgtgataatacacaaaatgatgccaataccaaggaattctgggtaaacatgccaaatttgatgactcacctaaagaaagtgtctgaacaaaaaccccaggctacatattataacgttgacatgctcaaatatcaggtgtctgcccagggcattcagtccacacctctgaacctggcagtgaattggcgatgtgagccttcaagcactgacctgcgcatagattacaaatataatacagatgcaatgacgactgctgtggccctcaacaatgtgcagttcctggtccccatcgacggaggagtcaccaagctccaggcagtgctcccaccagcagtctggaatgctgaacaacagagaatattgtggaagattcctgatatctctcagaagtcagaaaatggaggggtgggttctttgttggcaagatttcagttatctgaaggcccaagcaaaccttctccattggttgtgcagttcacaagtgaaggaagcaccctttctggctgtgacattgaacttgttggagcagggtatcgattttcactcatcaagaaaaggtttgctgcaggaaaatacttggcagataactaatgaaatcttatgcaaggatttggaggattcatataatggagaactgatgtatgagaaacagattttaattttggtttgatgaaaacaaaccaatatctgcacttgggatatatcaggtggaaagtcaatgactttcatctgtgatttccctcacacactaccatgatgaccagtcctacagtatttacttctaggtgtaatattgttaatggttttaaaatgtaattattgtatttgtaaattgtactctcattccagtaaggcagttagacacttgagttttagcattttaccattcctgaaatggatgtaatttaaactgtggtatgtaaatttaatagtagtattgttgaatggcacaatgcttacagaggtagattgcattttgtcaatatataaaatttaaatataatattgatagctgtcataaagggggtgccacatattaaagaaacttaagtggaaccagaagaaaaagaaacaaacttacttttcttcaatgcttagtatgttttactctagtgctaaataaaaactctatcttcaaatgtttagtgggttaaattgagaaactatttcagaaaaaaattctaaggttacagcatattcaaagaaaagcattagttaccactttttaaaaagcttttttttcaaactgcaaatttcataaaaatgcaaactgtgtaaacagggcctcttatttttataacttgtgtaaaaagggaaagcaattcatatttaaagtttaagtatattaaattataatcaagagtaaagaagatgttgaagtcttaactacttgcccctctctacagtttcgcaaatgtggggattgctgaataatcagtcagactaaaaccaaaattgtgattttaagatttcaagactttccgtagttgaactggttaagaatttttgcttagttactctgaatagatgatcttactcatccagtatgggggaatgatacctcacgtcttcctctttacccacaggaatcaaaacgctgagactgagaattttagggaaaaaaaagtccactgtttagatccagaaggagagttttaatcattgtttatatcatttgagaatgaaaaaataagcttcataaatgaaattctattcacattactgtgtaataaatttccttttggatgattaggattcattgtataaaactgtaaatctttgccattcttggagaagcaaaaggagagttatcaaaaatgtatgtcgtttcatcgttgcaaggtataataaaaactgtaattattcaatc

SEQ ID NO: 27955 - DNA, 2180 bp, Homo sapiens
  source 1..2180: mol_type = unassigned DNA
cctttctctcagcatcttcttggtagcctgcctgtaggtgaagaagcaccagcagcatccatggcctgtcttttggcttaacacttatctcctttggctttgacagcggacggaatagacctcagcagcggcgtggtgaggacttagctgggacctggaatcgtatcctcctgtgttttttcagactccttggaaattaaggaatgcaattctgccaccatgatggaaggattgaaaaaacgtacaaggaaggcctttggaatacggaagaaagaaaaggacactgattctacaggttcaccagatagagatggaattaactcacctgagctggatgaagaaggctacagcatcagacccgaggaacccggctctaccaaaggaaagcacttttattcttcaagtgaatcggaagaagaagaagaatcacataagaaatttaatatcaagattaaaccattgcaatctaaagacattcttaagaatgctgcaactgtagatgaattgaaggcatcaataggcaacatcgcactttccccatcaccagtgaggaaaagtccgaggcgcagcccgggtgcaattaaaaggaacttatccagtgaagaagtggcaagacccaggcgttccacaccaactccagaacttataagcaaaaagcctccagatgacactacggcccttgctcctctctttggcccaccactagaatcagcttttgatgaacagaagacagaagttcttttagatcagcctgagatatggggttcaggccaaccaattaatccaagcatggagtcgccaaagttaacaaggccttttcccactggaacacctccaccactgcctccaaaaaatgtaccagctaccccaccccgaacaggatcccccttaacaattggaccaggtgcatcatcccctgctcgaccagccactcctttggttccttgcagaagtaccactccacctccacctcctccccggcctccatcccggccaaagctacctccaggaaaacctggagttggagatgtgtccagaccttttagccctcccattcattcttccagccctcctccaatagcacccttagcgcgggctgaaagcacttcttcaatatcgtcaaccaattccttgagcgcagccaccactcccacagttgagaatgaacagccttccctcgtttggtttgacagaggaaagttttatttgacttttgaaggttcttccaggggacccagccccctaaccatgggagctcaggacactctccctgttgcagcagcatttacagaaacagtcaatgcctatttcaaaggagcagacccaagcaaatgtatcgttaagattaccggagaaatggtgttgtcatttcctgctggcatcaccagacactttgccaacaacccgtccccagctgctctgacttttcgggtgataaatttcagcaggttagaacacgtcctgccaaacccccaacttctctgctgtgataatacacaaaatgatgccaataccaaggaattctgggtaaacatgccaaatttgatgactcacctaaagaaagtgtctgaacaaaaaccccaggctacatattataacgttgacatgctcaaatatcaggtgtctgcccagggcattcagtccacacctctgaacctggcagtgaattggcgatgtgagccttcaagcactgacctgcgcatagattacaaatataatacagatgcaatgacgactgctgtggccctcaacaatgtgcagttcctggtccccatcgacggaggagtcaccaagctccaggcagtgctcccaccagcagtctggaatgctgaacaacagagaatattgtggaagattcctgatatctctcagaagtcagaaaatggaggggtgggttctttgttggcaagatttcagttatctgaaggcccaagcaaaccttctccattggttgtgcagttcacaagtgaaggaagcaccctttctggctgtgacattgaacttgttggagcagggtatcgattttcactcatcaagaaaaggtttgctgcaggaaaatacttggcagataactaatgaaatcttatgcaaggatttggaggattcatataatggagaactgatgtatgagaaacagattttaattttggtttgatgaaaacaaaccaatatctgcactt

SEQ ID NO: 27956 - DNA, 7273 bp, Homo sapiens
  source 1..7273: mol_type = unassigned DNA
caccagcagcatccatggcctgtcttttggcttaacacttatctcctttggctttgacagcggacggaatagacctcagcagcggcgtggtgaggacttagctgggacctggaatcgtatcctcctgtgttttttcagactccttggaaattaaggaatgcaattctgccaccatgatggaaggattgaaaaaacgtacaaggaaggcctttggaatacggaagaaagaaaaggacactgattctacaggttcaccagatagagatggaattaagaaaagcaatggggcaccaaatggattttatgcggaaattgattgggaaagatataactcacctgagctggatgaagaaggctacagcatcagacccgaggaacccggctctaccaaaggaaagcacttttattcttcaagtgaatcggaagaagaagaagaatcacataagaaatttaatatcaagattaaaccattgcaatctaaagacattcttaagaatgctgcaactgtagatgaattgaaggcatcaataggcaacatcgcactttccccatcaccagtgggtgcaattaaaaggaacttatccagtgaagaagtggcaagacccaggcgttccacaccaactccagaacttataagcaaaaagcctccagatgacactacggcccttgctcctctctttggcccaccactagaatcagcttttgatgaacagaagacagaagttcttttagatcagcctgagatatggggttcaggccaaccaattaatccaagcatggagtcgccaaagttaacaaggccttttcccactggaacacctccaccactgcctccaaaaaatgtaccagctaccccaccccgaacaggatcccccttaacaattggaccaggtgcatcatcccctgctcgaccagccactcctttggttccttgcagaagtaccactccacctccacctcctccccggcctccatcccggccaaagctacctccaggaaaacctggagttggagatgtgtccagaccttttagccctcccattcattcttccagccctcctccaatagcacccttagcgcgggctgaaagcacttcttcaatatcgtcaaccaattccttgagcgcagccaccactcccacagttgtgtcagaagacgatgttttttatgacaaactgccctcgtttgaaaggcgctgtgaaacgcctgcaggttcttccaggggacccagccccctaaccatgggagctcaggacactctccctgttgcagcagcatttacagaaacagtcaatgcctatttcaaaggagcagacccaagcaaatgtatcgttaagattaccggagaaatggtgttgtcatttcctgctggcatcaccagacactttgccaacaacccgtccccagctgctctgacttttcgggtgataaatttcagcaggttagaacacgtcctgccaaacccccaacttctctgctgtgataatacacaaaatgatgccaataccaaggaattctgggtaaacatgccaaatttgatgactcacctaaagaaagtgtctgaacaaaaaccccaggctacatattataacgttgacatgctcaaatatcaggtgtctgcccagggcattcagtccacacctctgaacctggcagtgaattggcgatgtgagccttcaagcactgacctgcgcatagattacaaatataatacagatgcaatgacgactgctgtggccctcaacaatgtgcagttcctggtccccatcgacggaggagtcaccaagctccaggcagtgctcccaccagcagtctggaatgctgaacaacagagaatattgtggaagattcctgatatctctcagaagtcagaaaatggaggggtgggttctttgttggcaagatttcagttatctgaaggcccaagcaaaccttctccattggttgtgcagttcacaagtgaaggaagcaccctttctggctgtgacattgaacttgttggagcagggtatcgattttcactcatcaagaaaaggtttgctgcaggaaaatacttggcagataactaatgaaatcttatgcaaggatttggaggattcatataatggagaactgatgtatgagaaacagattttaattttggtttgatgaaaacaaaccaatatctgcacttgggatatatcaggtggaaagtcaatgactttcatctgtgatttccctcacacactaccatgatgaccagtcctacagtatttacttctaggtgtaatattgttaatggttttaaaatgtaattattgtatttgtaaattgtactctcattccagtaaggcagttagacacttgagttttagcattttaccattcctgaaatggatgtaatttaaactgtggtatgtaaatttaatagtagtattgttgaatggcacaatgcttacagaggtagattgcattttgtcaatatataaaatttaaatataatattgatagctgtcataaagggggtgccacatattaaagaaacttaagtggaaccagaagaaaaagaaacaaacttacttttcttcaatgcttagtatgttttactctagtgctaaataaaaactctatcttcaaatgtttagtgggttaaattgagaaactatttcagaaaaaaattctaaggttacagcatattcaaagaaaagcattagttaccactttttaaaaagcttttttttcaaactgcaaatttcataaaaatgcaaactgtgtaaacagggcctcttatttttataacttgtgtaaaaagggaaagcaattcatatttaaagtttaagtatattaaattataatcaagagtaaagaagatgttgaagtcttaactacttgcccctctctacagtttcgcaaatgtggggattgctgaataatcagtcagactaaaaccaaaattgtgattttaagatttcaagactttccgtagttgaactggttaagaatttttgcttagttactctgaatagatgatcttactcatccagtatgggggaatgatacctcacgtcttcctctttacccacaggaatcaaaacgctgagactgagaattttagggaaaaaaaagtccactgtttagatccagaaggagagttttaatcattgtttatatcatttgagaatgaaaaaataagcttcataaatgaaattctattcacattactgtgtaataaatttccttttggatgattaggattcattgtataaaactgtaaatctttgccattcttggagaagcaaaaggagagttatcaaaaatgtatgtcgtttcatcgttgcaaggtataataaaaactgtaattattcaatctggccctgccatatgaacatttagaaagacaaacttcttcgggagtctcagttgtaaaaccttccctcattaatatctgaaaatgttagtcttcctttaagtcatagaacttatttaaacataaaccaatttctattacaggttatgctattaaatagctgtaattattaagttattatttttataattagttgttaaatttcattttacacccactcaaatttaacaaagaatctttagcccctttaaattttagaattaaattaaatttttaaagttttacttctaaaatgagattgtgactggcaattgtttatagtgaaactttttaaattaatctttgtactcctctatcagtgcttgctaccaagagaatgtccaaaatgatttgttttaccatgggaaaattcttactattcaacaaactctcagttggccccctacagcagtctggtgttgaagtttctttgaacgaactaaatatactcattttatgtaaaggtatccaatttgattttgaaaccaaaatagaaaatgcaaaattctaaattccatgaaacatggaatttatgacaccaaaatcaatggagagtaagcagcagcaaactgagaattatccagcatatgaatataacaatgtgtttttaagtaatcaattcatttaaaaaattgaatattaatacaaagcatattaaaaacatgtaaatattactggttctcatgtctttgtatttatattttattttgttttattttgtatagatctagaatgaattagtaattaaacacaagggtttttttcccaaaaaataattttactgatttttaaaaatttaattaaaaacatagattacagtaatctctaacattattcaaatctttctagggattaaattagaaactatgaagaaatcctataatctcttaactggtctttatggaacagaatgggagtcaacaatttcaaaatgattgaactatgagtaaccagaacctcaatagaaaatgtatcccttcacctttcagaaaagagatcaaataataacacaataagctggtatcagggatttgcattttgacattttgttgtttctttttaattttgtagattataatctcctgttacatctatatccacagtactgtagaataagaattcatgtcctgaaaatggtcccaggcaatgaaagagtctcagttatcaaagacattaagtcagattcatttattcattttattcccaagtcagaacaaaatgaactagtaggtaataaaactattttcagtactaggggttaaaacaaaaagaaattgttctagttaaccagaacaccatttcctgaacgttatgatctttaaaaggttctgctttagcaagataaaaagtataaatgatgctactttattttggcaacatggaaattttgtttttcttttccaataaaatccatattttcgtgaaatttttaaaaataaatttgtatcaaggattagtctgaattttatcataatagaaatttataattactaagaattaaatttttaatcatttttaaagctgtgttcttctctacacccacagccaaaatggaaattcactgtatggtatttgggaatatatttcacctgtaaaagaaagaatgtccacaattcaaacggttttgagttaatagataggaatccctcagtcaaactacagaattttttttgttttatatattcttagtcagcagagtgtttgagctataattacaagtatttccacttctaaatcttcttttagaaaagcagataactataataccttggctctgccactgactcctgccgtatgatattggacaaatcactgcccttttcagtttctcatctttagaatggggagttgggattgccagtggttttcaagcttttcttaacagcagggctttttttctaataaaattgcacatggaatcctggtaggcaaaacagctcaaagcaatgcaggagtttctccaacagtttaaattggggctccccagagcatggtttaaataccataacagtacacaatgatctatcatgtgtcttccaactctgaagttccacagttgtaatttactcagataaaccaccttttgaggctttataagcaaacttgtaaaaacacagtaattgaatgatatacaataaaaactgacagagtgtttaccatgtaccagtcactagagatattagctcatttaattctcttatcaatcaaaaaattgtaagtactctttttaattcctgttttacaagtgatgacactgaggcttaaatagaataatctccccaaaatgacacggcagctgaaagtaacccagctattctgactgcaaaggaaacgccttaattgctttgtccaccctgaacaaaacaatctgttttatgtcactatacgtactccatttgaatgccaaggtagaaggcaccatgaaaaaccattaccaaaataaggataattccaataacaaaactgtcaaaaaagaatcactgcttctcaaaatatgattggtatcatcacttattaatgttttgtatcatcacttattaatgattttggcttggtcaccactatgcctggaagatagtaggcactgataaacattgttaaacaccgtaacaacacaaaatgatctaccacatatcaatgtcttccatctctgaaattccatgattctactttactcagatataccaccttttgtggcattataaggaaacatgtataatcaagttcatacaagctatacacagtaggcatcgataaatttgtattgacagcataaacttctagggatgagatttgggaatatacattttgataagtgctccaaatttgagaatcattgctctagtagatctctaaggtccttcttagttctgacattatatcagattttaagcattaaattctaagatgaaaaccatttttctagtcagtttatttttcattcagtccacttaatttcctccaatcttaaaaaatttttttccctaggaaaatccctatctttttcttaaagttactctgttatactatctcagtctcaaagtagcctgaaatgcattttctcattttcatatttctgtccttttcttcaatgtcttaaaagacttgaagtagaagggaagttgcaagctgttatttattcaaatacaaaatcctaatcaatgtttccttctttgcaagggacattcagatctctaacttgtgagttgaacctatttattttgtaagcttttgactttacaaacatgtggtagcctcattctaaaagagttgcacgaatattttttctcaaaataaccacaggctgtaaattaaattgaacaatacagtagaatatgcagatacatactaaacagatgagtgtgtgtgtatgtgtctgtgtttaagcttttccttttccaaaagattatacatttgagcaaaatcccattcagtctaaatgtactcattttgccacatggttttctgatcagcaatttttttaaaaaatggaagtgttacattatatttaataatatcaaaacaagagtgatctctaaatatagctttgaaagttaatataatatgatgtgtccatgcaatgagtcaaattagattgttgatataaatgaacaaatcaatccaagttacattgattaaagggactatttggatgaccagcctcaccatcttttactgtgtgcactttcctcttaaggttttattgtattttccctgctcctttaggcttttttttcatgtggaaaacagtatctaaatgccattctctcacttatgaattaaatatggctaccattaatgttcctttttgtcagtggagtgtatggaaggaaaatgagataggagtacattgcttaagtctctaaatattaaaaacaacaacaaaac

SEQ ID NO: 27957 - DNA, 4554 bp, Homo sapiens
  source 1..4554: mol_type = unassigned DNA
cttagctgggacctggaatcgtatcctcctgtgttttttcagactccttggaaattaaggaatgcaattctgccaccatgatggaaggattgaaaaaacgtacaaggaaggcctttggaatacggaagaaagaaaaggacactgattctacaggttcaccagatagagatggaattcagcccagcccacacgaaccaccctacaatagcaaagcagagtgtgcgcgtgaaggaggaaaaaaagtttcgaagaaaagcaatggggcaccaaatggattttatgcggaaattgattgggaaagatataactcacctgagctggatgaagaaggctacagcatcagacccgaggaacccggctctaccaaaggaaagcacttttattcttcaagtgaatcggaagaagaagaagaatcacataagaaatttaatatcaagattaaaccattgcaatctaaagacattcttaagaatgctgcaactgtagatgaattgaaggcatcaataggcaacatcgcactttccccatcaccagtgaggaaaagtccgaggcgcagcccgggtgcaattaaaaggaacttatccagtgaagaagtggcaagacccaggcgttccacaccaactccagaacttataagcaaaaagcctccagatgacactacggcccttgctcctctctttggcccaccactagaatcagcttttgatgaacagaagacagaagttcttttagatcagcctgagatatggggttcaggccaaccaattaatccaagcatggagtcgccaaagttaacaaggccttttcccactggaacacctccaccactgcctccaaaaaatgtaccagctaccccaccccgaacaggatcccccttaacaattggaccaggaaatgaccagtcagccacagaggtcaaaattgaaaaactaccatccatcaatgacttggacagcatttttgggccagtattgtcccccaagtctgttgctgttaatgctgaagaaaagtgggtccatttttctgatacatccccggaacatgttactccggagttgactccaagggaaaaagtggtgtccccaccagctacaccagacaacccagctgactccccagctccaggccctctcggccccccaggtcccacaggccccccagggcctcctgggcctcctcgcaatgtactatcgccgctcaatttagaagaagtccagaagaaagtcgctgagcagaccttcattaaagatgattacttagaaacaatctcatctcctaaagattttgggttgggacaaagagcaactccacctcccccaccaccacccacctacaggactgtggtttcgtcccccggacctggctcgggccctggtccggggaccaccagtggtgcatcatcccctgctcgaccagccactcctttggttccttgcagaagtaccactccacctccacctcctccccggcctccatcccggccaaagctacctccaggaaaacctggagttggagatgtgtccagaccttttagccctcccattcattcttccagccctcctccaatagcacccttagcgcgggctgaaagcacttcttcaatatcgtcaaccaattccttgagcgcagccaccactcccacagttgagaatgaacagccttccctcgtttggtttgacagaggaaagttttatttgacttttgaaggttcttccaggggacccagccccctaaccatgggagctcaggacactctccctgttgcagcagcatttacagaaacagtcaatgcctatttcaaaggagcagacccaagcaaatgtatcgttaagattaccggagaaatggtgttgtcatttcctgctggcatcaccagacactttgccaacaacccgtccccagctgctctgacttttcgggtgataaatttcagcaggttagaacacgtcctgccaaacccccaacttctctgctgtgataatacacaaaatgatgccaataccaaggaattctgggtaaacatgccaaatttgatgactcacctaaagaaagtgtctgaacaaaaaccccaggctacatattataacgttgacatgctcaaatatcaggtgtctgcccagggcattcagtccacacctctgaacctggcagtgaattggcgatgtgagccttcaagcactgacctgcgcatagattacaaatataatacagatgcaatgacgactgctgtggccctcaacaatgtgcagttcctggtccccatcgacggaggagtcaccaagctccaggcagtgctcccaccagcagtctggaatgctgaacaacagagaatattgtggaagattcctgatatctctcagaagtcagaaaatggaggggtgggttctttgttggcaagatttcagttatctgaaggcccaagcaaaccttctccattggttgtgcagttcacaagtgaaggaagcaccctttctggctgtgacattgaacttgttggagcagggtatcgattttcactcatcaagaaaaggtttgctgcaggaaaatacttggcagataactaatgaaatcttatgcaaggatttggaggattcatataatggagaactgatgtatgagaaacagattttaattttggtttgatgaaaacaaaccaatatctgcacttgggatatatcaggtggaaagtcaatgactttcatctgtgatttccctcacacactaccatgatgaccagtcctacagtatttacttctaggtgtaatattgttaatggttttaaaatgtaattattgtatttgtaaattgtactctcattccagtaaggcagttagacacttgagttttagcattttaccattcctgaaatggatgtaatttaaactgtggtatgtaaatttaatagtagtattgttgaatggcacaatgcttacagaggtagattgcattttgtcaatatataaaatttaaatataatattgatagctgtcataaagggggtgccacatattaaagaaacttaagtggaaccagaagaaaaagaaacaaacttacttttcttcaatgcttagtatgttttactctagtgctaaataaaaactctatcttcaaatgtttagtgggttaaattgagaaactatttcagaaaaaaattctaaggttacagcatattcaaagaaaagcattagttaccactttttaaaaagcttttttttcaaactgcaaatttcataaaaatgcaaactgtgtaaacagggcctcttatttttataacttgtgtaaaaagggaaagcaattcatatttaaagtttaagtatattaaattataatcaagagtaaagaagatgttgaagtcttaactacttgcccctctctacagtttcgcaaatgtggggattgctgaataatcagtcagactaaaaccaaaattgtgattttaagatttcaagactttccgtagttgaactggttaagaatttttgcttagttactctgaatagatgatcttactcatccagtatgggggaatgatacctcacgtcttcctctttacccacaggaatcaaaacgctgagactgagaattttagggaaaaaaaagtccactgtttagatccagaaggagagttttaatcattgtttatatcatttgagaatgaaaaaataagcttcataaatgaaattctattcacattactgtgtaataaatttccttttggatgattaggattcattgtataaaactgtaaatctttgccattcttggagaagcaaaaggagagttatcaaaaatgtatgtcgtttcatcgttgcaaggtataataaaaactgtaattattcaatctggccctgccatatgaacatttagaaagacaaacttcttcgggagtctcagttgtaaaaccttccctcattaatatctgaaaatgttagtcttcctttaagtcatagaacttatttaaacataaaccaatttctattacaggttatgctattaaatagctgtaattattaagttattatttttataattagttgttaaatttcattttacacccactcaaatttaacaaagaatctttagcccctttaaattttagaattaaattaaatttttaaagttttacttctaaaatgagattgtgactggcaattgtttatagtgaaactttttaaattaatctttgtactcctctatcagtgcttgctaccaagagaatgtccaaaatgatttgttttaccatgggaaaattcttactattcaacaaactctcagttggccccctacagcagtctggtgttgaagtttctttgaacgaactaaatatactcattttatgtaaaggtatccaatttgattttgaaaccaaaatagaaaatgcaaaattctaaattccatgaaacatggaatttatgacaccaaaatcaatggagagtaagcagcagcaaactgagaattatccagcatatgaatataacaatgtgtttttaagtaatcaattcatttaaaaaattgaatattaatacaaagcatattaaaaacatgtaaatatta

SEQ ID NO: 27958 - DNA, 7957 bp, Homo sapiens
  source 1..7957: mol_type = unassigned DNA
caccagcagcatccatggcctgtcttttggcttaacacttatctcctttggctttgacagcggacggaatagacctcagcagcggcgtggtgaggacttagctgggacctggaatcgtatcctcctgtgttttttcagactccttggaaattaaggaatgcaattctgccaccatgatggaaggattgaaaaaacgtacaaggaaggcctttggaatacggaagaaagaaaaggacactgattctacaggttcaccagatagagatggaattcaggggaaaaaaaagacccagaagactcagcttctcctcacctcttgcttctggctcagagccctctcgttaactctgtctcagaagaaaagcaatggggcaccaaatggattttatgcggaaattgattgggaaagatataactcacctgagctggatgaagaaggctacagcatcagacccgaggaacccggctctaccaaaggaaagcacttttattcttcaagtgaatcggaagaagaagaagaatcacataagaaatttaatatcaagattaaaccattgcaatctaaagacattcttaagaatgctgcaactgtagatgaattgaaggcatcaataggcaacatcgcactttccccatcaccagtgagaaagaaagaaagaagagagaaaggtgcaattaaaaggaacttatccagtgaagaagtggcaagacccaggcgttccacaccaactccagaacttataagcaaaaagcctccagatgacactacggcccttgctcctctctttggcccaccactagaatcagcttttgatgaacagaagacagaagttcttttagatcagcctgagatatggggttcaggccaaccaattaatccaagcatggagtcgccaaagttaacaaggccttttcccactggaacacctccaccactgcctccaaaaaatgtaccagctaccccaccccgaacaggatcccccttaacaattggaccaggaaatgaccagtcagccacagaggtcaaaattgaaaaactaccatccatcaatgacttggacagcatttttgggccagtattgtcccccaagtctgttgctgttaatgctgaagaaaagtgggtccatttttctgatacatccccggaacatgttactccggagttgactccaagggaaaaagtggtgtccccaccagctacaccagacaacccagctgactccccagctccaggccctctcggccccccaggtcccacaggccccccagggcctcctgggcctcctcgcaatgtactatcgccgctcaatttagaagaagtccagaagaaagtcgctgagcagaccttcattaaagatgattacttagaaacaatctcatctcctaaagattttgggttgggacaaagagcaactccacctcccccaccaccacccacctacaggactgtggtttcgtcccccggacctggctcgggccctggtccggggaccaccagtgatgggaaaactgaggctcagagatatcaagtaatttgcccaagtttacaagctggaggcaatgaactggattcatactcaggtgcatcatcccctgctcgaccagccactcctttggttccttgcagaagtaccactccacctccacctcctccccggcctccatcccggccaaagctacctccaggaaaacctggagttggagatgtgtccagaccttttagccctcccattcattcttccagccctcctccaatagcacccttagcgcgggctgaaagcacttcttcaatatcgtcaaccaattccttgagcgcagccaccactcccacagttgagaatgaacagccttccctcgtttggtttgacagaggaaagttttatttgacttttgaaggttcttccaggggacccagccccctaaccatgggagctcaggacactctccctgttgcagcagcatttacagaaacagtcaatgcctatttcaaaggagcagacccaagcaaatgtatcgttaagattaccggagaaatggtgttgtcatttcctgctggcatcaccagacactttgccaacaacccgtccccagctgctctgacttttcgggtgataaatttcagcaggttagaacacgtcctgccaaacccccaacttctctgctgtgataatacacaaaatgatgccaataccaaggaattctgggtaaacatgccaaatttgatgactcacctaaagaaagtgtctgaacaaaaaccccaggctacatattataacgttgacatgctcaaatatcaggtgtctgcccagggcattcagtccacacctctgaacctggcagtgaattggcgatgtgagccttcaagcactgacctgcgcatagattacaaatataatacagatgcaatgacgactgctgtggccctcaacaatgtgcagttcctggtccccatcgacggaggagtcaccaagctccaggcagtgctcccaccagcagtctggaatgctgaacaacagagaatattgtggaagattcctgatatctctcagaagtcagaaaatggaggggtgggttctttgttggcaagatttcagttatctgaaggcccaagcaaaccttctccattggttgtgcagttcacaagtgaaggaagcaccctttctggctgtgacattgaacttgttggagcagggtatcgattttcactcatcaagaaaaggtttgctgcaggaaaatacttggcagataactaatgaaatcttatgcaaggatttggaggattcatataatggagaactgatgtatgagaaacagattttaattttggtttgatgaaaacaaaccaatatctgcacttgggatatatcaggtggaaagtcaatgactttcatctgtgatttccctcacacactaccatgatgaccagtcctacagtatttacttctaggtgtaatattgttaatggttttaaaatgtaattattgtatttgtaaattgtactctcattccagtaaggcagttagacacttgagttttagcattttaccattcctgaaatggatgtaatttaaactgtggtatgtaaatttaatagtagtattgttgaatggcacaatgcttacagaggtagattgcattttgtcaatatataaaatttaaatataatattgatagctgtcataaagggggtgccacatattaaagaaacttaagtggaaccagaagaaaaagaaacaaacttacttttcttcaatgcttagtatgttttactctagtgctaaataaaaactctatcttcaaatgtttagtgggttaaattgagaaactatttcagaaaaaaattctaaggttacagcatattcaaagaaaagcattagttaccactttttaaaaagcttttttttcaaactgcaaatttcataaaaatgcaaactgtgtaaacagggcctcttatttttataacttgtgtaaaaagggaaagcaattcatatttaaagtttaagtatattaaattataatcaagagtaaagaagatgttgaagtcttaactacttgcccctctctacagtttcgcaaatgtggggattgctgaataatcagtcagactaaaaccaaaattgtgattttaagatttcaagactttccgtagttgaactggttaagaatttttgcttagttactctgaatagatgatcttactcatccagtatgggggaatgatacctcacgtcttcctctttacccacaggaatcaaaacgctgagactgagaattttagggaaaaaaaagtccactgtttagatccagaaggagagttttaatcattgtttatatcatttgagaatgaaaaaataagcttcataaatgaaattctattcacattactgtgtaataaatttccttttggatgattaggattcattgtataaaactgtaaatctttgccattcttggagaagcaaaaggagagttatcaaaaatgtatgtcgtttcatcgttgcaaggtataataaaaactgtaattattcaatctggccctgccatatgaacatttagaaagacaaacttcttcgggagtctcagttgtaaaaccttccctcattaatatctgaaaatgttagtcttcctttaagtcatagaacttatttaaacataaaccaatttctattacaggttatgctattaaatagctgtaattattaagttattatttttataattagttgttaaatttcattttacacccactcaaatttaacaaagaatctttagcccctttaaattttagaattaaattaaatttttaaagttttacttctaaaatgagattgtgactggcaattgtttatagtgaaactttttaaattaatctttgtactcctctatcagtgcttgctaccaagagaatgtccaaaatgatttgttttaccatgggaaaattcttactattcaacaaactctcagttggccccctacagcagtctggtgttgaagtttctttgaacgaactaaatatactcattttatgtaaaggtatccaatttgattttgaaaccaaaatagaaaatgcaaaattctaaattccatgaaacatggaatttatgacaccaaaatcaatggagagtaagcagcagcaaactgagaattatccagcatatgaatataacaatgtgtttttaagtaatcaattcatttaaaaaattgaatattaatacaaagcatattaaaaacatgtaaatattactggttctcatgtctttgtatttatattttattttgttttattttgtatagatctagaatgaattagtaattaaacacaagggtttttttcccaaaaaataattttactgatttttaaaaatttaattaaaaacatagattacagtaatctctaacattattcaaatctttctagggattaaattagaaactatgaagaaatcctataatctcttaactggtctttatggaacagaatgggagtcaacaatttcaaaatgattgaactatgagtaaccagaacctcaatagaaaatgtatcccttcacctttcagaaaagagatcaaataataacacaataagctggtatcagggatttgcattttgacattttgttgtttctttttaattttgtagattataatctcctgttacatctatatccacagtactgtagaataagaattcatgtcctgaaaatggtcccaggcaatgaaagagtctcagttatcaaagacattaagtcagattcatttattcattttattcccaagtcagaacaaaatgaactagtaggtaataaaactattttcagtactaggggttaaaacaaaaagaaattgttctagttaaccagaacaccatttcctgaacgttatgatctttaaaaggttctgctttagcaagataaaaagtataaatgatgctactttattttggcaacatggaaattttgtttttcttttccaataaaatccatattttcgtgaaatttttaaaaataaatttgtatcaaggattagtctgaattttatcataatagaaatttataattactaagaattaaatttttaatcatttttaaagctgtgttcttctctacacccacagccaaaatggaaattcactgtatggtatttgggaatatatttcacctgtaaaagaaagaatgtccacaattcaaacggttttgagttaatagataggaatccctcagtcaaactacagaattttttttgttttatatattcttagtcagcagagtgtttgagctataattacaagtatttccacttctaaatcttcttttagaaaagcagataactataataccttggctctgccactgactcctgccgtatgatattggacaaatcactgcccttttcagtttctcatctttagaatggggagttgggattgccagtggttttcaagcttttcttaacagcagggctttttttctaataaaattgcacatggaatcctggtaggcaaaacagctcaaagcaatgcaggagtttctccaacagtttaaattggggctccccagagcatggtttaaataccataacagtacacaatgatctatcatgtgtcttccaactctgaagttccacagttgtaatttactcagataaaccaccttttgaggctttataagcaaacttgtaaaaacacagtaattgaatgatatacaataaaaactgacagagtgtttaccatgtaccagtcactagagatattagctcatttaattctcttatcaatcaaaaaattgtaagtactctttttaattcctgttttacaagtgatgacactgaggcttaaatagaataatctccccaaaatgacacggcagctgaaagtaacccagctattctgactgcaaaggaaacgccttaattgctttgtccaccctgaacaaaacaatctgttttatgtcactatacgtactccatttgaatgccaaggtagaaggcaccatgaaaaaccattaccaaaataaggataattccaataacaaaactgtcaaaaaagaatcactgcttctcaaaatatgattggtatcatcacttattaatgttttgtatcatcacttattaatgattttggcttggtcaccactatgcctggaagatagtaggcactgataaacattgttaaacaccgtaacaacacaaaatgatctaccacatatcaatgtcttccatctctgaaattccatgattctactttactcagatataccaccttttgtggcattataaggaaacatgtataatcaagttcatacaagctatacacagtaggcatcgataaatttgtattgacagcataaacttctagggatgagatttgggaatatacattttgataagtgctccaaatttgagaatcattgctctagtagatctctaaggtccttcttagttctgacattatatcagattttaagcattaaattctaagatgaaaaccatttttctagtcagtttatttttcattcagtccacttaatttcctccaatcttaaaaaatttttttccctaggaaaatccctatctttttcttaaagttactctgttatactatctcagtctcaaagtagcctgaaatgcattttctcattttcatatttctgtccttttcttcaatgtcttaaaagacttgaagtagaagggaagttgcaagctgttatttattcaaatacaaaatcctaatcaatgtttccttctttgcaagggacattcagatctctaacttgtgagttgaacctatttattttgtaagcttttgactttacaaacatgtggtagcctcattctaaaagagttgcacgaatattttttctcaaaataaccacaggctgtaaattaaattgaacaatacagtagaatatgcagatacatactaaacagatgagtgtgtgtgtatgtgtctgtgtttaagcttttccttttccaaaagattatacatttgagcaaaatcccattcagtctaaatgtactcattttgccacatggttttctgatcagcaatttttttaaaaaatggaagtgttacattatatttaataatatcaaaacaagagtgatctctaaatatagctttgaaagttaatataatatgatgtgtccatgcaatgagtcaaattagattgttgatataaatgaacaaatcaatccaagttacattgattaaagggactatttggatgaccagcctcaccatcttttactgtgtgcactttcctcttaaggttttattgtattttccctgctcctttaggcttttttttcatgtggaaaacagtatctaaatgccattctctcacttatgaattaaatatggctaccattaatgttcctttttgtcagtggagtgtatggaaggaaaatgagataggagtacattgcttaagtctctaaatattaaaaacaacaacaaaac

SEQ ID NO: 27959 - DNA, 4080 bp, Homo sapiens
  source 1..4080: mol_type = unassigned DNA
ggagaaagagagacggagagagagagagacgcacagatgtgcacggaggccacagacactgacatttggaattccttcaggcggacggaatagacctcagcagcggcgtggtgaggacttagctgggacctggaatcgtatcctcctgtgttttttcagactccttggaaattaaggaatgcaattctgccaccatgatggaaggattgaaaaaacgtacaaggaaggcctttggaatacggaagaaagaaaaggacactgattctacaggttcaccagatagagatggaattaagaaaagcaatggggcaccaaatggattttatgcggaaattgattgggaaagatataactcacctgagctggatgaagaaggctacagcatcagacccgaggaacccggctctaccaaaggaaagcacttttattcttcaagtgaatcggaagaagaagaagaatcacataagaaatttaatatcaagattaaaccattgcaatctaaagacattcttaagaatgctgcaactgtagatgaattgaaggcatcaataggcaacatcgcactttccccatcaccagtgggtgcaattaaaaggaacttatccagtgaagaagtggcaagacccaggcgttccacaccaactccagaacttataagcaaaaagcctccagatgacactacggcccttgctcctctctttggcccaccactagaatcagcttttgatgaacagaagacagaagttcttttagatcagcctgagatatggggttcaggccaaccaattaatccaagcatggagtcgccaaagttaacaaggccttttcccactggaacacctccaccactgcctccaaaaaatgtaccagctaccccaccccgaacaggatcccccttaacaattggaccaggtgcatcatcccctgctcgaccagccactcctttggttccttgcagaagtaccactccacctccacctcctccccggcctccatcccggccaaagctacctccaggaaaacctggagttggagatgtgtccagaccttttagccctcccattcattcttccagccctcctccaatagcacccttagcgcgggctgaaagcacttcttcaatatcgtcaaccaattccttgagcgcagccaccactcccacagttgtgtcagaagacgatgttttttatgacaaactgccctcgtttgaaaggcgctgtgaaacgcctgcaggttcttccaggggacccagccccctaaccatgggagctcaggacactctccctgttgcagcagcatttacagaaacagtcaatgcctatttcaaaggagcagacccaagcaaatgtatcgttaagattaccggagaaatggtgttgtcatttcctgctggcatcaccagacactttgccaacaacccgtccccagctgctctgacttttcgggtgataaatttcagcaggttagaacacgtcctgccaaacccccaacttctctgctgtgataatacacaaaatgatgccaataccaaggaattctgggtaaacatgccaaatttgatgactcacctaaagaaagtgtctgaacaaaaaccccaggctacatattataacgttgacatgctcaaatatcaggtgtctgcccagggcattcagtccacacctctgaacctggcagtgaattggcgatgtgagccttcaagcactgacctgcgcatagattacaaatataatacagatgcaatgacgactgctgtggccctcaacaatgtgcagttcctggtccccatcgacggaggagtcaccaagctccaggcagtgctcccaccagcagtctggaatgctgaacaacagagaatattgtggaagattcctgatatctctcagaagtcagaaaatggaggggtgggttctttgttggcaagatttcagttatctgaaggcccaagcaaaccttctccattggttgtgcagttcacaagtgaaggaagcaccctttctggctgtgacattgaacttgttggagcagggtatcgattttcactcatcaagaaaaggtttgctgcaggaaaatacttggcagataactaatgaaatcttatgcaaggatttggaggattcatataatggagaactgatgtatgagaaacagattttaattttggtttgatgaaaacaaaccaatatctgcacttgggatatatcaggtggaaagtcaatgactttcatctgtgatttccctcacacactaccatgatgaccagtcctacagtatttacttctaggtgtaatattgttaatggttttaaaatgtaattattgtatttgtaaattgtactctcattccagtaaggcagttagacacttgagttttagcattttaccattcctgaaatggatgtaatttaaactgtggtatgtaaatttaatagtagtattgttgaatggcacaatgcttacagaggtagattgcattttgtcaatatataaaatttaaatataatattgatagctgtcataaagggggtgccacatattaaagaaacttaagtggaaccagaagaaaaagaaacaaacttacttttcttcaatgcttagtatgttttactctagtgctaaataaaaactctatcttcaaatgtttagtgggttaaattgagaaactatttcagaaaaaaattctaaggttacagcatattcaaagaaaagcattagttaccactttttaaaaagcttttttttcaaactgcaaatttcataaaaatgcaaactgtgtaaacagggcctcttatttttataacttgtgtaaaaagggaaagcaattcatatttaaagtttaagtatattaaattataatcaagagtaaagaagatgttgaagtcttaactacttgcccctctctacagtttcgcaaatgtggggattgctgaataatcagtcagactaaaaccaaaattgtgattttaagatttcaagactttccgtagttgaactggttaagaatttttgcttagttactctgaatagatgatcttactcatccagtatgggggaatgatacctcacgtcttcctctttacccacaggaatcaaaacgctgagactgagaattttagggaaaaaaaagtccactgtttagatccagaaggagagttttaatcattgtttatatcatttgagaatgaaaaaataagcttcataaatgaaattctattcacattactgtgtaataaatttccttttggatgattaggattcattgtataaaactgtaaatctttgccattcttggagaagcaaaaggagagttatcaaaaatgtatgtcgtttcatcgttgcaaggtataataaaaactgtaattattcaatctggccctgccatatgaacatttagaaagacaaacttcttcgggagtctcagttgtaaaaccttccctcattaatatctgaaaatgttagtcttcctttaagtcatagaacttatttaaacataaaccaatttctattacaggttatgctattaaatagctgtaattattaagttattatttttataattagttgttaaatttcattttacacccactcaaatttaacaaagaatctttagcccctttaaattttagaattaaattaaatttttaaagttttacttctaaaatgagattgtgactggcaattgtttatagtgaaactttttaaattaatctttgtactcctctatcagtgcttgctaccaagagaatgtccaaaatgatttgttttaccatgggaaaattcttactattcaacaaactctcagttggccccctacagcagtctggtgttgaagtttctttgaacgaactaaatatactcattttatgtaaaggtatccaatttgattttgaaaccaaaatagaaaatgcaaaattctaaattccatgaaacatggaatttatgacaccaaaatcaatggagagtaagcagcagcaaactgagaattatccagcatatgaatataacaatgtgtttttaagtaatcaattcatttaaaaaattgaatattaatacaaagcatattaaaaacatgtaaatatta

SEQ ID NO: 27960 - DNA, 7876 bp, Homo sapiens
  source 1..7876: mol_type = unassigned DNA
caccagcagcatccatggcctgtcttttggcttaacacttatctcctttggctttgacagcggacggaatagacctcagcagcggcgtggtgaggacttagctgggacctggaatcgtatcctcctgtgttttttcagactccttggaaattaaggaatgcaattctgccaccatgatggaaggattgaaaaaacgtacaaggaaggcctttggaatacggaagaaagaaaaggacactgattctacaggttcaccagatagagatggaattcaggggaaaaaaaagacccagaagactcagcttctcctcacctcttgcttctggctcagagccctctcgttaactctgtctcagaagaaaagcaatggggcaccaaatggattttatgcggaaattgattgggaaagatataactcacctgagctggatgaagaaggctacagcatcagacccgaggaacccggctctaccaaaggaaagcacttttattcttcaagtgaatcggaagaagaagaagaatcacataagaaatttaatatcaagattaaaccattgcaatctaaagacattcttaagaatgctgcaactgtagatgaattgaaggcatcaataggcaacatcgcactttccccatcaccagtgagaaagaaagaaagaagagagaaaggtgcaattaaaaggaacttatccagtgaagaagtggcaagacccaggcgttccacaccaactccagaacttataagcaaaaagcctccagatgacactacggcccttgctcctctctttggcccaccactagaatcagcttttgatgaacagaagacagaagttcttttagatcagcctgagatatggggttcaggccaaccaattaatccaagcatggagtcgccaaagttaacaaggccttttcccactggaacacctccaccactgcctccaaaaaatgtaccagctaccccaccccgaacaggatcccccttaacaattggaccaggaaatgaccagtcagccacagaggtcaaaattgaaaaactaccatccatcaatgacttggacagcatttttgggccagtattgtcccccaagtctgttgctgttaatgctgaagaaaagtgggtccatttttctgatacatccccggaacatgttactccggagttgactccaagggaaaaagtggtgtccccaccagctacaccagacaacccagctgactccccagctccaggccctctcggccccccaggtcccacaggccccccagggcctcctgggcctcctcgcaatgtactatcgccgctcaatttagaagaagtccagaagaaagtcgctgagcagaccttcattaaagatgattacttagaaacaatctcatctcctaaagattttgggttgggacaaagagcaactccacctcccccaccaccacccacctacaggactgtggtttcgtcccccggacctggctcgggccctggtccggggaccaccagtggtgcatcatcccctgctcgaccagccactcctttggttccttgcagaagtaccactccacctccacctcctccccggcctccatcccggccaaagctacctccaggaaaacctggagttggagatgtgtccagaccttttagccctcccattcattcttccagccctcctccaatagcacccttagcgcgggctgaaagcacttcttcaatatcgtcaaccaattccttgagcgcagccaccactcccacagttgagaatgaacagccttccctcgtttggtttgacagaggaaagttttatttgacttttgaaggttcttccaggggacccagccccctaaccatgggagctcaggacactctccctgttgcagcagcatttacagaaacagtcaatgcctatttcaaaggagcagacccaagcaaatgtatcgttaagattaccggagaaatggtgttgtcatttcctgctggcatcaccagacactttgccaacaacccgtccccagctgctctgacttttcgggtgataaatttcagcaggttagaacacgtcctgccaaacccccaacttctctgctgtgataatacacaaaatgatgccaataccaaggaattctgggtaaacatgccaaatttgatgactcacctaaagaaagtgtctgaacaaaaaccccaggctacatattataacgttgacatgctcaaatatcaggtgtctgcccagggcattcagtccacacctctgaacctggcagtgaattggcgatgtgagccttcaagcactgacctgcgcatagattacaaatataatacagatgcaatgacgactgctgtggccctcaacaatgtgcagttcctggtccccatcgacggaggagtcaccaagctccaggcagtgctcccaccagcagtctggaatgctgaacaacagagaatattgtggaagattcctgatatctctcagaagtcagaaaatggaggggtgggttctttgttggcaagatttcagttatctgaaggcccaagcaaaccttctccattggttgtgcagttcacaagtgaaggaagcaccctttctggctgtgacattgaacttgttggagcagggtatcgattttcactcatcaagaaaaggtttgctgcaggaaaatacttggcagataactaatgaaatcttatgcaaggatttggaggattcatataatggagaactgatgtatgagaaacagattttaattttggtttgatgaaaacaaaccaatatctgcacttgggatatatcaggtggaaagtcaatgactttcatctgtgatttccctcacacactaccatgatgaccagtcctacagtatttacttctaggtgtaatattgttaatggttttaaaatgtaattattgtatttgtaaattgtactctcattccagtaaggcagttagacacttgagttttagcattttaccattcctgaaatggatgtaatttaaactgtggtatgtaaatttaatagtagtattgttgaatggcacaatgcttacagaggtagattgcattttgtcaatatataaaatttaaatataatattgatagctgtcataaagggggtgccacatattaaagaaacttaagtggaaccagaagaaaaagaaacaaacttacttttcttcaatgcttagtatgttttactctagtgctaaataaaaactctatcttcaaatgtttagtgggttaaattgagaaactatttcagaaaaaaattctaaggttacagcatattcaaagaaaagcattagttaccactttttaaaaagcttttttttcaaactgcaaatttcataaaaatgcaaactgtgtaaacagggcctcttatttttataacttgtgtaaaaagggaaagcaattcatatttaaagtttaagtatattaaattataatcaagagtaaagaagatgttgaagtcttaactacttgcccctctctacagtttcgcaaatgtggggattgctgaataatcagtcagactaaaaccaaaattgtgattttaagatttcaagactttccgtagttgaactggttaagaatttttgcttagttactctgaatagatgatcttactcatccagtatgggggaatgatacctcacgtcttcctctttacccacaggaatcaaaacgctgagactgagaattttagggaaaaaaaagtccactgtttagatccagaaggagagttttaatcattgtttatatcatttgagaatgaaaaaataagcttcataaatgaaattctattcacattactgtgtaataaatttccttttggatgattaggattcattgtataaaactgtaaatctttgccattcttggagaagcaaaaggagagttatcaaaaatgtatgtcgtttcatcgttgcaaggtataataaaaactgtaattattcaatctggccctgccatatgaacatttagaaagacaaacttcttcgggagtctcagttgtaaaaccttccctcattaatatctgaaaatgttagtcttcctttaagtcatagaacttatttaaacataaaccaatttctattacaggttatgctattaaatagctgtaattattaagttattatttttataattagttgttaaatttcattttacacccactcaaatttaacaaagaatctttagcccctttaaattttagaattaaattaaatttttaaagttttacttctaaaatgagattgtgactggcaattgtttatagtgaaactttttaaattaatctttgtactcctctatcagtgcttgctaccaagagaatgtccaaaatgatttgttttaccatgggaaaattcttactattcaacaaactctcagttggccccctacagcagtctggtgttgaagtttctttgaacgaactaaatatactcattttatgtaaaggtatccaatttgattttgaaaccaaaatagaaaatgcaaaattctaaattccatgaaacatggaatttatgacaccaaaatcaatggagagtaagcagcagcaaactgagaattatccagcatatgaatataacaatgtgtttttaagtaatcaattcatttaaaaaattgaatattaatacaaagcatattaaaaacatgtaaatattactggttctcatgtctttgtatttatattttattttgttttattttgtatagatctagaatgaattagtaattaaacacaagggtttttttcccaaaaaataattttactgatttttaaaaatttaattaaaaacatagattacagtaatctctaacattattcaaatctttctagggattaaattagaaactatgaagaaatcctataatctcttaactggtctttatggaacagaatgggagtcaacaatttcaaaatgattgaactatgagtaaccagaacctcaatagaaaatgtatcccttcacctttcagaaaagagatcaaataataacacaataagctggtatcagggatttgcattttgacattttgttgtttctttttaattttgtagattataatctcctgttacatctatatccacagtactgtagaataagaattcatgtcctgaaaatggtcccaggcaatgaaagagtctcagttatcaaagacattaagtcagattcatttattcattttattcccaagtcagaacaaaatgaactagtaggtaataaaactattttcagtactaggggttaaaacaaaaagaaattgttctagttaaccagaacaccatttcctgaacgttatgatctttaaaaggttctgctttagcaagataaaaagtataaatgatgctactttattttggcaacatggaaattttgtttttcttttccaataaaatccatattttcgtgaaatttttaaaaataaatttgtatcaaggattagtctgaattttatcataatagaaatttataattactaagaattaaatttttaatcatttttaaagctgtgttcttctctacacccacagccaaaatggaaattcactgtatggtatttgggaatatatttcacctgtaaaagaaagaatgtccacaattcaaacggttttgagttaatagataggaatccctcagtcaaactacagaattttttttgttttatatattcttagtcagcagagtgtttgagctataattacaagtatttccacttctaaatcttcttttagaaaagcagataactataataccttggctctgccactgactcctgccgtatgatattggacaaatcactgcccttttcagtttctcatctttagaatggggagttgggattgccagtggttttcaagcttttcttaacagcagggctttttttctaataaaattgcacatggaatcctggtaggcaaaacagctcaaagcaatgcaggagtttctccaacagtttaaattggggctccccagagcatggtttaaataccataacagtacacaatgatctatcatgtgtcttccaactctgaagttccacagttgtaatttactcagataaaccaccttttgaggctttataagcaaacttgtaaaaacacagtaattgaatgatatacaataaaaactgacagagtgtttaccatgtaccagtcactagagatattagctcatttaattctcttatcaatcaaaaaattgtaagtactctttttaattcctgttttacaagtgatgacactgaggcttaaatagaataatctccccaaaatgacacggcagctgaaagtaacccagctattctgactgcaaaggaaacgccttaattgctttgtccaccctgaacaaaacaatctgttttatgtcactatacgtactccatttgaatgccaaggtagaaggcaccatgaaaaaccattaccaaaataaggataattccaataacaaaactgtcaaaaaagaatcactgcttctcaaaatatgattggtatcatcacttattaatgttttgtatcatcacttattaatgattttggcttggtcaccactatgcctggaagatagtaggcactgataaacattgttaaacaccgtaacaacacaaaatgatctaccacatatcaatgtcttccatctctgaaattccatgattctactttactcagatataccaccttttgtggcattataaggaaacatgtataatcaagttcatacaagctatacacagtaggcatcgataaatttgtattgacagcataaacttctagggatgagatttgggaatatacattttgataagtgctccaaatttgagaatcattgctctagtagatctctaaggtccttcttagttctgacattatatcagattttaagcattaaattctaagatgaaaaccatttttctagtcagtttatttttcattcagtccacttaatttcctccaatcttaaaaaatttttttccctaggaaaatccctatctttttcttaaagttactctgttatactatctcagtctcaaagtagcctgaaatgcattttctcattttcatatttctgtccttttcttcaatgtcttaaaagacttgaagtagaagggaagttgcaagctgttatttattcaaatacaaaatcctaatcaatgtttccttctttgcaagggacattcagatctctaacttgtgagttgaacctatttattttgtaagcttttgactttacaaacatgtggtagcctcattctaaaagagttgcacgaatattttttctcaaaataaccacaggctgtaaattaaattgaacaatacagtagaatatgcagatacatactaaacagatgagtgtgtgtgtatgtgtctgtgtttaagcttttccttttccaaaagattatacatttgagcaaaatcccattcagtctaaatgtactcattttgccacatggttttctgatcagcaatttttttaaaaaatggaagtgttacattatatttaataatatcaaaacaagagtgatctctaaatatagctttgaaagttaatataatatgatgtgtccatgcaatgagtcaaattagattgttgatataaatgaacaaatcaatccaagttacattgattaaagggactatttggatgaccagcctcaccatcttttactgtgtgcactttcctcttaaggttttattgtattttccctgctcctttaggcttttttttcatgtggaaaacagtatctaaatgccattctctcacttatgaattaaatatggctaccattaatgttcctttttgtcagtggagtgtatggaaggaaaatgagataggagtacattgcttaagtctctaaatattaaaaacaacaacaaaac

SEQ ID NO: 27961 - DNA, 951 bp, Homo sapiens
  source 1..951: mol_type = unassigned DNA
gagagacgcacagatgtgcacggaggccacagacactgacatttggaattccttcaggcggacggaatagacctcagcagcggcgtggtgaggacttagctgggacctggaatcgtatcctcctgtgttttttcagactccttggaaattaaggaatgcaattctgccaccatgatggaaggattgaaaaaacgtacaaggaaggcctttggaatacggaagaaagaaaaggacactgattctacaggttcaccagatagagatggaattcagcccagcccacacgaaccaccctacaatagcaaagcagagtgtgcgcgtgaaggaggaaaaaaagtttcgaagaaaagcaatggggcaccaaatggattttatgcggaaattgattgggaaagatataactcacctgagctggatgaagaaggctacagcatcagacccgaggaacccggctctaccaaaggaaagcacttttattcttcaagtgaatcggaagaagaagaagaatcacataagaaatttaatatcaagattaaaccattgcaatctaaagacattcttaagaatgctgcaactgtagatgaattgaaggcatcaataggcaacatcgcactttccccatcaccagtgggtgcaattaaaaggaacttatccagtgaagaagtggcaagacccaggcgttccacaccaactccagaacttataagcaaaaagcctccagatgacactacggcccttgctcctctctttggcccaccactagaatcagcttttgatgaacagaagacagaagttcttttagatcagcctgagatatggggttcaggccaaccaattaatccaagcatggagtcgccaaagttaacaaggccttttcccactggaacacctccaccactgcctccaaaaaatgtaccagctaccccaccccgaacaggatcccccttaaca

SEQ ID NO: 27962 - DNA, 3646 bp, Homo sapiens
  source 1..3646: mol_type = unassigned DNA
aaaaacagcaggttgcatgacagtttctcagtgaagaggttcaaaaaaggtgagatgctattgctttgtgaatttacaaaggaaagaataatttaactgctcagaattacatgtccggtcactgctttttaatttaaaaaataatagagcatcattagtaatcttgttttctctttgatacataggtaaagggtgttttgtgtctggatgcctaaggtgattccaagggaggggatggaagatatgtgacatcttccctgaaatttatattgatatgcaatgctttgtcatttaaaacctaagctaatgttttctacaatccataactctgagtttatctttttggaaacatagaaggggatgacattgaagatgaaatggatacagcaattgctgaatgacagtttgcccaaattagtgcagttaaaatatgctgacgcccctgcatggccaggaagacttctgctccatgcacacaagcaccaagtatcaagcgaccaccaacacattcccattcctttaggcctccatagctttgcttttgctttctgtttcctgaactaaaaaaaaaaaaaaaagtgtagattgccagccttccctttttcctgcacgctaatggcatgtagtgcctccacccttccctatagtgagattaatgacctgctctgtaactcacattgtgtccttctctctccctttccttaacccttcccatcccgcttcaactcctggccatacagagaatgaacagccttccctcgtttggtttgacagaggaaagttttatttgacttttgaaggttcttccaggggacccagccccctaaccatgggagctcaggacactctccctgttgcagcagcatttacagaaacagtcaatgcctatttcaaaggagcagacccaagcaaatgtatcgttaagattaccggagaaatggtgttgtcatttcctgctggcatcaccagacactttgccaacaacccgtccccagctgctctgacttttcgggtgataaatttcagcaggttagaacacgtcctgccaaacccccaacttctctgctgtgataatacacaaaatgatgccaataccaaggaattctgggtaaacatgccaaatttgatgactcacctaaagaaagtgtctgaacaaaaaccccaggctacatattataacgttgacatgctcaaatatcaggtgtctgcccagggcattcagtccacacctctgaacctggcagtgaattggcgatgtgagccttcaagcactgacctgcgcatagattacaaatataatacagatgcaatgacgactgctgtggccctcaacaatgtgcagttcctggtccccatcgacggaggagtcaccaagctccaggcagtgctcccaccagcagtctggaatgctgaacaacagagaatattgtggaagattcctgatatctctcagaagtcagaaaatggaggggtgggttctttgttggcaagatttcagttatctgaaggcccaagcaaaccttctccattggttgtgcagttcacaagtgaaggaagcaccctttctggctgtgacattgaacttgttggagcagggtatcgattttcactcatcaagaaaaggtttgctgcaggaaaatacttggcagataactaatgaaatcttatgcaaggatttggaggattcatataatggagaactgatgtatgagaaacagattttaattttggtttgatgaaaacaaaccaatatctgcacttgggatatatcaggtggaaagtcaatgactttcatctgtgatttccctcacacactaccatgatgaccagtcctacagtatttacttctaggtgtaatattgttaatggttttaaaatgtaattattgtatttgtaaattgtactctcattccagtaaggcagttagacacttgagttttagcattttaccattcctgaaatggatgtaatttaaactgtggtatgtaaatttaatagtagtattgttgaatggcacaatgcttacagaggtagattgcattttgtcaatatataaaatttaaatataatattgatagctgtcataaagggggtgccacatattaaagaaacttaagtggaaccagaagaaaaagaaacaaacttacttttcttcaatgcttagtatgttttactctagtgctaaataaaaactctatcttcaaatgtttagtgggttaaattgagaaactatttcagaaaaaaattctaaggttacagcatattcaaagaaaagcattagttaccactttttaaaaagcttttttttcaaactgcaaatttcataaaaatgcaaactgtgtaaacagggcctcttatttttataacttgtgtaaaaagggaaagcaattcatatttaaagtttaagtatattaaattataatcaagagtaaagaagatgttgaagtcttaactacttgcccctctctacagtttcgcaaatgtggggattgctgaataatcagtcagactaaaaccaaaattgtgattttaagatttcaagactttccgtagttgaactggttaagaatttttgcttagttactctgaatagatgatcttactcatccagtatgggggaatgatacctcacgtcttcctctttacccacaggaatcaaaacgctgagactgagaattttagggaaaaaaaagtccactgtttagatccagaaggagagttttaatcattgtttatatcatttgagaatgaaaaaataagcttcataaatgaaattctattcacattactgtgtaataaatttccttttggatgattaggattcattgtataaaactgtaaatctttgccattcttggagaagcaaaaggagagttatcaaaaatgtatgtcgtttcatcgttgcaaggtataataaaaactgtaattattcaatctggccctgccatatgaacatttagaaagacaaacttcttcgggagtctcagttgtaaaaccttccctcattaatatctgaaaatgttagtcttcctttaagtcatagaacttatttaaacataaaccaatttctattacaggttatgctattaaatagctgtaattattaagttattatttttataattagttgttaaatttcattttacacccactcaaatttaacaaagaatctttagcccctttaaattttagaattaaattaaatttttaaagttttacttctaaaatgagattgtgactggcaattgtttatagtgaaactttttaaattaatctttgtactcctctatcagtgcttgctaccaagagaatgtccaaaatgatttgttttaccatgggaaaattcttactattcaacaaactctcagttggccccctacagcagtctggtgttgaagtttctttgaacgaactaaatatactcattttatgtaaaggtatccaatttgattttgaaaccaaaatagaaaatgcaaaattctaaattccatgaaacatggaatttatgacaccaaaatcaatggagagtaagcagcagcaaactgagaattatccagcatatgaatataacaatgtgtttttaagtaatcaattcatttaaaaaattgaatattaatacaaagcatattaaaaacatgtaaatatt

SEQ ID NO: 27963 - DNA, 2465 bp, Homo sapiens
  source 1..2465: mol_type = unassigned DNA
gggcgcggagctggcaagcgggtggcggaggcggcgccgacggggactgctgaggcgcgcagagggtcggcggcgcccgggagcctgtcgctggcgcggtccgggcgggaggctcggcggcgggcggcagcatgtcggtggcggggctgaagaagcagttctacaaggcgagccagctggtcagtgagaaggtcggaggggccgaggggaccaagctggatgatgacttcaaagagatggagaagaaggtggatgtcaccagcaaggcggtgacagaagtgctggccaggaccatcgagtacctgcagcccaacccagcctcgcgggctaagctgaccatgctcaacacggtgtccaagatccggggccaggtgaagaaccccggctacccgcagtcggaggggcttctgggcgagtgcatgatccgccacgggaaggagctgggcggcgagtccaactttggtgacgcattgctggatgccggcgagtccatgaagcgcctggcagaggtgaaggactccctggacatcgaggtcaagcagaacttcattgaccccctccagaacctgtgcgagaaagacctgaaggagatccagcaccacctgaagaaactggagggccgccgcctggactttgactacaagaagaagcggcagggcaagatccccgatgaggagctacgccaggcgctggagaagttcgaggagtccaaggaggtggcagaaaccagcatgcacaacctcctggagactgacatcgagcaggtgagtcagctctcggccctggtggatgcacagctggactaccaccggcaggccgtgcagatcctggacgagctggcggagaagctcaagcgcaggatgcgggaagcttcctcacgccctaagcgggagtataagcccaagccccgggagccctttgaccttggagagcctgagcagtccaacgggggcttcccctgcaccacagcccccaagatcgcagcttcatcgtctttccgatcttccgacaagcccatccggacccctagccggagcatgccgcccctggaccagccgagctgcaaggcgctgtacgacttcgagcccgagaacgacggggagctgggcttccatgagggcgacgtcatcacgctgaccaaccagatcgatgagaactggtacgagggcatgctggacggccagtcgggcttcttcccgctcagctacgtggaggtgcttgtgcccctgccgcagtgactcacccgtgtccccgccccgcccctccgtccacactggccggcaccccctgctgggtctcctgcattccacggagcccctgctgccagggcggtgtctgagcctgccggcgccacctgggccccggcccttgaggtactccctgagcaggaccccacacttgggtgggggggcttatctgggtgggtggggatgcctgtttacactagcgctgactcccaacggtgacggctcccttccccactccatggcgccagcctcctcccccgctccccaacttctcgcccagctggccgaggcggggcaacactaaggtgctcttagaaacactaatgttcctctggggcagcccccacctccgtcctgacccgacgggggcccggcccactgcctaccctcgagtcccgcagccttaacaggatgggatcgagggtccccatggggtggctcagagataggaccctggttttaaatccctcccagcctggtgctggtgatgggccctggccctactccagggccaatgcacccccgcctcacacacgcactccttctcctcaaggccagggcagagggcctcaccgcctcccgggcctgctgtcagcttgcagcccggggacagaggccagctgggatctgcctgaggacagagaacatggtctcctgcagggccctgcctcccaagccccgccctcagaaagccaagtaccttttcagctttttaactgcccccatcccaacccagggaggcctgtgtcactctggcacaagctgccaccaccagccacccacacccaccccagcacacctcacacgggaccacagccgcgctgccgagggccaagcacaaaggttccagtgagcgcatgtcccagcccctggtggccaggctccccttgctgagccgctgccacttcaccctgtgggaagtggccccagccatctcctctagaccaaggcaggcagccccgacatctgcttcctctatcgcccaatgcaaaatcgatgaaatggggagttctctgggccaggccacattcacattcccctccccctgtggtccagtgaagcctccggaccccaggctctgctctgccctgccctgcacccccctcgtcagaagtacatgaggggcgcagagatgagcacacagctttgggcacggtccagggcaaactgaaatgtacgcctgaattttgtaaacagaagtattaaatgtctctttct

SEQ ID NO: 27964 - DNA, 1404 bp, Homo sapiens
  source 1..1404: mol_type = unassigned DNA
gcgagcggctgaggcggcgccggggcgggcgcggagctggcaagcgggtggcggaggcggcgccgacggggactgctgaggcgcgcagagggtcggcggcgcccgggagcctgtcgctggcgcggtccgggcgggaggctcggcggcgggcggcagcatgtcggtggcggggctgaagaagcagttctacaaggcgagccagctggtcagtgagaaggtcggaggggccgaggggaccaagctggatgatgacttcaaagagatggagaagaaggtggatgtcaccagcaaggcggtgacagaagtgctggccaggaccatcgagtacctgcagcccaacccaggtgacgcattgctggatgccggcgagtccatgaagcgcctggcagaggtgaaggactccctggacatcgaggtcaagcagaacttcattgaccccctccagaacctgtgcgagaaagacctgaaggagatccagcaccacctgaagaaactggagggccgccgcctggactttgactacaagaagaagcggcagggcaagatccccgatgaggagctacgccaggcgctggagaagttcgaggagtccaaggaggtggcagaaaccagcatgcacaacctcctggagactgacatcgagcaggtgagtcagctctcggccctggtggatgcacagctggactaccaccggcaggccgtgcagatcctggacgagctggcggagaagctcaagcgcaggatgcgggaagcttcctcacgccctaagcgggagtataagcccaagccccgggagccctttgaccttggagagcctgagcagtccaacgggggcttcccctgcaccacagcccccaagatcgcagcttcatcgtctttccgatcttccgacaagcccatccggacccctagccggagcatgccgcccctggaccagccgagctgcaaggcgctgtacgacttcgagcccgagaacgacggggagctgggcttccatgagggcgacgtcatcacgctgaccaaccagatcgatgagaactggtacgagggcatgctggacggccagtcgggcttcttcccgctcagctacgtggaggtgcttgtgcccctgccgcagtgactcacccgtgtccccgccccgcccctccgtccacactggccggcaccccctgctgggtctcctgcattccacggagcccctgctgccagggcggtgtctgagcctgccggcgccacctgggccccggcccttgaggtactccctgagcaggaccccacacttgggtgggggggcttatctgggtgggtggggatgcctgtttacactagcgctgactcccaacggtgacggctcccttccccactccatggcgccagcctcctcccccgctccccaacttctcg

SEQ ID NO: 27965 - DNA, 2194 bp, Homo sapiens
  source 1..2194: mol_type = unassigned DNA
agcctgtcgctggcgcggtccgggcgggaggctcggcggcgggcggcagcatgtcggtggcggggctgaagaagcagttctacaaggcgagccagctggtcagtgagaaggtcggaggggccgaggggaccaagctggatgatgacttcaaagagatggagaagaaggtggatgtcaccagcaaggcggtgacagaagtgctggccaggaccatcgagtacctgcagcccaacccagcctcgcgggctaagctgaccatgctcaacacggtgtccaagatccggggccagaacctgtgcgagaaagacctgaaggagatccagcaccacctgaagaaactggagggccgccgcctggactttgactacaagaagaagcggcagggcaagatccccgatgaggagctacgccaggcgctggagaagttcgaggagtccaaggaggtggcagaaaccagcatgcacaacctcctggagactgacatcgagcaggtgagtcagctctcggccctggtggatgcacagctggactaccaccggcaggccgtgcagatcctggacgagctggcggagaagctcaagcgcaggatgcgggaagcttcctcacgccctaagcgggagtataagcccaagccccgggagccctttgaccttggagagcctgagcagtccaacgggggcttcccctgcaccacagcccccaagatcgcagcttcatcgtctttccgatcttccgacaagcccatccggacccctagccggagcatgccgcccctggaccagccgagctgcaaggcgctgtacgacttcgagcccgagaacgacggggagctgggcttccatgagggcgacgtcatcacgctgaccaaccagatcgatgagaactggtacgagggcatgctggacggccagtcgggcttcttcccgctcagctacgtggaggtgcttgtgcccctgccgcagtgactcacccgtgtccccgccccgcccctccgtccacactggccggcaccccctgctgggtctcctgcattccacggagcccctgctgccagggcggtgtctgagcctgccggcgccacctgggccccggcccttgaggtactccctgagcaggaccccacacttgggtgggggggcttatctgggtgggtggggatgcctgtttacactagcgctgactcccaacggtgacggctcccttccccactccatggcgccagcctcctcccccgctccccaacttctcgcccagctggccgaggcggggcaacactaaggtgctcttagaaacactaatgttcctctggggcagcccccacctccgtcctgacccgacgggggcccggcccactgcctaccctcgagtcccgcagccttaacaggatgggatcgagggtccccatggggtggctcagagataggaccctggttttaaatccctcccagcctggtgctggtgatgggccctggccctactccagggccaatgcacccccgcctcacacacgcactccttctcctcaaggccagggcagagggcctcaccgcctcccgggcctgctgtcagcttgcagcccggggacagaggccagctgggatctgcctgaggacagagaacatggtctcctgcagggccctgcctcccaagccccgccctcagaaagccaagtaccttttcagctttttaactgcccccatcccaacccagggaggcctgtgtcactctggcacaagctgccaccaccagccacccacacccaccccagcacacctcacacgggaccacagccgcgctgccgagggccaagcacaaaggttccagtgagcgcatgtcccagcccctggtggccaggctccccttgctgagccgctgccacttcaccctgtgggaagtggccccagccatctcctctagaccaaggcaggcagccccgacatctgcttcctctatcgcccaatgcaaaatcgatgaaatggggagttctctgggccaggccacattcacattcccctccccctgtggtccagtgaagcctccggaccccaggctctgctctgccctgccctgcacccccctcgtcagaagtacatgaggggcgcagagatgagcacacagctttgggcacggtccagggcaaactgaaatgtacgcctgaattttgtaaacagaagtattaaatgtctctttctac

SEQ ID NO: 27966 - DNA, 2565 bp, Homo sapiens
  source 1..2565: mol_type = unassigned DNA
atagccccggcggcggcacgaccagaggcggccaggggagcgcgccgccccgctcggccctccagtccccctccgcctcctccctcccgcacagcagccgccagcgcggcctcctgcaccatgtcggtggccggcctcaagaagcagttccataaagccactcagaaagtgagtgagaaggttggaggagctgaaggaaccaagctagatgatgacttcaaagagatggaaaggaaagtggatgtcaccagcagggctgtgatggaaataatgactaaaacaattgaataccttcaacccaatccagcttccagagctaagctcagcatgatcaacaccatgtcaaaaatccgtggccaggagaaggggccaggctatcctcaggcagaggcgctgctggcagaggccatgctcaaatttggaagagagcttggagatgattgcaactttggcccagcacttggtgaggtcggggaggccatgcgggaactgtcggaggtcaaagactctttggacatagaagtgaagcagaacttcattgaccctcttcagaatcttcatgacaaagatcttagggaaattcaacatcatctaaagaagttggagggtcgacgcctggattttgattataagaagaaacgacaaggcaagattccggatgaagagcttcgtcaagctctagagaaatttgatgagtctaaggaaattgctgagtcaagcatgttcaatctcttggagatggatattgaacaagtgagccagctctctgcacttgtgcaagctcagctggagtaccacaagcaggcagtccagatcctgcagcaagtcacggtcagactggaagaaagaataagacaggcttcatctcagcctagaagggaatatcaacctaaaccacgaatgagcctggagtttccaactggagacagtactcagcccaatgggggtctctcccacacaggcactcccaaaccttcaggtgtccaaatggatcagccctgctgccgagctctgtacgactttgaacctgaaaatgaaggggagttgggatttaaagagggcgatatcatcacactcactaaccaaattgatgagaactggtatgaggggatgctgcatggccattcaggcttcttccccatcaattatgtggaaattctggttgccctgccccattaggatgttatgctggctggctcgcctcctcttgacccagatagttacggttaaccactgctttggcaatgctgcttataacacatcccaagtgcaggccgcagtggtccacgtcatccagccccaccaagtgactttggttgacttgtgggctcccacaggagtcatggtgatggatgatatcctcttagcctggtgggcgtggcatgtgctttttaaaacatcatctgagaccagccagtagtcacagaactgctgtttacacagttctcaggaggctgtggtttcttagaatatgaccatgagccatttcacagaaaaaccatcccaccgaagatattgtctatcaccccaggggccatctgaaggtctctttgcatttctccatgcaaagaggagaaagcttttgctttcacactgtcccttcccaaatatgtgagtcatggaattgtcaaagtaagccttccctcaccagcaaattgtctcctgatctgaatgaatttgtctcttaatgcatccatagaaaagtgttaattgtgggttcaaagcattctctgcaaataggcatctcagctcctcacacttatggctatttctgacgtatagccagttttcttccctccttgctattaaagccagagcggtaattccaaattatttttcagtaagacagttaatcagcattattgtgagagggactgaaaagaaattctccattatgaggaattgggaagaaatctggtatccaagcttaaatttcttgctatacagaaactatgtatgtatttaggctatttctgaagggcacagggaagggggaacaaatatcttcacttcagttttatttgtgaattacatgtttcatgaatccatttggcacagagacacaaggaagaaaacactagtaaccatctttccactagttcatatactgagaaacagtaaatacctttcctttccacttttaccctgtgttctttgaacatcatttgtgcagattctgccctcaatgaggaccaaataaagatgatttttgtgcttagcagtttaaggtatatggctgcatatgcaaaactctttcccaattcagtcgctacttttacttctgccctttctatccatcgtcttcattttgtgtgtacagtgctgtgtgtaagcttatcagtgtgtttttttatttgtatcagtcatgaaagtcctgttaggtatgcagagttctatttatctagctgtacagactctttcagaggtttaacgtgctgcttccgatgtgccacctgcagtagtggatcatgtggagtgaaaggcaaatcttactgcttaatgtataaactctcaccacaggaagcatcgctgtttccaataaatattgctgaagacagaaccaaa

SEQ ID NO: 27967 - DNA, 2658 bp, Homo sapiens
  source 1..2658: mol_type = unassigned DNA
gttggcgccagcatccaggtaccgcgcgccacagcacctgcctgggcgttcccgcgcttggggcggggcttcccgcgtcccctttaagaggccgcatcacccgcccttgacgtcagagtgtttctccgcaagagcccgtgtcccgctaggctccgcgccctcgcgcccatagccccggcggcggcacgaccagaggcggccaggggagcgcgccgccccgctcggccctccagtccccctccgcctcctccctcccgcacagcagccgccagcgcggcctcctgcaccatgtcggtggccggcctcaagaagcagttccataaagccactcagaaagtgagtgagaaggttggaggagctgaaggaaccaagctagatgatgacttcaaagagatggaaaggaaagtggatgtcaccagcagggctgtgatggaaataatgactaaaacaattgaataccttcaacccaatccaggatccctcgaggcagaggcgctgctggcagaggccatgctcaaatttggaagagagcttggagatgattgcaactttggcccagcacttggtgaggtcggggaggccatgcgggaactgtcggaggtcaaagactctttggacatagaagtgaagcagaacttcattgaccctcttcagaatcttcatgacaaagatcttagggaaattcaacatcatctaaagaagttggagggtcgacgcctggattttgattataagaagaaacgacaaggcaagattccggatgaagagcttcgtcaagctctagagaaatttgatgagtctaaggaaattgctgagtcaagcatgttcaatctcttggagatggatattgaacaagtgagccagctctctgcacttgtgcaagctcagctggagtaccacaagcaggcagtccagatcctgcagcaagtcacggtcagactggaagaaagaataagacaggcttcatctcagcctagaagggaatatcaacctaaaccacgaatgagcctggagtttccaactggagacagtactcagcccaatgggggtctctcccacacaggcactcccaaaccttcaggtgtccaaatggatcagccctgctgccgagctctgtacgactttgaacctgaaaatgaaggggagttgggatttaaagagggcgatatcatcacactcactaaccaaattgatgagaactggtatgaggggatgctgcatggccattcaggcttcttccccatcaattatgtggaaattctggttgccctgccccattaggatgttatgctggctggctcgcctcctcttgacccagatagttacggttaaccactgctttggcaatgctgcttataacacatcccaagtgcaggccgcagtggtccacgtcatccagccccaccaagtgactttggttgacttgtgggctcccacaggagtcatggtgatggatgatatcctcttagcctggtgggcgtggcatgtgctttttaaaacatcatctgagaccagccagtagtcacagaactgctgtttacacagttctcaggaggctgtggtttcttagaatatgaccatgagccatttcacagaaaaaccatcccaccgaagatattgtctatcaccccaggggccatctgaaggtctctttgcatttctccatgcaaagaggagaaagcttttgctttcacactgtcccttcccaaatatgtgagtcatggaattgtcaaagtaagccttccctcaccagcaaattgtctcctgatctgaatgaatttgtctcttaatgcatccatagaaaagtgttaattgtgggttcaaagcattctctgcaaataggcatctcagctcctcacacttatggctatttctgacgtatagccagttttcttccctccttgctattaaagccagagcggtaattccaaattatttttcagtaagacagttaatcagcattattgtgagagggactgaaaagaaattctccattatgaggaattgggaagaaatctggtatccaagcttaaatttcttgctatacagaaactatgtatgtatttaggctatttctgaagggcacagggaagggggaacaaatatcttcacttcagttttatttgtgaattacatgtttcatgaatccatttggcacagagacacaaggaagaaaacactagtaaccatctttccactagttcatatactgagaaacagtaaatacctttcctttccacttttaccctgtgttctttgaacatcatttgtgcagattctgccctcaatgaggaccaaataaagatgatttttgtgcttagcagtttaaggtatatggctgcatatgcaaaactctttcccaattcagtcgctacttttacttctgccctttctatccatcgtcttcattttgtgtgtacagtgctgtgtgtaagcttatcagtgtgtttttttatttgtatcagtcatgaaagtcctgttaggtatgcagagttctatttatctagctgtacagactctttcagaggtttaacgtgctgcttccgatgtgccacctgcagtagtggatcatgtggagtgaaaggcaaatcttactgcttaatgtataaactctcaccacaggaagcatcgctgtttccaataaatattgctgaagac

SEQ ID NO: 27968 - DNA, 1282 bp, Homo sapiens
  source 1..1282: mol_type = unassigned DNA
acagagttgattgaggcagtaggaaatgggaagataaagctggcagctctttccacacatggaaagcataataggaaagaagggcttaagttagcagaaagtgagtgagaaggttggaggagctgaaggaaccaagctagatgatgacttcaaagagatggaaaggtccttttgttgctccacaaacaacgccacgctgttcacgagtccttacacctaagttcaggaaataccaacttttcttcagggaagaaagaaagtggatgtcaccagcagggctgtgatggaaataatgactaaaacaattgaataccttcaacccaatccagcttccagagctaagctcagcatgatcaacaccatgtcaaaaatccgtggccaggagaaggggccaggctatcctcaggcagaggcgctgctggcagaggccatgctcaaatttggaagagagcttggagatgattgcaactttggcccagcacttggtgaggtcggggaggccatgcgggaactgtcggaggtcaaagactctttggacatagaagtgaagcagaacttcattgaccctcttcagaatcttcatgacaaagatcttagggaaattcaacatcatctaaagaagttggagggtcgacgcctggattttgattataagaagaaacgacaaggcaagattccggatgaagagcttcgtcaagctctagagaaatttgatgagtctaaggaaattgctgagtcaagcatgttcaatctcttggagatggatattgaacaagtgagccagctctctgcacttgtgcaagctcagctggagtaccacaagcaggcagtccagatcctgcagcaagtcacggtcagactggaagaaagaataagacaggcttcatctcagcctagaagggaatatcaacctaaaccacgaatgagcctggagtttccaactggagacagtactcagcccaatgggggtctctcccacacaggcactcccaaaccttcaggtgtccaaatggatcagccctgctgccgagctctgtacgactttgaacctgaaaatgaaggggagttgggatttaaagagggcgatatcatcacactcactaaccaaattgatgagaactggtatgaggggatgctgcatggccattcaggcttcttccccatcaattatgtggaaattctggttgccctgccccattaggatgttatgctggctggctcgcctcctcttgacccagatagttacggttaaccactgctttggcaatgctgcttataacac

SEQ ID NO: 27969 - DNA, 1025 bp, Homo sapiens
  source 1..1025: mol_type = unassigned DNA
gttggcgccagcatccaggtaccgcgcgccacagcacctgcctgggcgttcccgcgcttggggcggggcttcccgcgtcccctttaagaggccgcatcacccgcccttgacgtcagagtgtttctccgcaagagcccgtgtcccgctaggctccgcgccctcgcgcccatagccccggcggcggcacgaccagaggcggccaggggagcgcgccgccccgctcggccctccagtccccctccgcctcctccctcccgcacagcagccgccagcgcggcctcctgcaccatgtcggtggccggcctcaagaagcagttccataaagccactcagaaagtgagtgagaaggttggaggagctgaaggaaccaagctagatgatgacttcaaagagatggaaattgaacaagtgagccagctctctgcacttgtgcaagctcagctggagtaccacaagcaggcagtccagatcctgcagcaagtcacggtcagactggaagaaagaataagacaggcttcatctcagcctagaagggaatatcaacctaaaccacgaatgagcctggagtttccaactggagacagtactcagcccaatgggggtctctcccacacaggcactcccaaaccttcaggtgtccaaatggatcagccctgctgccgagctctgtacgactttgaacctgaaaatgaaggggagttgggatttaaagagggcgatatcatcacactcactaaccaaattgatgagaactggtatgaggggatgctgcatggccattcaggcttcttccccatcaattatgtggaaattctggttgccctgccccattaggatgttatgctggctggctcgcctcctcttgacccagatagttacggttaaccactgctttggcaatgctgcttataacacatcccaagtgcaggccgcagtggtccacgtcatccagccccaccaagtgactttggttgacttgtgggctcccacaggagtcatggtgatggatgatatcctcttagcct

SEQ ID NO: 27970 - DNA, 2012 bp, Homo sapiens
  source 1..2012: mol_type = unassigned DNA
gcgatgtcggtggccgggctgaagaagcagttccacaaagccagccagtagagatgggtttcaccatgttggccaatatggtctcgatctcctgacctcgtgatccgcctgcctcggcctcccagagtgctgggattacaggtgtgagccactgtgcccagcctcttctctcactatccgtttctgacaaatgaaaaaaatggatgtgggtcctgcagaacctgaggccagctctaaccagtctttcatggatgcatacacctgcctgcaggcgctgctcccaggttatgaggctggttcttgggtttgactctgggaatcatgctcattgatctgcttttcctaatcatgtcagtgaatacctacacgtgaagaaaactcaagctgcaccataaagctaaaggaagaaggagcttttaagtgaataagaccattttcccaatgagcagtgtcataaacattgaggactctcttaaatcagaagatgaatgaatggatggaatctttgctgggataatatgcaatcaagctaataggtgccttacctggacctcccaacagctatttagtgaaaaaataagtggtgctgaaggaactaaactagacgatgaatttcttgacatggaaaggaaaatagatgttaccaataaagttgttgcagaaattctttcaaaaaccactgaatatcttcagccaaatccagcatacagagctaagctaggaatgctgaacactgtgtcgaagatccgagggcaggtgaagaccacaggatacccgcagacggaaggcttgctgggggactgtatgctgaaatacgggaaggagctcggggaagactccacctttggcaatgcattgatagaagttggtgaatccatgaagctaatggctgaggtgaaagactctcttgatattaatgtaaagcaaacttttattgatccacttcagttactacaagataaagatttaaaagagatcgggcatcacctgaaaaagctggaaggccgccgcctggattacgattataaaaagaaacgagtaggtaagataccagacgaagaagtcagacaagcggtagaaaaatttgaagagtcaaaggagttggctgaaagaagcatgtttaactttttagaaaatgatgtagaacaagtcagccagttggctgtgttcatagaggcagcattagactatcacagacagtccacagagattctgcaggagctgcagagcaagctacagatgcgaatatcagctgcatccagtgtccccagacgagaatacaagccaaggcctgtgaaaaggagttctagtgagctcaatggagtttccaccacctctgtagtgaagacgacaggttctaacattcccatggaccagccctgctgtcgtggtctctatgactttgagccagaaaaccaaggagaattaggatttaaagaaggggacatcattacattaaccaatcaaatagatgaaaactggtatgaaggaatgatacacggagaatcgggattcttccccattaattacgtggaagtgatcgtgcctttacctcagtaaatgtgtaacacaaactctggacatactttcgtaactgaaatgaattcacaccagtgtgctctcagtgcggtgttctgtgacatcctttgctctctgaccaacttaatgacttttgtatgtgtgctctctttataatgtattttatatcactttaatttgtataaatgattttcttgtccttgctacatgaaaatattttcttttttgcttcctgtcctaaaagtcattggttaaatgtatttgcttcctgtggctaaaaataagtctcacccattgcagttatgtcaacgaatggcctatattcctcagctgcaatgaaatggtaacatttgaaactaagaaatgctaaatattttgtttctcgacattcctgatgacgtctggtcttttcttttcattgtattttaagcttacctgtgaatagcccaataaacatgacacactgtgttggc

SEQ ID NO: 27971 - DNA, 1806 bp, Homo sapiens
  source 1..1806: mol_type = unassigned DNA
gcggctcaagtagcccaggtctccacgcaacaatgaagcgtgggcggccccagcagcttcatttgcatatcgccgcggcttggccaatgggctgcgcaggggctttggaacgcagtgttgccatcggcgtgcgcgcgtgtgtgcgagtgtgacagcggctgtggctgtggccgtggccgtgggaggcgggcccggcggagcccagccgcggggggaccggcccgggctcccgctccccgagcgcgtcgcggccgcgtggcccagccgagccttgagaccaccccgcccctgccggtcgcagtcgcgatgtcggtggccgggctgaagaagcagttccacaaagccagccagctatttagtgaaaaaataagtggtgctgaaggaactaaactagacgatgaatttcttgacatggaaaggaaaatagatgttaccaataaagttgttgcagaaattctttcaaaaaccactgaatatcttcagccaaatccagcatacagagctaagctaggaatgctgaacactgtgtcgaagatccgagggcaggtgaagaccacaggatacccgcagacggaaggcttgctgggggactgtatgctgaaatacgggaaggagctcggggaagactccacctttggcaatgcattgatagaagttggtgaatccatgaagctaatggctgaggtgaaagactctcttgatattaatgtaaagcaaacttttattgatccacttcagttactacaagataaagatttaaaagagatcgggcatcacctgaaaaagctggaaggccgccgcctggattacgattataaaaagaaacgagtaggtaagataccagacgaagaagtcagacaagcggtagaaaaatttgaagagtcaaaggagttggctgaaagaagcatgtttaactttttagaaaatgatgtagaacaagtcagccagttggctgtgttcatagaggcagcattagactatcacagacagtccacagagattctgcaggagctgcagagcaagctacagatgcgaatatcagctgcatccagtgtccccagacgagaatacaagccaaggcctgtgaaaaggagttctagtgagctcaatggagtttccaccacctctgtagtgaagacgacaggttctaacattcccatggaccagccctgctgtcgtggtctctatgactttgagccagaaaaccaaggagaattaggatttaaagaaggggacatcattacattaaccaatcaaatagatgaaaactggtatgaaggaatgatacacggagaatcgggattcttccccattaattacgtggaagtgatcgtgcctttacctcagtaaatgtgtaacacaaactctggacatactttcgtaactgaaatgaattcacaccagtgtgctctcagtgcggtgttctgtgacatcctttgctctctgaccaacttaatgacttttgtatgtgtgctctctttataatgtattttatatcactttaatttgtataaatgattttcttgtccttgctacatgaaaatattttcttttttgcttcctgtcctaaaagtcattggttaaatgtatttgcttcctgtggctaaaaataagtctcacccattgcagttatgtcaacgaatggcctatattcctcagctgcaatgaaatggtaacatttgaaactaagaaatgctaaatattttgtttctcgacattcctgatgacgtctggtcttttcttttcattgtattttaagcttacctgtgaatagcccaataaacatgacacactgtgttggcaaaa

SEQ ID NO: 27972 - DNA, 1520 bp, Homo sapiens
  source 1..1520: mol_type = unassigned DNA
atggatggaatctttgctgggataatatgcaatcaagctaataggtgccttacctggacctcccaacagctatttagtgaaaaaataagtggtgctgaaggaactaaactagacgatgaatttcttgacatggaaaggaaaatagatgttaccaataaagttgttgcagaaattctttcaaaaaccactgaatatcttcagccaaatccagcatacagagctaagctaggaatgctgaacactgtgtcgaagatccgagggcaggtgaagaccacaggatacccgcagacggaaggcttgctgggggactgtatgctgaaatacgggaaggagctcggggaagactccacctttggcaatgcattgatagaagttggtgaatccatgaagctaatggctgaggtgaaagactctcttgatattaatgtaaagcaaacttttattgatccacttcagttactacaagataaagatttaaaagagatcgggcatcacctgaaaaagctggaaggccgccgcctggattacgattataaaaagaaacgagtaggtaagataccagacgaagaagtcagacaagcggtagaaaaatttgaagagtcaaaggagttggctgaaagaagcatgtttaactttttagaaaatgatgtagaacaagtcagccagttggctgtgttcatagaggcagcattagactatcacagacagtccacagagattctgcaggagctgcagagcaagctacagatgcgaatatcagctgcatccagtgtccccagacgagaatacaagccaaggcctgtgaaaaggagttctagtgagctcaatggagtttccaccacctctgtagtgaagacgacaggttctaacattcccatggaccagccctgctgtcgtggtctctatgactttgagccagaaaaccaaggagaattaggatttaaagaaggggacatcattacattaaccaatcaaatagatgaaaactggtatgaaggaatgatacacggagaatcgggattcttccccattaattacgtggaagtgatcgtgcctttacctcagtaaatgtgtaacacaaactctggacatactttcgtaactgaaatgaattcacaccagtgtgctctcagtgcggtgttctgtgacatcctttgctctctgaccaacttaatgacttttgtatgtgtgctctctttataatgtattttatatcactttaatttgtataaatgattttcttgtccttgctacatgaaaatattttcttttttgcttcctgtcctaaaagtcattggttaaatgtatttgcttcctgtggctaaaaataagtctcacccattgcagttatgtcaacgaatggcctatattcctcagctgcaatgaaatggtaacatttgaaactaagaaatgctaaatattttgtttctcgacattcctgatgacgtctggtcttttcttttcattgtattttaagcttacctgtgaatagcccaataaacatgacacactgtgttggc

SEQ ID NO: 27973 - DNA, 1752 bp, Homo sapiens
  source 1..1752: mol_type = unassigned DNA
tgtggctgtggccgtggccgtgggaggcgggcccggcggagcccagccgcggggggaccggcccgggctcccgctccccgagcgcgtcgcggccgcgtggcccagccgagccttgagaccaccccgcccctgccggtcgcagtcgcgatgtcggtggccgggctgaagaagcagttccacaaagccagccagctatttagtgaaaaaataagtggtgctgaaggaactaaactagacgatgaatttcttgacatggaaaggaaaatagatgttaccaataaagttgttgcagaaattctttcaaaaaccactgaatatcttcagccaaatccagcatacagagctaagctaggaatgctgaacactgtgtcgaagatccgagggcaggtgaagaccacaggatacccgcagacggaaggcttgctgggggactgtatgctgaaatacgggaaggagctcggggaagactccacctttggcaatgcattgatagaagttggtgaatccatgaagctaatggctgaggtgaaagactctcttgatattaatgtaaagcaaacttttattgatccacttcagttactacaagataaagatttaaaagagatcgggcatcacctgaaaaagctggaaggccgccgcctggattacgattataaaaagaaacgagtaggtaagataccagacgaagaagtcagacaagcggtagaaaaatttgaagagtcaaaggagttggctgaaagaagcatgtttaactttttagaaaatgatgtagaacaagtcagccagttggctgtgttcatagaggcagcattagactatcacagacagtccacagagattctgcaggagctgcagagcaagctacagatgcgaatatcagctgcatccagtgtccccagacgagaatacaagccaaggcctgtgaaaaggagttctagtgagctcaatggagtttccaccacctctgtagtgaagacgacagcctacagcagactggaaccagcagattaggaaggcccaagggactgcttcgggaaggccattgacagcaggaaaaagtgacaggtcgcagccagactacaagggaggcaagagaaaaactataaaaagcaggaacaaaaacactcaaaagacacagcagtctgggggatttactaaaagacaaagagccctactcaggttctaacattcccatggaccagccctgctgtcgtggtctctatgactttgagccagaaaaccaaggagaattaggatttaaagaaggggacatcattacattaaccaatcaaatagatgaaaactggtatgaaggaatgatacacggagaatcgggattcttccccattaattacgtggaagtgatcgtgcctttacctcagtaaatgtgtaacacaaactctggacatactttcgtaactgaaatgaattcacaccagtgtgctctcagtgcggtgttctgtgacatcctttgctctctgaccaacttaatgacttttgtatgtgtgctctctttataatgtattttatatcactttaatttgtataaatgattttcttgtccttgctacatgaaaatattttcttttttgcttcctgtcctaaaagtcattggttaaatgtatttgcttcctgtggctaaaaataagtctcacccattgcagttatgtcaacgaatggcctatattcctcagctgcaatgaaatggtaacatttgaaactaagaaatgctaaatattttgtttctcg

SEQ ID NO: 27974 - DNA, 1944 bp, Homo sapiens
  source 1..1944: mol_type = unassigned DNA
gccgccactgaggaagaagccggcccagccgccgccgcgtccggaccctcgcgcctggatcccagcgccccgatcccggcgccccaacccccacgcccgcctccgccaactttcacgctgcctcggcggcccggcccggctcgacgccaatggtggaggccatagtggagtttgactaccaggcccagcacgatgatgagctgacgatcagcgtgggtgaaatcatcaccaacatcaggaaggaggatggaggctggtgggagggacagatcaacggcaggagaggtttgttccctgacaactttgtaagagaaataaagaaagagatgaagaaagaccctctcaccaacaaagctccagaaaagcccctgcacgaagtgcccagtggaaactctttgctgtcttctgaaacgattttaagaaccaataagagaggcgagcgacggaggcgccggtgccaggtggcattcagctacctgccccagaatgacgatgaacttgagctgaaagttggcgacatcatagaggtggtaggagaggtagaggaaggatggtgggaaggtgttctcaacgggaagactggaatgtttccttccaacttcatcaaggagctgtcaggggagtcggatgagcttggcatttcccaggatgagcagctatccaagtcaaggcctgaaggtctccctccagcttctctgctgccctttccagctcacggagcaaaaggaaagactacctttgaagggacaattctgtaccgagctgcaccgggaaagacggagggccacagacgctattacagtttaagggaaaccacaggctccgagagtgatgggggtgactcaagcagcaccaagtctgaaggtgccaacgggacagtggcaactgcagcaatccagcccaagaaagttaagggagtgggctttggagacattttcaaagacaagccaatcaaactaagaccaaggtcaattgaagtagaaaatgactttctgccggtagaaaagactattgggaagaagttacctgcaactacagcaactccagactcatcaaaaacagaaatggacagcaggacaaagagcaaggattactgcaaagtaatatttccatatgaggcacagaatgatgatgaattgacaatcaaagaaggagatatagtcactctcatcaataaggactgcatcgacgtaggctggtgggaaggagagctgaacggcagacgaggcgtgttccccgataacttcgtgaagttacttccaccggactttgaaaaggaagggaatagacccaagaagccaccgcctccatccgctcctgtcatcaaacaaggggcaggcaccactgagagaaaacatgaaattaaaaagatacctcctgaaagaccagaaatgcttccaaacagaacagaagaaaaagaaagaccagagagagagccaaaactggatttacagaagccctccgttcctgccataccgccaaaaaagcctcggccacctaagaccaattctctcagcagacctggcgcactgcccccgagaaggccggagagaccggtgggtccgctgacacacaccaggtactgctgtgctctcacctccggggcgggtgtggggtggctatggaaggaacacaggaggggaactgactgccacagaccttgggaggaagggagaggagaagggggtgctcaagcttccctcttacatcctccagcaaaattatctgaagacaccggccacttctgtccttgctcctgcactcaggcaggagtgagtgtgaggttgaggggtgcggtgtgggtttcatgaggactgggtacccagcatttaggccctgctcacacacaggggtttttcctgggccttattagaagcaaggccaactgcccttcagcctggaaatgcaggtggcgtgtccctctttgtccccctggatgttgtg

SEQ ID NO: 27975 - DNA, 2678 bp, Homo sapiens
  source 1..2678: mol_type = unassigned DNA
gagcacggaacttattcctgcccagagttcagacacagccagaaattaccatttcatacttcacagaatggaggtttcagcagccaaagccccaagtgccgcagacttgtctgagattgaaataaagaaagagatgaagaaagaccctctcaccaacaaagctccagaaaagcccctgcacgaagtgcccagtggaaactctttgctgtcttctgaaacgattttaagaaccaataagagaggcgagcgacggaggcgccggtgccaggtggcattcagctacctgccccagaatgacgatgaacttgagctgaaagttggcgacatcatagaggtggtaggagaggtagaggaaggatggtgggaaggtgttctcaacgggaagactggaatgtttccttccaacttcatcaaggagctgtcaggggagtcggatgagcttggcatttcccaggatgagcagctatccaagtcaagtttaagggaaaccacaggctccgagagtgatgggggtgactcaagcagcaccaagtctgaaggtgccaacgggacagtggcaactgcagcaatccagcccaagaaagttaagggagtgggctttggagacattttcaaagacaagccaatcaaactaagaccaaggtcaattgaagtagaaaatgactttctgccggtagaaaagactattgggaagaagttacctgcaactacagcaactccagactcatcaaaaacagaaatggacagcaggacaaagagcaaggattactgcaaagtaatatttccatatgaggcacagaatgatgatgaattgacaatcaaagaaggagatatagtcactctcatcaataaggactgcatcgacgtaggctggtgggaaggagagctgaacggcagacgaggcgtgttccccgataacttcgtgaagttacttccaccggactttgaaaaggaagggaatagacccaagaagccaccgcctccatccgctcctgtcatcaaacaaggggcaggcaccactgagagaaaacatgaaattaaaaagatacctcctgaaagaccagaaatgcttccaaacagaacagaagaaaaagaaagaccagagagagagccaaaactggatttacagaagccctccgttcctgccataccgccaaaaaagcctcggccacctaagaccaattctctcagcagacctggcgcactgcccccgagaaggccggagagaccggtgggtccgctgacacacaccaggggtgacagtccaaagattgacttggccggcagttcgctatctggcatcctggacaaagatctctcggaccgcagcaatgacattgacttagaaggttttgactccgtggtatcatctactgagaaactcagtcatccgaccacaagcagaccaaaagctacagggaggcggcctccgtcccagtccctcacatcttcatccctttcaagccctgatatcttcgactccccaagtcccgaagaggataaggaggaacacatttcacttgcgcacagaggagtggacgcgtcaaagaaaacttccaagactgttaccatatcccaagtgtctgacaacaaagcatccctgccgcccaagccggggaccatggcagcaggtggcggtgggccagcccctctgtcctcagcggcgccctcccccctgtcatcctctttgggaacagctggacacagagccaactccccgtctctgttcggcacggaaggaaaaccaaagatggagcctgcggccagcagccaggcggccgtggaggagctaaggacacaggtccgcgagctgaggagcatcatcgagaccatgaaggaccagcagaaacgagagattaaacagttattgtctgagttggatgaagagaagaaaatccggcttcggttgcagatggaagtgaacgacataaagaaagctctacaatcaaaatgaatacttgatcaatgaaatgtcacattattcatcctgagtccgagactcaaattttctgccccagccaaaataatcttgtgccaaaagattaaaggtttgcctcaaaatgtccctgtttgaaagattagcacaaaagtcttgatagcacaacacaaattccatccaagaggagaatcttccccagggtttagtcctggggctggcactcgttgtgacttacacagagcaaaattgtgctaaaggcttttctactctgagatctcaatgcgaaatgaaaactcaggcagtttagtccatagtggtactattttgatgatattttccattaataaaatgtaatttcagattattcgtttacaagctttataattttatgattttttaatcgtgttttgtcacagacttccctagtgtttgtactacacgtagtcagaagcgagtgtccttttcttttgcttcaggctaagagctgcctcgctctttgtccccccattaggattctattacatatgcaattgtaggttcaacctgtccctttccctgccagcaaaccccaccaccctaagagaaattttagcttatatatgacggtatatttacaaaaagagaaagagaaaatctggtatttgcaatgatctgtgccttctttttaccaccctcttgattggagcttttgtgatgcagctaccatgattcaaaaaaattaaaaattaaaaaaaaaaaa

SEQ ID NO: 27976 - DNA, 4873 bp, Homo sapiens
  source 1..4873: mol_type = unassigned DNA
cgcaatttccactcgcggggagcaggaaacccggcgcagccgggcgcattgggccgcgatgcaacagcagcagcaggagtcgccccggggcagcagcggcagcagcagcagaggcagcagcgggcggcgctgagccgccgccgccgccactgaggaagaagccggcccagccgccgccgcgtccggaccctcgcgcctggatcccagcgccccgatcccggcgccccaacccccacgcccgcctccgccaactttcacgctgcctcggcggcccggcccggctcgacgccaatggtggaggccatagtggagtttgactaccaggcccagcacgatgatgagctgacgatcagcgtgggtgaaatcatcaccaacatcaggaaggaggatggaggctggtgggagggacagatcaacggcaggagaggtttgttccctgacaactttgtaagagaaataaagaaagagatgaagaaagaccctctcaccaacaaagctccagaaaagcccctgcacgaagtgcccagtggaaactctttgctgtcttctgaaacgattttaagaaccaataagagaggcgagcgacggaggcgccggtgccaggtggcattcagctacctgccccagaatgacgatgaacttgagctgaaagttggcgacatcatagaggtggtaggagaggtagaggaaggatggtgggaaggtgttctcaacgggaagactggaatgtttccttccaacttcatcaaggagctgtcaggggagtcggatgagcttggcatttcccaggatgagcagctatccaagtcaaggcctgaaggtctccctccagcttctctgctgccctttccagctcacggagcaaaaggaaagactacctttgaagggacaattctgtaccgagctgcaccgggaaagacggagggccacagacgctattacagtttaagggaaaccacaggctccgagagtgatgggggtgactcaagcagcaccaagtctgaaggtgccaacgggacagtggcaactgcagcaatccagcccaagaaagttaagggagtgggctttggagacattttcaaagacaagccaatcaaactaagaccaaggtcaattgaagtagaaaatgactttctgccggtagaaaagactattgggaagaagttacctgcaactacagcaactccagactcatcaaaaacagaaatggacagcaggacaaagagcaaggattactgcaaagtaatatttccatatgaggcacagaatgatgatgaattgacaatcaaagaaggagatatagtcactctcatcaataaggactgcatcgacgtaggctggtgggaaggagagctgaacggcagacgaggcgtgttccccgataacttcgtgaagttacttccaccggactttgaaaaggaagggaatagacccaagaagccaccgcctccatccgctcctgtcatcaaacaaggggcaggcaccactgagagaaaacatgaaattaaaaagatacctcctgaaagaccagaaatgcttccaaacagaacagaagaaaaagaaagaccagagagagagccaaaactggatttacagaagccctccgttcctgccataccgccaaaaaagcctcggccacctaagaccaattctctcagcagacctggcgcactgcccccgagaaggccggagagaccggtgggtccgctgacacacaccaggggtgacagtccaaagattgacttggccggcagttcgctatctggcatcctggacaaagatctctcggaccgcagcaatgacattgacttagaaggttttgactccgtggtatcatctactgagaaactcagtcatccgaccacaagcagaccaaaagctacagggaggcggcctccgtcccagtccctcacatcttcatccctttcaagccctgatatcttcgactccccaagtcccgaagaggataaggaggaacacatttcacttgcgcacagaggagtggacgcgtcaaagaaaacttccaagactgttaccatatcccaagtgtctgacaacaaagcatccctgccgcccaagccggggaccatggcagcaggtggcggtgggccagcccctctgtcctcagcggcgccctcccccctgtcatcctctttgggaacagctggacacagagccaactccccgtctctgttcggcacggaaggaaaaccaaagatggagcctgcggccagcagccaggcggccgtggaggagctaaggacacaggtccgcgagctgaggagcatcatcgagaccatgaaggaccagcagaaacgagagattaaacagttattgtctgagttggatgaagagaagaaaatccggcttcggttgcagatggaagtgaacgacataaagaaagctctacaatcaaaatgaatacttgatcaatgaaatgtcacattattcatcctgagtccgagactcaaattttctgccccagccaaaataatcttgtgccaaaagattaaaggtttgcctcaaaatgtccctgtttgaaagattagcacaaaagtcttgatagcacaacacaaattccatccaagaggagaatcttccccagggtttagtcctggggctggcactcgttgtgacttacacagagcaaaattgtgctaaaggcttttctactctgagatctcaatgcgaaatgaaaactcaggcagtttagtccatagtggtactattttgatgatattttccattaataaaatgtaatttcagattattcgtttacaagctttataattttatgattttttaatcgtgttttgtcacagacttccctagtgtttgtactacacgtagtcagaagcgagtgtccttttcttttgcttcaggctaagagctgcctcgctctttgtccccccattaggattctattacatatgcaattgtaggttcaacctgtccctttccctgccagcaaaccccaccaccctaagagaaattttagcttatatatgacggtatatttacaaaaagagaaagagaaaatctggtatttgcaatgatctgtgccttctttttaccaccctcttgattggagcttttgtgatgcagctaccatgattcaaaaaaattaaaaattaaaaaaaaaaaatctgccacttatccaagtccactagaggccactgtcttcaaagcttctctcaccctagccaaaggtcctaagaggagacagctgtgaagttgggcgtgctctgtggtaccagctgtgacttttctatttctcctagttttaggttgttcatgaaactagaaatgtcatcctgcttgatttttcatcagccaagttaaacccctgctttctgtcctttgcaccttttgcgtgaacagaatatgcattattaaagcaaaaataaataaaagtaaaatgcaaatgaaaacaagggagggaaagttgtattatttcctgcactgggttacccgtgtgtgttatcgtttaaactgtattcacataatgtcatttgccttgctcacttgtaaccccttcctcaggtccaagagaatgggaggagggtcatgttgaagtgtagccactggaactttcttgcatttatggagttgctttttctttcccaaggaaactgatgtttgcctgtccgctttatctttgtagtacatgaacagttcagccttagactatgtaactgttttctcatccttagctgaaaatgaggggcctactgtattgcgagactgttcaggggtaggggtggagggggtggtcccttaatggcccctgaagatgttggatgtgtttctcaaaagctgctttgtctctttcctgagtttaatagtgaaactactaaacattaatagatttgcacagccacaaagaatgagagttgataataccgaagaagtgatgcaaaaacaaaaaatcacattactgatcattgatagtattacaaataaatgtctcttcctttctcttcctcccttcctccccctgccttcctcttaacctatgtgctcatccttgctacttgaggctgttatttccctccgagtatttaaggagcccaaacaccttggtcttcctgggtgggggcataattaagggaagggagtgtataaggaaggaaacctcataccctccattcccatccctggatatattgccttttcagcagcctcgggttcagtgtgcttggggtcaggagtgccaggttcccaagagcagcgtaaaacatccctgtaccccttgacagttataagcatttctgcgttaaacttgaagattccagagattccccacgacctaatgatctaagaatgcagattggattctttgatgttcaaatttctcatttacttatgaaaatccctaattatatagttttatataatgtgtatacagagtaggattgttgatgaaattgagcggttggaacaccctcatggaacactggcaacatggaatgtagagagctgatgtcttccccctcatagaggccattggcttcctttgtataaggagagggagaagtgattctggaaggagaagttggtatgtctagcttcattgcggcccctcgggctacccagcaagaggattctgcatcaaggaactggacgagccgctacccaaactgccaccatctttactctttacaaaatggacccatcgagaatgttgaaaagcttggaagtatcacttttgaaaaaaaaaaaaattattttgcattcagcatggactcgaccaggcatctatggagattatttttttgcttcattttataaagttgtatttagaaaagtcttaagtattgtgctttgtaaagaagatgattaaaatgaaattttgtgagaatagttttgttca

SEQ ID NO: 27977 - DNA, 3819 bp, Homo sapiens
  source 1..3819: mol_type = unassigned DNA
tttggtcccaagtatgactcagggttaggctgggtcctcaggctccgtgctgttggaaggaagtgggaggattccaggggagttctgggaccttttcaaactgaagagaggaggctggctgcatcatgggagaagagactattgggaagaagttacctgcaactacagcaactccagactcatcaaaaacagaaatggacagcaggacaaagagcaaggattactgcaaagtaatatttccatatgaggcacagaatgatgatgaattgacaatcaaagaaggagatatagtcactctcatcaataaggactgcatcgacgtaggctggtgggaaggagagctgaacggcagacgaggcgtgttccccgataacttcgtgaagttacttccaccggactttgaaaaggaagggaatagacccaagaagccaccgcctccatccgctcctgtcatcaaacaaggggcaggcaccactgagagaaaacatgaaattaaaaagatacctcctgaaagaccagaaatgcttccaaacagaacagaagaaaaagaaagaccagagagagagccaaaactggatttacagaagccctccgttcctgccataccgccaaaaaagcctcggccacctaagaccaattctctcagcagacctggcgcactgcccccgagaaggccggagagaccggtgggtccgctgacacacaccaggggtgacagtccaaagattgacttggccggcagttcgctatctggcatcctggacaaagatctctcggaccgcagcaatgacattgacttagaaggttttgactccgtggtatcatctactgagaaactcagtcatccgaccacaagcagaccaaaagctacagggaggcggcctccgtcccagtccctcacatcttcatccctttcaagccctgatatcttcgactccccaagtcccgaagaggataaggaggaacacatttcacttgcgcacagaggagtggacgcgtcaaagaaaacttccaagactgttaccatatcccaagtgtctgacaacaaagcatccctgccgcccaagccggggaccatggcagcaggtggcggtgggccagcccctctgtcctcagcggcgccctcccccctgtcatcctctttgggaacagctggacacagagccaactccccgtctctgttcggcacggaaggaaaaccaaagatggagcctgcggccagcagccaggcggccgtggaggagctaaggacacaggtccgcgagctgaggagcatcatcgagaccatgaaggaccagcagaaacgagagattaaacagttattgtctgagttggatgaagagaagaaaatccggcttcggttgcagatggaagtgaacgacataaagaaagctctacaatcaaaatgaatacttgatcaatgaaatgtcacattattcatcctgagtccgagactcaaattttctgccccagccaaaataatcttgtgccaaaagattaaaggtttgcctcaaaatgtccctgtttgaaagattagcacaaaagtcttgatagcacaacacaaattccatccaagaggagaatcttccccagggtttagtcctggggctggcactcgttgtgacttacacagagcaaaattgtgctaaaggcttttctactctgagatctcaatgcgaaatgaaaactcaggcagtttagtccatagtggtactattttgatgatattttccattaataaaatgtaatttcagattattcgtttacaagctttataattttatgattttttaatcgtgttttgtcacagacttccctagtgtttgtactacacgtagtcagaagcgagtgtccttttcttttgcttcaggctaagagctgcctcgctctttgtccccccattaggattctattacatatgcaattgtaggttcaacctgtccctttccctgccagcaaaccccaccaccctaagagaaattttagcttatatatgacggtatatttacaaaaagagaaagagaaaatctggtatttgcaatgatctgtgccttctttttaccaccctcttgattggagcttttgtgatgcagctaccatgattcaaaaaaattaaaaattaaaaaaaaaaaatctgccacttatccaagtccactagaggccactgtcttcaaagcttctctcaccctagccaaaggtcctaagaggagacagctgtgaagttgggcgtgctctgtggtaccagctgtgacttttctatttctcctagttttaggttgttcatgaaactagaaatgtcatcctgcttgatttttcatcagccaagttaaacccctgctttctgtcctttgcaccttttgcgtgaacagaatatgcattattaaagcaaaaataaataaaagtaaaatgcaaatgaaaacaagggagggaaagttgtattatttcctgcactgggttacccgtgtgtgttatcgtttaaactgtattcacataatgtcatttgccttgctcacttgtaaccccttcctcaggtccaagagaatgggaggagggtcatgttgaagtgtagccactggaactttcttgcatttatggagttgctttttctttcccaaggaaactgatgtttgcctgtccgctttatctttgtagtacatgaacagttcagccttagactatgtaactgttttctcatccttagctgaaaatgaggggcctactgtattgcgagactgttcaggggtaggggtggagggggtggtcccttaatggcccctgaagatgttggatgtgtttctcaaaagctgctttgtctctttcctgagtttaatagtgaaactactaaacattaatagatttgcacagccacaaagaatgagagttgataataccgaagaagtgatgcaaaaacaaaaaatcacattactgatcattgatagtattacaaataaatgtctcttcctttctcttcctcccttcctccccctgccttcctcttaacctatgtgctcatccttgctacttgaggctgttatttccctccgagtatttaaggagcccaaacaccttggtcttcctgggtgggggcataattaagggaagggagtgtataaggaaggaaacctcataccctccattcccatccctggatatattgccttttcagcagcctcgggttcagtgtgcttggggtcaggagtgccaggttcccaagagcagcgtaaaacatccctgtaccccttgacagttataagcatttctgcgttaaacttgaagattccagagattccccacgacctaatgatctaagaatgcagattggattctttgatgttcaaatttctcatttacttatgaaaatccctaattatatagttttatataatgtgtatacagagtaggattgttgatgaaattgagcggttggaacaccctcatggaacactggcaacatggaatgtagagagctgatgtcttccccctcatagaggccattggcttcctttgtataaggagagggagaagtgattctggaaggagaagttggtatgtctagcttcattgcggcccctcgggctacccagcaagaggattctgcatcaaggaactggacgagccgctacccaaactgccaccatctttactctttacaaaatggacccatcgagaatgttgaaaagcttggaagtatcacttttgaaaaaaaaaaaaattattttgcattcagcatggactcgaccaggcatctatggagattatttttttgcttcattttataaagttgtatttagaaaagtcttaagtattgtgctttgtaaa

SEQ ID NO: 27978 - DNA, 1941 bp, Homo sapiens
  source 1..1941: mol_type = unassigned DNA
ctcaccaacaaagctccagaaaagcccctgcacgaagtgcccagtggaaactctttgctgtcttctgaaacgattttaagaaccaataagagaggcgagcgacggaggcgccggtgccaggtggcattcagctacctgccccagaatgacgatgaacttgagctgaaagttggcgacatcatagaggtggtaggagaggtagaggaaggatggtgggaaggtgttctcaacgggaagactggaatgtttccttccaacttcatcaaggagctgtcaggggagtcggatgagcttggcatttcccaggatgagcagctatccaagtcaaggcctgaaggtctccctccagcttctctgctgccctttccagctcacggagcaaaaggaaagactacctttgaagggacaattctgtaccgagctgcaccgggaaagacggagggccacagacgctattacagtttaagggaaaccacaggctccgagagtgatgggggtgactcaagcagcaccaagtctgaaggtgccaacgggacagtggcaactgcagcaatccagcccaagaaagttaagggagtgggctttggagacattttcaaagacaagccaatcaaactaagaccaaggtcaattgaagtagaaaatgactttctgccggtagaaaagactattgggaagaagttacctgcaactacagcaactccagactcatcaaaaacagaaatggacagcaggacaaagagcaaggattactgcaaagtaatatttccatatgaggcacagaatgatgatgaattgacaatcaaagaaggagatatagtcactctcatcaataaggactgcatcgacgtaggctggtgggaaggagagctgaacggcagacgaggcgtgttccccgataacttcgtgaagttacttccaccggactttgaaaaggaagggaatagacccaagaagccaccgcctccatccgctcctgtcatcaaacaaggggcaggcaccactgagagaaaacatgaaattaaaaagatacctcctgaaagaccagaaatgcttccaaacagaacagaagaaaaagaaagaccagagagagagccaaaactggatttacagaagccctccgttcctgccataccgccaaaaaagcctcggccacctaagaccaattctctcagcagacctggcgcactgcccccgagaaggccggagagaccggtgggtccgctgacacacaccaggggtgacagtccaaagattgacttggccggcagttcgctatctggcatcctggacaaagatctctcggaccgcagcaatgacattgacttagaaggttttgactccgtggtatcatctactgagaaactcagtcatccgaccacaagcagaccaaaagctacagggaggcggcctccgtcccagtccctcacatcttcatccctttcaagccctgatatcttcgactccccaagtcccgaagaggataaggaggaacacatttcacttgcgcacagaggagtggacgcgtcaaagaaaacttccaagactgttaccatatcccaagtgtctgacaacaaagcatccctgccgcccaagccggggaccatggcagcaggtggcggtgggccagcccctctgtcctcagcggcgccctcccccctgtcatcctctttgggaacagctggacacagagccaactccccgtctctgttcggcacggaaggaaaaccaaagatggagcctgcggccagcagccaggcggccgtggaggagctaaggacacaggtccgcgagctgaggagcatcatcgagaccatgaaggaccagcagaaacgagagattaaacagttattgtctgagttggatgaagagaagaaaatccggcttcggttgcagatggaagtgaacgacataaagaaagctctacaatcaaaatgaata

SEQ ID NO: 27979 - DNA, 2737 bp, Homo sapiens
  source 1..2737: mol_type = unassigned DNA
tttgagacaagcgagcgacggaggcgccggtgccaggtggcattcagctacctgccccagaatgacgatgaacttgagctgaaagttggcgacatcatagaggtggtaggagaggtagaggaaggatggtgggaaggtgttctcaacgggaagactggaatgtttccttccaacttcatcaaggagctgtcaggggagtcggatgagcttggcatttcccaggatgagcagctatccaagtcaagtttaagggaaaccacaggctccgagagtgatgggggtgactcaagcagcaccaagtctgaaggtgccaacgggacagtggcaactgcagcaatccagcccaagaaagttaagggagtgggctttggagacattttcaaagacaagccaatcaaactaagaccaaggtcaattgaagtagaaaatgactttctgccggtagaaaagactattgggaagaagttacctgcaactacagcaactccagactcatcaaaaacagaaatggacagcaggacaaagagcaaggattactgcaaagtaatatttccatatgaggcacagaatgatgatgaattgacaatcaaagaaggagatatagtcactctcatcaataaggactgcatcgacgtaggctggtgggaaggagagctgaacggcagacgaggcgtgttccccgataacttcgtgaagttacttccaccggactttgaaaaggaagggaatagacccaagaagccaccgcctccatccgctcctgtcatcaaacaaggggcaggcaccactgagagaaaacatgaaattaaaaagatacctcctgaaagaccagaaatgcttccaaacagaacagaagaaaaagaaagaccagagagagagccaaaactggatttacagaagccctccgttcctgccataccgccaaaaaagcctcggccacctaagaccaattctctcagcagacctggcgcactgcccccgagaaggccggagagaccggtgggtccgctgacacacaccaggggtgacagtccaaagattgacttggccggcagttcgctatctggcatcctggacaaagatctctcggaccgcagcaatgacattgacttagaaggttttgactccgtggtatcatctactgagaaactcagtcatccgaccacaagcagaccaaaagctacagggaggcggcctccgtcccagtccctcacatcttcatccctttcaagccctgatatcttcgactccccaagtcccgaagaggataaggaggaacacatttcacttgcgcacagaggagtggacgcgtcaaagaaaacttccaagactgttaccatatcccaagtgtctgacaacaaagcatccctgccgcccaagccggggaccatggcagcaggtggcggtgggccagcccctctgtcctcagcggcgccctcccccctgtcatcctctttgggaacagctggacacagagccaactccccgtctctgttcggcacggaaggaaaaccaaagatggagcctgcggccagcagccaggcggccgtggaggagctaaggacacaggtccgcgagctgaggagcatcatcgagaccatgaaggaccagcagaaacgagagattaaacagttattgtctgagttggatgaagagaagaaaatccggcttcggttgcagatggaagtgaacgacataaagaaagctctacaatcaaaatgaatacttgatcaatgaaatgtcacattattcatcctgagtccgagactcaaattttctgccccagccaaaataatcttgtgccaaaagattaaaggtttgcctcaaaatgtccctgtttgaaagattagcacaaaagtcttgatagcacaacacaaattccatccaagaggagaatcttccccagggtttagtcctggggctggcactcgttgtgacttacacagagcaaaattgtgctaaaggcttttctactctgagatctcaatgcgaaatgaaaactcaggcagtttagtccatagtggtactattttgatgatattttccattaataaaatgtaatttcagattattcgtttacaagctttataattttatgattttttaatcgtgttttgtcacagacttccctagtgtttgtactacacgtagtcagaagcgagtgtccttttcttttgcttcaggctaagagctgcctcgctctttgtccccccattaggattctattacatatgcaattgtaggttcaacctgtccctttccctgccagcaaaccccaccaccctaagagaaattttagcttatatatgacggtatatttacaaaaagagaaagagaaaatctggtatttgcaatgatctgtgccttctttttaccaccctcttgattggagcttttgtgatgcagctaccatgattcaaaaaaattaaaaattaaaaaaaaaaaatctgccacttatccaagtccactagaggccactgtcttcaaagcttctctcaccctagccaaaggtcctaagaggagacagctgtgaagttgggcgtgctctgtggtaccagctgtgacttttctatttctcctagttttaggttgttcatgaaactagaaatgtcatcctgcttgatttttcatcagccaagttaaacccctgctttctgtcctttgcaccttttgcgtgaacagaatatgcattattaaagcaaaaataaataaaagtaaaatgcaaatgaaaacaagg

SEQ ID NO: 27980 - DNA, 4731 bp, Homo sapiens
  source 1..4731: mol_type = unassigned DNA
cgcaatttccactcgcggggagcaggaaacccggcgcagccgggcgcattgggccgcgatgcaacagcagcagcaggagtcgccccggggcagcagcggcagcagcagcagaggcagcagcgggcggcgctgagccgccgccgccgccactgaggaagaagccggcccagccgccgccgcgtccggaccctcgcgcctggatcccagcgccccgatcccggcgccccaacccccacgcccgcctccgccaactttcacgctgcctcggcggcccggcccggctcgacgccaatggtggaggccatagtggagtttgactaccaggcccagcacgatgatgagctgacgatcagcgtgggtgaaatcatcaccaacatcaggaaggaggatggaggctggtgggagggacagatcaacggcaggagaggtttgttccctgacaactttgtaagagaaataaagaaagagatgaagaaagaccctctcaccaacaaagctccagaaaagcccctgcacgaagtgcccagtggaaactctttgctgtcttctgaaacgattttaagaaccaataagagaggcgagcgacggaggcgccggtgccaggtggcattcagctacctgccccagaatgacgatgaacttgagctgaaagttggcgacatcatagaggtggtaggagaggtagaggaaggatggtgggaaggtgttctcaacgggaagactggaatgtttccttccaacttcatcaaggagctgtcaggggagtcggatgagcttggcatttcccaggatgagcagctatccaagtcaagtttaagggaaaccacaggctccgagagtgatgggggtgactcaagcagcaccaagtctgaaggtgccaacgggacagtggcaactgcagcaatccagcccaagaaagttaagggagtgggctttggagacattttcaaagacaagccaatcaaactaagaccaaggtcaattgaagtagaaaatgactttctgccggtagaaaagactattgggaagaagttacctgcaactacagcaactccagactcatcaaaaacagaaatggacagcaggacaaagagcaaggattactgcaaagtaatatttccatatgaggcacagaatgatgatgaattgacaatcaaagaaggagatatagtcactctcatcaataaggactgcatcgacgtaggctggtgggaaggagagctgaacggcagacgaggcgtgttccccgataacttcgtgaagttacttccaccggactttgaaaaggaagggaatagacccaagaagccaccgcctccatccgctcctgtcatcaaacaaggggcaggcaccactgagagaaaacatgaaattaaaaagatacctcctgaaagaccagaaatgcttccaaacagaacagaagaaaaagaaagaccagagagagagccaaaactggatttacagaagccctccgttcctgccataccgccaaaaaagcctcggccacctaagaccaattctctcagcagacctggcgcactgcccccgagaaggccggagagaccggtgggtccgctgacacacaccaggggtgacagtccaaagattgacttggccggcagttcgctatctggcatcctggacaaagatctctcggaccgcagcaatgacattgacttagaaggttttgactccgtggtatcatctactgagaaactcagtcatccgaccacaagcagaccaaaagctacagggaggcggcctccgtcccagtccctcacatcttcatccctttcaagccctgatatcttcgactccccaagtcccgaagaggataaggaggaacacatttcacttgcgcacagaggagtggacgcgtcaaagaaaacttccaagactgttaccatatcccaagtgtctgacaacaaagcatccctgccgcccaagccggggaccatggcagcaggtggcggtgggccagcccctctgtcctcagcggcgccctcccccctgtcatcctctttgggaacagctggacacagagccaactccccgtctctgttcggcacggaaggaaaaccaaagatggagcctgcggccagcagccaggcggccgtggaggagctaaggacacaggtccgcgagctgaggagcatcatcgagaccatgaaggaccagcagaaacgagagattaaacagttattgtctgagttggatgaagagaagaaaatccggcttcggttgcagatggaagtgaacgacataaagaaagctctacaatcaaaatgaatacttgatcaatgaaatgtcacattattcatcctgagtccgagactcaaattttctgccccagccaaaataatcttgtgccaaaagattaaaggtttgcctcaaaatgtccctgtttgaaagattagcacaaaagtcttgatagcacaacacaaattccatccaagaggagaatcttccccagggtttagtcctggggctggcactcgttgtgacttacacagagcaaaattgtgctaaaggcttttctactctgagatctcaatgcgaaatgaaaactcaggcagtttagtccatagtggtactattttgatgatattttccattaataaaatgtaatttcagattattcgtttacaagctttataattttatgattttttaatcgtgttttgtcacagacttccctagtgtttgtactacacgtagtcagaagcgagtgtccttttcttttgcttcaggctaagagctgcctcgctctttgtccccccattaggattctattacatatgcaattgtaggttcaacctgtccctttccctgccagcaaaccccaccaccctaagagaaattttagcttatatatgacggtatatttacaaaaagagaaagagaaaatctggtatttgcaatgatctgtgccttctttttaccaccctcttgattggagcttttgtgatgcagctaccatgattcaaaaaaattaaaaattaaaaaaaaaaaatctgccacttatccaagtccactagaggccactgtcttcaaagcttctctcaccctagccaaaggtcctaagaggagacagctgtgaagttgggcgtgctctgtggtaccagctgtgacttttctatttctcctagttttaggttgttcatgaaactagaaatgtcatcctgcttgatttttcatcagccaagttaaacccctgctttctgtcctttgcaccttttgcgtgaacagaatatgcattattaaagcaaaaataaataaaagtaaaatgcaaatgaaaacaagggagggaaagttgtattatttcctgcactgggttacccgtgtgtgttatcgtttaaactgtattcacataatgtcatttgccttgctcacttgtaaccccttcctcaggtccaagagaatgggaggagggtcatgttgaagtgtagccactggaactttcttgcatttatggagttgctttttctttcccaaggaaactgatgtttgcctgtccgctttatctttgtagtacatgaacagttcagccttagactatgtaactgttttctcatccttagctgaaaatgaggggcctactgtattgcgagactgttcaggggtaggggtggagggggtggtcccttaatggcccctgaagatgttggatgtgtttctcaaaagctgctttgtctctttcctgagtttaatagtgaaactactaaacattaatagatttgcacagccacaaagaatgagagttgataataccgaagaagtgatgcaaaaacaaaaaatcacattactgatcattgatagtattacaaataaatgtctcttcctttctcttcctcccttcctccccctgccttcctcttaacctatgtgctcatccttgctacttgaggctgttatttccctccgagtatttaaggagcccaaacaccttggtcttcctgggtgggggcataattaagggaagggagtgtataaggaaggaaacctcataccctccattcccatccctggatatattgccttttcagcagcctcgggttcagtgtgcttggggtcaggagtgccaggttcccaagagcagcgtaaaacatccctgtaccccttgacagttataagcatttctgcgttaaacttgaagattccagagattccccacgacctaatgatctaagaatgcagattggattctttgatgttcaaatttctcatttacttatgaaaatccctaattatatagttttatataatgtgtatacagagtaggattgttgatgaaattgagcggttggaacaccctcatggaacactggcaacatggaatgtagagagctgatgtcttccccctcatagaggccattggcttcctttgtataaggagagggagaagtgattctggaaggagaagttggtatgtctagcttcattgcggcccctcgggctacccagcaagaggattctgcatcaaggaactggacgagccgctacccaaactgccaccatctttactctttacaaaatggacccatcgagaatgttgaaaagcttggaagtatcacttttgaaaaaaaaaaaaattattttgcattcagcatggactcgaccaggcatctatggagattatttttttgcttcattttataaagttgtatttagaaaagtcttaagtattgtgctttgtaaagaagatgattaaaatgaaattttgtgagaata

SEQ ID NO: 27981 - DNA, 518 bp, Homo sapiens
  source 1..518: mol_type = unassigned DNA
cgccaaggcggtggcgtggatcttgataggccgtgagctctttggcagaaatgaaactgttaacaaaggatggaaagaagcgagcgacggaggcgccggtgccaggtggcattcagctacctgccccagaatgacgatgaacttgagctgaaagttggcgacatcatagaggtggtaggagaggtagaggaaggatggtgggaaggtgttctcaacgggaagactggaatgtttccttccaacttcatcaaggagctgtcaggggagtcggatgagcttggcatttcccaggatgagcagctatccaagtcaagtttaagggaaaccacaggctccgagagtgatgggggtgactcaagcagcaccaagtctgaaggtgccaacgggacagtggcaactgcagcaatccagcccaagaaagttaagggagtgggctttggagacattttcaaagacaagccaatcaaactaagaccaaggtcaattgaagtagaaaatgactttctgccggtagaaaa

SEQ ID NO: 27982 - DNA, 663 bp, Homo sapiens
  source 1..663: mol_type = unassigned DNA
gctgctgtgaacagaggcagcaactggggaattggatatggaaataaagaaagagatgaagaaagaccctctcaccaacaaagctccagaaaagcccctgcacgaagtgcccagtggaaactctttgctgtcttctgaaacgattttaagaaccaataagagaggcgagcgacggaggcgccggtgccaggtggcattcagctacctgccccagaatgacgatgaacttgagctgaaagttggcgacatcatagaggtggtaggagaggtagaggaaggatggtgggaaggtgttctcaacgggaagactggaatgtttccttccaacttcatcaaggagctgtcaggggagtcggatgagcttggcatttcccaggatgagcagctatccaagtcaagtttaagggaaaccacaggctccgagagtgatgggggtgactcaagcagcaccaagtctgaaggtgccaacgggacagtggcaactgcagcaatccagcccaagaaagttaagggagtgggctttggagacattttcaaagacaagccaatcaaactaagaccaaggtcaattgaagtagaaaatgactttctgccggtagaaaagactattgggaagaagttacctgcaactacagcaactccagactcatcaaaaacagaaat

SEQ ID NO: 27983 - DNA, 1549 bp, Homo sapiens
  source 1..1549: mol_type = unassigned DNA
actcttgagggtcaccgacatttggagttttctttgtgagtggagcagctactattgggaagaagttacctgcaactacagcaactccagactcatcaaaaacagaaatggacagcaggacaaagagcaaggattactgcaaagtaatatttccatatgaggcacagaatgatgatgaattgacaatcaaagaaggagatatagtcactctcatcaataaggactgcatcgacgtaggctggtgggaaggagagctgaacggcagacgaggcgtgttccccgataacttcgtgaagttacttccaccggactttgaaaaggaagggaatagacccaagaagccaccgcctccatccgctcctgtcatcaaacaaggggcaggcaccactgagagaaaacatgaaattaaaaagatacctcctgaaagaccagaaatgcttccaaacagaacagaagaaaaagaaagaccagagagagagccaaaactggatttacagaagccctccgttcctgccataccgccaaaaaagcctcggccacctaagaccaattctctcagcagacctggcgcactgcccccgagaaggccggagagaccggtgggtccgctgacacacaccaggggtgacagtccaaagattgacttggccggcagttcgctatctggcatcctggacaaagatctctcggaccgcagcaatgacattgacttagaaggttttgactccgtggtatcatctactgagaaactcagtcatccgaccacaagcagaccaaaagctacagggaggcggcctccgtcccagtccctcacatcttcatccctttcaagccctgatatcttcgactccccaagtcccgaagaggataaggaggaacacatttcacttgcgcacagaggagtggacgcgtcaaagaaaacttccaagactgttaccatatcccaagtgtctgacaacaaagcatccctgccgcccaagccggggaccatggcagcaggtggcggtgggccagcccctctgtcctcagcggcgccctcccccctgtcatcctctttgggaacagctggacacagagccaactccccgtctctgttcggcacggaaggaaaaccaaagatggagcctgcggccagcagccaggcggccgtggaggagctaaggacacaggtccgcgagctgaggagcatcatcgagaccatgaaggaccagcagaaacgagagattaaacagttattgtctgagttggatgaagagaagaaaatccggcttcggttgcagatggaagtgaacgacataaagaaagctctacaatcaaaatgaatacttgatcaatgaaatgtcacattattcatcctgagtccgagactcaaattttctgccccagccaaaataatcttgtgccaaaagattaaaggtttgcctcaaaatgtccctgtttgaaagattagcacaaaagtcttgatagcacaacacaaattccatccaagaggagaatcttccccagggtttagtcctggggctggcactcgttgtgacttacacagagc

SEQ ID NO: 27984 - DNA, 3128 bp, Homo sapiens
  source 1..3128: mol_type = unassigned DNA
ggctgagggtccgcgccgccgcccgcccgctccttcccgctcggccgcggcctcagggacggatactccagcgcgcggttccaaccgaggcccgtggtttagccccacgaagatgaactgggcacccgcaacgtgctgggctctgctactggcggccgccttcctctgcgacagcggcgcagccaagggcggccgcggaggtgcgcggggcagtgcccggggaggggtccgcgggggtgcgcgcggggcctcgagggtgcgcgtgaggccggcgcagcgctacggtgccccgggctcctccctgcgcgtggctgccgccggggcggcagccggggcggcggcgggagcggccgcgggcctggcggcgggctcgggctggagaagggccgcgggacccggggaacgcggcctggaggacgaggaggacggggtgcccggaggcaacgggacaggccccggcatctacagctaccgggcgtggacttcgggcgctggacccacgcgcggcccgcgtctctgtctcgtgctgggcggcgccctcggagccctggggctgctgcggccctaggcctggctgggctcggggaccacatctggcccccggcccgcgccatcccccaggatcctccggcctgggctcccccttcctcccttgcccacggtcttggagccccactgggtgcaggagctgctggctgtccctgtggacccgccatccaccgtcctgcccacgccgcctcagcctgccacctcccacctagaggagaccatgggccctgccccacccactccaggatgttagggtcccctcagccaaaaaggcagctgcctgtggctcctgtaccaaccgcccagccacgctccatcgccgcccaaagggaggtgccaaggccaggaacccaagccaccccggctcccctcgcctgcccaggggccgtggtgactcacgggcagggaggcgacatcaggctggttctgccactgagcccctgaggaatctgaccctccccaaaagaagcagtgaaatggaccaaaggacttaagaatttggggggaagtgagggaaaaacgttaggtgctaaccacctgcccagaagagtggatctcacagcccaggaacattcccaagcaggaaaaccgtccgtccgaggaacgtccatcctggctctctgcggctggtgggaaaacacaccctgccctgaggggctgtccaggccttctcccccacaccctcaggccgagatccgtgagagacccactttgctccaacaacttgaaacaagtcactttaccctccttaggacccattttgggggggaaaaaccaacacattccagagctttccaagtcctttgaacttcaggttcacattcagggatcacacagttctgcctgttctcagggcacagcaactgccaatcccgctgaagaggcctccctgggcacagcacaggctgcacggtgcacgcatttccctgaaggcagccccttcttcggaagcagctgttccaggcctcggaacagggcctgggtatccgcgtggtgggctggcagctgacggcctgctcagtggagccaggagctaactcagaccccaaagcaagcagggggccagtggcggggcccagcgcccagcaggacacccatgcaagaggctgagccccccaacatccaaggacaggagagacatggagtggcgctggacagtcacgacaaggacttgcctccagcactggacacacctgtgttaagaccagccctctgcttcccagtcccgccagcctggggcatcctccatgggctcagcactgagaggtcttgggtctgccacgttctctagctctccagtcacccactcatccagggtaggaggggttctccctgccccccgccgtggccttgggatctcaccctctccatgtcctggggacagcctcgccctcagccggactgcatccctcctgggcctgagcctcgggactcagtggacaccaaagtcaagaccagcacccaccacgggccctgccagcctctgccttccccagctggcctgggttctggcctgggtgaggatctggaagctgttggcaggactcaaccaagcactgctctctagctccagggcactaagccacaggaggcagcgccctgcagcctcccgtccacactgccagcaatgcccctggcccagtgagcccagacgctcctccaccccttccagaccaagctcaacgcctccaagaccagcaggccaaggccaagccctgccccagatcctcataggcagagaagcccttctgacatttcccccaggaggcagggggtggtctgagtctcctcacagcagagagacccaccggagccccctcaactttgcagatgcccacctggaaaatgggctgagctgcaccagaccctcacacaccacagcactgcaagctgatggaatgttccagttatgatggacacttcgtgatctgcaatgactgttgattcagcacattagcatctgacacagccaacctgaatacttcctgccccaggcggtcagggttatggcacgatgcaggtggcactcaggggctaacttcaggctgatgagtgtgtggggtatggggcagcagaggcagccagccagcaaagaggggccactgagcaccagggccctggtggaggctgctgtgggacggtcaggccaccaccgcaaagaggcagccggagcttctgcacaggatgtccctggccccaggtcctgcagcaccttagtccatactaccagccccacccaccttccttcctcttccctcttctaggacacaggctgtggaccccttcaggtgcactataatggggctggaggggcccccacatctctcagccccactaatgcagaatcccactacccgtgagctagaaggtgctcagaggccaggggtctctactgcccatgccgggcggccttccagtcattgcacagcaaagccatgtgcagggcgtccccctcaaccctgccctgaacatgccccagggcactgaggggcgaagccagtgcttgggctctgctgctgggagtctctggtctgtgtctgtgtgtgcctgtaagtgtgaaataaacctctctgatggca

SEQ ID NO: 27985 - DNA, 3172 bp, Homo sapiens
  source 1..3172: mol_type = unassigned DNA
ggcggaggcctcgcgcaaaacccaggcgccgcggctccgcgctccggctgagggtccgcgccgccgcccgcccgctccttcccgctcggccgcggcctcagggacggatactccagcgcgcggttccaaccgaggcccgtggtttagccccacgaagatgaactgggcacccgcaacgtgctgggctctgctactggcggccgccttcctctgcgacagcggcgcagccaagggcggccgcggaggtgcgcggggcagtgcccggggaggggtccgcgggggtgcgcgcggggcctcgagggtgcgcgtgaggccggcgcagcgctacggtgccccgggctcctccctgcgcgtggctgccgccggggcggcagccggggcggcggcgggagcggccgcgggcctggcggcgggctcgggctggagaagggccgcgggacccggggaacgcggcctggaggacgaggaggacggggtgcccggaggcaacgggacaggccccggcatctacagctaccgggcgtggacttcgggcgctggacccacgcgcggcccgcgtctctgtctcgtgctgggcggcgccctcggagccctggggctgctgcggccctaggcctggctgggctcggggaccacatctggcccccggcccgcgccatcccccaggatcctccggcctgggctcccccttcctcccttgcccacggtcttggagccccactgggtgcaggagctgctggctgtccctgtggacccgccatccaccgtcctgcccacgccgcctcagcctgccacctcccacctagaggagaccatgggccctgccccacccactccaggatgttagggtcccctcagccaaaaaggcagctgcctgtggctcctgtaccaaccgcccagccacgctccatcgccgcccaaagggaggtgccaaggccaggaacccaagccaccccggctcccctcgcctgcccaggggccgtggtgactcacgggcagggaggcgacatcaggctggttctgccactgagcccctgaggaatctgaccctccccaaaagaagcagtgaaatggaccaaaggacttaagaatttggggggaagtgagggaaaaacgttaggtgctaaccacctgcccagaagagtggatctcacagcccaggaacattcccaagcaggaaaaccgtccgtccgaggaacgtccatcctggctctctgcggctggtgggaaaacacaccctgccctgaggggctgtccaggccttctcccccacaccctcaggccgagatccgtgagagacccactttgctccaacaacttgaaacaagtcactttaccctccttaggacccattttgggggggaaaaaccaacacattccagagctttccaagtcctttgaacttcaggttcacattcagggatcacacagttctgcctgttctcagggcacagcaactgccaatcccgctgaagaggcctccctgggcacagcacaggctgcacggtgcacgcatttccctgaaggcagccccttcttcggaagcagctgttccaggcctcggaacagggcctgggtatccgcgtggtgggctggcagctgacggcctgctcagtggagccaggagctaactcagaccccaaagcaagcagggggccagtggcggggcccagcgcccagcaggacacccatgcaagaggctgagccccccaacatccaaggacaggagagacatggagtggcgctggacagtcacgacaaggacttgcctccagcactggacacacctgtgttaagaccagccctctgcttcccagtcccgccagcctggggcatcctccatgggctcagcactgagaggtcttgggtctgccacgttctctagctctccagtcacccactcatccagggtaggaggggttctccctgccccccgccgtggccttgggatctcaccctctccatgtcctggggacagcctcgccctcagccggactgcatccctcctgggcctgagcctcgggactcagtggacaccaaagtcaagaccagcacccaccacgggccctgccagcctctgccttccccagctggcctgggttctggcctgggtgaggatctggaagctgttggcaggactcaaccaagcactgctctctagctccagggcactaagccacaggaggcagcgccctgcagcctcccgtccacactgccagcaatgcccctggcccagtgagcccagacgctcctccaccccttccagaccaagctcaacgcctccaagaccagcaggccaaggccaagccctgccccagatcctcataggcagagaagcccttctgacatttcccccaggaggcagggggtggtctgagtctcctcacagcagagagacccaccggagccccctcaactttgcagatgcccacctggaaaatgggctgagctgcaccagaccctcacacaccacagcactgcaagctgatggaatgttccagttatgatggacacttcgtgatctgcaatgactgttgattcagcacattagcatctgacacagccaacctgaatacttcctgccccaggcggtcagggttatggcacgatgcaggtggcactcaggggctaacttcaggctgatgagtgtgtggggtatggggcagcagaggcagccagccagcaaagaggggccactgagcaccagggccctggtggaggctgctgtgggacggtcaggccaccaccgcaaagaggcagccggagcttctgcacaggatgtccctggccccaggtcctgcagcaccttagtccatactaccagccccacccaccttccttcctcttccctcttctaggacacaggctgtggaccccttcaggtgcactataatggggctggaggggcccccacatctctcagccccactaatgcagaatcccactacccgtgagctagaaggtgctcagaggccaggggtctctactgcccatgccgggcggccttccagtcattgcacagcaaagccatgtgcagggcgtccccctcaaccctgccctgaacatgccccagggcactgaggggcgaagccagtgcttgggctctgctgctgggagtctctggtctgtgtctgtgtgtgcctgtaagtgtgaaataaacctctctgatggc

SEQ ID NO: 27986 - DNA, 1687 bp, Homo sapiens
  source 1..1687: mol_type = unassigned DNA
gtgtgggcgtggcgggggctggggtctgcgggcgaaggtggcagcccattggaggtcccgggagcgaagtccagctgccgttaggcgctgggatagtcgcacgctggatgcatctacgtccgccgagcccctggggcgaagaggccgcgtccgccttcagttgtggccggtgcttcgccccctgacccttcgcccccaaagaccagctctaacgtgagcgcctcggccgccctgccccagcctcgtacacgccgccagcctcgcccagccggtgtccggagaccctcgggccgtgtccatttgtgggcaaagccagcggggcaggcttggccagagtgcaccactcggcgccgtcccaggcccgacgctctgggcgcgcccggaaccccaggttcgcggcccgtgtttccgaccggcggagggggctcagcggcccgatcccacggaagcgcgctcggaggggtgggacccggccggaccggagatggcgccgccagcgggcggggcggcggcggcggcctcggacttgggctccgccgcagtgctcttggctgtgcacgccgcggtgaggccgctgggcgccgggccagacgccgaggcacagctgcggaggctgcagctgagcgcggaccctgagcggcctgggcgcttccggctggagctgctgggcgcgggacctggggcggttaatttggagtggcccctggagtcagtttcctacaccatccgaggccccacccagcacgagctacagcctccaccaggagggcctggaaccctcagcctgcacttcctcaaccctcaggaagctcagcggtgggcagtcctagtccgaggtgccaccgtggaaggacagaatggcagcaagagcaactcaccaccagccttgggcccagaagcatgccctgtctccctgcccagtcccccggaagcctccacactcaagggccctccacctgaggcagatcttcctaggagccctggaaacttgacggagagagaagagctggcagggagcctggcccgggctattgcaggtggagacgagaagggggcagcccaagtggcagccgtcctggcccagcatcgtgtggccctgagtgttcagcttcaggaggcctgcttcccacctggccccatcaggctgcaggtcacacttgaagacgctgcctctgccgcatccgccgcgtcctctgcacacgttgccctgcaggtccacccccactgcactgttgcagctctccaggagcaggtgttctcagagctcggtttcccgccagccgtgcaacgctgggtcatcggacggtgcctgtgtgtgcctgagcgcagccttgcctcttacggggttcggcaggatggggaccctgctttcctctacttgctgtcagctcctcgagaagccccagcccagctggtcctgtccttcctgcaccttcatcaatgccccagaccgccctggctgtgagatgtgtagcacccagaggccctgcacttgggacccccttgctgcagcttccacctagcagccaccagaggttacaaggggagagtggcccttccctcacaagtccgacatctccaggcccccactgaactccggggacctctactgactgcttgctgggacagtcaccagggttggggggaagggccacaaaatgaaaccattaaagacccttaagagcca

SEQ ID NO: 27987 - DNA, 1765 bp, Homo sapiens
  source 1..1765: mol_type = unassigned DNA
attggaggtcccgggagcgaagtccagctgccgttaggcgctgggatagtcgcacgctggatgcatctacgtccgccgagcccctggggcgaagaggccgcgtccgccttcagttgtggccggtgcttcgccccctgacccttcgcccccaaagaccagctctaacgtgagcgcctcggccgccctgccccagcctcgtacacgccgccagcctcgcccagccggtgtccggagaccctcgggccgtgtccatttgtgggcaaagccagcggggcaggcttggccagagtgcaccactcggcgccgtcccaggcccgacgctctgggcgcgcccggaaccccaggttcgcggcccgtgtttccgaccggcggagggggctcagcggcccgatcccacggaagcgcgctcggaggggtgggacccggccggaccggagatggcgccgccagcgggcggggcggcggcggcggcctcggacttgggctccgccgcagtgctcttggctgtgcacgccgcggtgaggccgctgggcgccgggccagacgccgaggcacagctgcggaggctgcagctgagcgcggaccctgagcggcctgggcgcttccggctggagctgctgggcgcgggacctggggcggttaatttggagtggcccctggagtcagtttcctacaccatccgaggccccacccagcacgagctacagcctccaccaggagggcctggaaccctcagcctgcacttcctcaaccctcaggaagctcagcggtgggcagtcctagtccgaggtgccaccgtggaaggacagaatggcagcaagagcaactcaccaccagccttgggcccagaagcatgccctgtctccctgcccagtcccccggaagcctccacactcaagggccctccacctgaggcagatcttcctaggagccctggaaacttgacggagagagaagagctggcagggagcctggcccgggctattgcaggtggagacgagaagggggcagcccaagtggcagccgtcctggcccagcatcgtgtggccctgagtgttcagcttcaggaggcctgcttcccacctggccccatcaggctgcaggtcacacttgaagacgctgcctctgccgcatccgccgcgtcctctgcacacgttgccctgcaggtccacccccactgcactgttgcagctctccaggagcaggtgttctcagagctcggtttcccgccagccgtgcaacgctgggtcatcggacggtgcctgtgtgtgcctgagcgcagccttgcctcttacggggttcggcaggatggggaccctgctttcctctacttgctgtcagctcctcgagaagccccagccacaggacctagccctcagcacccccagaagatggacggggaacttggacgcttgtttcccccatcattggggctacccccaggcccccagccagctgcctccagcctgcccagtccactccagcccagctggtcctgtccttcctgcaccttcatcaatgccccagaccgccctggctgtgagatgtgtagcacccagaggccctgcacttgggacccccttgctgcagcttccacctagcagccaccagaggttacaaggggagagtggcccttccctcacaagtccgacatctccaggcccccactgaactccggggacctctactgactgcttgctgggacagtcaccagggttggggggaagggccacaaaatgaaaccattaaagacccttaagagcca

SEQ ID NO: 27988 - DNA, 3461 bp, Homo sapiens
  source 1..3461: mol_type = unassigned DNA
tatctcatttccaggcattgctggttcgtttttttcgaaaatcattccaaattatattccaattcgactttcttcaagttcatcccagaaaagcaaaggccgggcacttgaacaagaacagctgtcagcctggggcgagggggcagtgttggtgggggctggagcggggccggactctaattggtccacggcctcggcccgactatcaaatcagcagagcctgcgtcatcacgtcgttgcctgggctgccgtccgcggaaatttgaaatggctgacgggtcgctgacgggcggcggtctggaggcagcggccatggcgccggagcgcatgggctgggcggtggagcaggagctggcgtctctggagaaaggtttgttccaagatgaagattcatgcagtgattgtagctaccgtgataaaccaggttctagtttacaaagttttatgccagaaggaaaaacctttttcccagaaattttccaaacaaatcaacttttgttctatgagcgattcagagcctatcaagattacattttagctgactgcaaggcctctgaggtacaggaattcacagctgagttcttggagaaggtccttgagccatctggatggcgggcagtctggcacactaatgtgttcaaggtgctggttgagatcacagatgtggactttgcagccttgaaggcagtggtgaggcttgctgaaccatacctctgtgactctcaagtgagcacttttaccatggagtgcatgaaggagctccttgatctgaaggagcatcggttgcccctgcaggagctgtgggtggtgtttgatgattcaggagtgtttgaccagacagcccttgcaattgagcatgtcagatttttctaccaaaacatttggaggagttgggatgaagaagaggaggatgaatacgattattttgtcagatgtgttgaacctcgattaagattgcattatgacattcttgaagaccgagttccatcaggacttattgttgactaccacaatctgttgtctcaatgtgaggagagttacaggaaatttttaaatctgagaagcagtttgtcaaattgtaactctgattccgagcaggaaaatatctccatggtggaagggttaaaattgtattcggagatggaacagttgaaacaaaagctgaaactcattgagaatcctttgttgaggtatgtgtttggttatcagaagaattctaacatccaagcaaagggtgtccgttccagcggtcagaagatcactcatgtggtctcctccaccatgatggctggtctcctgcggtccctgcttacggacaggctttgccaggagcctggtgaggaagaaagagaaattcagttccatagtgatccattgtctgctataaatgcctgcttcgaaggtgacactgttattgtttgtcctggccattatgtggtacatggcactttctccattgctgactccattgagttggaaggatatggcctaccagatgacattgtgatagaaaagaggggcaaaggcgacacttttgtggactgcactggtgctgatattaaaatctcaggcataaaatttgttcagcatgatgctgtagagggaatcttaattgttcaccgtggtaagactacgctggaaaactgtgtgctgcagtgtgagacgaccggagtcacagtgcggacatcagcagagtttctaatgaagaactcggatttatatggcgccaagggtgctggtatagaaatctaccctgggagtcagtgcaccctgagtgacaatgggatccatcactgcaaggaagggatcctcattaaggacttcttagatgaacattatgacattcccaagatatccatggtgaataatataatacataataatgaaggttatggtgttgtcttggtgaaacctacaatcttctctgacctgcaagaaaatgctgaagatggaactgaagaaaataaagcgcttaaaattcagacaagtggagagccagatgtggctgaaagagtggatctagaagagctgattgagtgtgcaactggtaaaatggagctttgtgcaagaactgacccttctgagcaagtcgagggaaattgtgaaattgtaaatgaactaattgctgcctccacacagaaaggccagataaagaagaaaaggttgagtgaactggggatcacgcaagctgatgacaacttaatgtcacaggagatgtttgttgggattgtggggaaccagttcaagtggaatgggaaaggtagttttggcacatttcttttctgactacagtgatgtaagtagatagcaaaatactggattttgcacatgctgccctaagaatcactgctgccattgtagtttgctgtattgtctgtattttatatttgattatttgggcttgagtgaaaggtagatttatttccatttgcaggtgttgcacataaaacactccctctttataagaaaaatcataaatgcatataaaatagaaaatatttggagattgcttatctgaaagtcttgctttcttatacacatggttctctcatattaagcctggtagtaactttttagtgtaattacctttagcacttcaaagacgaggaagtaaggaagggaatgcaagactagtgcataaaaatgcaataggtgtcatatgtacagcattcttcttagagttgccttttcatcccaattacagtgagtctgatttccatcctgtatttgcataatacttgtcttaaaataaaagcttttatgattgggaatttatctgcctaatcagacttattattgagacgtcaatgggacgcatttttctgttgagctatgcagtcgtcaaaacagcgatagacagcataggaggtttgaagcagaaatgaaatgtgttattcagagccaatgttgtacatagagcattttcactattgctgaatgggaatgattaaaaacaaggtatttttcgggccaggcggtggctcacgcttgtaatcgcagcactttgggaggctgaggcaggaggatcacttgagcccaggagttcaagactagcctaggcaacatagtgagaccctgtctctactaaaaataaatttaaaaaaaattagctgagtgtggtggtgcatgcatgtagttccagctactcaggaggctgaggctagaggatccttgagcccaggaggttgaggctgcagtgaggtgtgattgcgccactgcattccagcttgggcgacagagcgagacccagtctcaaaaaaaaaaaaaagtatttttctcttaccgttacagtattctgattatattactgacacagtcaaaatgattaactgtacaacctgtatctgctgggtgttcttgttatcatattgtaaaacagctttaaaaatatttatattttaaaaactgtatgtgacattaatatgcctaatgattaaaattatagtgatgaaataacaaaa

SEQ ID NO: 27989 - DNA, 2369 bp, Homo sapiens
  source 1..2369: mol_type = unassigned DNA
atgcatccggtgagcagaaggaaactccgtgcgtcgcccggcgcctgtccgagtctgggaaccggtaccaagttttcgcgcagaccccgggcgcgaagctggccccgaggctgggaagtcgtccgcttccttccttcctcctccttccaccttcctccctcctccctcctccctcctcctccctcctcctcctcctgctcccccggacagaggttccgggaaccagccgggccggggcggggcggggcgagggagaggggcggccgcgcggatcactgaggctgtggcggcactgcgcccggcgctcgcgtccgtccgcccgtccgcccgcccagccatgactgcgccggtccccgcgccgcggatcctgttgccgttgctgttgctgctgctgctaacgccgcctccgggtgcacgtggtgaggtgtgtatggcttcccgtggactcagcctcttccccgagtcctgtccagatttctgctgtggtacctgtgatgaccaatactgctgctctgacgtgctgaagaaatttgtgtggagcgaggaaaggtgtgctgtgcctgaggccagcgtgcctgccagtgtagagccggtggagcagctgggctcggcgctgaggtttcgccctggctacaacgaccccatgtcagggttcggagcgaccttggccgttggcctgaccatctttgtgctgtctgtcgtcactatcatcatctgcttcacctgctcctgctgctgcctttacaagacgtgccgccgaccacgtccggttgtcaccaccaccacatccaccactgtggtgcatgccccttatcctcagcctccaagtgtgccgcccagctaccctggaccaagctaccagggctaccacaccatgccgcctcagccagggatgccagcagcaccctacccaatgcagtacccaccaccttacccagcccagcccatgggcccaccggcctaccacgagaccctggctggaggagcagccgcgccctaccccgccagccagcctccttacaacccggcctacatggatgccccgaaggcggccctctgagcattccctggcctctctggctgccacttggttatgttgtgtgtgtgcgtgagtggtgtgcaggcgcggttccttacgccccatgtgtgctgtgtgtgtccaggcacggttccttacgccccatgtgtgctgtgtgtgtcctgcctgtatatgtggcttcctctgatgctgacaaggtggggaacaatccttgccagagtgggctgggaccagactttgttctcttcctcacctgaaattatgcttcctaaaatctcaagccaaactcaaagaatggggtggtggggggcaccctgtgaggtggcccctgagaggtgggggcctctccagggcacatctggagttcttctccagcttaccctagggtgaccaagtagggcctgtcacaccagggtggcgcagctttctgtgtgatgcagatgtgtcctggtttcggcagcgtagccagctgctgcttgaggccatggctcgtccccggagttgggggtacccgttgcagagccagggacatgatgcaggcgaagcttgggatctggccaagttggactttgatcctttgggcagatgtcccattgctccctggagcctgtcatgcctgttggggatcaggcagcctcctgatgccagaacacctcaggcagagccctactcagctgtacctgtctgcctggactgtcccctgtccccgcatctcccctgggaccagctggagggccacatgcacacacagcctagctgcccccagggagctctgctgcccttgctggccctgcccttcccacaggtgagcagggctcctgtccaccagcacactcagttctcttccctgcagtgttttcattttattttagccaaacattttgcctgttttctgtttcaaacatgatagttgatatgagactgaaacccctgggttgtggagggaaattggctcagagatggacaacctggcaactgtgagtccctgcttcccgacaccagcctcatggaatatgcaacaactcctgtaccccagtccacggtgttctggcagcagggacacctgggccaatgggccatctggaccaaaggtggggtgtggggccctggatggcagctctggcccagacatgaatacctcgtgttcctcctccctctattactgtttcaccagagctgtcttagctcaaatctgttgtgtttctgagtctagggtctgtacacttgtttataataaatgcaatcgtttggagctgctgccccctttcttcctggcctcggctgctggaattggaatcaggctgtactctttccatccatttgggcttct

SEQ ID NO: 27990 - DNA, 575 bp, Homo sapiens
  source 1..575: mol_type = unassigned DNA
actgcgcccggcgctcgcgtccgtccgcccgtccgcccgcccagccatgactgcgccggtccccgcgccgcggatcctgttgccgttgctgttgctgctgctgctaacgccgcctccgggtgccctagctcagaggctcagattgggctgtgaagaccttgctgcatatgggttcacctgagccaccaggcacgggccatgctgatgataccagctttcagcacgtggtgaggtgtgtatggcttcccgtggactcagcctcttccccgagtcctgtccagatttctgctgtggtacctgtgatgaccaatactgctgctctgacgtgctgaagaaatttgtgtggagcgaggaaaggtgtgctgtgcctgaggccagcgtgcctgccagtgtagagccggtggagcagctgggctcggcgctgaggtttcgccctggctacaacgaccccatgtcagggttcggagcgaccttggccgttggcctgaccatctttgtgctgtctgtcgtcactatcatcatctgcttcacctgctcctgctgctgcctttacaagacgtgccgccgaccacgtc

SEQ ID NO: 27991 - DNA, 1839 bp, Homo sapiens
  source 1..1839: mol_type = unassigned DNA
gggcggggccatcctgtgtctttaagagggtggaacggggcttcgcgtctgtgcttcctgtggctgacgtcatctggaggagatttgctttctttttctccaaaaggggaggaaattgaaactgagtggcccacgatgggaagaggggaaagcccaggggtacaggaggcctctgggtgaaggcagaggctaacatggggttcggagcgaccttggccgttggcctgaccatctttgtgctgtctgtcgtcactatcatcatctgcttcacctgctcctgctgctgcctttacaagacgtgccgccgaccacgtccggttgtcaccaccaccacatccaccactgtggtgcatgccccttatcctcagcctccaagtgtgccgcccagctaccctggaccaagctaccagggctaccacaccatgccgcctcagccagggatgccagcagcaccctacccaatgcagtacccaccaccttacccagcccagcccatgggcccaccggcctaccacgagaccctggctggaggagcagccgcgccctaccccgccagccagcctccttacaacccggcctacatggatgccccgaaggcggccctctgagcattccctggcctctctggctgccacttggttatgttgtgtgtgtgcgtgagtggtgtgcaggcgcggttccttacgccccatgtgtgctgtgtgtgtccaggcacggttccttacgccccatgtgtgctgtgtgtgtcctgcctgtatatgtggcttcctctgatgctgacaaggtggggaacaatccttgccagagtgggctgggaccagactttgttctcttcctcacctgaaattatgcttcctaaaatctcaagccaaactcaaagaatggggtggtggggggcaccctgtgaggtggcccctgagaggtgggggcctctccagggcacatctggagttcttctccagcttaccctagggtgaccaagtagggcctgtcacaccagggtggcgcagctttctgtgtgatgcagatgtgtcctggtttcggcagcgtagccagctgctgcttgaggccatggctcgtccccggagttgggggtacccgttgcagagccagggacatgatgcaggcgaagcttgggatctggccaagttggactttgatcctttgggcagatgtcccattgctccctggagcctgtcatgcctgttggggatcaggcagcctcctgatgccagaacacctcaggcagagccctactcagctgtacctgtctgcctggactgtcccctgtccccgcatctcccctgggaccagctggagggccacatgcacacacagcctagctgcccccagggagctctgctgcccttgctggccctgcccttcccacaggtgagcagggctcctgtccaccagcacactcagttctcttccctgcagtgttttcattttattttagccaaacattttgcctgttttctgtttcaaacatgatagttgatatgagactgaaacccctgggttgtggagggaaattggctcagagatggacaacctggcaactgtgagtccctgcttcccgacaccagcctcatggaatatgcaacaactcctgtaccccagtccacggtgttctggcagcagggacacctgggccaatgggccatctggaccaaaggtggggtgtggggccctggatggcagctctggcccagacatgaatacctcgtgttcctcctccctctattactgtttcaccagagctgtcttagctcaaatctgttgtgtttctgagtctagggtctgtacacttgtttataataaatgcaatcgtttgga

SEQ ID NO: 27992 - DNA, 2250 bp, Homo sapiens
  source 1..2250: mol_type = unassigned DNA
agtcctggcccactgcgccagcgctgagcctgccagggctggggctggggatcaccttgggatgatggtgtcagtcccagggggcaggagatcgagtgtcctctgagctggcgactgggcctgtagaagggaaccggcatttgtggagtgtctactgagtgccaaggtctgcgctgggcactgtcctcgcaccgcctcacctagtcctcacgtagccctcgggcaagtgaggatccgccgggactgcggctgggagggatggctgtggctgtcccccagcccacacagtaggcgctcagtgtcagggtgcatattcccggggacgccctccaggcctgagagctgggggccgccgccgccccccatgcatccgcacgtggtgaggtgtgtatggcttcccgtggactcagcctcttccccgagtcctgtccagatttctgctgtggtacctgtgatgaccaatactgctgctctgacgtgctgaagaaatttgtgtggagcgaggaaaggtgtgctgtgcctgaggccagcgtgcctgccagtgtagagccggtggagcagctgggctcggcgctgaggtttcgccctggctacaacgaccccatgtcagggttcggagcgaccttggccgttggcctgaccatctttgtgctgtctgtcgtcactatcatcatctgcttcacctgctcctgctgctgcctttacaagacgtgccgccgaccacgtccggttgtcaccaccaccacatccaccactgtggtgcatgccccttatcctcagcctccaagtgtgccgcccagctaccctggaccaagctaccagggctaccacaccatgccgcctcagccagggatgccagcagcaccctacccaatgcagtacccaccaccttacccagcccagcccatgggcccaccggcctaccacgagaccctggctggaggagcagccgcgccctaccccgccagccagcctccttacaacccggcctacatggatgccccgaaggcggccctctgagcattccctggcctctctggctgccacttggttatgttgtgtgtgtgcgtgagtggtgtgcaggcgcggttccttacgccccatgtgtgctgtgtgtgtccaggcacggttccttacgccccatgtgtgctgtgtgtgtcctgcctgtatatgtggcttcctctgatgctgacaaggtggggaacaatccttgccagagtgggctgggaccagactttgttctcttcctcacctgaaattatgcttcctaaaatctcaagccaaactcaaagaatggggtggtggggggcaccctgtgaggtggcccctgagaggtgggggcctctccagggcacatctggagttcttctccagcttaccctagggtgaccaagtagggcctgtcacaccagggtggcgcagctttctgtgtgatgcagatgtgtcctggtttcggcagcgtagccagctgctgcttgaggccatggctcgtccccggagttgggggtacccgttgcagagccagggacatgatgcaggcgaagcttgggatctggccaagttggactttgatcctttgggcagatgtcccattgctccctggagcctgtcatgcctgttggggatcaggcagcctcctgatgccagaacacctcaggcagagccctactcagctgtacctgtctgcctggactgtcccctgtccccgcatctcccctgggaccagctggagggccacatgcacacacagcctagctgcccccagggagctctgctgcccttgctggccctgcccttcccacaggtgagcagggctcctgtccaccagcacactcagttctcttccctgcagtgttttcattttattttagccaaacattttgcctgttttctgtttcaaacatgatagttgatatgagactgaaacccctgggttgtggagggaaattggctcagagatggacaacctggcaactgtgagtccctgcttcccgacaccagcctcatggaatatgcaacaactcctgtaccccagtccacggtgttctggcagcagggacacctgggccaatgggccatctggaccaaaggtggggtgtggggccctggatggcagctctggcccagacatgaatacctcgtgttcctcctccctctattactgtttcaccagagctgtcttagctcaaatctgttgtgtttctgagtctagggtctgtacacttgtttataataaatgcaatcgtttgg

SEQ ID NO: 27993 - DNA, 2081 bp, Homo sapiens
  source 1..2081: mol_type = unassigned DNA
gtgtgccctgggagctgccagtttctagctcagtcctggcccactgcgccagcgctgagcctgccagggctggggctggggatcaccttgggatgatggtgtcagtcccagggggcaggagatcgagtgtcctctgagctggcgactgggcctgtagaagggaaccggcatttgtggagtgtctactgagtgccaagcacgtggtgaggtgtgtatggcttcccgtggactcagcctcttccccgagtcctgtccagatttctgctgtggtacctgtgatgaccaatactgctgctctgacgtgctgaagaaatttgtgtggagcgaggaaaggtgtgctgtgcctgaggccagcgtgcctgccagtgtagagccggtggagcagctgggctcggcgctgaggtttcgccctggctacaacgaccccatgtcagggttcggagcgaccttggccgttggcctgaccatctttgtgctgtctgtcgtcactatcatcatctgcttcacctgctcctgctgctgcctttacaagacgtgccgccgaccacgtccggttgtcaccaccaccacatccaccactgtggtgcatgccccttatcctcagcctccaagtgtgccgcccagctaccctggaccaagctaccagggctaccacaccatgccgcctcagccagggatgccagcagcaccctacccaatgcagtacccaccaccttacccagcccagcccatgggcccaccggcctaccacgagaccctggctggaggagcagccgcgccctaccccgccagccagcctccttacaacccggcctacatggatgccccgaaggcggccctctgagcattccctggcctctctggctgccacttggttatgttgtgtgtgtgcgtgagtggtgtgcaggcgcggttccttacgccccatgtgtgctgtgtgtgtccaggcacggttccttacgccccatgtgtgctgtgtgtgtcctgcctgtatatgtggcttcctctgatgctgacaaggtggggaacaatccttgccagagtgggctgggaccagactttgttctcttcctcacctgaaattatgcttcctaaaatctcaagccaaactcaaagaatggggtggtggggggcaccctgtgaggtggcccctgagaggtgggggcctctccagggcacatctggagttcttctccagcttaccctagggtgaccaagtagggcctgtcacaccagggtggcgcagctttctgtgtgatgcagatgtgtcctggtttcggcagcgtagccagctgctgcttgaggccatggctcgtccccggagttgggggtacccgttgcagagccagggacatgatgcaggcgaagcttgggatctggccaagttggactttgatcctttgggcagatgtcccattgctccctggagcctgtcatgcctgttggggatcaggcagcctcctgatgccagaacacctcaggcagagccctactcagctgtacctgtctgcctggactgtcccctgtccccgcatctcccctgggaccagctggagggccacatgcacacacagcctagctgcccccagggagctctgctgcccttgctggccctgcccttcccacaggtgagcagggctcctgtccaccagcacactcagttctcttccctgcagtgttttcattttattttagccaaacattttgcctgttttctgtttcaaacatgatagttgatatgagactgaaacccctgggttgtggagggaaattggctcagagatggacaacctggcaactgtgagtccctgcttcccgacaccagcctcatggaatatgcaacaactcctgtaccccagtccacggtgttctggcagcagggacacctgggccaatgggccatctggaccaaaggtggggtgtggggccctggatggcagctctggcccagacatgaatacctcgtgttcctcctccctctattactgtttcaccagagctgtcttagctcaaatctgttgtgtttctgagtctagggtctgtacacttgtttataataaatgcaatcgtttggagctgct

SEQ ID NO: 27994 - DNA, 1732 bp, Homo sapiens
  source 1..1732: mol_type = unassigned DNA
tgacgtcatctggaggagatttgctttctttttctccaaaaggggaggaaattgaaactgagtggcccacgatgggaagaggggaaagcccaggggtacaggaggcctctgggtgaaggcagaggctaacatggggttcggagcgaccttggccgttggcctgaccatctttgtgctgtctgtcgtcactatcatcatctgcttcacctgctcctgctgctgcctttacaagacgtgccgccgaccacgtccggttgtcaccaccaccacatccaccactgtggtgcatgccccttatcctcagcctccaagtgtgccgcccagctaccctggaccaagctaccagggctaccacaccatgccgcctcagccaggatgccagcagcaccctacccaatgcagtacccaccaccttacccagcccagcccatgggcccaccggcctaccacgagaccctggctggaggagcagccgcgccctaccccgccagccagcctccttacaacccggcctacatggatgccccgaggcggccctctgagcattccctggcctctctggctgccacttggttatgttgtgtgtgtgcgtgagtggtgtgcaggcgcggttccttacgccccatgtgtgctgtgtgtgtcctgcctgtatatgtggcttcctctgatgctgacaaggtggggaacaatccttgccagagtgggctgggaccagactttgttctcttcctcacctgaaattatgcttcctaaaatctcaagccaaactcaaagaatggggtggtggggggcaccctgtgaggtggcccctgagaggtgggggcctctccagggcacatctggagttcttctccagcttaccctagggtgaccaagtagggcctgtcacaccagggtggcgcagctttctgtgtgatgcagatgtgtcctggtttcggcagcgtagccagctgctgcttgaggccatggctcgtccccggagttgggggtacccgttgcagagccagggacatgatgcaggcgaagcttgggatctggccaagttggactttgatcctttgggcagatgtcccattgctccctggagcctgtcatgcctgttggggatcaggcagcctcctgatgccagaacacctcaggcagagccctactcagctgtacctgtctgcctggactgtcccctgtccccgcatctcccctgggaccagctggagggccacatgcacacacagcctagctgcccccagggagctctgctgcccttgctggccctgcccttcccacaggtgagcagggctcctgtccaccagcacactcagttctcttccctgcagtgttttcattttattttagccaaacattttgcctgttttctgtttcaaacatgatagttgatatgagactgaaacccctgggttgtggagggaaattggctcagagatggacaacctggcaactgtgagtccctgcttcccgacaccagcctcatggaatatgcaacaactcctgtaccccagtccacggtgttctggcagcagggacacctgggccaatgggccatctggaccaaaggtggggtgtggggccctggatggcagctctggcccagacatgaatacctcgtgttcctcctccctctattactgtttcaccagagctgtcttagctcaaatctgttgtgtttctgagtctagggtctgtacacttgtttataataaatgcaatcgtttgg

SEQ ID NO: 27995 - DNA, 4043 bp, Homo sapiens
  source 1..4043: mol_type = unassigned DNA
gtggccggccggacctgcaccccgcgcttgaccccgctcatcctccccccgcccggccgggcgcgctcctccccggccggcccctcggcgcgcggcgcgctggaggcgaacgcgggctgaggcgaacgcgggctgagccgagcgcagtggccgccgaccaccgagcgccccgcgccgctccctgcatgtgcggcccgcggcggctcgcagctcccggcagcagcctcggcagcttcggccgcgcctcgagaggcggccgcagaggctccagcggcggccgagcggccgagcccgggctgggagacaccatgcgccgcgtccttcggctgctcctcggttgcttcctcaccgagctgtgcgcccgcgtgtgccgggcgcaggagcgagcgggacacgggcagctggcgcaactgggcggcgtgttgctgctggcggggggcaaccgctccggggccgcctccggagaggccagcgagggcgctgaggcatcggacgcgcccccgacccgggcgcccacgccggacttctgccggggctacttcgatgtcatgggccagtgggacccgccgttcaactgcagctcgggcgacttcatcttctgctgcgggacttgtggcttccggttctgctgcacgtttaagaagcggcgactgaaccaaagcacctgcaccaactacgacacgccgctctggctcaacaccggcaagccccccgcccgcaaggacgaccccttgcacgaccccaccaaggacaagaccaacctgatcgtctacatcatctgcggggtggtggccgtcatggtgctcgtgggcatcttcaccaagctggggctggagaaagcgcaccggccccaaagggagcacatgtccaggctctatgacaatctgctgtttatggaggcacagatttctttccaagaggacgaacctgcccctggagagtggagtgtcggacttcaaacctggacagtctgagtgcacggatccttggccgctaggctgcactgcgtttgagtgcaaacctgcaggaattccagacttctcagatcacagagaagtacgcgatgccctgcaaacaacagctcatgcatcggggccagttcaagaagctaccgtaagatgaagtctaggaatgctttctatatcggccccggcaggcccagacgtcttggtggaggcgttggtgagaaatgaccttggggacagaagcacatatgtgaagctctctacacttgaagccagtagggaacacatgtcattattttgtccaccttcaaacagaattggaaatccaagtggcaaatggcagataagggtcctgtgtgtttttaaaacatgcttcagaagaactggcaccccttggaaagaaatagcaacaaataatgataaatgcacctcctcctcttgccttttgccttccagtttctctcctgcctctcatctttctatgcatttgtggttatcctaaggctttgaccagcttcccaggctggagaagtccatgtgtgcatgcatctactgttggccacagaaaagtcttaatttatttttctttgcagggtatgttgacttctctttgggcactgagtccttgcattttaaaaatcaacttcattgaagtataatttacacaataaaatgcacacattgtaagtgtgtagtttgatgagcttggacaaatgtctatacctgtgtaatcattactctagaaagctcactcatgcccattgcccttgcatttttgaaaaataattgatgcttcttgtgcaagaagaagtgctcaggaactctattcaagtgtttaaaagtcaacacatagattggacattgggatacctggaggctttgaagcaagataccgggactctgagttctgtttggaaatattggtgtcatatatttgtcattgtaattggaaagaaaagagatgcaccattttcttcttgttctttggataagctaagctcattcccatcttggagctgttgcactggcccttgtgtggctggtccctcctcatcaccagggtcccagctccaatgtcatcttctctgagaagccgtccctgaccaggcttagttgcttcccaccccagcctgacacactccagcccatcacccagtcagtgttatttgcttcatttttacattatggtctaaaattaacttgctagtttactggtttactagtttattatctgtctccttccattatccctctccttccctccttcccttccccttccttccttccttccttccttccttcgagacacagtcgtactctgtcaccccggctggagtgcagtggtgtgatcttgcctcactacaacccctgcctcctgggttttagcgattcttctgcctcagcctcccgagtagctgggactacaggcacccaccatgatgccaggctaatttttgtatttttattggagacagggtttcaccatgttggccaggctggtctcgaactcttgacctcaagtgatccacctgtctcggcctcccaaagtgctgggattacaggcatgagccactgcacctggcccttttattattcatagtaagacacacagggaccacaattgtctcttctactcagtagttggattctgagtgcctagttcagtatttggcaagtaagagttctgcatttgatatcctggtttacctggcacaacaaagtatctccaaattcattcattcattctttcattcattcgataggtatttactgaacatctaacttatgcccaacactgtgctgagagatatgagataaccatgaatagtacaaaagcaatccctgcccttgaagagcaaacagccaaatatcaggagacaggtaacacacaaggaaatgtacaagaaagttgagccagcacttttataagtactggttctagtactagctttcataagaaagtactggttctagtactagctttcagtactctcttgtgaaattttcaatattcagtcatttcaacctcaaaaatggcaacataattatgtttcaacataattgttgttttaaacaaacaattttgtttcaacataattctcctgaactgggtggaaggctatcaagaaaaagcttagcttcttcttcaggtaactgcaagagacagggttctctagagaaacagaacaaatatacaaagagattcattataaggaattggaagtccaaaatctccagagcctctgtacttgtacaagtctgaaggccgacaggcaggagaattctctctttttggggcaaaggtcagtgttttgttctatccaggctttcagatgattggttgaggctcactcacattagaagggcaatctgtcttactgccattagaatgcaacctgttttacttagcttactgatttcaatgttaatctatttcaagagcaccctcacagaaacacccagaataatgtttgatgaaatatctgggcaccctgtgacccagtcaagttgacacatgacactaaccatcacagtacgcttagggtcttgtcactcggagtgtggcctgtgaaccagcagcatttttatcttctgggagcttgggcacgatctcaggccccacctcctgcttattgattcagaatctgcattttaacaagatccccaggtgatctggatgcaccgtaacatctgagaagcactcaaactatgtgccgcaaacaaacgccaaattcttaggcatttgtgtggcttggagcacatagttggttctttctactgtctaattcattacattttttcagcacattcctgtctataaaatgtttttttgtatgcaccccaatatatgcacatttataagcatatgcatgaacccacgaacaatgattaggtacattatgaagcatacgtaaggacagaaatttcaaaccaagcttgagggtgaaataaatattatttgaaaacctgttgctaattgtgatgacttcatactatcattagttactatctcaatgcataatgtacagtgacgggtgaagtttatcattaataaaaaaaatctggattttaaccatt

SEQ ID NO: 27996 - DNA, 2042 bp, Homo sapiens
  source 1..2042: mol_type = unassigned DNA
attccacaagtgtcgcttcgctctcttcagcgcacttggcgagctggtgaggtgagagggatactgcgagagggctaggggcggccagtccggggctgccggccaaggctaggcgctgccagcccgattctcctctgctctccacccccgcctcacccagtggccggccggacctgcaccccgcgcttgaccccgctcatcctccccccgcccggccgggcgcgctcctccccggccggcccctcggcgcgcggcgcgctggaggcgaacgcgggctgaggcgaacgcgggctgagccgagcgcagtggccgccgaccaccgagcgccccgcgccgctccctgcatgtgcggcccgcggcggctcgcagctcccggcagcagcctcggcagcttcggccgcgcctcgagaggcggccgcagaggctccagcggcggccgagcggccgagcccgggctgggagacaccatgcgccgcgtccttcggctgctcctcggttgcttcctcaccgagctgtgcgcccgcgtgtgccgggcgcaggagcgagcgggacacgggcagctggcgcaactgggcggcgtgttgctgctggcggggggcaaccgctccggggccgcctccggagaggccagcgagggcgctgaggcatcggacgcgcccccgacccgggcgcccacgccggacttctgccggggctacttcgatgtcatgggccagtgggacccgccgttcaactgcagctcgggcgacttcatcttctgctgcgggacttgtggcttccggttctgctgcacgtttaagaagcggcgactgaaccaaagcacctgcaccaactacgacacgccgctctggctcaacaccggcaagccccccgcccgcaaggacgaccccttgcacgaccccaccaaggacaagaccaacctgatcgtctacatcatctgcggggtggtggccgtcatggtgctcgtgggcatcttcaccaagctggggctggagaaagcgcaccggccccaaagggagcacatgtccagggcccttgcggatgtcatgagaccacagggccactgcaacactgatcacatggagagagacctaaacatcgttgtccacgtccagcattatgagaacatggacacgagaacccccataaataatcttcatgccacccagatgaacaacgcagtgcccacctctcctctgctccagcagatgggccatccacattcgtacccgaacctgggccagatctccaacccctatgaacagcagccaccaggaaaagagctcaacaagtacgcctccttaaaggcagtcggaagttctgatggtgactgggcagtatcgacacttaagtcaccaaaagctgacaaggtcaatgacgacttctacaccaagcgacggcacctggctgagctggctgccaaggggaacttacctctgcaccccgtaagagtggaggacgagccccgggccttcagccctgagcacggtcctgccaagcagaatggacagaagtcccgcaccaacaagatgcccccacatcccctggcctacacctctaccaccaactttaagggctgggaccccaacgagcagtccctccggcggcaggcttacagcaacaagggcaagcttggcacggccgagacaggctccagcgaccccttgggaactcgcccccagcactacccacccccacagccatacttcatcaccaacagcaaaacagaagtgactgtctgagctttcaccacagggagcaccctggagaccacactcaactgagagaggcaaaaaacaaccccgcccacaccctccccatcctcccctaatacatgcgtccacacactcactctcaacaagaaccaactctaaacctactggggacacagagtcgcgcttttcctaggtcatgcctgtaacgtgtcggcgggcagctgagaaagaccgaagcgtggacattcagcaatacagcaaaggggaaaatgaggcacactctttccacttcaggcccaagatggccaactcacatgcccaaaccgt

SEQ ID NO: 27997 - DNA, 4180 bp, Homo sapiens
  source 1..4180: mol_type = unassigned DNA
ctcttcagcgcacttggcgagctggtgaggtgagagggatactgcgagagggctaggggcggccagtccggggctgccggccaaggctaggcgctgccagcccgattctcctctgctctccacccccgcctcacccagtggccggccggacctgcaccccgcgcttgaccccgctcatcctccccccgcccggccgggcgcgctcctccccggccggcccctcggcgcgcggcgcgctggaggcgaacgcgggctgaggcgaacgcgggctgagccgagcgcagtggccgccgaccaccgagcgccccgcgccgctccctgcatgtgcggcccgcggcggctcgcagctcccggcagcagcctcggcagcttcggccgcgcctcgagaggcggccgcagaggctccagcggcggccgagcggccgagcccgggctgggagacaccatgcgccgcgtccttcggctgctcctcggttgcttcctcaccgagctgtgcgcccgcgtgtgccgggcgcaggagcgagcgggacacgggcagctggcgcaactgggcggcgtgttgctgctggcggggggcaaccgctccggggccgcctccggagaggccagcgagggcgctgaggcatcggacgcgcccccgacccgggcgcccacgccggacttctgccggggctacttcgatgtcatgggccagtgggacccgccgttcaactgcagctcgggcgacttcatcttctgctgcgggacttgtggcttccggttctgctgcacgtttaagaagcggcgactgaaccaaagcacctgcaccaactacgacacgccgctctggctcaacaccggcaagccccccgcccgcaaggacgaccccttgcacgaccccaccaaggacaagaccaacctgatcgtctacatcatctgcggggtggtggccgtcatggtgctcgtgggcatcttcaccaagctggggctggagaaagcgcaccggccccaaagggagcacatgtccaggctctatgacaatctgctgtttatggaggcacagatttctttccaagaggacgaacctgcccctggagagtggagtgtcggacttcaaacctggacagtctgagtgcacggatccttggccgctaggctgcactgcgtttgagtgcaaacctgcaggaattccagacttctcagatcacagagaagtacgcgatgccctgcaaacaacagctcatgcatcggggccagttcaagaagctaccgtaagatgaagtctaggaatgctttctatatcggccccggcaggcccagacgtcttggtggaggcgttggtgagaaatgaccttggggacagaagcacatatgtgaagctctctacacttgaagccagtagggaacacatgtcattattttgtccaccttcaaacagaattggaaatccaagtggcaaatggcagataagggtcctgtgtgtttttaaaacatgcttcagaagaactggcaccccttggaaagaaatagcaacaaataatgataaatgcacctcctcctcttgccttttgccttccagtttctctcctgcctctcatctttctatgcatttgtggttatcctaaggctttgaccagcttcccaggctggagaagtccatgtgtgcatgcatctactgttggccacagaaaagtcttaatttatttttctttgcagggtatgttgacttctctttgggcactgagtccttgcattttaaaaatcaacttcattgaagtataatttacacaataaaatgcacacattgtaagtgtgtagtttgatgagcttggacaaatgtctatacctgtgtaatcattactctagaaagctcactcatgcccattgcccttgcatttttgaaaaataattgatgcttcttgtgcaagaagaagtgctcaggaactctattcaagtgtttaaaagtcaacacatagattggacattgggatacctggaggctttgaagcaagataccgggactctgagttctgtttggaaatattggtgtcatatatttgtcattgtaattggaaagaaaagagatgcaccattttcttcttgttctttggataagctaagctcattcccatcttggagctgttgcactggcccttgtgtggctggtccctcctcatcaccagggtcccagctccaatgtcatcttctctgagaagccgtccctgaccaggcttagttgcttcccaccccagcctgacacactccagcccatcacccagtcagtgttatttgcttcatttttacattatggtctaaaattaacttgctagtttactggtttactagtttattatctgtctccttccattatccctctccttccctccttcccttccccttccttccttccttccttccttccttcgagacacagtcgtactctgtcaccccggctggagtgcagtggtgtgatcttgcctcactacaacccctgcctcctgggttttagcgattcttctgcctcagcctcccgagtagctgggactacaggcacccaccatgatgccaggctaatttttgtatttttattggagacagggtttcaccatgttggccaggctggtctcgaactcttgacctcaagtgatccacctgtctcggcctcccaaagtgctgggattacaggcatgagccactgcacctggcccttttattattcatagtaagacacacagggaccacaattgtctcttctactcagtagttggattctgagtgcctagttcagtatttggcaagtaagagttctgcatttgatatcctggtttacctggcacaacaaagtatctccaaattcattcattcattctttcattcattcgataggtatttactgaacatctaacttatgcccaacactgtgctgagagatatgagataaccatgaatagtacaaaagcaatccctgcccttgaagagcaaacagccaaatatcaggagacaggtaacacacaaggaaatgtacaagaaagttgagccagcacttttataagtactggttctagtactagctttcataagaaagtactggttctagtactagctttcagtactctcttgtgaaattttcaatattcagtcatttcaacctcaaaaatggcaacataattatgtttcaacataattgttgttttaaacaaacaattttgtttcaacataattctcctgaactgggtggaaggctatcaagaaaaagcttagcttcttcttcaggtaactgcaagagacagggttctctagagaaacagaacaaatatacaaagagattcattataaggaattggaagtccaaaatctccagagcctctgtacttgtacaagtctgaaggccgacaggcaggagaattctctctttttggggcaaaggtcagtgttttgttctatccaggctttcagatgattggttgaggctcactcacattagaagggcaatctgtcttactgccattagaatgcaacctgttttacttagcttactgatttcaatgttaatctatttcaagagcaccctcacagaaacacccagaataatgtttgatgaaatatctgggcaccctgtgacccagtcaagttgacacatgacactaaccatcacagtacgcttagggtcttgtcactcggagtgtggcctgtgaaccagcagcatttttatcttctgggagcttgggcacgatctcaggccccacctcctgcttattgattcagaatctgcattttaacaagatccccaggtgatctggatgcaccgtaacatctgagaagcactcaaactatgtgccgcaaacaaacgccaaattcttaggcatttgtgtggcttggagcacatagttggttctttctactgtctaattcattacattttttcagcacattcctgtctataaaatgtttttttgtatgcaccccaatatatgcacatttataagcatatgcatgaacccacgaacaatgattaggtacattatgaagcatacgtaaggacagaaatttcaaaccaagcttgagggtgaaataaatattatttgaaaacctgttgctaattgtgatgacttcatactatcattagttactatctcaatgcataatgtacagtgacgggtgaagtttatcattaataaaaaaaatctggattttaaccatt

SEQ ID NO: 27998 - DNA, 6726 bp, Homo sapiens
  source 1..6726: mol_type = unassigned DNA
ctcttcagcgcacttggcgagctggtgaggtgagagggatactgcgagagggctaggggcggccagtccggggctgccggccaaggctaggcgctgccagcccgattctcctctgctctccacccccgcctcacccagtggccggccggacctgcaccccgcgcttgaccccgctcatcctccccccgcccggccgggcgcgctcctccccggccggcccctcggcgcgcggcgcgctggaggcgaacgcgggctgaggcgaacgcgggctgagccgagcgcagtggccgccgaccaccgagcgccccgcgccgctccctgcatgtgcggcccgcggcggctcgcagctcccggcagcagcctcggcagcttcggccgcgcctcgagaggcggccgcagaggctccagcggcggccgagcggccgagcccgggctgggagacaccatgcgccgcgtccttcggctgctcctcggttgcttcctcaccgagctgtgcgcccgcgtgtgccgggcgcaggagcgagcgggacacgggcagctggcgcaactgggcggcgtgttgctgctggcggggggcaaccgctccggggccgcctccggagaggccagcgagggcgctgaggcatcggacgcgcccccgacccgggcgcccacgccggacttctgccggggctacttcgatgtcatgggccagtgggacccgccgttcaactgcagctcgggcgacttcatcttctgctgcgggacttgtggcttccggttctgctgcacgtttaagaagcggcgactgaaccaaagcacctgcaccaactacgacacgccgctctggctcaacaccggcaagccccccgcccgcaaggacgaccccttgcacgaccccaccaaggacaagaccaacctgatcgtctacatcatctgcggggtggtggccgtcatggtgctcgtgggcatcttcaccaagctggggctggagaaagcgcaccggccccaaagggagcacatgtccagggcccttgcggatgtcatgagaccacagggccactgcaacactgatcacatggagagagacctaaacatcgttgtccacgtccagcattatgagaacatggacacgagaacccccataaataatcttcatgccacccagatgaacaacgcagtgcccacctctcctctgctccagcagatgggccatccacattcgtacccgaacctgggccagatctccaacccctatgaacagcagccaccaggaaaagagctcaacaagtacgcctccttaaaggcagtcggaagttctgatggtgactgggcagtatcgacacttaagtcaccaaaagctgacaaggtcaatgacgacttctacaccaagcgacggcacctggctgagctggctgccaaggggaacttacctctgcaccccgtaagagtggaggacgagccccgggccttcagccctgagcacggtcctgccaagcagaatggacagaagtcccgcaccaacaagatgcccccacatcccctggcctacacctctaccaccaactttaagggctgggaccccaacgagcagtccctccggcggcaggcttacagcaacaagggcaagcttggcacggccgagacaggctccagcgaccccttgggaactcgcccccagcactacccacccccacagccatacttcatcaccaacagcaaaacagaagtgactgtctgagctttcaccacagggagcaccctggagaccacactcaactgagagaggcaaaaaacaaccccgcccacaccctccccatcctcccctaatacatgcgtccacacactcactctcaacaagaaccaactctaaacctactggggacacagagtcgcgcttttcctaggtcatgcctgtaacgtgtcggcgggcagctgagaaagaccgaagcgtggacattcagcaatacagcaaaggggaaaatgaggcacactctttccacttcaggcccaagatggccaactcacatgcccaaaccgtggggctgagttttcttttcctcctaacttgaaactgaaatccatggtgacaaaatataaaagtagcacaatttagagaaattgtccatttgagcacatacactacttgccacgtgctgtctgtttctaggttcgaaagccagggtggaaatgggggtagagaatgagggaggacacaagagaagagtgtattctggaagaggagttgttctgggaggaatttgcccacattagaagcatttttctaattccaagaagtggtgacgtggacgtaaaattttgacgagcatgaaacagtaactggaccccaaccattctatttatagtacttttcatatcatccatgttgaaagcaaaaaacaacacaccctcaaactcacagaaagtaaatagaccctgaacccaccgacaatgatgggaaggaaaaaacaaaaaacaaaaaacattttagagaactcccataaggaccatgaccgtggaaatgggagggatgggcttttacggagagggtccggagagtatcaaataactttttaaaaagaggattaaaatgtaagcccactacaaaacagataaaaacggcaaattaggtgttttttttttttcaaaaatcttgaagacttgttgacattaacaacaacaaatccacagttggaaaagtccacaggagatcagatgaggatccagaagcctctgatttctgggttttgcctccaagacctgaaacagccacagaaacaagtcctctataaactgtatgtccctgacatccctttcccttcagcgcgttgccgccgccgctgccaaacttcaactgctttggactgaaaatgtcataagcgtgggtggtgccttcaatgtgttactgttgtttaatgacagtcttgtttcccaagtgcaacctgtgttcttttagccttccttcctcttctttttctgcagtagtagaagatgtttccatccttcctttgtaggtgagcccaccccataacaccctctgaggggctgctacaatgtcaggggtacccaagaacgaagacctccctactctctacactatcaaaattagtccttccattttctagccctctcaaacctgtcagatgtttcttggtcccgtaattcccatggtccctccaaattacctccccacatacttcatgtgttcatctcccatccagaatgtcctgaggttgtttttctggttggttctcataatccatagtccttggggtcccagcaaagtcagttttcctacaagttgtgtttgttttgtggaagcccaaagaagtggattgagagagaagagatttttatctaaggtggaaggtttttcaactagcccctaaaggtctttggtagttaattaacattcaacagacccacagcaactctggtgtcagaagctataaatggtctggccaaacaagactcagagtattttctgaaatcctgagctgcaaggttctgcctcacctgtctctccactctgacatcacgaaatcagcaaaaccagatatttattctcctcactcccagcagatacgaggacaccaacaatgcagttgatccctctgggcctgagtctcccatctgaaacatggggaattggggtaggtcaagctttttgaaactgcaaaacctctacctgtttttaaaaatgagatcttttgaccaggcacagtggctcacacctaaaatcccagcactttgggaggctgaagcaggtggatcatctgaggtcaggagtttgagatcagcctggtcaacatggtgaaaccccgtctctactaaaaatacaaacattagctgggcatggtggtgggtgcctgtaatcccaactactcgagaggctgaggcaggagaatcgcttaaacttgggaggttgcagtgagctgagaccacaccactgccctctagcctgggtgacggagtgagactatctcaaaaaaaaaaaaaaaaagaaaaaaaaagagatctttcaaagaacgcataataggagatctccatgtataaaaaggtaccatgctgtacaaagctggggtcagagatttagtgcccaccttctcagcctccttgggaagaccccagagcttcccagagtcaagtaaataccactgggcatggtcagagtttccttgacgttaatgagctatgtacctgcaacacactttggcatctctgtatatcaccttcacaatatttgtatctaaattgattcattttaatgcattttgtttttaaaatgaaaacttcctgtcttcatcacaaatttaaaaaaaatcatcagttgccataaatagaaagcaaacataaaaataagtacaaaggaaacaagcagcgatgattaaattccagctggagtctgttgtctgtgagtctgaactaaagcctggggttctttctttctctctccatctctctgtttctgtttctctctctctcttaaaatgatatcatcaggtattaaataattgttaaaaataccagcacccaatgaagactttctctttgtactaataagatggaccaaaaagtaaatgaaaggggaatcatttcctatgcaagtcagtgttgaacaatgctgtagctatgtactgcctatgatcattgtgcatacactaggggtgcatagcccacacttcagaaaaccctgggttgacttatctgtgaggctctttccagctcaaagtttccataattcttatctcccttttacctcgtggttgctctttgcccccagtccacttcgtcccacccttatctcaactctgattaagagtctttcttggcctctaaatctgtagtattgtattccttctgcatgctccttctcctctgaataaacttcatcaattgaactgggctccttggggtctgcagttgtaattttggcagcaaaggtgcagactggtcattaagatgtagccacaatgatggcccaagaaggacacgtactttccaagtagtcctgtctaggatggaaagctcaggaagtgcttcatagtttattatcttccagttggttttgggagatgaactgaagagggaagtttggatagggaaggtctttttattcttttttttttaatgtatccatggagtatttattattattattattattattattattattattatactttaagttttagggtacatgtgcacaatgtgcaggttagttacatatgtatacacgtgtcatgctggtgtgctgcacccattaactcgtcatttagcattagctatatctcctaatgctatccctcccccctccccccaccccacaacagtccccagagtgtgatgttccccttcttgtgtccatgtgttctcattgttcaattcccatctatgagtgagaacatgcagtgtttggtttttttgtccttgcgatagtttactgagaatgatgatttccaatttcatccatgtccctacaaaggacatgaactcatcattttttatggctgcatagtattccatggtgtatatgtgccacattttcttaatccagtctatccttgttggacttttgggttggttccaagtctttgctattgtgaatagtgccgcaataaacatacgtgtgcatgtgtctttatagcagcatgatttatagtcctttgggtatatacccagtaatgggatggctgggtcaaatggtatttctagttctagatccctgaggaatcgccacactgacttccacaatggttgaactagtttacagtcccaccagcagtgtaaaagtgttcctatttctccacatcctctccagcacctgttgtttcctgactttttaatgattgccattctaactggcgtgagatggtatctcattgtggttttgatttgcatttctctgatggccagtgatgatgagcattttttcatgtgtcttttgactgcataaatgtcttttgagaagtgtctgttcatatccttcgcccactttttgatggggttgtttgtttttttcttgtaaatttgtttgagttcattgtagattctggatattagccctttgtcagatgagtaggttgcgaaaattttctcccattttgtaggttgcctgttcactctgatggtagtttcttttgctgtgcagaagctctttagtttaattagatcccatttgtcaattttggcttcctcttgggagggtagacagacctcacaatatggaaagacgggacaacctatggaactatctgtgacttccatgtaccaagacaaggacgctatagctagggtagtgagacctagaagagagaaaccagaacaaagcagacaggctgtcctcttcctaattccatgccctgacatcagcccctattttttgcctttagctgtcccccagtttccaacccaatgggaccagagtctgacttccctttgccctttcacagtgtctcagcctccatctgccttgggctccgcctggcctccccatctaactcttcccagttttttgtgtaaatggagcatattttatgtgcgaatattttagtaaccgtatgttctgcaagtaaacctgtgttaatacttgtcaacaactgcagagtttatgatacgaataattcttcctacaatgaagaaaaaaacacatttgtttgttttctaagaatgtttatttgtaaacatatgtattcactatattaatatgaatttcttacctggcaataaaactgattatatgtg

SEQ ID NO: 27999 - DNA, 1951 bp, Homo sapiens
  source 1..1951: mol_type = unassigned DNA
cgcctgcttttgcccgggtcctgagaacaggggctccccacactttttttttttttggttttgttttatttcgtttccgcgcgtctctttctactgcaaacagaaatgggagggtggacaggcgggtaggagcggatcagacgcccaggacgcagcagcccgagtccgcacagggtttgcgggaggtggtgaccgcgctggggacgccaggacgcgaatgaacctccggggcgcgctcggggcctgcgctcagagcttggaaaactggagtttgcttttcctccggccacggagagaacgcgggtaacctgtgtggggggctcgggcgcctgcgcccccctcctgcgcgcgcgctctcccttccaaaaatgggatctttcccccttcgcaccaaggtgtacggacgccaaacagtgatgaaatgagaagaaagccaattgccggcctggggggtgggggagacacagcgtctctgcgtgcgtccgccgcggagcccggagaccagtaattgcaccagacaggcagcgcatggggggctgggcgaggtcgccgcgtataaatagtgagatttccaatggaaaggcgtaaataacagcgctggtgatccacccgcgcgcacgggccgtcctctccgcgcggggagacgcgcgcatccaccagccccggctgctcgccagccccggccccagccatggaagagctcacggcttttgtatccaagtcttttgaccagaaaagcaaggacggtaacggcggaggcggaggcggcggaggtaagaaggattccattacgtaccgggaagttttggagagcggactggcgcgctcccgggagctggggacgtcggattccagcctccaggacatcacggagggcggcggccactgcccggtgcatttgttcaaggaccacgtagacaatgacaaggagaaactgaaagaattcggcaccgcgagagtggcagaagggatttatgaatgcaaagagaagcgcgaggacgtgaagtcggaggacgaggacgggcagaccaagctgaaacagaggcgcagccgcaccaacttcacgctggagcagctgaacgagctcgagcgactcttcgacgagacccattaccccgacgccttcatgcgcgaggagctcagccagcgcctggggctctccgaggcgcgcgtgcaggtttggttccagaaccggagagccaagtgccgcaaacaagagaatcagatgcataaaggcgtcatcttgggcacagccaaccacctagacgcctgccgagtggcaccctacgtcaacatgggagccttacggatgcctttccaacagatggagttttgctcttgtcgcccgggctggagtataatggcatgatctcgactcactgcaacctccgcctcccgagttcaagcgattctcctgcctcagcctcccgagtagctgggattacaggtgcccaccaccatgtcaagataatgtttgtattttcagtagagatggggtttgaccatgttggccaggctggtctcgaactcctgacctcaggtgatccacccgccttagcctcccaaagtgctgggatgacaggcgtgagcccctgcgcccggcctttgtaactttatttttaattttttttttttttttaagaaagacagagtcttgctctgtcacccaggctggagcacactggtgcgatcatagctcactgcagcctcaaactcctgggctcaagcaatcctcccacctcagcctcctgagtagctgggactacaggcacccaccaccacacccagctaatttttttgatttttactagagacgggatcttgctttgctgctgaggctggtcttgagctcctgagctccaaagatcctctcacctccacctcccaaagtgttagaattacaagcatgaaccactgcccgtggtctccaaaaaaaggactgttacgtgga

SEQ ID NO: 28000 - DNA, 1351 bp, Homo sapiens
  source 1..1351: mol_type = unassigned DNA
gtgatccacccgcgcgcacgggccgtcctctccgcgcggggagacgcgcgcatccaccagccccggctgctcgccagccccggccccagccatggaagagctcacggcttttgtatccaagtcttttgaccagaaaagcaaggacggtaacggcggaggcggaggcggcggaggtaagaaggattccattacgtaccgggaagttttggagagcggactggcgcgctcccgggagctggggacgtcggattccagcctccaggacatcacggagggcggcggccactgcccggtgcatttgttcaaggaccacgtagacaatgacaaggagaaactgaaagaattcggcaccgcgagagtggcagaagggatttatgaatgcaaagagaagcgcgaggacgtgaagtcggaggacgaggacgggcagaccaagctgaaacagaggcgcagccgcaccaacttcacgctggagcagctgaacgagctcgagcgactcttcgacgagacccattaccccgacgccttcatgcgcgaggagctcagccagcgcctggggctctccgaggcgcgcgtgcaggtttggttccagaaccggagagccaagtgccgcaaacaagagaatcagatgcataaaggcgtcatcttgggcacagccaaccacctagacgcctgccgagtggcaccctacgtcaacatgggagccttacggatgcctttccaacagatggagttttgctcttgtcgcccgggctggagtataatggcatgatctcgactcactgcaacctccgcctcccgagttcaagcgattctcctgcctcagcctcccgagtagctgggattacaggtgcccaccaccatgtcaagataatgtttgtattttcagtagagatggggtttgaccatgttggccaggctggtctcgaactcctgacctcaggtgatccacccgccttagcctcccaaagtgctgggatgacaggcgtgagcccctgcgcccggcctttgtaactttatttttaattttttttttttttttaagaaagacagagtcttgctctgtcacccaggctggagcacactggtgcgatcatagctcactgcagcctcaaactcctgggctcaagcaatcctcccacctcagcctcctgagtagctgggactacaggcacccaccaccacacccagctaatttttttgatttttactagagacgggatcttgctttgctgctgaggctggtcttgagctcctgagctccaaagatcctctcacctccacctcccaaagtgttagaattacaagcatgaaccactgcccgtggtctccaaaaaaaggactgttacgtgga

SEQ ID NO: 28001 - DNA, 3757 bp, Homo sapiens
  source 1..3757: mol_type = unassigned DNA
cgcctgcttttgcccgggtcctgagaacaggggctccccacactttttttttttttggttttgttttatttcgtttccgcgcgtctctttctactgcaaacagaaatgggagggtggacaggcgggtaggagcggatcagacgcccaggacgcagcagcccgagtccgcacagggtttgcgggaggtggtgaccgcgctggggacgccaggacgcgaatgaacctccggggcgcgctcggggcctgcgctcagagcttggaaaactggagtttgcttttcctccggccacggagagaacgcgggtaacctgtgtggggggctcgggcgcctgcgcccccctcctgcgcgcgcgctctcccttccaaaaatgggatctttcccccttcgcaccaaggtgtacggacgccaaacagtgatgaaatgagaagaaagccaattgccggcctggggggtgggggagacacagcgtctctgcgtgcgtccgccgcggagcccggagaccagtaattgcaccagacaggcagcgcatggggggctgggcgaggtcgccgcgtataaatagtgagatttccaatggaaaggcgtaaataacagcgctggtgatccacccgcgcgcacgggccgtcctctccgcgcggggagacgcgcgcatccaccagccccggctgctcgccagccccggccccagccatggaagagctcacggcttttgtatccaagtcttttgaccagaaaagcaaggacggtaacggcggaggcggaggcggcggaggtaagaaggattccattacgtaccgggaagttttggagagcggactggcgcgctcccgggagctggggacgtcggattccagcctccaggacatcacggagggcggcggccactgcccggtgcatttgttcaaggaccacgtagacaatgacaaggagaaactgaaagaattcggcaccgcgagagtggcagaagggatttatgaatgcaaagagaagcgcgaggacgtgaagtcggaggacgaggacgggcagaccaagctgaaacagaggcgcagccgcaccaacttcacgctggagcagctgaacgagctcgagcgactcttcgacgagacccattaccccgacgccttcatgcgcgaggagctcagccagcgcctggggctctccgaggcgcgcgtgcaggtttggttccagaaccggagagccaagtgccgcaaacaagagaatcagatgcataaaggcgtcatcttgggcacagccaaccacctagacgcctgccgagtggcaccctacgtcaacatgggagccttacggatgcctttccaacaggtccaggctcagctgcagctggaaggcgtggcccacgcgcacccgcacctgcacccgcacctggcggcgcacgcgccctacctgatgttccccccgccgcccttcgggctgcccatcgcgtcgctggccgagtccgcctcggccgccgccgtggtcgccgccgccgccaaaagcaacagcaagaattccagcatcgccgacctgcggctcaaggcgcggaagcacgcggaggccctggggctctgacccgccgcgcagccccccgcgcgcccggactcccgggctccgcgcaccccgcctgcaccgcgcgtcctgcactcaaccccgcctggagctccttccgcggccaccgtgctccgggcaccccgggagctcctgcaagaggcctgaggagggaggctcccgggaccgtccacgcacgacccagccagaccctcgcggagatggtgcagaaggcggagcgggtgagcggccgtgcgtccagcccgggcctctccaaggctgcccgtgcgtcctgggaccctggagaagggtaaacccccgcctggctgcgtcttcctctgctataccctatgcatgcggttaactacacacgtttggaagatccttagagtctattgaaactgcaaagatcccggagctggtctccgatgaaaatgccatttcttcgttgccaacgattttctttactaccatgctccttccttcatcccgagaggctgcggaacgggtgtggatttgaatgtggacttcggaatcccaggaggcaggggccgggctctcctccaccgctcccccggagcctcccaggcagcaataaggaaatagttctctggctgaggctgaggacgtgaaccgcgggctttggaaagggaggggagggagacccgaacctcccacgttgggactcccacgttccggggacctgaatgaggaccgactttataacttttccagtgtttgattcccaaattgggtctggttttgttttggattggtatttttttttttttttttttttttttttttttttgctgtgttacaggattcagacgcaaaagacttgcataagagacggacgcgtggttgcaaggtgtcatactgatatgcagcattaactttactgacatggagtgaagtgcaatattataaatattatagattaaaaaaaaaatagccgtgcactcttgaccccgtcagcgtccaacgtggaaaaggcgttacctcttctcccagcgctggccgcctggccactgagggccctttgcaaaaatcacgggtgtagagatggccctgggcgcgctgggagtgtggttgtgtttctgaaggggataaaagagggcacggtggtgccaagatatcagtttggtacctgagctgtttctggttgggaagcgtaaaagccagggagagatccagagagttttcaagtttttgcagatgtaggtggttccagcttttctttctcccctactccatcttctgcgttcccccagttcttttatttctttgttttttatttttgagacagagacttgctttgtcgcccaggctggagtgcagtggcgcaatgtcagctcactgccacctccgcctcccgggttcaagcgatgctcctgcctcagcctcccgagtagctgggactacaggcacctgccaccacccccggctaattttttgtatttatagtagagacggggtttcaccgtgttggccaggctcgtctcgaactcctgacctcaggtgatctgcccgcctcggcctcccaacgtgcccccagttttataaacagcagatagcaacttgtcgtcacagctggcatgggctggacagttgcttgaaatgacctaaccaaaaacattcaagggttctgcccccagatttcgggagatccacgttccatgttctgattggttttctgggaacacagcaaggggtttggtgacctccgagaagatccatctgcatgattggcattagttaccacagcctgcccagagagaaactatcttctcccaacatttactaacatccactggtcaactctcttatttccataacacatttgcatctttctggattcaagcttggtggttttctttcctaacttctgatttagatacttctccctgaggtggggataaaagaaaaaaaaaaacaacttctttttttcttccgcataacactttctatcttgtcactgagctgaactgtagatccatttggacccgtctcatttgtatcttctgatattctttatacaaaccaaaagtccccttcaacattttttatgtcaaaatgttacaaccgctgtaaaatgacggagagagagagaaagaatcccagacattaacggtattagagagtttgcctcattcatccatttttcttaaaagctggaaattaaaaaaaaaaaagagagagagaggcttt

SEQ ID NO: 28002 - DNA, 1902 bp, Homo sapiens
  source 1..1902: mol_type = unassigned DNA
gtgatccacccgcgcgcacgggccgtcctctccgcgcggggagacgcgcgcatccaccagccccggctgctcgccagccccggccccagccatggaagagctcacggcttttgtatccaagtcttttgaccagaaaagcaaggacggtaacggcggaggcggaggcggcggaggtaagaaggattccattacgtaccgggaagttttggagagcggactggcgcgctcccgggagctggggacgtcggattccagcctccaggacatcacggagggcggcggccactgcccggtgcatttgttcaaggaccacgtagacaatgacaaggagaaactgaaagaattcggcaccgcgagagtggcagaagggatttatgaatgcaaagagaagcgcgaggacgtgaagtcggaggacgaggacgggcagaccaagctgaaacagaggcgcagccgcaccaacttcacgctggagcagctgaacgagctcgagcgactcttcgacgagacccattaccccgacgccttcatgcgcgaggagctcagccagcgcctggggctctccgaggcgcgcgtgcaggtttggttccagaaccggagagccaagtgccgcaaacaagagaatcagatgcataaaggcgtcatcttgggcacagccaaccacctagacgcctgccgagtggcaccctacgtcaacatgggagccttacggatgcctttccaacaggtccaggctcagctgcagctggaaggcgtggcccacgcgcacccgcacctgcacccgcacctggcggcgcacgcgccctacctgatgttccccccgccgcccttcgggctgcccatcgcgtcgctggccgagtccgcctcggccgccgccgtggtcgccgccgccgccaaaagcaacagcaagaattccagcatcgccgacctgcggctcaaggcgcggaagcacgcggaggccctggggctctgacccgccgcgcagccccccgcgcgcccggactcccgggctccgcgcaccccgcctgcaccgcgcgtcctgcactcaaccccgcctggagctccttccgcggccaccgtgctccgggcaccccgggagctcctgcaagaggcctgaggagggaggctcccgggaccgtccacgcacgacccagccagaccctcgcggagatggtgcagaaggcggagcgggtgagcggccgtgcgtccagcccgggcctctccaaggctgcccgtgcgtcctgggaccctggagaagggtaaacccccgcctggctgcgtcttcctctgctataccctatgcatgcggttaactacacacgtttggaagatccttagagtctattgaaactgcaaagatcccggagctggtctccgatgaaaatgccatttcttcgttgccaacgattttctttactaccatgctccttccttcatcccgagaggctgcggaacgggtgtggatttgaatgtggacttcggaatcccaggaggcaggggccgggctctcctccaccgctcccccggagcctcccaggcagcaataaggaaatagttctctggctgaggctgaggacgtgaaccgcgggctttggaaagggaggggagggagacccgaacctcccacgttgggactcccacgttccggggacctgaatgaggaccgactttataacttttccagtgtttgattcccaaattgggtctggttttgttttggattggtatttttttttttttttttttttttttttttttttgctgtgttacaggattcagacgcaaaagacttgcataagagacggacgcgtggttgcaaggtgtcatactgatatgcagcattaactttactgacatggagtgaagtgcaatattataaatattatagattaaaaaaaaaatagc

SEQ ID NO: 28003 - DNA, 1513 bp, Homo sapiens
  source 1..1513: mol_type = unassigned DNA
gtgtccccggagctgaaagatcgcaaagaggatgcgaaagggatggaggacgaaggccagaccaaaatcaagcagaggcgaagtcggaccaatttcaccctggaacaactcaatgagctggagaggctttttgacgagacccactatcccgacgccttcatgcgagaggaactgagccagcgactgggcctgtcggaggcccgagtgcaggtttggtttcaaaatcgaagagctaaatgtagaaaacaagaaaatcaactccataaaggtgttctcataggggccgccagccagtttgaagcttgtagagtcgcaccttatgtcaacgtaggtgctttaaggatgccatttcagcaggttcaggcgcagctgcagctggacagcgctgtggcgcacgcgcaccaccacctgcatccgcacctggccgcgcacgcgccctacatgatgttcccagcaccgcccttcggactgccgctcgccacgctggccgcggattcggcttccgccgcctcggtagtggcggccgcagcagccgccaagaccaccagcaagaactccagcatcgccgatctcagactgaaagccaaaaagcacgccgcagccctgggtctgtgacgccaacgccagcaccaatgtcgcgcctgtcccgcggcactcagcctgcacgccctccgcgccccgctgcttctccgttacccctttgagacctcgggagccggccctcttcccgcctcactgaccatccctcgtcccctatcgcatcttggactcggaaagccagactccacgcaggaccagggatctcacgaggcacgcaggctccgtggctcctgcccgttttcctactcgagggcctagaattgggttttgtaggagcgggtttgggggagtctggagagagactggacaggggagtgctggaaccgcggagtttggctcaccgcaaagctgcaacgatggactcttgcatagaaaaaaaaatcttgttaacaatgaaaaaatgagcaaacaaaaaaatcgaaagacaaacgggagagaaaaagaggaagggaacttatttcttaactgctatttggcagaagctgaaattggagaaccaaggagcaaaaacaaattttaaaattaaagtattttatacatttaaaaatatggaaaaacaacccagacgattctcgagagactggggggagttaccaacttaaatgtgtgtttttaaaaatgcgctaagaaggcaaagcagaaagaagaggtatacttatttaaaaaactaagatgaaaaaagtgcgcagctgggaagttcacaggttttgaaactgacctttttctgcgaagttcacgttaacacgagaaatttgatgagagaggcgggcctccttttacgttgaatcagatgctttgagtttaaacccaccatgtatggaagagcaagaaaagagaaaatattaaaacgaggagagagaaattattatggcaaaactgtctggactgctgacagtaaattccggtttgcatg

SEQ ID NO: 28004 - DNA, 2422 bp, Homo sapiens
  source 1..2422: mol_type = unassigned DNA
ccgagttgcgaggggaggtaatttactcaaaacaagaggccgccgttaggaagtataaatagtgggacttcaagcgcagcgtcgctatcagatctgaactctccgcaggaagaattgtcaaagatcttaacattgaacaagcgcgctccggcagggaagcatcagttcccatttccctccggcagcccccgccccttctcttctcctcctcctcctccctctcctcttcacccttctccccctcttcctcttcttcctcctcctcctcttcttacttctttttctccttctacttctcctcctctttcttctttcttctcctctttttcttcttctttctcctcctccctctcctcccccacctcctgtcccattgatgtgttattattgggggggctggagcagtaaaaaaagaagaaggaaaaaaagagcggggctctgctggcagaggttgagcgccgggctgacgtgcggcggcgatggaagaacttacggcgttcgtctccaagtcttttgaccagaaagtgaaggagaagaaggaggcgatcacgtaccgggaggtgctggagagcgggccgctgcgcggggccaaggagccgaccggctgcaccgaggcgggccgcgacgaccgcagcagcccggcagtccgggcggccggcggaggcggcggcggaggaggcggaggcggcggcggaggaggcggaggaggtgtaggaggaggaggagcaggcggaggagctggaggagggcgctctcccgtccgggagctggacatgggcgccgccgagagaagcagggagccgggcagcccgcgactgacggaggtgtccccggagctgaaagatcgcaaagaggatgcgaaagggatggaggacgaaggccagaccaaaatcaagcagaggcgaagtcggaccaatttcaccctggaacaactcaatgagctggagaggctttttgacgagacccactatcccgacgccttcatgcgagaggaactgagccagcgactgggcctgtcggaggcccgagtgcaggtttggtttcaaaatcgaagagctaaatgtagaaaacaagaaaatcaactccataaaggtgttctcataggggccgccagccagtttgaagcttgtagagtcgcaccttatgtcaacgtaggtgctttaaggatgccatttcagcaggatagtcattgcaacgtgacgcccttgtcctttcaggttcaggcgcagctgcagctggacagcgctgtggcgcacgcgcaccaccacctgcatccgcacctggccgcgcacgcgccctacatgatgttcccagcaccgcccttcggactgccgctcgccacgctggccgcggattcggcttccgccgcctcggtagtggcggccgcagcagccgccaagaccaccagcaagaactccagcatcgccgatctcagactgaaagccaaaaagcacgccgcagccctgggtctgtgacgccaacgccagcaccaatgtcgcgcctgtcccgcggcactcagcctgcacgccctccgcgccccgctgcttctccgttacccctttgagacctcgggagccggccctcttcccgcctcactgaccatccctcgtcccctatcgcatcttggactcggaaagccagactccacgcaggaccagggatctcacgaggcacgcaggctccgtggctcctgcccgttttcctactcgagggcctagaattgggttttgtaggagcgggtttgggggagtctggagagagactggacaggggagtgctggaaccgcggagtttggctcaccgcaaagctgcaacgatggactcttgcatagaaaaaaaaatcttgttaacaatgaaaaaatgagcaaacaaaaaaatcgaaagacaaacgggagagaaaaagaggaagggaacttatttcttaactgctatttggcagaagctgaaattggagaaccaaggagcaaaaacaaattttaaaattaaagtattttatacatttaaaaatatggaaaaacaacccagacgattctcgagagactggggggagttaccaacttaaatgtgtgtttttaaaaatgcgctaagaaggcaaagcagaaagaagaggtatacttatttaaaaaactaagatgaaaaaagtgcgcagctgggaagttcacaggttttgaaactgacctttttctgcgaagttcacgttaacacgagaaatttgatgagagaggcgggcctccttttacgttgaatcagatgctttgagtttaaacccaccatgtatggaagagcaagaaaagagaaaatattaaaacgaggagagagaaaaataatattaacacaaaaaaatgccacagacaatgatttctctgagaaattattatggcaaaactgtctggactgctgacagtaaattccggtttgcatg

SEQ ID NO: 28005 - DNA, 3277 bp, Homo sapiens
  source 1..3277: mol_type = unassigned DNA
cctccctctcctcccccacctcctgtcccattgatgtgttattattgggggggctggagcagtaaaaaaagaagaaggaaaaaaagagcggggctctgctggcagaggttgagcgccgggctgacgtgcggcggcgatggaagaacttacggcgttcgtctccaagtcttttgaccagaaagtgaaggagaagaaggaggcgatcacgtaccgggaggtgctggagagcgggccgctgcgcggggccaaggagccgaccggctgcaccgaggcgggccgcgacgaccgcagcagcccggcagtccgggcggccggcggaggcggcggcggaggaggcggaggcggcggcggaggaggcggaggaggtgtaggaggaggaggagcaggcggaggagctggaggagggcgctctcccgtccgggagctggacatgggcgccgccgagagaagcagggagccgggcagcccgcgactgacggagggtagaaggaagccaacgaaagctgaggtccaggctacgctgcttctcccgggcgaggcgtttcggtttcttgtgtccccggagctgaaagatcgcaaagaggatgcgaaagggatggaggacgaaggccagaccaaaatcaagcagaggcgaagtcggaccaatttcaccctggaacaactcaatgagctggagaggctttttgacgagacccactatcccgacgccttcatgcgagaggaactgagccagcgactgggcctgtcggaggcccgagtgcaggtttggtttcaaaatcgaagagctaaatgtagaaaacaagaaaatcaactccataaaggtgttctcataggggccgccagccagtttgaagcttgtagagtcgcaccttatgtcaacgtaggtgctttaaggatgccatttcagcaggatagtcattgcaacgtgacgcccttgtcctttcaggttcaggcgcagctgcagctggacagcgctgtggcgcacgcgcaccaccacctgcatccgcacctggccgcgcacgcgccctacatgatgttcccagcaccgcccttcggactgccgctcgccacgctggccgcggattcggcttccgccgcctcggtagtggcggccgcagcagccgccaagaccaccagcaagaactccagcatcgccgatctcagactgaaagccaaaaagcacgccgcagccctgggtctgtgacgccaacgccagcaccaatgtcgcgcctgtcccgcggcactcagcctgcacgccctccgcgccccgctgcttctccgttacccctttgagacctcgggagccggccctcttcccgcctcactgaccatccctcgtcccctatcgcatcttggactcggaaagccagactccacgcaggaccagggatctcacgaggcacgcaggctccgtggctcctgcccgttttcctactcgagggcctagaattgggttttgtaggagcgggtttgggggagtctggagagagactggacaggggagtgctggaaccgcggagtttggctcaccgcaaagctgcaacgatggactcttgcatagaaaaaaaaatcttgttaacaatgaaaaaatgagcaaacaaaaaaatcgaaagacaaacgggagagaaaaagaggaagggaacttatttcttaactgctatttggcagaagctgaaattggagaaccaaggagcaaaaacaaattttaaaattaaagtattttatacatttaaaaatatggaaaaacaacccagacgattctcgagagactggggggagttaccaacttaaatgtgtgtttttaaaaatgcgctaagaaggcaaagcagaaagaagaggtatacttatttaaaaaactaagatgaaaaaagtgcgcagctgggaagttcacaggttttgaaactgacctttttctgcgaagttcacgttaacacgagaaatttgatgagagaggcgggcctccttttacgttgaatcagatgctttgagtttaaacccaccatgtatggaagagcaagaaaagagaaaatattaaaacgaggagagagaaaaataatattaacacaaaaaaatgccacagacaatgatttctctgagaaattattatggcaaaactgtctggactgctgacagtaaattccggtttgcatgttacttgtattccattgatggtgtgtctcctcccacccccttatctcccatgcactcactccattttcatcttcactatgaaaaacaataccaaaagtatctggaaattgatatatatatatccatatatatatatcatatatttgccatatatatatatatatatatatatatatatatatatatatatttgccctgtctttgatcctggggaacaaaagaaaaaagtcagaaagggaaaaaattacactcattgtcctaagaagacagaggtgggcagaatatgtggggaaaggaaaaagaaaacaagaccaccaaatgaaataatgaaggtacagcgcctcgctgtgccagacacagtaggcgctcaatcagtattagttcccaccattccccttttcttgtgttccttcttgttggtttcctgaagtcctatttgaagacagtggtttatttccccctctctatcccgtcaaattcaccttaaataacacccagctagatacaggcactaggtttgtgtaagatatgttgatacacacgaacaaagtttattttgactataatgtgtggactgactttcaacatttgcattttatctcacaaaggtgtatctattcaagtaaccttttttttttgtttgtttgtttcttttttgtttttttttttcttttggttgtttgtttcaattcatgtagctatttaaactgggataccttggactaagccagtctgtatcccaattcgctagcaagcctaagtttgtggggttttgtttttgtttttgttttaccttctaatttacaagaaagaggaaaagctcttctaactgaactttggtatgcggttgagctttgtaactatttgttctccatgaaaacaaaattatttatatttgacatatttttttctagtgtattaagttattttaaacaaaagatgttatctcatgacgtgttgtcagtacaaaatgtgtcgcctccaattctgttaaaccttttaaataagtgccaagttattaattgaagacactttgcgatcaattgaatgaaaatatcgtttcatttgatggggttcgagtcatctttgttcctgttactattaaaatatccgggatagtctttcc

SEQ ID NO: 28006 - DNA, 1171 bp, Homo sapiens
  source 1..1171: mol_type = unassigned DNA
cctcctccctctcctcccccacctcctgtcccattgatgtgttattattgggggggctggagcagtaaaaaaagaagaaggaaaaaaagagcggggctctgctggcagaggttgagcgccgggctgacgtgcggcggcgatggaagaacttacggcgttcgtctccaagtcttttgaccagaaagtgaaggagaagaaggaggcgatcacgtaccgggaggtgctggagagcgggccgctgcgcggggccaaggagccgaccggctgcaccgaggcgggccgcgacgaccgcagcagcccggcagtccgggcggccggcggaggcggcggcggaggaggcggaggcggcggcggaggaggcggaggaggtgtaggaggaggaggagcaggcggaggagctggaggagggcgctctcccgtccgggagctggacatgggcgccgccgagagaagcagggagccgggcagcccgcgactgacggagggtagaaggaagccaacgaaagctgaggtccaggctacgctgcttctcccgggcgaggcgtttcggtttcttgtgtccccggagctgaaagatcgcaaagaggatgcgaaagggatggaggacgaaggccagaccaaaatcaagcagaggcgaagtcggaccaatttcaccctggaacaactcaatgagctggagaggctttttgacgagacccactatcccgacgccttcatgcgagaggaactgagccagcgactgggcctgtcggaggcccgagtgcaggtttggtttcaaaatcgaagagctaaatgtagaaaacaagaaaatcaactccataaaggtgttctcataggggccgccagccagtttgaagcttgtagagtcgcaccttatgtcaacgtaggtgctttaaggatgccatttcagcaggttcaggcgcagctgcagctggacagcgctgtggcgcacgcgcaccaccacctgcatccgcacctggccgcgcacgcgccctacatgatgttcccagcaccgcccttcggactgccgctcgccacgctggccgcggattcggcttccgccgcctcggtagtggcggccgcagcagccgccaagaccaccagcaagaactccagcatcgccgatctcagactgaaagccaaaaagcacgccgcagccctgggtctgtga

SEQ ID NO: 28007 - DNA, 4078 bp, Homo sapiens
  source 1..4078: mol_type = unassigned DNA
aaagctagcctctagcgcagagtttgccgggagggagaaggggcagaggtggaaagcttaaccctccggtcgcctaggtgtttggggccgccaagacccctcgaactccgcagagcccctgaatctttggatcttaggggccaaaacttcccattctctttcaaggtagaaggaagccaacgaaagctgaggtccaggctacgctgcttctcccgggcgaggcgtttcggtttcttgaccggctcttccggaaatgatttttaacacccatgctggcctggatcctgcgctgggaagaactgcaaacagcctcgactatctaaactcagctttgacttcttaaaacccggagtctctgattcgggcgcagaggataaaggttccagggggatatatatatggtggctgtatatgctcacactagaagagctcctgtttttaaagggaggagaaggacaggaaagtggcaacggatgtgtgcaaacccagagcagaaaaattcatattttattaaacatccgagctgctggttgcatgaaaaggctttgagcaaccaatagaaaccgaggatcgcgaatattccgcttgaacctgttgatctctgtgggttaagcgtttagggtcgagtctgcgtttccacgagggagggcgaagagagaacagaaagagcggttgctttcgcccgccaccggaggctggttttccgcctcctgccttctggcccggcttgggcggcgagccctttgggcagccaacatggcgtgggcgcctgtgctcgtgcgaccccggtcgggcaggcgggacggagattacctggctgtccaggggaccttatgcagggtttggcccgagcccaggggcagcgaggggcgtctgcggatgcggctccctgtgcggcacaacaccggggtctgttgctctcgctgatacctttcggcccaattgttcctaaattagaccagcaagtttgcggtaggcagagagccagcggtggtgagagctggcctgagaacgagccagccttctgggaatggccggtgtgagaggccagtgggtggccttgccgcgcccttatgtccagactttgctctgtgagaggcctggcgctgcgcctttgatttctgtgagtgctgcggagcaagtgagtgcgaaagtgagtggaaaccatttggtgtttgctggggaaggccggtgactggggggtgaatagtgaggcggtgagtcgaggtacgtttgtgaaggaggtggtggatgactgcccaccttgccccaggcggccgctcagacttgacctttgcgcttctccgggatattcttcctccgggtgggttgagaagccggaccaggattccacgagggggaaggattctctattcttttttgcgacaaatctggtaacaggatttgctgtgctgttttcgtccgtgtgtgtgtgcgtgtgtgtgtgtgttcgtgtggatgcacgtgtggccccgctggggtgccccctccagtgtccccggagctgaaagatcgcaaagaggatgcgaaagggatggaggacgaaggccagaccaaaatcaagcagaggcgaagtcggaccaatttcaccctggaacaactcaatgagctggagaggctttttgacgagacccactatcccgacgccttcatgcgagaggaactgagccagcgactgggcctgtcggaggcccgagtgcaggtttggtttcaaaatcgaagagctaaatgtagaaaacaagaaaatcaactccataaaggtgttctcataggggccgccagccagtttgaagcttgtagagtcgcaccttatgtcaacgtaggtgctttaaggatgccatttcagcaggttcaggcgcagctgcagctggacagcgctgtggcgcacgcgcaccaccacctgcatccgcacctggccgcgcacgcgccctacatgatgttcccagcaccgcccttcggactgccgctcgccacgctggccgcggattcggcttccgccgcctcggtagtggcggccgcagcagccgccaagaccaccagcaagaactccagcatcgccgatctcagactgaaagccaaaaagcacgccgcagccctgggtctgtgacgccaacgccagcaccaatgtcgcgcctgtcccgcggcactcagcctgcacgccctccgcgccccgctgcttctccgttacccctttgagacctcgggagccggccctcttcccgcctcactgaccatccctcgtcccctatcgcatcttggactcggaaagccagactccacgcaggaccagggatctcacgaggcacgcaggctccgtggctcctgcccgttttcctactcgagggcctagaattgggttttgtaggagcgggtttgggggagtctggagagagactggacaggggagtgctggaaccgcggagtttggctcaccgcaaagctgcaacgatggactcttgcatagaaaaaaaaatcttgttaacaatgaaaaaatgagcaaacaaaaaaatcgaaagacaaacgggagagaaaaagaggaagggaacttatttcttaactgctatttggcagaagctgaaattggagaaccaaggagcaaaaacaaattttaaaattaaagtattttatacatttaaaaatatggaaaaacaacccagacgattctcgagagactggggggagttaccaacttaaatgtgtgtttttaaaaatgcgctaagaaggcaaagcagaaagaagaggtatacttatttaaaaaactaagatgaaaaaagtgcgcagctgggaagttcacaggttttgaaactgacctttttctgcgaagttcacgttaacacgagaaatttgatgagagaggcgggcctccttttacgttgaatcagatgctttgagtttaaacccaccatgtatggaagagcaagaaaagagaaaatattaaaacgaggagagagaaaaataatattaacacaaaaaaatgccacagacaatgatttctctgagaaattattatggcaaaactgtctggactgctgacagtaaattccggtttgcatgttacttgtattccattgatggtgtgtctcctcccacccccttatctcccatgcactcactccattttcatcttcactatgaaaaacaataccaaaagtatctggaaattgatatatatatatccatatatatatatcatatatttgccatatatatatatatatatatatatatatatatatatatatatttgccctgtctttgatcctggggaacaaaagaaaaaagtcagaaagggaaaaaattacactcattgtcctaagaagacagaggtgggcagaatatgtggggaaaggaaaaagaaaacaagaccaccaaatgaaataatgaaggtacagcgcctcgctgtgccagacacagtaggcgctcaatcagtattagttcccaccattccccttttcttgtgttccttcttgttggtttcctgaagtcctatttgaagacagtggtttatttccccctctctatcccgtcaaattcaccttaaataacacccagctagatacaggcactaggtttgtgtaagatatgttgatacacacgaacaaagtttattttgactataatgtgtggactgactttcaacatttgcattttatctcacaaaggtgtatctattcaagtaaccttttttttttgtttgtttgtttcttttttgtttttttttttcttttggttgtttgtttcaattcatgtagctatttaaactgggataccttggactaagccagtctgtatcccaattcgctagcaagcctaagtttgtggggttttgtttttgtttttgttttaccttctaatttacaagaaagaggaaaagctcttctaactgaactttggtatgcggttgagctttgtaactatttgttctccatgaaaacaaaattatttatatttgacatatttttttctagtgtattaagttattttaaacaaaagatgttatctcatgacgtgttgtcagtacaaaatgtgtcgcctccaattctgttaaaccttttaaataagtgccaagttattaatt

SEQ ID NO: 28008 - DNA, 2879 bp, Homo sapiens
  source 1..2879: mol_type = unassigned DNA
gcgcgagcacttccgcctcgagccggaagctccgtccctcacaccgagagttcctgcgcgtggggagttggagagtttgcgtggcgggaacgcggcggcagtgagagcgagcggcgccggcccttgcgtccggtgcggcgatgctgaccccggcgttcgacctcagccaggatccggacttcctgactatcgccatccgcgtgccctacgcccgggtctccgagttcgacgtctacttcgaggggtctgacttcaagttctacgccaagccatactttctcagattaacccttcctggaagaattgtagaaaatggaagtgagcaagggtcctatgatgcagataaaggaatttttaccattcgcctgcccaaagaaacccctggccagcattttgaggggctgaacatgttaactgctcttctggcaccaagaaaatccaggacagcaaaaccacttgtggaagaaataggtgcttctgagattcctgaggaagtagttgacgatgaagagtttgattgggaaattgagcagacaccctgtgaagaggtatcagaaagtgctttgaatccgcagtgccactatggatttggaaacttacgatcaggagtgttgcaacggttacaggatgaactgagtgatgttattgatattaaggatccagatttcacccctgcagctgaacgaagacagaagcgcctggccgctgagctggccaagtttgatcctgatcattatctagctgacttttttgaagatgaggcgattgaacagattttgaagtataatccttggtggactgacaaatattcaaaaatgatggcctttttggaaaagagtcaggaacaagaaaatcatgctacattagtgtctttttctgaagaagagaagtatcagctacgaaaatttgtcaataaatcttatctgctggacaagagagcctgtcgtcaagtgtgctacagtttgattgatatccttctggcatattgctatgaaacccgtgtcactgaaggagagaagaatgttgaatctgcatggaatatcaggaaactgagtccaacactatgctggtttgagacttggactaacgttcatgatatcatggtgtcttttggaagaagggtgttgtgttacccactctatcgccatttcaagctggtgatgaaggcctacagggacactataaagatattgcaactgggtaaaagtgcagttttaaagtgtctcctggatattcacaaaatttttcaggaaaatgacccagcgtacatactgaatgatctctacatctcagactactgtgtgtggattcagaaagtcaaatccaaaaagttggcagctcttgcagaagccttaaaggaagtctcccttacaaaggcccagctggggttagaactggaagaactagaagcagcagcactgcttgtccaggaggaagaaactgcattaaaagcagcccattcagtttctgggcagcagacactttgctccagctctgaggcaagtgattcggaggactcagacagcagcgtgtcatctggaaacgaagactcaggctcagattcagaacaagatgaactcaaagatagtccatctgagacagtcagttctttgcaaggtccctttcttgaagaaagcagtgcctttcttattgttgatggtggagtacgcagaaacacagccatccaggagtctgatgccagtcagggaaagccacttgcctcttcctggcctcttggagtgtctgggcctctgatagaggagcttggggaacaactgaagactacagttcaggtttctgaacccaagggcaccactgctgtaaaccgcagcaatattcaggagagagacggctgtcagacaccaaataattgactcttaggtggttttattcattgttgagaaatatggtagattgggtttcatttaccgaatgagaattcttcattttcactttgtaatttttcttagtatatagtcagcccactgtatttgtgtgttccacatctgtggattcaaccaactgcagatcaaaaatattgaagaaaaaatcgcatctgtaccaaacatgtacagacttttttcttgttattattctctaaataatacagtatgacaactatttccacagcatttacattgtattgggtaatataagtaatctagtgatgatttaaactgtgcaggaggatgtgggtaggttatatgcaaatactgcaccattttttatcaggggcttgagcatctgaggattttagtatcctcaggagtcctggaaccaaccccccacagatacggggacaactttatgacattgtttttcaaccaatgaatgtttataccttttgttttccttgccgcgactgtgaagataaagttcaaaagtatttttaccaaagtgtagctaatatttcaagctgaaaataatagttctactgcccgtgtctccagaatgtagagcccatcaatatttttattttaggaggtgtacttgacacccaataaactgcacgtatcaaaagtgtacaatgtgttggcgtatgtataccctgcgtaaaactatcaccacaactgaagtgaggaacggacccatcattcccaagtgcccttgtgccctgttattagtttgcatgtcctagaattctatgtaaattgaatcatacaatatgtatcccttttttggtcaggcatattttactcagtatagttattttgagattcatccatgtggtagcatgtgtcacgagtttttgtttttatgtttttcattgctgagtactgcttcattgaatagatttgttcattgacctatcgatggacacctgggttgtttccagtttggggctgttataaataaagctgttatgaacatttgtgtac

SEQ ID NO: 28009 - DNA, 7447 bp, Homo sapiens
  source 1..7447: mol_type = unassigned DNA
tctgcggcgctcggagcctcccttgcgatcccacggccgggactgcccggagtgcatgggcgcgggccagggacgctgagcggtcgcgccatggagggcgccgagccccgcgcgcggcccgagcgcctggccgaggccgagacgcgggcggcggacggcgggcgcctggtggaggtgcagctgagcggcggcgccccgtggggcttcaccctgaagggcggccgcgagcacggcgagccgctggtcatcaccaagattgaagagggcagtaaagccgcggcggtcgacaagttactggctggagatgagatcgtcggcatcaatgacattggtctctcagggtttagacaggaagcgatttgcctggtgaaggggtcccataagaccctgaagctggtcgtcaaaaggaggagcgagctgggctggaggcctcactcctggcatgccaccaagttctctgacagccaccccgagctagcggcctccccattcacctccaccagcggctgtccttcctggtccggccgacaccacgcgagttcttcctcccacgacctgtccagttcctgggagcagacgaacctacagcgcaccttagatcacttcagctccttggggagcgttgacagcctggaccacccctccagtcgcctctcggtggccaagtccaacagcagcatcgaccacctgggcagccacagcaagcgcgactcggcctacggctccttctccaccagctctagcactcctgaccacaccttgtccaaagccgacacgtcctccgcagagaacatcctctacactgtgggcctctgggaggctcccaggcagggtggccggcaggcccaggccgcaggcgaccctcagggctcggaggagaagctcagttgtttcccgcccagggtccccggtgacagcggcaaaggccccaggccagagtacaatgccgagcccaagctggctgcccctgggaggtccaattttgggccagtctggtatgttcccgataagaagaaagcaccatcatccccacctcctccccctccccctctccgcagtgacagctttgctgccaccaagagccacgagaaggcccagggccctgtgttctcagaggcggctgcggcacagcactttacggccctggcccaggctcagcctcgtggtgaccggagaccagagctcaccgatcggccttggaggtcagcacacccggggagcctcgggaagggatcgggaggcccgggctgcccacaggaggcccacgcagacggcagctggccgccctccaaggatggagcttccagtaggctgcaggcctctctgtccagctcagatgtgcgcttccctcagtctcctcatagcggccgacaccctcccctatacagcgaccacagccccctctgtgctgacagccttgggcaggagccaggggctgccagcttccagaacgacagccctcctcaggtgagggggctcagcagctgtgaccagaagctggggagcggctggcagggtccccggccctgtgtgcagggagacctgcaagcagcacagctctgggcgggatgctggccttctgacacagcccttggagccctcgagagtcttcccccacccacggtgggccagagcccacgccatcacctacctcagcctgagggtcctccggatgcccgcgagacaggacggtgttacccgctggacaaaggggccgagggctgctccgcgggagcccaggagcctcccagggccagccgtgcagaaaaagccagccagaggctggcagccagcatcacgtgggcagatggggagagcagcaggatctgcccgcaggagacgcccctgttgcactccctgacccaggaggggaagcgccggcctgagagcagtccagaggacagcgccaccagaccgccaccgttcgacgcccacgtgggcaagcccacccgaagaagcgaccgctttgccaccaccctgcggaatgagatccagatgcatagagccaagctgcagaagagccggagcacagtggctctgactgcagcaggggaggcggaggatggcaccggccgctggagggccgggttgggaggtggcacccaggaaggacccctcgctggcacctataaagaccacctgaaagaggcccaagcccgggtcctgagggccacgtccttcaagcgccgcgacttggaccccaacccaggagacctatacccggagtcactggaacaccggatgggggatccagacactgtcccccacttctgggaggcaggcctggcccagccaccctcatctacaagtggcgggccccacccgccccgcatcggaggccggagacggttcacagctgagcagaaattgaagtcctactcggaacctgagaagatgaacgaggtgggcctcacgaggggctacagtcctcaccagcaccccaggacatctgaggatactgtgggcacgtttgctgacaggtggaagttttttgaggaaacgagcaaacctgttccccagaggcctgcccagaagcaagctcttcacggaatcccgagagacaagccagagaggccgcggacagcgggccgcacatgtgagggcacggagccctggtcgcgcaccacctcccttggggacagcctcaacgctcacagcgcagcggagaaggcagggacttcagacctgccgcggaggctcggcacctttgcagagtatcaggcctcttggaaggaacagaggaaacctctggaggccaggagctctgggcgctgccactcagcggatgacatcctggatgtgagcctggacccacaggagaggccgcagcacgttcatgggaggtcccggtcttcaccgtccacagaccactacaagcaggaagcttctgtcgaactgcgaaggcaggcaggggaccccggcgagcccagagaagagcttccctccgcagtccgggccgaggagggacagtccacgccgagacaagcagatgcccagtgtcgggaaggcagcccaggatcacagcagcacccaccgagtcagaaggcaccgaacccacccacattctctgaactatctcactgccggggagccccagagctgccccgggagggccggggccgagcgggaaccctacctcgagattatagatactcggaggagagcaccccagcagacttgggaccccgagcccagagccctggctcacccctgcatgctcgaggacaagactcgtggccagtgagctcagccctgctctccaagaggccagccccacagaggccaccgccacccaagcgcgagcccaggagatacagggccacagacggcgcacctgctgacgcccccgtgggcgtcctcggcaggcccttcccaacgccatcccctgcgtccctggatgtgtatgtggcccgcctgtccctctcccacagcccctctgtgttcagcagtgcccagccccaggacaccccgaaggccactgtctgtgagcgtggaagccagcatgtgagcggggacgcatcacgtcctctgccagaagcactgctccctcccaagcagcagcacctgcgcctgcagacggccaccatggagacctcgcgctccccctcgccccagttcgccccccagaaactgacggacaaacctcccctgctcatccaggatgaggattcaaccagaattgagcgggtgatggacaacaacaccacggtgaagatggtgcccatcaagatcgtgcactcggagagccagccagagaaggagagccgccagagcctggcatgccccgccgagccacctgccctgccccacgggctggagaaagaccagatcaagacgctgagcacatctgagcagttctactcgcgcttctgtctgtacacgcggcagggtgctgagcccgaggccccacatagggcccagccggctgagccccagcccctgggcacccaggtgccccccgagaaagaccgctgcacctcccctccagggctcagctacatgaaggccaaagagaagactgtggaagacctgaagtcggaggagctggccagggagatcgtggggaaggataagtccctggccgacatcctggatcccagtgtgaagatcaaaaccactatggacttgatggaaggcatcttccccaaagacgagcacctcctggaagaagcccagcaacggaggaagctgctccccaaaatcccctctcctagaagcacagaggagaggaaagaggagcccagcgtgcctgcggccgtgtccctggccaccaattctacctactacagcacgtcggcccccaaggcggagctgctgatcaagatgaaggacctgcaggagcagcaggagcacgaagaggattcgggaagcgacttggaccacgacctgtcggtgaagaagcaggagctcatcgagagcatcagccgcaagctgcaggtgctccgggaggcccgcgagagcctgctggaggacgtgcaggccaacaccgtgctgggggccgaggtggaggccatcgtgaaaggcgtctgcaagcccagcgagtttgacaagttccggatgttcattggagacctggacaaagtggtgaacctcctgctgtcgctgtcaggccgcctggcccgggtggagaatgccctcaataatttggacgacggcgcttctcccggtgatcggcaatcactgcttgagaagcagagagtcctgatccagcagcacgaggacgccaaggagctcaaggagaacctggaccgccgcgagcgcatcgtctttgacattttggccaactatctgagcgaggagagcctcgcggactatgagcacttcgtgaagatgaagtcggccctcatcatcgagcagcgggagctggaagataaaatccaccttggtgaagagcagctgaagtgcttattggacagccttcagcccgaaaggggcaaataagagaccagtccccggtggaggaggggcacggggcctccgagctccagctccgttcccaaggatactcgtgaagaccccatctgtgttcatggcctggaaagagacttctcccatagcaaagaggctgttataaaagcaataacttttgtgtttgtgtgggatgatttatttaattttttagtttcccctttgattgctgagagccattttcctttacacataactacacctgacaccaggctctgctggatgtgagtttccactgcatgggctgtgggctgggcctgtggtgcctgccgagtggtcactgtcagtgggaaacccgttgttcctcccgtcttcagatgctgagccaactgcttggacagcagccagcgcgtcatgacgtgcatgagagggggaccctggtgctcatcttctcttgtcattcatccaggcatgggctgccaggttttgtccctgctcgttcaacagtgtgagcatttgtctctgttatctaatgatgttctctgacccagcagaaatcatcatcatgatgatgataatttattaactttttggaagggtgaatagtttcctaatggttaaaaaccaactgtgaaaggaaccacctgtgtggttgggttcactcattctcagattaaattgccacttaaagaaataacgtgcatgctttaaaaaacacagtcacgcaccaagcaggcaaatagctttagtccttctcacctcacatcacagttgttctgcaaagtaaaattttttggttaagagcgtgtccagtagtaatgtgcttgttagctgtttctcaagaccaacagaagattttttcagttactttccccccatgtattttgtatgcatatgattgtccgtgataattggctacttttccattgtttcctccttaaatcgtttagcatggcatgagggccacattccatggacgggaagaccccttcctcttcagaggtcccgtggactacacagctcctgagcttgatctttttctgccatgaagtttaaagattctatgcccatttccttgattgaaatggcaggattctaaagagagcctggtttgttaaaagaaaacactgtcatgctgtcagttcccaattgacaagtcacagactgggagaaaatatttgcaaatcgtgtatctgacaaaaggtttgtgtccaggatgtacaaagaactctcaaaccggatagtaagaaaacaaacagcccaagtgaaaagcaggcaaaagacttgaatagacacttcaccaaagagcatacacgcgtggcaaacaagcacacgaaaagacgttcagccgccgatggcttggttataatttataacttacttatttttatctaataattgtagattcagtgtatttcttcaaaaaatgtttaattaaatgcatgttaatggtgagtgaatcccttgggtgacttcgtgtttaggtcgtattagggcatttgttggatcaacggatcattttaaccctgacttccccttattcccataaaagaagttttccagtggaatggagatttcattttgtcagcagcagtgaccacagccttaccaaagcagacgcgtgcgcgtgcacagatgcacacacacagatgtcttaaaagactagaatccacacttcctgagccagaggggccgtgttgacggtaatgcattctctatagagccaagtccaaactggcaagctcaatgatgcaggcaataaaccgcctttttggcagcctaccaatgccaaaaggataaatgtctttccaaaagtgtgtattcctgttaaattaagctcttgctaacttgaaaaatccctgttctgccagcgaagcttcctcctcctctccagctggtagtcacttgcgtgaatgctggtcagtctgaaaaggtgaagctggctgtgcacttacccccatctttctccctcggggagacgacccaaggaatttcagagtattttgtttggcagagcttttacctgttattctttgccctcaaatacagtattgtggtcattttgatgatatgtgtgtaaaatgtgaataatccaattggtgtctgtactcagccttttgatgtctttttaggactttctcttctacacagcaatacgtcgtgctcgagtatccttgtagcaaagcacatagagccagctgtcctgtcagttcccctgtttgcctctgaaacgtctggttagtggggacccaaagattctagtgagtcaacatccataactctgtatctagttgtattattcatagaaaatcaatctggtgctaatggttggccctggtgttgttgggtggcagctgctccttcgccctcttgtagtgtggctgtggagggctctgcctatggggggtggcctgtggcttgtatccttcagtccaccacagcaaatgtgtgtagatttcatgctcgacacttaccactcacctatcaacagatcatcctgcttgactgtaacaaaataaatagtgtctcttcaagtgaa

SEQ ID NO: 28010 - DNA, 3597 bp, Homo sapiens
  source 1..3597: mol_type = unassigned DNA
aaatgcaagcggagccttgagccgtggaggtgaaggttgacggagcctgcgtgagcttgcccatcaacaagacagcaggcacagacaggccagctgttgtgagcttggctttaggactccattcagtaggcaggaggagagctgcagcagaggcgggctgtgggtccctgaagcacatcgctgccttcacagctgggcgaactcccatccagcacgacaagcagatgcccagtgtcgggaaggcagcccaggatcacagcagcacccaccgagtcagaaggcaccgaacccacccacattctctgaactatctcactgccggggagccccagagctgccccgggagggccggggccgagcgggaaccctacctcgagattatagatactcggaggagagcaccccagcagacttgggaccccgagcccagagccctggctcacccctgcatgctcgaggacaagactcgtggccagtgagctcagccctgctctccaagaggccagccccacagaggccaccgccacccaagcgcgagcccaggagatacagggccacagacggcgcacctgctgacgcccccgtgggcgtcctcggcaggcccttcccaacgccatcccctgcgtccctggatgtgtatgtggcccgcctgtccctctcccacagcccctctgtgttcagcagtgcccagccccaggacaccccgaaggccactgtctgtgagcgtggaagccagcatgtgagcggggacgcatcacgtcctctgccagaagcactgctccctcccaagcagcagcacctgcgcctgcagacggccaccatggagacctcgcgctccccctcgccccagttcgccccccagaaactgacggacaaacctcccctgctcatccaggatgaggattcaaccagaattgagcgggtgatggacaacaacaccacggtgaagatggtgcccatcaagatcgtgcactcggagagccagccagagaaggagagccgccagagcctggcatgccccgccgagccacctgccctgccccacgggctggagaaagaccagatcaagacgctgagcacatctgagcagttctactcgcgcttctgtctgtacacgcggcagggtgctgagcccgaggccccacatagggcccagccggctgagccccagcccctgggcacccaggtgccccccgagaaagaccgctgcacctcccctccagggctcagctacatgaaggccaaagagaagactgtggaagacctgaagtcggaggagctggccagggagatcgtggggaaggataagtccctggccgacatcctggatcccagtgtgaagatcaaaaccactatggacttgatggaaggcatcttccccaaagacgagcacctcctggaagaagcccagcaacggaggaagctgctccccaaaatcccctctcctagaagcacagaggagaggaaagaggagcccagcgtgcctgcggccgtgtccctggccaccaattctacctactacagcacgtcggcccccaaggcggagctgctgatcaagatgaaggacctgcaggagcagcaggagcacgaagaggattcgggaagcgacttggaccacgacctgtcggtgaagaagcaggagctcatcgagagcatcagccgcaagctgcaggtgctccgggaggcccgcgagagcctgctggaggacgtgcaggccaacaccgtgctgggggccgaggtggaggccatcgtgaaaggcgtctgcaagcccagcgagtttgacaagttccggatgttcattggagacctggacaaagtggtgaacctcctgctgtcgctgtcaggccgcctggcccgggtggagaatgccctcaataatttggacgacggcgcttctcccggtgatcggcaatcactgcttgagaagcagagagtcctgatccagcagcacgaggacgccaaggagctcaaggagaacctggaccgccgcgagcgcatcgtctttgacattttggccaactatctgagcgaggagagcctcgcggactatgagcacttcgtgaagatgaagtcggccctcatcatcgagcagcgggagctggaagataaaatccaccttggtgaagagcagctgaagtgcttattggacagccttcagcccgaaaggggcaaataagagaccagtccccggtggaggaggggcacggggcctccgagctccagctccgttcccaaggatactcgtgaagaccccatctgtgttcatggcctggaaagagacttctcccatagcaaagaggctgttataaaagcaataacttttgtgtttgtgtgggatgatttatttaattttttagtttcccctttgattgctgagagccattttcctttacacataactacacctgacaccaggctctgctggatgtgagtttccactgcatgggctgtgggctgggcctgtggtgcctgccgagtggtcactgtcagtgggaaacccgttgttcctcccgtcttcagatgctgagccaactgcttggacagcagccagcgcgtcatgacgtgcatgagagggggaccctggtgctcatcttctcttgtcattcatccaggcatgggctgccaggttttgtccctgctcgttcaacagtgtgagcatttgtctctgttatctaatgatgttctctgacccagcagaaatcatcatcatgatgatgataatttattaactttttggaagggtgaatagtttcctaatggttaaaaaccaactgtgaaaggaaccacctgtgtggttgggttcactcattctcagattaaattgccacttaaagaaataacgtgcatgctttaaaaaacacagtcacgcaccaagcaggcaaatagctttagtccttctcacctcacatcacagttgttctgcaaagtaaaattttttggttaagagcgtgtccagtagtaatgtgcttgttagctgtttctcaagaccaacagaagattttttcagttactttccccccatgtattttgtatgcatatgattgtccgtgataattggctacttttccattgtttcctccttaaatcgtttagcatggcatgagggccacattccatggacgggaagaccccttcctcttcagaggtcccgtggactacacagctcctgagcttgatctttttctgccatgaagtttaaagattctatgcccatttccttgattgaaatggcaggattctaaagagagcctggtttgttaaaagaaaacactgtcatgctgtcagttcccaattgacaagtcacagactgggagaaaatatttgcaaatcgtgtatctgacaaaaggtttgtgtccaggatgtacaaagaactctcaaaccggatagtaagaaaacaaacagcccaagtgaaaagcaggcaaaagacttgaatagacacttcaccaaagagcatacacgcgtggcaaacaagcacacgaaaagacgttcagccgccgatggcttggttataatttataacttacttatttttatctaataattgtagattcagtgtatttcttcaaaaaatgtttaattaaatgcatgttaatggtg

SEQ ID NO: 28011 - DNA, 2276 bp, Homo sapiens
  source 1..2276: mol_type = unassigned DNA
gtttgtagttcccagtggctcttttgttctgctatcttgaagggcaggttgcttgtcagctcacaatgctgtgggtaaggtctggtgaggtcggcgaatgtgttctcattgtttattcttctgcctgaagatgagaaataatgcaaatcagggtgcagattccggctcgagctccacaggcgtgcacgtatgtgtaagggcatgctcgccggtgctgcatgtcctcgtggatgcatgcaatttttacagctttgggattcacggttagctgaaagcacattggaactggaaggcggtgctcttaacaccgtgttctaggctggaagccgtagagccatcatctgctctgatgggactgcagcccttggtatgtgggacccttgctccatgtgagttctgcagatgggttccccgagggagctggctggaggacgccagcatcgcatgaagacctgcctgcctcgtttgccttttgtttttcagtagcagtaagaaacaggcattctcactacacaggcattgaatgcggacattgagaaaaaatgacaagcagatgcccagtgtcgggaaggcagcccaggatcacagcagcacccaccgagtcagaaggcaccgaacccacccacattctctgaactatctcactgccggggagccccagagctgccccgggagggccggggccgagcgggaaccctacctcgagattatagatactcggaggagagcaccccagcagacttgggaccccgagcccagagccctggctcacccctgcatgctcgaggacaagactcgtggccagtgagctcagccctgctctccaagaggccagccccacagaggccaccgccacccaagcgcgagcccaggagatacagggccacagacggcgcacctgctgacgcccccgtgggcgtcctcggcaggcccttcccaacgccatcccctgcgtccctggatgtgtatgtggcccgcctgtccctctcccacagcccctctgtgttcagcagtgcccagccccaggacaccccgaaggccactgtctgtgagcgtggaagccagcatgtgagcggggacgcatcacgtcctctgccagaagcactgctccctcccaagcagcagcacctgcgcctgcagacggccaccatggagacctcgcgctccccctcgccccagttcgccccccagaaactgacggacaaacctcccctgctcatccaggatgaggattcaaccagaattgagcgggtgatggacaacaacaccacggtgaagatggtgcccatcaagatcgtgcactcggagagccagccagagaaggagagccgccagagcctggcatgccccgccgagccacctgccctgccccacgggctggagaaagaccagatcaagacgctgagcacatctgagcagttctactcgcgcttctgtctgtacacgcggcagggtgctgagcccgaggccccacatagggcccagccggctgagccccagcccctgggcacccaggtgccccccgagaaagaccgctgcacctcccctccagggctcagctacatgaaggccaaagagaagactgtggaagacctgaagtcggaggagctggccagggagatcgtggggaaggataagtccctggccgacatcctggatcccagtgtgaagatcaaaaccactatggacttgatggaaggcatcttccccaaagacgagcacctcctggaagaagcccagcaacggaggaagctgctccccaaaatcccctctcctagaagcacagaggagaggaaagaggagcccagcgtgcctgcggccgtgtccctggccaccaattctacctactacagcacgtcggcccccaaggcggagctgctgatcaagatgaaggacctgcaggagcagcaggagcacgaagaggattcgggaagcgacttggaccacgacctgtcggtgaagaagcaggagctcatcgagagcatcagccgcaagctgcaggtgctccgggaggcccgcgagagcctgctggaggacgtgcaggccaacaccgtgctgggggccgaggtggaggccatcgtgaaaggcgtctgcaagcccagcgagtttgacaagttccggatgttcattggagacctggacaaagtggtgaacctcctgctgtcgctgtcaggccgcctggcccgggtggagaatgccctcaataatttggacgacggcgcttctcccggtgatcggcaatcactgcttgagaagcagagagtcctgatccagca

SEQ ID NO: 28012 - DNA, 2365 bp, Homo sapiens
  source 1..2365: mol_type = unassigned DNA
gtttgtagttcccagtggctcttttgttctgctatcttgaagggcaggttgcttgtcagctcacaatgctgtgggtaaggtctggtgaggtcggcgaatgtgttctcattgtttattcttctgcctgaagatgagaaataatgcaaatcagggtgcagattccggctcgagctccacaggcgtgcacgtatgtgtaagggcatgctcgccggtgctgcatgtcctcgtggatgcatgcaatttttacagctttgggattcacggttagctgaaagcacattggaactggaaggcggtgctcttaacaccgtgttctaggctggaagccgtagagccatcatctgctctgatgggactgcagcccttggtatgtgggacccttgctccatgtgagttctgcagatgggttccccgagggagctggctggaggacgccagcatcgcatgaagacctgcctgcctcgtttgccttttgtttttcagtagcagtaagaaacaggcattctcactacacaggcattgaatgcggacattgagaaaaaatgacaagcagatgcccagtgtcgggaaggcagcccaggatcacagcagcacccaccgagtcagaaggcaccgaacccacccacattctctgaactatctcactgccggggagccccagagctgccccgggagggccggggccgagcgggaaccctacctcgagattatagatactcggaggagagcaccccagcagacttgggaccccgagcccagagccctggctcacccctgcatgctcgaggacaagactcgtggccagtgagctcagccctgctctccaagaggccagccccacagaggccaccgccacccaagcgcgagcccaggagatacagggccacagacggcgcacctgctgacgcccccgtgggcgtcctcggcaggcccttcccaacgccatcccctgcgtccctggatgtgtatgtggcccgcctgtccctctcccacagcccctctgtgttcagcagtgcccagccccaggacaccccgaaggccactgtctgtgagcgtggaagccagcatgtgagcggggacgcatcacgtcctctgccagaagcactgctccctcccaagcagcagcacctgcgcctgcagacggccaccatggagacctcgcgctccccctcgccccagttcgccccccagaaactgacggacaaacctcccctgctcatccaggatgaggattcaaccagaattgagcgggtgatggacaacaacaccacggtgaagatggtgcccatcaagatcgtgcactcggagagccagccagagaaggagagccgccagagcctggcatgccccgccgagccacctgccctgccccacgggctggagaaagaccagatcaagacgctgagcacatctgagcagttctactcgcgcttctgtctgtacacgcggcagggtgctgagcccgaggccccacatagggcccagccggctgagccccagcccctgggcacccaggtgccccccgagaaagaccgctgcacctcccctccagggctcagctacatgaaggccaaagagaagactgtggaagacctgaagtcggaggagctggccagggagatcgtggggaaggataagtccctggccgacatcctggatcccagtgtgaagatcaaaaccactatggacttgatggaaggcatcttccccaaagacgagcacctcctggaagaagcccagcaacggaggaagctgctccccaaaatcccctctcctagaagcacagaggagaggaaagaggagcccagcgtgcctgcggccgtgtccctggccaccaattctacctactacagcacgtcggcccccaaggcggagctgctgatcaagatgaaggacctgcaggagcagcaggagcacgaagaggattcgggaagcgacttggaccacgacctgtcggtgaagaagcaggagctcatcgagagcatcagccgcaagctgcaggtgctccgggaggcccgcgagagcctgctggaggacgtgcaggccaacaccgtgctgggggccgaggtggaggccatcgtgaaaggcgtctgcaagcccagcgagtttgacaagttccggatgttcattggagacctggacaaagtggtgaacctcctgctgtcgctgtcaggccgcctggcccgggtggagaatgccctcaataatttggacgacggcgcttctcccggtgatcggcaatcactgcttgagaagcagagagtcctgatccagcaaatgtgtgtagatttcatgctcgacacttaccactcacctatcaacagatcatcctgcttgactgtaacaaaataaatagtgtctcttc

SEQ ID NO: 28013 - DNA, 1862 bp, Homo sapiens
  source 1..1862: mol_type = unassigned DNA
accctcggcgcgccgcgcgggatcagcgtcctccagccgcgctgccccggcccaccgtgcagctgtagccgcggcgcggtggcgcggtggcgcagggcgctgctgggccgcccattgttgagcgcgttgggccccgccggcgatgccgcgcgccgcctcctcggagcggcggcgaagtttgaacttggcgtcggcctggagccccgagcagcccgggggcggcggccgcgaggcgagcggcgatgagatgtgtgcacagacccaggccatgcagatactggtgcctctaacttcgtcagcccttagaacatgacttgctgtccccagtggagaagaaaccagaagctacagccaagtatgtcccctccaaagtccatttctgttcagtgcctgaaaatgaggaggatgcctccctgaagagacatctcacacctccccaaggcaacagcccacattccaatgagagaaagagcacccccacctcctccaccgagtcaggaaaccccggtgtatagcatggatgacttccctccacctcctccccacactgtatgtgaggcgcagctggacagtgaggatcccgaggggccacgccccagcttcaacaaactttctaaagtgacaattgcaagggaaaggcacatgcctggtgcagcccatgtggtaggtagtcagacactggcttccagactccaaacttctatcaagggttcagaggctgagtccacaccaccctccttcatgagcgttcacgcccaacttgctgggtctcttggtgggcagccagcacccatccagactcaaagcctcagccatgatccagtcagtggaactcagggtttagaaaagaaagtcagtcctgatcctcagaagagttcagaagacatcagaacagaggctttggccaaggaaattgtccaccaagacaaatctctagcagacattttggatccagactccaggctgaagacaacaatggacctgatggaaggtttgtttccccgagatgtgaacttgctgaaggaaaacagtgtaaagaggaaggccatacagagaactgtcagctcttcaggatgtgaaggcaagaggaatgaagacaaggaagcagtgagcatgttggttaactgccctcagatttcattcccaaggctggggccctggctctgcccccaaacctcacgagtgagcccattcctgctgggggctgtactttcagtggtattttcccaacattaacctctccactttaacctcttctaaaatacccaaccaaaagatcactgtttctctcaacactatttaatctgaaaaatgtttcagtacaaaccactgtttgaactatctgggttattggtgtttgttcctgatgaaaggaaaaaaattctctccaggaggaagcctttttccttcttgcccttcctgattgatcttctgagagctcgaatgctgctggacacgtacccctttctattattactttgtagtagaaagaaagttaatgaaactgagaactgattggagggtgtttgatcatttagtttttaacaggctgaggcaacatggatcagtgtgtgtccccctcaggaatgtatccacagtggccttccttgctggtgggcagtgtatcctgatggcagggtacaagtaccattaatgaagggtctgcaacataaagccttaaaaagacacacactaagaaaactgtaaaaccttgaacattgttatttatattttttaaaatggaaaagatcactatgtttgttgtgctaaccacttatttgattctgttttgtggtggacatagatgattacgtttgagctttgtattttgtgaaaaccttaatgaaatgaattccaaagat

SEQ ID NO: 28014 - DNA, 11020 bp, Homo sapiens
  source 1..11020: mol_type = unassigned DNA
gttattaactgtaagactgtttgaattgtcaggtctttgtggtgagctgaattctgcatggcagtgcttactgtgcagaaaggttgcaatgcctcactttgccttaatccatgttcctctaacttccttactctttctctcaagaggaggcaagtggctgtggcggccgcagcagtggctgatcatcactgaaaataccaaagaaaagaactgagctgcctccttcatattttttccattgaggattaatttaccgtgctttttcattttctctacatcctgcaaaagtttttttctctcctaagaaacaaactatgaactgattgttgaaaaaaagaagtaaaaagttttagcacagcttctctgtctcttcgggacaagttagaaaattctgaagtgagccgaagcatagtaagtgctttctttctttttaagctacttctggggagggaggaggctattgtaatggtaaatttcactccgagaggaagaaagggttgataatcaatcaaaaatgaggtattcctttgagtatttgtgattttcttactatattgtaagatgcttttaattttctctgtaaaataggcagaaatggttttagtgtgtgtatgtgtgaaataaaagctcagaaaagcaatcttcagagcgccactgaaggaagttttgacgaacggagtagagatgtataccacttgggggcttcagtgagaacccagaattcctggaggaggatttacattcagaaatgttgaagtgaaaattccttctggttcagcatcttggagttcagcttggaagaacattttacgtatggaagaatttgcttctccaaacctctcttttggccattgtgtgtcctgaaggatgggacaacttgtgctgtagaagcactgcttgcctgagtttgcttcaggcattttaaatttaacttgagggatcatgtgtttggcatgatgaggaccactgaagacttccacaagcctagtgccacattaaactctaacacggccaccaagggaaggtacatttatctggaggcattcctggagggaggagctccctggggttttactctaaagggtggcctggagcacggagaaccattaatcatctctaaggtcgaagaagggggcaaagcagacaccctgagctccaaactgcaggctggggatgaggttgtgcacatcaatgaggtgactctgagcagctccagaaaggaggcagtttccctggtgaaaggatcctacaagaccctcaggctggtagtgcgcagagatgtgtgcacagacccaggccatgcagatactggtgcctctaacttcgtcagcccagaacacctcacctctggcccccagcacaggaaagcagcgtggtcaggaggggttaaacttcggctgaagcacaggcgcagtgagcctgcaggccgacctcactcgtggcacacaactaaatctggggagaagcaacccgatgccagcatgatgcagatatctcagggtatgatcggccctccttggcaccaaagctaccattccagctcctctactagtgacctctccaactatgaccatgcttatctaaggcggagccctgaccagtgcagctcccaggggagcatggagagcctggagcccagtggggcatacccaccctgtcatctttcccctgccaagtccaccggcagcattgaccagctcagccacttccataacaagagagactcggcttacagctctttctccaccagttctagcatcctagagtatccacaccctggcatctctggccgggagcgttcaggctccatggacaatacttctgctcgaggtggcctcctcgaagggatgaggcaggcagatattcgctatgtcaagacagtctatgacacccggaggggagtctcagcagagtatgaggtgaactcttcagccctgctgcttcaaggtagggaggcccgagcctcagcaaatggtcagggctatgataaatggtctaatattcctcggggcaagggagtgccacccccatcctggagccagcagtgccccagttccttggagactgccacggacaaccttcctcctaaggtgggtgcacccctgcctccagctcggagtgacagttacgcagcatttcggcaccgtgagcggcccagctcctggtctagccttgatcagaaacggctctgccggcctcaggcaaactctttaggctccctgaagtctccattcatagaggagcagctgcatactgtgctggagaagagtccagagaacagccccccagtgaagcccaagcataactatacccagaaggcccaacctggccaacctctgctgccgaccagcatctacccggtaccttccctggagccacactttgcccaggtgcctcagccttctgtgagtagcaacggtatgctctaccctgcactggccaaggagagtggatacatagcccctcagggagcatgcaacaagatggctaccattgatgagaatgggaaccagaatggatctggcaggcctgggtttgccttctgccagcccttagaacatgacttgctgtccccagtggagaagaaaccagaagctacagccaagtatgtcccctccaaagtccatttctgttcagtgcctgaaaatgaggaggatgcctccctgaagagacatctcacacctccccaaggcaacagcccacattccaatgagagaaagagcacccacagtaacaaaccatcttctcatccccacagcctcaaatgccctcaggctcaggcctggcaagcgggtgaagacaagagatcttccaggctctcagagccctgggagggcgatttccaggaagaccacaatgccaacctctggaggaggctggagagagaaggcctaggccagagcctgtcaggcaactttggcaagaccaagtcagccttctcatctctccagaacattcctgagagtctgagaagacacagcagcctggagctaggccggggaacccaggagggttaccccgggggcaggcccacctgtgcagtcaacaccaaggcagaagaccctgggaggaaagccgctcctgacctcgggagccatctggaccggcaggtttcctacccgcggcccgaggggaggaccggtgcctcggcttctttcaacagcacagacccaagtcccgaagagccgcctgccccctcgcacccgcacacatccagtctgggccggagggggcccggcccaggcagcgcctcggctcttcagggctttcagtacgggaagccccactgctcggtgctggagaaggtctccaaattcgagcagcgagagcaagggagccagagaccgagtgtgggcggctctggttttggccataactataggccccacaggaccgtctcaacttccagtacttctgggaatgacttcgaggagacaaaagcacacattcgtttctctgagtcagctgaacccctaggcaacggggagcagcacttcaaaaacggggagctgaagttggaagaggcttcccggcagccctgcggtcagcagctgagcggaggagcgtcggacagcggccgtggcccccagaggccggacgctcggctcctccgtagccagagcaccttccagctctccagcgagccagagagggagcccgagtggcgggacaggcccggctcgcccgaatcgcccctgctggatgcccccttcagccgcgcctaccggaacagcatcaaggacgcacagtcccgtgtcttgggggccacctcctttcgacgtcgagacctggagctgggggcgcccgtggcgtcgaggtcctggcggccacggccttcctcggcccacgtggggctgcggagccccgaggcgtcggcctccgcctccccgcacacgccccgggagcggcacagcgtgacccctgctgagggcgacctggccaggcccgtgccccctgccgcccggagaggtgctcgccggcgcctgactcccgagcagaagaagcgctcctactcggagcccgagaagatgaacgaggtggggatcgtggaggaggccgaaccggcacccctgggcccgcagagaaatgggatgcgtttcccggagagcagcgtggccgaccggcgccgtctcttcgagcgcgatggcaaggcctgctccacgctcagcctgtcggggcccgagctgaagcagttccagcagagcgccctggcggactacatccagcgcaagaccggcaagcggcctacctccgccgccggctgcagcctccaggagcccgggccactgcgtgagcgcgcccagagtgcctacctccagcccggccccgcggcgctcgaaggctccggcctcgcctcggcctccagcttgagctcactgcgggagcccagcctgcagccccgcagggaggccacgctcctgccggccacagttgcagaaacccagcaggctccccgagatcgcagcagctccttcgccggtggccgccgcctcggggaacggcgacgcggggacctgcttagcggagcaaacggtggaacaaggggcacccagagaggggatgagacccccagggagccatcctcctggggggccagggccgggaagtccatgtcggccgaggacctgctggaacgctcggacgtccttgcgggccctgtccatgtgaggtccaggtcatctcccgccaccgcagacaagcgccaggatgtgcttttggggcaagacagtggctttggtcttgtgaaggatccatgttatttggctggtcctggatctaggtcactcagttgttcagaaagaggccaagaagagatgctgccgctcttccaccatctcacccctcgttggggtggttcaggctgcaaagccattggtgattcctccgttcctagtgaatgtcctggaaccctggaccatcagaggcaagccagtaggacaccctgccccaggccaccactggcaggaacgcaagggctggtcacagacaccagggctgcacccctgaccccaattggcacccctctgccttcagccattccctctggctactgctcacaggacggtcagacagggcgacagcctctcccgccctacacccctgccatgatgcacagaagcaatggtcacaccctgacccagcctcccggtccaagaggctgtgagggcgatggcccagagcatggggtagaagagggaacgaggaagagggtctcgctgcctcagtggccacctccttctcgagcaaagtgggcccacgcagccagagaggacagccttcctgaggaatcctcagcccctgattttgcaaacctgaagcactatcaaaaacagcagagtcttccaagtttatgcagcacttctgacccagacacacctcttggggccccgagcactccagggaggatctccctccgaatatctgagtctgtcctgcgggactccccgccacctcatgaggattatgaagacgaagtgtttgtgagggatccgcaccccaaggccacgtccagccccacatttgaacctcttcccccacccccacctcctccaccgagtcaggaaaccccggtgtatagcatggatgacttccctccacctcctccccacactgtatgtgaggcgcagctggacagtgaggatcccgaggggccacgccccagcttcaacaaactttctaaagtgacaattgcaagggaaaggcacatgcctggtgcagcccatgtggtaggtagtcagacactggcttccagactccaaacttctatcaagggttcagaggctgagtccacaccaccctccttcatgagcgttcacgcccaacttgctgggtctcttggtgggcagccagcacccatccagactcaaagcctcagccatgatccagtcagtggaactcagggtttagaaaagaaagtcagtcctgatcctcagaagagttcagaagacatcagaacagaggctttggccaaggaaattgtccaccaagacaaatctctagcagacattttggatccagactccaggctgaagacaacaatggacctgatggaaggtttgtttccccgagatgtgaacttgctgaaggaaaacagtgtaaagaggaaggccatacagagaactgtcagctcttcaggatgtgaaggcaagaggaatgaagacaaggaagcagtgagcatgttggttaactgccctgcctactacagtgtgtctgctcccaaggctgagctactgaacaaaatcaaagagatgccagcagaagtgaatgaggaagaggaacaggcagatgtcaatgaaaagaaggctgagctcattggaagtctcacccacaagctggagaccctccaggaggcgaaggggagcctgctcacggacatcaagctcaacaacgccctgggagaagaggtggaggctctgatcagcgagctctgcaagcccaatgagtttgacaagtataggatgttcataggggatttggacaaggtggtcaacctgctgctctccctctcggggcgtctagcccgtgttgagaatgtccttagcggccttggtgaagatgccagtaatgaagaaaggagctctctttacgagaaaaggaagatcctggctggtcagcatgaggatgcccgggagctgaaggagaacctggatcgcagggagcgagtagtgctgggcatcttggccaattacctttcagaggagcagctccaggactaccagcacttcgtgaaaatgaagtccacgctcctcattgagcaacggaagctggatgacaagatcaagctgggccaggagcaggtcaagtgtctgctggagagcctgccctcagatttcattcccaaggctggggccctggctctgcccccaaacctcacgagtgagcccattcctgctgggggctgtactttcagtggtattttcccaacattaacctctccactttaacctcttctaaaatacccaaccaaaagatcactgtttctctcaacactatttaatctgaaaaatgtttcagtacaaaccactgtttgaactatctgggttattggtgtttgttcctgatgaaaggaaaaaaattctctccaggaggaagcctttttccttcttgcccttcctgattgatcttctgagagctcgaatgctgctggacacgtacccctttctattattactttgtagtagaaagaaagttaatgaaactgagaactgattggagggtgtttgatcatttagtttttaacaggctgaggcaacatggatcagtgtgtgtccccctcaggaatgtatccacagtggccttccttgctggtgggcagtgtatcctgatggcagggtacaagtaccattaatgaagggtctgcaacataaagccttaaaaagacacacactaagaaaactgtaaaaccttgaacattgttatttatattttttaaaatggaaaagatcactatgtttgttgtgctaaccacttatttgattctgttttgtggtggacatagatgattacgtttgagctttgtattttgtgaaaaccttaatgaaatgaattccaaagatagtcacgttgagcgtgaagactttttttcttacattcctgtcttatttttaccaacacgagcaggcattctgcgcttccactggactgagtatgggggagtcctgctcccctcctgtctcacaccttccccaggaggaaggcctcatgcactgcggttattgcatcatttcctagtgcttcatgtcattatcactggtggggaaacaaagctaaattttattaacaaagacaactctcagacctatataataggaggaggacgtccagaatccaacaaaattcaaacggagcccatgctgttctcctgaacaagatttgggctaaatacggcctgtttattgaggctgttttaatgatgctttaaaaaaaaaaaatgttttctaaaatgtcaaacctgttgaccacactttgattaaaaactgcctccttaacctctgaagactgattttgctttatcatgtttcaataataacatttcagaggttactctgtagccccagttgtaagcttataaaaacaaactggaaggctgaggaggttatgggctggcagccaggctatgtttacagctgctggagatggcagtagccttatactttgagcaggtagtacatcccaggctgtgctagaggtagatttgttttttcacgtttgatctgtggctggtggccacctttgttgatttgggcttacgagtttcatagtagccagtcttagaaaattgggggagtaaaattttgaagtaaaaaaaaaaaaaaaatgacaagggaaccaaatgctccttctccccttagtacattttcattacttaatgaagttttatctcctatgtaagaatatcaaaattgtagtttgggtctccagtagagatgtcttttgattaacttataaacaactggccacccagaagtttcctttgcatagtcaaccaaagctatggctttgttctttggagcttatatactgcatgactccattgatacaaataagacagcaccttggtttcccagggatgttttcattcagaggtcctgtctcccaggaaagcagtagaaccagtgacagcattcaacagccacactgcatggtcatcagtcttaggccaacatgggagcctgaaattaactccatcagtaactacctgtgtgtcttgctgatactgaatgagccctcacaagccaagccaggtggaagacagccagcaaacgtctacagttattcttagtgaaattcctcagaggaatccagggggctcccagttcccaacactcttcgagatgaccatttttcgggatttgactggggaacattttacatattcagtctttctcaaaaatttttatttattttcttgagaaagggtcttactatgttgcccaggctggagtgcagagtggtgcgataacagctcattgcagtctgaacctctgaggctcaagccatcctcccatctcagcctcccaagtagctgggaccacaggtgtgcaccactatgcttggctaattttttgattttttatagagacgggggtctcgctatgttgcccaggctggtttcaaactcctgggctcaagggatccttccgctttggtcccagaagtgctgggattacaggcatgagccacttcacccagccacttttctaatttatagacataaaagtaattgactcccacagcacagtaacaggcaatgctgcttggcatgccacaaacatctgaaagcttgtgacactcctaggattgtgtccattctttcattatgtggaaactttgttctgttatgtgaaatgggtaaggcaccaagtgagactttgaaatctaatttttaggtggatgtgatatttattgtaataggacttgacctctgtactttaaagaaatcactaaccaaattttcaaagtttccttttaaatgcgtttagctagaaatctatgtatttatccctttcctattttgcattcttctcccactatttttaaaaactcatttacagtagaaaccattcttctttctcccaacagtatcctttgccaagaccatgagaacagtaaggagcatgttgttggtcagggtttcagaatacgcgtgatgtcactgagaatgtttgctcacagtcaataattgtctttgtggatgtgataattttggagatacacttctggtcagaactcaggtgagataatcttgcaatactccaaatgcagatactccagccacccgcaaggttccaggaaaggacaatgtcctgcgagaaaatcaggaggcctccacttcctgggccacttgagaagttcctgggcatgtcactacatgttggttgactcagccatttctcatgctgttttgtttcttgcggtggccacttaaccccaaagaatgaagggaggatccacagtgaaagtgcctgagtttctctatgagaccagatgctgtcgaaaccaaacatcttttcctttgctctatgggaacattttagggtttgttttgcacagctggtttccagactagaagattaacaagtttgggtccacccctaagaatcagtggctgtcttttaaggtgaggagtgtgggcttaactgaggtcctttgagggagctataaaggagaaacaacctgggacatcccagttttcctattcctccactgttaatatctcatctaaaataattcatgagtttaaatggtaaatatatgctttaagctctacctttaaacttgtatgttattcaggcatctcttattaagatactgggtctctggatacccaaggaaatgttggctttttattcttatgtggttccaaatttacttctcttcagtttaattgtccatggtagtgctggcttcattgttaggttggagttattattttccttttagaacaacatgaattttattcaccttactattagaaaaaggaataactacagccagaaataacttcatttcctacaaggtataaaaagtggtcaagtgaatgtgaaggggcttttctacacaggaatatattatcgggaacaaagtatttcctgctgccttaactctttgggatgcataggataaaatgataaagaccattttaatatcagaaagggttgtcttattaatttttaaataaaacttcacatttcttaatggggagctcattcagaaactaaataatggtttctcaaagtgtggtcaggatacgatctgcatcagaatccttggaatgcttgttaaaaataccaattgctatgacaaaaccaagtctgctggaaactgcatttcagcaggtttcccatgttattctgatgtattttaacatttgagagccactaccaatcatctgtacagttcctactgttatgatcacaataagactaacatgaatttaataatctgaataatttttaaaatttaaataaacagaaattgaagttaaatttaaaaataaaaataacctcagaagttgaaa

SEQ ID NO: 28015 - DNA, 2241 bp, Homo sapiens
  source 1..2241: mol_type = unassigned DNA
gcattctatcatcagatgattttccttgcttccctcctcctcttgcccacaaaaatagaattccagcatttctaagctataggctattgttcaagatgccagctcttctcagggagtcattaagggtcaccttctcttcttccctcttacagagcaggaattgaattttaattggccaatttacagaggggactggcattgagagtccctcccacttgcgctgagctgggcaagttcaaggcgattcaggccgtccaactggaggcacatgtagtacttgtgaggcttttaccatgctgtggggagcagaaagagcagtagcagggcagaatggctttttattccacgactgaatatgacatccaattggccagagggttgctatctgggatgtttctatttgccacaaggcgcagtgagcctgcaggccgacctcactcgtggcacacaactaaatctggggagaagcaacccgatgccagcatgatgcagatatctcagggtatgatcggccctccttggcaccaaagctaccattccagctcctctactagtgacctctccaactatgaccatgcttatctaaggcggagccctgaccagtgcagctcccaggggagcatggagagcctggagcccagtggggcatacccaccctgtcatctttcccctgccaagtccaccggcagcattgaccagctcagccacttccataacaagagagactcggcttacagctctttctccaccagttctagcatcctagagtatccacaccctggcaagcgggtgaagacaagagatcttccaggctctcagagccctgggagggcgatttccaggaagaccacaatgccaacctctggaggaggctggagagagaaggcctaggccagagcctgtcaggcaactttggcaagaccaagtcagccttctcatctctccagaacattcctgagagtctgagaagacacagcagcctggagctaggccggggaacccaggagggttaccccgggggcaggcccacctgtgcagtcaacaccaaggcagaagaccctgggaggaaagccgctcctgacctcgggagccatctggaccggcaggtttcctacccgcggcccgaggggaggaccggtgcctcggcttctttcaacagcacagacccaagtcccgaagagccgcctgccccctcgcacccgcacacatccagtctgtatcagagctgctctggcagagaggccctcagagctcggtgctgggaaaggagcaagtggaagtggtgagcgtggccaacgtcttgccaagactgagaggggaagggctttgtaaggaggagagcctagagaaatagattcgtgtactacactgacccttacctctgaggcattaaggtgggtgttggcgcaaatcctgaaaatcaggaaaggtctgagtaggagcgcactgtctggtttggcccagtccgtgagcctctgcttctgaagctccttgagccagccatgtaacacgtgtcccagtgtgcagtctgtgcttttcatttctcctgggttactgcagtattttcttgcatgttttatttccttaaaagactactatgagaaagactgagtagctttcattttctcttaaattttcagtgaaatctttgtggattgacagtctgggactcagcagttagtggcttccagactaaataaaaacagaacattttatccaaatttgggattgcattttaaaaatttccaactgatcctaactaaattactaacaggaacaccacgtttcattttatgggggagagagaaaggaaagagctatgtgatacttacaagctatttgtcacattgtcagaggctcttctgattcaaggccttaactgtcaccttgtccatttcactgcttttattttcagatttgggaaacagactaattgaggtgaagtgatttatccagggtcatgtctttagcaaacacatactgagcacctacaatgtgcaaggcaatccactgggtactatggggaccccaaagataagatttttgtaggtgtgccagtcagttcaccatgggtggttgcagtatggtcattctgttctctgaccactggctgaaggaccaaagtaacatccttagcaaagtatttcctagcattaccactggaaatatatgtttgctccgtcagtttagaagcagaatggtcatggagcttttgcagcactgagaccttcctggggattt

SEQ ID NO: 28016 - DNA, 6261 bp, Homo sapiens
  source 1..6261: mol_type = unassigned DNA
ccgttttcttgtccattacgcgctatccctccgcctctccttctttcttttcttttctttttttcccttctccttttcccccctctctccccctttctccagctccgtgtcatttcctccttgcgctcgctcgctgcctgagcgtctccagccgggagagtaggcggagcagggcggtgcggggtggcgtagagctggagggcgatggtggcggagctgctgggggcggaggcaacgtagccccctcggaaaaggagcccggcggcgcctgagcccagccgaggatggagaaccggcctgggtccttccagtacgtccctgtgcagctgcaagggggggcaccctggggcttcacccttaaggggggtctggaacactgtgagccgctcacagtgtctaagattgaagatggaggcaaggcagctttgtcccagaagatgaggactggtgatgagctggtgaatatcaatggcactccattatatggctcccgccaagaggccctcattctcatcaaaggctccttccggattctcaagctgattgtcaggaggaggaacgcccctgtcagtaggccgcactcatggcatgtggccaagctgctggagggatgccctgaagcagccaccaccatgcatttcccttctgaagccttcagcttgtcctggcattctggctgcaacacaagtgacgtgtgtgtgcagtggtgtccactctcccggcattgcagcaccgagaaaagcagctccattggcagcatggagagcctggagcaaccaggccaagccacctatgagagccatctgttgcctattgaccagaacatgtaccctaaccagcgtgactcagcctacagctccttctcggccagctcaaatgcttctgactgtgccctttccctcaggccagaggagccagcctctacagactgcatcatgcaaggcccagggccaactaaggcccccagtggccggcctaatgtggctgagacctcaggaggtagtcggcgcaccaatgggggccacctgacccccagctctcagatgtcatcccgtccacaggagggataccagtcagggcccgccaaagcagtcaggggcccaccacaacctccagtgaggcgggacagccttcaggcctccagagcccaactcctcaatggagagcagcgcagggcatctgagcctgtggtccccttgccacagaaggagaaactgagcttagagcctgtgctacccgcaaggaaccctaataggttctgttgcctcagtgggcatgaccaagtgacaagtgagggccatcagaactgtgagttcagtcagcctcctgaatccagccaacagggctctgagcatctactgatgcaggcctcaaccaaagctgttggatccccaaaagcctgtgacagagcttccagcgtggattccaacccactcaatgaggcttctgcagagctagctaaggcttcttttggcagacctccacatctcataggacccacagggcatcgccatagtgcccctgaacagctgctggcatcccacctgcagcatgtgcaccttgataccaggggcagcaaagggatggagctcccacccgtacaggatgggcaccagtggactctgtcccctttgcacagcagccacaaagggaagaaaagtccatgcccccctacaggaggaacccatgaccagtccagcaaagaaagaaagaccagacaagtggatgacaggtctttagttttgggacaccagagccaaagcagtcccccacatggagaggctgatggacacccctcagaaaaaggtttcctggacccaaacagaacaagcagagcagccagtgaattggccaaccagcaaccctctgcctctggctcccttgttcaacaagccacggactgttcttcaaccactaaagcagctagtggcacagaggcaggtgaagaaggggacagcgagcccaaggagtgcagccggatgggtggtaggcgaagtggagggacccggggccgctcgatccaaaaccggcggaagagtgagcgttttgctaccaatctgcgtaatgaaattcagaggaggaaggcccagctccagaaaagcaagggtcccttgtcacagctgtgtgacactaaggagccagtggaagagacccaggagcccccagaaagtcctccactcactgcctctaacacatctcttctatcttcatgtaaaaaacctcccagccccagagacaagctcttcaacaaaagcatgatgctcagagctaggtcttccgagtgcctcagccaagcccctgagagccatgaatctaggacaggcttagagggacgaataagccctggccagaggcctggccagtcctctttgggcctgaacacctggtggaaagcacctgacccatcctcctcagaccctgagaaagcacatgctcactgtggagtccgtggaggtcattggagatggtctccagagcataattcacagccacttgtggcagcagccatggaaggcccttccaacccaggtgacaacaaggaattgaaggcttctactgctcaagctggggaggatgccatcctcttgccttttgcagacagaagaaagttctttgaagagagtagcaaatccttatctacatctcatttgccaggtttaaccactcatagcaacaagacttttacccagagaccaaaacctatagaccaaaacttccagccaatgagctccagctgtagggaattgaggcgccatcccatggaccaatcatatcattccgcagaccaaccatatcatgccacagaccaatcatatcattccatgtcaccccttcagtcagaaactcccacttactcagaatgttttgcaagcaaaggtctagaaaattccatgtgttgtaagccactacactgtggtgattttgattaccacaggacctgctcttactcctgcagtgttcaaggagctctagtccatgatccttgcatttattgttctggggaaatctgccctgccttgctaaagagaaatatgatgccaaattgctacaactgccggtgccaccaccaccaatgcattcggtgttcagtttgctatcataatcctcagcacagtgccctcgaggacagcagcttggcacctggcaacacttggaaacccaggaagctgacagtgcaggaatttcctggggacaaatggaatccaataacaggaaacaggaagaccagccagtcagggagggaaatggctcattccaagactagcttttcatgggcaacccctttccatccttgccttgagaacccagcactggacttgtcaagctaccgagcaatttcttctcttgacctccttggagacttcaaacatgctttgaaaaaatcagaggaaacttcagtttatgaggaggggagctcccttgcctccatgccccacccactgcgcagccgtgccttctcagagagtcacatcagcttggcgccccaaagcacccgggcctgggggcagcataggagggagctctttagcaaaggtgatgagacccagtcggatcttctcggagccaggaagaaggcctttcctcctcctcgccctcctcctcccaactgggagaagtacaggctctttcgtgcagcccagcagcagaagcagcaacagcagcagcagaagcaacaggaggaggaggaggaggaggaagaagaagaagaagaggaagaggaagaggaggaggaggaggcagaggaggaggaagaggagctgccaccccagtatttcagttcagaaacctctggttcctgtgctctcaatcctgaggaggtcctagagcagccacaacccctcagctttggccacctggagggctcgagacagggttcacaaagtgtcccagcagagcaagaatcctttgcactccattccagtgatttcttgcctccaataaggggtcacttgggatctcaacctgagcaggctcagcccccttgctactatggcattggtgggctttggaggacatcgggacaggaagccactgaatccgccaaacaagagtttcagcacttttcgcctccttcaggggccccaggaatccctacctcttactcagcttattacaatatttctgtggccaaggcagagctgctgaacaaactgaaagaccaacctgagatggcagagattggcctaggagaggaggaagttgaccatgaactggctcaaaaaaagatacagcttatcgaaagcatcagcagaaaactttctgtcttgcgggaggcccagcgagggctgctagaggacatcaatgccaattctgcccttggggaggaggtggaggccaacttaaaagccgtctgcaaatccaatgaatttgaaaagtaccacttgtttgttggggacctggacaaagtggtcaacctgttgctgtcactctctggacgactggcccgggtggagaatgctctgaacagcatcgattcagaggccaaccaggagaagttggtactgatagagaagaagcagcagctgacggggcagttggcagatgccaaggagctgaaggagcacgtggaccgccgggagaagttggtgtttggcatggtctcccgctacctgcctcaggaccagctccaagattaccagcactttgtcaagatgaaatctgctctcatcattgaacagcgagagctggaggagaagatcaagctcggggaagagcaactcaaatgtctcagggagagtctactcctggggcccagcaatttctaattctaccagcactctgccacagcatccctgcccagccatgtgggaagtgctttcaatcttctttgttagcagtttctcagcaagtagatagcaattagcagtttgttccagccctctaccctggatgtctctcactaccccttccctagcagtggtcctaaccagctaggagaccctggggaagccacaagcttctacccaagggagctgcagcaaggtgtgatcttagaaccacactctccttcccacagttgccaagggcaagtacttgctgcacagagaaccaaggaagtgccttcattctgctttgtactaggacaccaaagacatcaagtactcatcacccacccatatcatcaacagcctctaaaggctcagagggaatctgccttgcagctctactctgccccagggcttgtggccagccatttctcacagagagctggctgccttgagggcattcacctggcaccagtttcagggcctcacccaagctttgcaggggaaagcacagagggaggaattacactgaaaaaaatgcaagcaaaggttgagtacccccaggtgccccttaggaaggaaccaggtttaaataggctctacccttacctttcccagcagcaagttcaggggaagaggcctactcttagccctggctagtgtgaccctcttcctgtcctaagactttggtcctaccacctcttgtttcatctttcctttacattgctgggggttaccgcaggtgcctaccccagggcttcaccatatgggccattaatagctctactaaaactgacttctagatgtaggtttcattattgggggagggggttcttattgttatattttaaatggccttttgattttatttatttttatgttttgattatttttttcttttttaactaataaggcgagaagagggaagttggagagggaaaagttagcccagaaggaaagcattttctgcagatcagcctgaatccaccgtggctaggcatattcttgctcttctcgtgttgctcacaactacctgcctggatgaatttaggaaagttgcaggatacaaggttaaaacacaagatcaaatgaacaatccgaaaatgttattaagaaaacagttccggccgggcatggtggctcacgcctgaaatcccagcactttgggaggccgaggcaggtggatcacgaggtcaggagatcaagaccatcctggctaacacggtgaaaccctatctctactaaaaatacaaaaaattagccaggtgtggtggcacgcaccagtagtcccagctactcgggaggctgaggcaggagaattgcttgaacctggaaggcagagattgcagtgagctgagaccacaccactgcactccatcctgggcaacagagtgagactttgtctcaaaaagaaagaaagaaagaaagaaagaaagaaagaaagaaaagaaagaaagaaagaaagaaagaaaacagttccatttacaatagcatc

SEQ ID NO: 28017 - DNA, 9556 bp, Homo sapiens
  source 1..9556: mol_type = unassigned DNA
ccggcggcgcctgagcccagccgaggatggagaaccggcctgggtccttccagtacgtccctgtgcagctgcaagggggggcaccctggggcttcacccttaaggggggtctggaacactgtgagccgctcacagtgtctaagattgaagatggaggcaaggcagctttgtcccagaagatgaggactggtgatgagctggtgaatatcaatggcactccattatatggctcccgccaagaggccctcattctcatcaaaggctccttccggattctcaagctgattgtcaggaggaggaacgcccctgtcagtaggccgcactcatggcatgtggccaagctgctggagggatgccctgaagcagccaccaccatgcatttcccttctgaagccttcagcttgtcctggcattctggctgcaacacaagtgacgtgtgtgtgcagtggtgtccactctcccggcattgcagcaccgagaaaagcagctccattggcagcatggagagcctggagcaaccaggccaagccacctatgagagccatctgttgcctattgaccagaacatgtaccctaaccagcgtgactcagcctacagctccttctcggccagctcaaatgcttctgactgtgccctttccctcaggccagaggagccagcctctacagactgcatcatgcaaggcccagggccaactaaggcccccagtggccggcctaatgtggctgagacctcaggaggtagtcggcgcaccaatgggggccacctgacccccagctctcagatgtcatcccgtccacaggagggataccagtcagggcccgccaaagcagtcaggggcccaccacaacctccagtgaggcgggacagccttcaggcctccagagcccaactcctcaatggagagcagcgcagggcatctgagcctgtggtccccttgccacagaaggagaaactgagcttagagcctgtgctacccgcaaggaaccctaataggttctgttgcctcagtgggcatgaccaagtgacaagtgagggccatcagaactgtgagttcagtcagcctcctgaatccagccaacagggctctgagcatctactgatgcaggcctcaaccaaagctgttggatccccaaaagcctgtgacagagcttccagcgtggattccaacccactcaatgaggcttctgcagagctagctaaggcttcttttggcagacctccacatctcataggacccacagggcatcgccatagtgcccctgaacagctgctggcatcccacctgcagcatgtgcaccttgataccaggggcagcaaagggatggagctcccacccgtacaggatgggcaccagtggactctgtcccctttgcacagcagccacaaagggaagaaaagtccatgcccccctacaggaggaacccatgaccagtccagcaaagaaagaaagaccagacaagtggatgacaggtctttagttttgggacaccagagccaaagcagtcccccacatggagaggctgatggacacccctcagaaaaaggtttcctggacccaaacagaacaagcagagcagccagtgaattggccaaccagcaaccctctgcctctggctcccttgttcaacaagccacggactgttcttcaaccactaaagcagctagtggcacagaggcaggtgaagaaggggacagcgagcccaaggagtgcagccggatgggtggtaggcgaagtggagggacccggggccgctcgatccaaaaccggcggaagagtgagcgttttgctaccaatctgcgtaatgaaattcagaggaggaaggcccagctccagaaaagcaagggtcccttgtcacagctgtgtgacactaaggagccagtggaagagacccaggagcccccagaaagtcctccactcactgcctctaacacatctcttctatcttcatgtaaaaaacctcccagccccagagacaagctcttcaacaaaagcatgatgctcagagctaggtcttccgagtgcctcagccaagcccctgagagccatgaatctaggacaggcttagagggacgaataagccctggccagaggcctggccagtcctctttgggcctgaacacctggtggaaagcacctgacccatcctcctcagaccctgagaaagcacatgctcactgtggagtccgtggaggtcattggagatggtctccagagcataattcacagccacttgtggcagcagccatggaaggcccttccaacccaggtgacaacaaggaattgaaggcttctactgctcaagctggggaggatgccatcctcttgccttttgcagacagaagaaagttctttgaagagagtagcaaatccttatctacatctcatttgccaggtttaaccactcatagcaacaagacttttacccagagaccaaaacctatagaccaaaacttccagccaatgagctccagctgtagggaattgaggcgccatcccatggaccaatcatatcattccgcagaccaaccatatcatgccacagaccaatcatatcattccatgtcaccccttcagtcagaaactcccacttactcagaatgttttgcaagcaaaggtctagaaaattccatgtgttgtaagccactacactgtggtgattttgattaccacaggacctgctcttactcctgcagtgttcaaggagctctagtccatgatccttgcatttattgttctggggaaatctgccctgccttgctaaagagaaatatgatgccaaattgctacaactgccggtgccaccaccaccaatgcattcggtgttcagtttgctatcataatcctcagcacagtgccctcgaggacagcagcttggcacctggcaacacttggaaacccaggaagctgacagtgcaggaatttcctggggacaaatggaatccaataacaggaaacaggaagaccagccagtcagggagggaaatggctcattccaagactagcttttcatgggcaacccctttccatccttgccttgagaacccagcactggacttgtcaagctaccgagcaatttcttctcttgacctccttggagacttcaaacatgctttgaaaaaatcagaggaaacttcagtttatgaggaggggagctcccttgcctccatgccccacccactgcgcagccgtgccttctcagagagtcacatcagcttggcgccccaaagcacccgggcctgggggcagcataggagggagctctttagcaaaggtgatgagacccagtcggatcttctcggagccaggaagaaggcctttcctcctcctcgccctcctcctcccaactgggagaagtacaggctctttcgtgcagcccagcagcagaagcagcaacagcagcagcagaagcaacaggaggaggaggaggaggaggaagaagaagaagaagaggaagaggaagaggaggaggaggaggcagaggaggaggaagaggagctgccaccccagtatttcagttcagaaacctctggttcctgtgctctcaatcctgaggaggtcctagagcagccacaacccctcagctttggccacctggagggctcgagacagggttcacaaagtgtcccagcagagcaagaatcctttgcactccattccagtgatttcttgcctccaataaggggtcacttgggatctcaacctgagcaggctcagcccccttgctactatggcattggtgggctttggaggacatcgggacaggaagccactgaatccgccaaacaagagtttcagcacttttcgcctccttcaggggccccaggaatccctacctcttactcagcttattacaatatttctgtggccaaggcagagctgctgaacaaactgaaagaccaacctgagatggcagagattggcctaggagaggaggaagttgaccatgaactggctcaaaaaaagatacagcttatcgaaagcatcagcagaaaactttctgtcttgcgggaggcccagcgagggctgctagaggacatcaatgccaattctgcccttggggaggaggtggaggccaacttaaaagccgtctgcaaatccaatgaatttgaaaagtaccacttgtttgttggggacctggacaaagtggtcaacctgttgctgtcactctctggacgactggcccgggtggagaatgctctgaacagcatcgattcagaggccaaccaggagaagttggtactgatagagaagaagcagcagctgacggggcagttggcagatgccaaggagctgaaggagcacgtggaccgccgggagaagttggtgtttggcatggtctcccgctacctgcctcaggaccagctccaagattaccagcactttgtcaagatgaaatctgctctcatcattgaacagcgagagctggaggagaagatcaagctcggggaagagcaactcaaatgtctcagggagagtctactcctggggcccagcaatttctaattctaccagcactctgccacagcatccctgcccagccatgtgggaagtgctttcaatcttctttgttagcagtttctcagcaagtagatagcaattagcagtttgttccagccctctaccctggatgtctctcactaccccttccctagcagtggtcctaaccagctaggagaccctggggaagccacaagcttctacccaagggagctgcagcaaggtgtgatcttagaaccacactctccttcccacagttgccaagggcaagtacttgctgcacagagaaccaaggaagtgccttcattctgctttgtactaggacaccaaagacatcaagtactcatcacccacccatatcatcaacagcctctaaaggctcagagggaatctgccttgcagctctactctgccccagggcttgtggccagccatttctcacagagagctggctgccttgagggcattcacctggcaccagtttcagggcctcacccaagctttgcaggggaaagcacagagggaggaattacactgaaaaaaatgcaagcaaaggttgagtacccccaggtgccccttaggaaggaaccaggtttaaataggctctacccttacctttcccagcagcaagttcaggggaagaggcctactcttagccctggctagtgtgaccctcttcctgtcctaagactttggtcctaccacctcttgtttcatctttcctttacattgctgggggttaccgcaggtgcctaccccagggcttcaccatatgggccattaatagctctactaaaactgacttctagatgtaggtttcattattgggggagggggttcttattgttatattttaaatggccttttgattttatttatttttatgttttgattatttttttcttttttaactaataaggcgagaagagggaagttggagagggaaaagttagcccagaaggaaagcattttctgcagatcagcctgaatccaccgtggctaggtaagcaagtgccaaggcgttgaattgttcccaccatagctaccgatgtctaggaaggagttttccccttgaactcagagcctccctactgtggcctggccttgtgcttcccttaaagtctaagtgacttgagtttagcattccccagcagggtttaagtttttcttactgatttctttttgaaaccaaagaaatctcctgaaatggagaaaggttcagtcatttctctaccatctccaagctatgggatcagtagaggtgagctcagaaggaactcctctaaccattgctttctcagcctgtggcctggctcaagggaaccaaaactcaaggtagctgggagctccagccagagccagctccccagagcaattgaagacccagccaggatcttaggcatacaaacaactaaaactgctgctgttgccaaggccctgacaccagtagctagtttctatgctggaaaagcagccctcaggtggacgatggcaagaagggggttatggccaaatgctgccctgttatccagcttagctccctgttcctcactaactggggccaatccttggtatcacacaacccagccaaggcctggcatctcttctagttactgctgagttcctcagggtccttgaaggtcaactgtagcagcagggatgtctcattcaaccaaagaatttgccaaggaacttttgctgctgttacaaatacttgtcactagcttccatttcctcttcattgtatttgaaaacaatgggagaatcttggccagcagggtgtcctggggtagggggtggggtaagcctttctgtggagctctgggtttgctcttagtactgctgccagaaacactgttagaatggcaaccctgccattctcccctccagtggaagattctactttattcaggaaggctggtggcttgcaggggctaggcttacacaagccagccaagattgagaaggtaggggagtgctttcaatggaggccatagttgtcatcttttcttctgagcaggctctaggacaaacaatgagcaaattgagatgtcctgtattgggaggatgaggctgatatgtttcatcattctcagaatttgtgggctagagcacctttttgggaatatgggcctagggaaaagaacggtcacttacctggacactatggccatagtcttgagtttttctagtcagcatgtgattggttgtaccttaagtttatgacaccaaaaatactattaactctgttatttttgttcttaatcccatctcaaattagtttctagagttagaatcagaacacaaggatgctcattttcacatggagggaaagttgccaaagcatttaaaaaataaccccaaaagtatatctagcagtgaagcttggtagataaaggtgaactgctaaacagacactggcgtgccacactcctgccagggcagtctcattgtgtgtgacggtgctgcaacactgccagtattacttgagatgcagtctctctcccctgttctcagttcctgggctcagccctcctccaaggcctgccagtgagtagcagtttggaaggcaggccaagggagatccccaaagacagttatcagtcttaacttctgctgtctcccgtcaaatacttatacaggcccccatgggtaataggcaagcatgatggctgatagagaagtcagtgcatgagttactatcacatgtccccccaacccctcctgccacctcccagggctctggataattgaatcttcctgagtcccacagctggagactcaaccaggatatagctgtaaatgcccaagtagaatctgacagaataagacagagacactgaaaataaagccctagaaaggaagaaattggaagcaaagaaaaggagaggtgaaaagataaaaagcctccttcaaggttaggttcaggttctgttttccatttaacctcatgtgccataaagctgcccaggcacaccagagccacatcctgaacccgaccctccctgacagtgctgctctgccagtagcaagccccagatggaggaagctgggcccatttctggccacttccacccatttggagctttgccagaggagtcgtctatgccaataatatttctgcaacagcatattatattatttgaagattagtagatctttttgggggggtggggcaggggacagtttctatagatgaagaaccagtgttggttgtacagctgttgggggtcatctatcccatgtgaagctattctttttccaaatcttgttgtttctgcatttgtgtcctccaccactcccttcttggctgacatagatatgcctgccagattgtcatcaagggtcatatttcaataaaaggtgctaaggacaaaaaaaaatctcatgtgttttaactcaggtgatggaagtctaaagattctgctgaaaagtactggaaaggaatttggtcacctatccatagtccttcacagataaacatatgaccagacccttacccacatccctaaacccttaccctggcctctgagggatggtattgatgctataccattcatcatccccagttaaatagcaggatctgccatagcctttttaggggaacagcttttagacatctatttcaagaccatcctgagtagggggtacagagtttaagccattggttatttctgttgttatcacagtattgaagcatggtatttttctactcagaaggatctcaggatcacagccctgccctttagctcactgatatatttcttcctctctggttactcagtggcaacatcacatccagtctaaccccatgtttagaatgcagaaaaagtcaacaataggtgtaatctcaggtatagacctaagcagtatacagagtctagttctggagtctagcctgatcgaaggtaagccattctttctagacttcttccaatcttgaattctgtctagtattttcatcttacttctagctgatagtccaatctcacaccttcatgctcagctccctggaaagcaagggccttggtgatctgctctccaaggcaacctcaaagattagactcaaatgtattccaggaagcaactctgacattgaaaagctttcttttttcgtgatccatattctgttcacattccaactatcctccttctactcaagatatccattgtggtagagtagaaagagtccagctttggcattagaatgaactgtgttcaaatcctggttctgccacttattcaatgaacctgggctactagctcaacttctgaggtcattttcttatctgtaaaatgggaacagtattatcttgcttgcagttattgtaacttgaaaataataaataaaagccactaacaatccaagaagttattaggcagaatcccaggcccaccccaaacccagtgatagcagtctgaattttaactagatttccaggagattcatgaacatattacagcatgggaagtactgacttgttgaaaacatattcagtacatggtaaccattattatagtcctgatctactcaattcattttttccttatcccaggcatattcttgctcttctcgtgttgctcacaactacctgcctggatgaatttaggaaagttgcaggatacaaggttaaaacacaagatcaaatgaacaatccgaaaatgttattaagaaaacagttccggccgggcatggtggctcacgcctgaaatcccagcactttgggaggccgaggcaggtggatcacgaggtcaggagatcaagaccatcctggctaacacggtgaaaccctatctctactaaaaatacaaaaaattagccaggtgtggtggcacgcaccagtagtcccagctactcgggaggctgaggcaggagaattgcttgaacctggaaggcagagattgcagtgagctgagaccacaccactgcactccatcctgggcaacagagtgagactttgtctcaaaaagaaagaaagaaagaaagaaagaaagaaagaaagaaaagaaagaaagaaagaaagaaagaaaacagttccatttacaatagcatc

SEQ ID NO: 28018 - DNA, 7966 bp, Homo sapiens
  source 1..7966: mol_type = unassigned DNA
ctttcatccttccctttgccaccagggtgctggctggttcctggagcagcgtcttcactcctatccagctcttgacactggctttcgttccctaaggctgtggccatatctaggtccatccaggctgatggtcataccttgccttcagtgctactccttcctgttcttagaactggaacctgactgtgcctgagccccttggatcacactcagcatcttgggctgatggtccctcgccccagaaggtcttaactggagggcagatgggtcccagctaagggaggacgctggctggagggtttgtcaacgagagtctgagctagccggataccccgctctctcccaagccatctctccaccctgggcaacttccatggaggaacgcccctgtcagtaggccgcactcatggcatgtggccaagctgctggagggatgccctgaagcagccaccaccatgcatttcccttctgaagccttcagcttgtcctggcattctggctgcaacacaagtgacgtgtgtgtgcagtggtgtccactctcccggcattgcagcaccgagaaaagcagctccattggcagcatggagagcctggagcaaccaggccaagccacctatgagagccatctgttgcctattgaccagaacatgtaccctaaccagcgtgactcagcctacagctccttctcggccagctcaaatgcttctgactgtgccctttccctcaggccagaggagccagcctctacagactgcatcatgcaaggcccagggccaactaaggcccccagtggccggcctaatgtggctgagacctcaggaggtagtcggcgcaccaatgggggccacctgacccccagctctcagatgtcatcccgtccacaggagggataccagtcagggcccgccaaagcagtcaggggcccaccacaacctccagtgaggcgggacagccttcaggcctccagagcccaactcctcaatggagagcagcgcagggcatctgagcctgtggtccccttgccacagaaggagaaactgagcttagagcctgtgctacccgcaaggaaccctaataggttctgttgcctcagtgggcatgaccaagtgacaagtgagggccatcagaactgtgagttcagtcagcctcctgaatccagccaacagggctctgagcatctactgatgcaggcctcaaccaaagctgttggatccccaaaagcctgtgacagagcttccagcgtggattccaacccactcaatgaggcttctgcagagctagctaaggcttcttttggcagacctccacatctcataggacccacagggcatcgccatagtgcccctgaacagctgctggcatcccacctgcagcatgtgcaccttgataccaggggcagcaaagggatggagctcccacccgtacaggatgggcaccagtggactctgtcccctttgcacagcagccacaaagggaagaaaagtccatgcccccctacaggaggaacccatgaccagtccagcaaagaaagaaagaccagacaagtggatgacaggtctttagttttgggacaccagagccaaagcagtcccccacatggagaggctgatggacacccctcagaaaaaggtttcctggacccaaacagaacaagcagagcagccagtgaattggccaaccagcaaccctctgcctctggctcccttgttcaacaagccacggactgttcttcaaccactaaagcagctagtggcacagaggcaggtgaagaaggggacagcgagcccaaggagtgcagccggatgggtggtaggcgaagtggagggacccggggccgctcgatccaaaaccggcggaagagtgagcgttttgctaccaatctgcgtaatgaaattcagaggaggaaggcccagctccagaaaagcaagggtcccttgtcacagctgtgtgacactaaggagccagtggaagagacccaggagcccccagaaagtcctccactcactgcctctaacacatctcttctatcttcatgtaaaaaacctcccagccccagagacaagctcttcaacaaaagcatgatgctcagagctaggtcttccgagtgcctcagccaagcccctgagagccatgaatctaggacaggcttagagggacgaataagccctggccagaggcctggccagtcctctttgggcctgaacacctggtggaaagcacctgacccatcctcctcagaccctgagaaagcacatgctcactgtggagtccgtggaggtcattggagatggtctccagagcataattcacagccacttgtggcagcagccatggaaggcccttccaacccaggtgacaacaaggaattgaaggcttctactgctcaagctggggaggatgccatcctcttgccttttgcagacagaagaaagttctttgaagagagtagcaaatccttatctacatctcatttgccaggtttaaccactcatagcaacaagacttttacccagagaccaaaacctatagaccaaaacttccagccaatgagctccagctgtagggaattgaggcgccatcccatggaccaatcatatcattccgcagaccaaccatatcatgccacagaccaatcatatcattccatgtcaccccttcagtcagaaactcccacttactcagaatgttttgcaagcaaaggtctagaaaattccatgtgttgtaagccactacactgtggtgattttgattaccacaggacctgctcttactcctgcagtgttcaaggagctctagtccatgatccttgcatttattgttctggggaaatctgccctgccttgctaaagagaaatatgatgccaaattgctacaactgccggtgccaccaccaccaatgcattcggtgttcagtttgctatcataatcctcagcacagtgccctcgaggacagcagcttggcacctggcaacacttggaaacccaggaagctgacagtgcaggaatttcctggggacaaatggaatccaataacaggaaacaggaagaccagccagtcagggagggaaatggctcattccaagactagcttttcatgggcaacccctttccatccttgccttgagaacccagcactggacttgtcaagctaccgagcaatttcttctcttgacctccttggagacttcaaacatgctttgaaaaaatcagaggaaacttcagtttatgaggaggggagctcccttgcctccatgccccacccactgcgcagccgtgccttctcagagagtcacatcagcttggcgccccaaagcacccgggcctgggggcagcataggagggagctctttagcaaaggtgatgagacccagtcggatcttctcggagccaggaagaaggcctttcctcctcctcgccctcctcctcccaactgggagaagtacaggctctttcgtgcagcccagcagcagaagcagcaacagcagcagcagaagcaacaggaggaggaggaggaggaggaagaagaagaagaagaggaagaggaagaggaggaggaggaggcagaggaggaggaagaggagctgccaccccagtatttcagttcagaaacctctggttcctgtgctctcaatcctgaggaggtcctagagcagccacaacccctcagctttggccacctggagggctcgagacagggttcacaaagtgtcccagcagagcaagaatcctttgcactccattccagtgatttcttgcctccaataaggggtcacttgggatctcaacctgagcaggctcagcccccttgctactatggcattggtgggctttggaggacatcgggacaggaagccactgaatccgccaaacaagagtttcagcacttttcgcctccttcaggggccccaggaatccctacctcttactcagcttattacaatatttctgtggccaaggcagagctgctgaacaaactgaaagaccaacctgagatggcagagattggcctaggagaggaggaagttgaccatgaactggctcaaaaaaagatacagcttatcgaaagcatcagcagaaaactttctgtcttgcgggaggcccagcgagggctgctagaggacatcaatgccaattctgcccttggggaggaggtggaggccaacttaaaagccgtctgcaaatccaatgaatttgaaaagtaccacttgtttgttggggacctggacaaagtggtcaacctgttgctgtcactctctggacgactggcccgggtggagaatgctctgaacagcatcgattcagaggccaaccaggagaagttggtactgatagagaagaagcagcagctgacggggcagttggcagatgccaaggagctgaaggagcacgtggaccgccgggagaagttggtgtttggcatggtctcccgctacctgcctcaggaccagctccaagattaccagcactttgtcaagatgaaatctgctctcatcattgaacagcgagagctggaggagaagatcaagctcggggaagagcaactcaaatgtctcagggagagtctactcctggggcccagcaatttctaattctaccagcactctgccacagcatccctgcccagccatgtgggaagtgctttcaatcttctttgttagcagtttctcagcaagtagatagcaattagcagtttgttccagccctctaccctggatgtctctcactaccccttccctagcagtggtcctaaccagctaggagaccctggggaagccacaagcttctacccaagggagctgcagcaaggtgtgatcttagaaccacactctccttcccacagttgccaagggcaagtacttgctgcacagagaaccaaggaagtgccttcattctgctttgtactaggacaccaaagacatcaagtactcatcacccacccatatcatcaacagcctctaaaggctcagagggaatctgccttgcagctctactctgccccagggcttgtggccagccatttctcacagagagctggctgccttgagggcattcacctggcaccagtttcagggcctcacccaagctttgcaggggaaagcacagagggaggaattacactgaaaaaaatgcaagcaaaggttgagtacccccaggtgccccttaggaaggaaccaggtttaaataggctctacccttacctttcccagcagcaagttcaggggaagaggcctactcttagccctggctagtgtgaccctcttcctgtcctaagactttggtcctaccacctcttgtttcatctttcctttacattgctgggggttaccgcaggtgcctaccccagggcttcaccatatgggccattaatagctctactaaaactgacttctagatgtaggtttcattattgggggagggggttcttattgttatattttaaatggccttttgattttatttatttttatgttttgattatttttttcttttttaactaataaggcgagaagagggaagttggagagggaaaagttagcccagaaggaaagcattttctgcagatcagcctgaatccaccgtggctaggtaagcaagtgccaaggcgttgaattgttcccaccatagctaccgatgtctaggaaggagttttccccttgaactcagagcctccctactgtggcctggccttgtgcttcccttaaagtctaagtgacttgagtttagcattccccagcagggtttaagtttttcttactgatttctttttgaaaccaaagaaatctcctgaaatggagaaaggttcagtcatttctctaccatctccaagctatgggatcagtagaggtgagctcagaaggaactcctctaaccattgctttctcagcctgtggcctggctcaagggaaccaaaactcaaggtagctgggagctccagccagagccagctccccagagcaattgaagacccagccaggatcttaggcatacaaacaactaaaactgctgctgttgccaaggccctgacaccagtagctagtttctatgctggaaaagcagccctcaggtggacgatggcaagaagggggttatggccaaatgctgccctgttatccagcttagctccctgttcctcactaactggggccaatccttggtatcacacaacccagccaaggcctggcatctcttctagttactgctgagttcctcagggtccttgaaggtcaactgtagcagcagggatgtctcattcaaccaaagaatttgccaaggaacttttgctgctgttacaaatacttgtcactagcttccatttcctcttcattgtatttgaaaacaatgggagaatcttggccagcagggtgtcctggggtagggggtggggtaagcctttctgtggagctctgggtttgctcttagtactgctgccagaaacactgttagaatggcaaccctgccattctcccctccagtggaagattctactttattcaggaaggctggtggcttgcaggggctaggcttacacaagccagccaagattgagaaggtaggggagtgctttcaatggaggccatagttgtcatcttttcttctgagcaggctctaggacaaacaatgagcaaattgagatgtcctgtattgggaggatgaggctgatatgtttcatcattctcagaatttgtgggctagagcacctttttgggaatatgggcctagggaaaagaacggtcacttacctggacactatggccatagtcttgagtttttctagtcagcatgtgattggttgtaccttaagtttatgacaccaaaaatactattaactctgttatttttgttcttaatcccatctcaaattagtttctagagttagaatcagaacacaaggatgctcattttcacatggagggaaagttgccaaagcatttaaaaaataaccccaaaagtatatctagcagtgaagcttggtagataaaggtgaactgctaaacagacactggcgtgccacactcctgccagggcagtctcattgtgtgtgacggtgctgcaacactgccagtattacttgagatgcagtctctctcccctgttctcagttcctgggctcagccctcctccaaggcctgccagtgagtagcagtttggaaggcaggccaagggagatccccaaagacagttatcagtcttaacttctgctgtctcccgtcaaatacttatacaggcccccatgggtaataggcaagcatgatggctgatagagaagtcagtgcatgagttactatcacatgtccccccaacccctcctgccacctcccagggctctggataattgaatcttcctgagtcccacagctggagactcaaccaggatatagctgtaaatgcccaagtagaatctgacagaataagacagagacactgaaaataaagccctagaaaggaagaaattggaagcaaagaaaaggagaggtgaaaagataaaaagcctccttcaaggttaggttcaggttctgttttccatttaacctcatgtgccataaagctgcccaggcacaccagagccacatcctgaacccgaccctccctgacagtgctgctctgccagtagcaagccccagatggaggaagctgggcccatttctggccacttccacccatttggagctttgccagaggagtcgtctatgccaataatatttctgcaacagcatattatattatttgaagattagtagatctttttgggggggtggggcaggggacagtttctatagatgaagaaccagtgttggttgtacagctgttgggggtcatctatcccatgtgaagctattctttttccaaatcttgttgtttctgcatttgtgtcctccaccactcccttcttggctgacatagatatgcctgccagattgtcatcaagggtcatatttcaataaaaggtgctaaggacaaaaaaaaa

SEQ ID NO: 28019 - DNA, 2338 bp, Homo sapiens
  source 1..2338: mol_type = unassigned DNA
agttccaggcgacggcggacggtggtacggtcctggagggcccagtgcgcggggctagccgtggctggagagcttcgaagagccttgaaatgtgaggaggaggaagatagctgttgcagaagtagtggccaaggcaaaagatggccaaggaaagatgcctgaaaaagtcctttcaagatagtcttgaagacataaagaagcgaatgaaagagaaaaggaataaaaacttggcagagattggcaaacgcaggtcttttatagctgcaccatgccaaataatcaccaacacttctacactgctgaaaaattaccaagacaacaacaaaatgttagttttagctttggaaaatgaaaaatccaaagtgaaagaagcccaagatatcatcctacagctgagaaaagaatgttactatctcacatgtcagctatatgcattgaaaggaaaacttacatcacaacaaacagtagaacctgctcagaaccaggaaatatgttcctctggaatggaccccaatagtgatgacagctccagaaatttatttgtgaaggatttaccgcaaattcctcttgaagaaactgaacttccaggacaaggagaatcatttcaaatagaagatcagatacctactattcctcaagacacactgggagttgattttgattcaggtgaagctaagtctactgataatgtcttacctagaactgtatctgttcgtagcagtttaaagaaacattgtaacagtatatgtcagtttgatagcttggatgattttgaaaccagtcatttggcagggaagtcttttgaattcgaaagagttggatttttagacccactagtaaacatgcacatacctgaaaatgtacaacacaatgcttgtcaatggagcaaggaccaagttaacttatcaccaaagctgattcagccaggaacgtttactaaaacaaaagaagacattttagaatctaaatctgaacaaactaaaagtaagcaaagagatacacaagaaagaaaaagagaagagaaaagaaaagctaacaggagaaaatcaaaacgtatgtcaaaatataaagagaataaaagcgaaaataaaaaaactgttccccaaaaaaaaatgcacaaatctgtcagttccaatgatgcttacaattttaatttggaagagggtgttcatcttactcctttccgacaaaaagtgagcaatgactctaatagagaagaaaacaacgagtctgaagtgagcctctgtgaatcaagtggttcaggagatgattccgatgacctctatttgcccacttgcaagtacattcagaatcccacgagcaattcagatagaccagtcaccaggcctctagctaaaagagcactgaaatacacagatgaaaaagagacggagggttctaagccaacaaaaactcctaccactacaccacctgaaactcagcagtcacctcatcttagcctgaaggatatcaccaatgtctccttgtatcctgttgtgaaaatcagaagactttctctttctccaaaaaagaataaagcaagcccagcagtggctctgcctaaacgtaggtgcacagccagcgtgaactataaggagcccaccctcgcttcgaaactgagaagaggggacccttttacagatttgtgttttttgaattctcctattttcaagcagaaaaaggatttgagacgttctaaaaaaagagccctggaggtatcacctgccaaagaagcaatttttattttatattatgttcgagaatttgtttcgagattcccagactgtaggaaatgtaaacttgaaacccacatctgcttgaggtaaagtccacgggcttcacatccttagaaaacttttttagtccatgcattcactaatgtatgcagacctttaatagattctagctttatgtgttgggggagagatggaggggtgttgacagtctgtttcactcagcctacatacataataaaatctaagccctttaattagagatagcaactttcccagggtgaccgaggaatcagtacgtgttgaacccctcttttaagtttccttttggttgtgtcacttggagattgccttttctttcttgtaagctcagctgtgtcctcaaatatattgcattttacccagcatttccaggtgttttcaggggtcaaagtttttaagttatcttagtctttgatattgtgtaagcgaaattctccaatcccatctcctagatgatttttttttaaatcacaaaatgtgattatgcttaacagctgtttcctgtttctcttaaaataaaatccatttcctatttctcttaaaataaaatccattattcttaa

SEQ ID NO: 28020 - DNA, 1531 bp, Homo sapiens
  source 1..1531: mol_type = unassigned DNA
agttccaggcgacggcggacggtggtacggtcctggagggcccagtgcgcggggctagccgtggctggagagcttcgaagagccttgaaatgtgaggaggaggaagatagctgttgcagaagtagtggccaaggcaaaagatggccaaggaaagatgcctgaaaaagtcctttcaagatagtcttgaagacataaagaagcgaatgaaagagaaaaggaataaaaacttggcagagattggcaaacgcaggtcttttatagctgcaccatgccaaataatcaccaacacttctacactgctgaaaaattaccaagacaacaacaaaatgttagttttagctttggaaaatgaaaaatccaaagtgaaagaagcccaagatatcatcctacagctgagaaaagaatgttactatctcacatgtcagctatatgcattgaaaggaaaacttacatcacaacaaacagtagaacctgctcagaaccaggaaatatgttcctctggaatggaccccaatagtgatgacagctccagaaatttatttgtgaaggatttaccgcaaattcctcttgaagaaactgaacttccaggacaaggagaatcatttcaaatagaagctacaccacctgaaactcagcagtcacctcatcttagcctgaaggatatcaccaatgtctccttgtatcctgttgtgaaaatcagaagactttctctttctccaaaaaagaataaagcaagcccagcagtggctctgcctaaacgtaggtgcacagccagcgtgaactataaggagcccaccctcgcttcgaaactgagaagaggggacccttttacagatttgtgttttttgaattctcctattttcaagcagaaaaaggatttgagacgttctaaaaaaagagccctggaggtatcacctgccaaagaagcaatttttattttatattatgttcgagaatttgtttcgagattcccagactgtaggaaatgtaaacttgaaacccacatctgcttgaggtaaagtccacgggcttcacatccttagaaaacttttttagtccatgcattcactaatgtatgcagacctttaatagattctagctttatgtgttgggggagagatggaggggtgttgacagtctgtttcactcagcctacatacataataaaatctaagccctttaattagagatagcaactttcccagggtgaccgaggaatcagtacgtgttgaacccctcttttaagtttccttttggttgtgtcacttggagattgccttttctttcttgtaagctcagctgtgtcctcaaatatattgcattttacccagcatttccaggtgttttcaggggtcaaagtttttaagttatcttagtctttgatattgtgtaagcgaaattctccaatcccatctcctagatgatttttttttaaatcacaaaatgtgattatgcttaacagctgtttcctgtttctcttaaaataaaatccatttcctatttctcttaaaataaaatccattattcttaa

SEQ ID NO: 28021 - DNA, 1298 bp, Homo sapiens
  source 1..1298: mol_type = unassigned DNA
agttccaggcgacggcggacggtggtacggtcctggagggcccagtgcgcggggctagccgtggctggagagcttcgaagagccttgaaatgtgaggaggaggaagatagctgttgcagaagtagtggccaaggcaaaagatggccaaggaaagatgcctgaaaaagtcctttcaagatagtcttgaagacataaagaagcgaatgaaagagaaaaggaataaaaacttggcagagattggcaaacgcaggtcttttatagctgcaccatgccaaataatcaccaacacttctacactgctgaaaaattaccaagacaacaacaaaatgttagttttagctttggaaaatgaaaaatccaaagtgaaagaagcccaagatatcatcctacagctgagaaaagaatgttactatctcacatgtcagctatatgcattgaaaggaaaacttacatcacaacaaacagtagaacctgctcagaaccaggaaatatgttcctctggaatggaccccaatagtgatgacagctccagaaatttatttgtgaaggatttaccgcaaattcctcttgaagaaactgaacttccaggacaaggagaatcatttcaaatagaagatcagatacctactattcctcaagacacactgggagttgattttgattcaggagccctggaggtatcacctgccaaagaagcaatttttattttatattatgttcgagaatttgtttcgagattcccagactgtaggaaatgtaaacttgaaacccacatctgcttgaggtaaagtccacgggcttcacatccttagaaaacttttttagtccatgcattcactaatgtatgcagacctttaatagattctagctttatgtgttgggggagagatggaggggtgttgacagtctgtttcactcagcctacatacataataaaatctaagccctttaattagagatagcaactttcccagggtgaccgaggaatcagtacgtgttgaacccctcttttaagtttccttttggttgtgtcacttggagattgccttttctttcttgtaagctcagctgtgtcctcaaatatattgcattttacccagcatttccaggtgttttcaggggtcaaagtttttaagttatcttagtctttgatattgtgtaagcgaaattctccaatcccatctcctagatgatttttttttaaatcacaaaatgtgattatgcttaacagctgtttcctgtttctcttaaaataaaatccatttcctatttctcttaaaataaaatccattattctt

SEQ ID NO: 28022 - DNA, 1935 bp, Homo sapiens
  source 1..1935: mol_type = unassigned DNA
agttccaggcgacggcggacggtggtacggtcctggagggcccagtgcgcggggctagccgtggctggagagcttcgaagagccttgaaatgtgaggaggaggaagatagctgttgcagaagtagtggccaaggcaaaagatggccaaggaaagatgcctgaaaaagtcctttcaagatagtcttgaagacataaagaagcgaatgaaagagaaaaggaataaaaacttggcagagattggcaaacgcaggtcttttatagctgcaccatgccaaataatcaccaacacttctacactgctgaaaaattaccaagacaacaacaaaatgttagttttagctttggaaaatgaaaaatccaaagtgaaagaagcccaagatatcatcctacagctgagaaaagaatgttactatctcacatgtcagctatatgcattgaaaggaaaacttacatcacaacaaacagtagaacctgctcagaaccaggaaatatgttcctctggaatggaccccaatagtgatgacagctccagaaatttatttgtgaaggatttaccgcaaattcctcttgaagaaactgaacttccaggacaaggagaatcatttcaaatagaagatcagatacctactattcctcaagacacactgggagttgattttgattcaggtgaagctaagtctactgataatgtcttacctagaactgtatctgttcgtagcagtttaaagaaacattgtaacagtatatgtcagtttgatagcttggatgattttgaaaccagtcatttggcagggaagtcttttgaattcgaaagagttggatttttagacccactagtaaacatgcacatacctgaaaatgtacaacacaatgcttgtcaatggagcaaggaccaagttaacttatcaccaaagctgattcagccaggaacgtttactaaaacaaaagaagacattttagaatctaaatctgaacaaactaaaagtaagcaaagagatacacaagaaagaaaaagagaagagaaaagaaaagctaacaggagaaaatcaaaacgtatgtcaaaatataaagagaataaaagcgaaaataaaaaaactgttccccaaaaaaaaatgcacaaatctgtcagttccaatgatgcttacaattttaatttggaagagggtgttcatcttactcctttccgacaaaaagtgagcaatgactctaatagagaagaaaacaacgagtctgaagtgagcctctgtgaatcaagtggttcaggagatgattccgatgacctctatttgcccacttgcaagtacattcagaatcccacgagcaattcagatagaccagtcaccaggcctctagctaaaagagcactgaaatacacagatgaaaaagagacggagggttctaagccaacaaaaactcctaccactacaccacctgaaactcagcagtcacctcatcttagcctgaaggatatcaccaatgtctccttgtatcctgttgtgaaaatcagaagactttctctttctccaaaaaagaataaagcaagcccagcagtggctctgcctaaacgtaggtgcacagccagcgtgaactataaggagcccaccctcgcttcgaaactgagaagaggggacccttttacagatttgtgttttttgaattctcctattttcaagcagaaaaaggatttgagacgttctaaaaaaagtatgaaacaaatacaatgaaggttttgttggatattgtttaaattcaatctacacctctttctgttgcttcaggagaggatctgtaagagtacacaaacagagtgagccattgccatagaatattctcttgacaggaccctagctcataaacatttcttcagaactatacttcaaatgggatgctttgtattaaaactttaataaatttaatttattttttcttttgaat

SEQ ID NO: 28023 - DNA, 2587 bp, Homo sapiens
  source 1..2587: mol_type = unassigned DNA
tctgcctgcgacggtggtgttgggtgcatcctgcgccacgtgaccgcctcccagccaaccaatggaggagcgaggcggaaaatttcgaatgtggcggcggtagttccaggcgacggcggacggtggtacggtcctggagggcccagtgcgcggggctagccgtggctggagagcttcgaagagccttgaaatgtgaggaggaggaagatagctgttgcagaagtagtggccaaggtatcgttctggacgcgcctgcggcaggagggtcgccgcgtccacttccgccagccccacctccccccggccttcctggagtccctgaaagaggaagaagtaggttttaaggcaaaagatggccaaggaaagatgcctgaaaaagtcctttcaagatagtcttgaagacataaagaagcgaatgaaagagaaaaggaataaaaacttggcagagattggcaaacgcaggtcttttatagctgcaccatgccaaataatcaccaacacttctacactgctgaaaaattaccaagacaacaacaaaatgttagttttagctttggaaaatgaaaaatccaaagtgaaagaagcccaagatatcatcctacagctgagaaaagaatgttactatctcacatgtcagctatatgcattgaaaggaaaacttacatcacaacaaacagtagaacctgctcagaaccaggaaatatgttcctctggaatggaccccaatagtgatgacagctccagaaatttatttgtgaaggatttaccgcaaattcctcttgaagaaactgaacttccaggacaaggagaatcatttcaaatagaagatcagatacctactattcctcaagacacactgggagttgattttgattcaggtgaagctaagtctactgataatgtcttacctagaactgtatctgttcgtagcagtttaaagaaacattgtaacagtatatgtcagtttgatagcttggatgattttgaaaccagtcatttggcagggaagtcttttgaattcgaaagagttggatttttagacccactagtaaacatgcacatacctgaaaatgtacaacacaatgcttgtcaatggagcaaggaccaagttaacttatcaccaaagctgattcagccaggaacgtttactaaaacaaaagaagacattttagaatctaaatctgaacaaactaaaagtaagcaaagagatacacaagaaagaaaaagagaagagaaaagaaaagctaacaggagaaaatcaaaacgtatgtcaaaatataaagagaataaaagcgaaaataaaaaaactgttccccaaaaaaaaatgcacaaatctgtcagttccaatgatgcttacaattttaatttggaagagggtgttcatcttactcctttccgacaaaaagtgagcaatgactctaatagagaagaaaacaacgagtctgaagtgagcctctgtgaatcaagtggttcaggagatgattccgatgacctctatttgcccacttgcaagtacattcagaatcccacgagcaattcagatagaccagtcaccaggcctctagctaaaagagcactgaaatacacagatgaaaaagagacggagggttctaagccaacaaaaactcctaccactacaccacctgaaactcagcagtcacctcatcttagcctgaaggatatcaccaatgtctccttgtatcctgttgtgaaaatcagaagactttctctttctccaaaaaagaataaagcaagcccagcagtggctctgcctaaacgtaggtgcacagccagcgtgaactataaggagcccaccctcgcttcgaaactgagaagaggggacccttttacagatttgtgttttttgaattctcctattttcaagcagaaaaaggatttgagacgttctaaaaaaagtatgaaacaaatacaatgaaggttttgttggatattgtttaaattcaatctacacctctttctgttgcttcaggagaggatctgtaagagtacacaaacagagtgagccattgccatagaatattctcttgacaggaccctagctcataaacatttcttcagaactatacttcaaatgggatgctttgtattaaaactttaataaatttaatttattttttcttttgaatataaataactgagcttaagcattatcatcatatcgatttcttatgctgcctaaacctcttaattttagtcgaaatatatctttttttttttttggaggcggaatttcattcttgttgcccaggctggagtgcaatggcacgatctcagcttaccgcaacctccgcctcccaggttcaagcgattctcctgcctcagactcccgagtagctgggactacaggcatgtgccactacgcccggctaattttgtatttttagtagagacagggtttctccatgttggtcaggttgctctcaaactcccaacctcaggtgatctgcccacctcggcctcccaaagtgctgggattactgagccactgtgcccagcccaaaatgtatcttatacaaacattgtagaaatgaataatgattactcaaataagatcttttaattataa

SEQ ID NO: 28024 - DNA, 1075 bp, Homo sapiens
  source 1..1075: mol_type = unassigned DNA
ctggagagcttcgaagagccttgaaatgtgaggaggaggaagatagctgttgcagaagtagtggccaaggtatcgttctggacgcgcctgcggcaggagggtcgccgcgtccacttccgccagccccacctccccccggccttcctggagtccctgaaagaggaagaagtaggttttaaggcaaaagatggccaaggaaagatgcctgaaaaagtcctttcaagatagtcttgaagacataaagaagcgaatgaaagagaaaaggaataaaaacttggcagagattggcaaacgcaggtcttttatagctgcaccatgccaaataatcaccaacacttctacactgctgaaaaattaccaagacaacaacaaaatgttagttttagctttggaaaatgaaaaatccaaagtgaaagaagcccaagatatcatcctacagctgagaaaagaatgttactatctcacatgtcagctatatgcattgaaaggaaaacttacatcacaacaaacagtagaacctgctcagaaccaggaaatatgttcctctggaatggaccccaatagtgatgacagctccagaaatttatttgtgaaggatttaccgcaaattcctcttgaagaaactgaacttccaggacaaggagaatcatttcaaatagaagatcagatacctactattcctcaagacacactgggagttgattttgattcagctacaccacctgaaactcagcagtcacctcatcttagcctgaaggatatcaccaatgtctccttgtatcctgttgtgaaaatcagaagactttctctttctccaaaaaagaataaagcaagcccagcagtggctctgcctaaacgtaggtgcacagccagcgtgaactataaggagcccaccctcgcttcgaaactgagaagaggggacccttttacagatttgtgttttttgaattctcctattttcaagcagaaaaaggatttgagacgttctaaaaaaagtatgaaacaaatacaatgaaggttttgttggatattgtttaaattcaatctacacctctttctgttgcttcaggagagg

SEQ ID NO: 28025 - DNA, 1582 bp, Homo sapiens
  source 1..1582: mol_type = unassigned DNA
agttccaggcgacggcggacggtggtacggtcctggagggcccagtgcgcggggctagccgtggctggagagcttcgaagagccttgaaatgtgaggaggaggaagatagctgttgcagaagtagtggccaaggcaaaagatggccaaggaaagatgcctgaaaaagtcctttcaagatagtcttgaagacataaagaagcgaatgaaagagaaaaggaataaaaacttggcagagattggcaaacgcaggtcttttatagctgcaccatgccaaataatcaccaacacttctacactgctgaaaaattaccaagacaacaacaaaatgttagttttagctttggaaaatgaaaaatccaaagtgaaagaagcccaagatatcatcctacagctgagaaaagaatgttactatctcacatgtcagctatatgcattgaaaggaaaacttacatcacaacaaacagtagaacctgctcagaaccaggaaatatgttcctctggaatggaccccaatagtgatgacagctccagaaatttatttgtgaaggatttaccgcaaattcctcttgaagaaactgaacttccaggacaaggagaatcatttcaaatagaagatcagatacctactattcctcaagacacactgggagttgattttgattcagctacaccacctgaaactcagcagtcacctcatcttagcctgaaggatatcaccaatgtctccttgtatcctgttgtgaaaatcagaagactttctctttctccaaaaaagaataaagcaagcccagcagtggctctgcctaaacgtaggtgcacagccagcgtgaactataaggagcccaccctcgcttcgaaactgagaagaggggacccttttacagatttgtgttttttgaattctcctattttcaagcagaaaaaggatttgagacgttctaaaaaaagagccctggaggtatcacctgccaaagaagcaatttttattttatattatgttcgagaatttgtttcgagattcccagactgtaggaaatgtaaacttgaaacccacatctgcttgaggtaaagtccacgggcttcacatccttagaaaacttttttagtccatgcattcactaatgtatgcagacctttaatagattctagctttatgtgttgggggagagatggaggggtgttgacagtctgtttcactcagcctacatacataataaaatctaagccctttaattagagatagcaactttcccagggtgaccgaggaatcagtacgtgttgaacccctcttttaagtttccttttggttgtgtcacttggagattgccttttctttcttgtaagctcagctgtgtcctcaaatatattgcattttacccagcatttccaggtgttttcaggggtcaaagtttttaagttatcttagtctttgatattgtgtaagcgaaattctccaatcccatctcctagatgatttttttttaaatcacaaaatgtgattatgcttaacagctgtttcctgtttctcttaaaataaaatccatttcctatttctcttaaaataaaatccattattcttaa

SEQ ID NO: 28026 - DNA, 1969 bp, Homo sapiens
  source 1..1969: mol_type = unassigned DNA
ctggagagcttcgaagagccttgaaatgtgaggaggaggaagatagctgttgcagaagtagtggccaaggtatcgttctggacgcgcctgcggcaggagggtcgccgcgtccacttccgccagccccacctccccccggccttcctggagtccctgaaagaggaagaagtaggttttaaggcaaaagatggccaaggaaagatgcctgaaaaagtcctttcaagatagtcttgaagacataaagaagcgaatgaaagagaaaaggaataaaaacttggcagagattggcaaacgcaggtcttttatagctgcaccatgccaaataatcaccaacacttctacactgctgaaaaattaccaagacaacaacaaaatgttagttttagctttggaaaatgaaaaatccaaagtgaaagaagcccaagatatcatcctacagctgagaaaagaatgttactatctcacatgtcagctatatgcattgaaaggaaaacttacatcacaacaaacagtagaacctgctcagaaccaggaaatatgttcctctggaatggaccccaatagtgatgacagctccagaaatttatttgtgaaggatttaccgcaaattcctcttgaagaaactgaacttccaggacaaggagaatcatttcaaatagaagatcagatacctactattcctcaagacacactgggagttgattttgattcaggtgaagctaagtctactgataatgtcttacctagaactgtatctgttcgtagcagtttaaagaaacattgtaacagtatatgtcagtttgatagcttggatgattttgaaaccagtcatttggcagggaagtcttttgaattcgaaagagttggatttttagacccactagtaaacatgcacatacctgaaaatgtacaacacaatgcttgtcaatggagcaaggaccaagttaacttatcaccaaagctgattcagccaggaacgtttactaaaacaaaagaagacattttagaatctaaatctgaacaaactaaaagtaagcaaagagatacacaagaaagaaaaagagaagagaaaagaaaagctaacaggagaaaatcaaaacgtatgtcaaaatataaagagaataaaagcgaaaataaaaaaactgttccccaaaaaaaaatgcacaaatctgtcagttccaatgatgcttacaattttaatttggaagagggtgttcatcttactcctttccgacaaaaagtgagcaatgactctaatagagaagaaaacaacgagtctgaagtgagcctctgtgaatcaagtggttcaggagatgattccgatgacctctatttgcccacttgcaagtacattcagaatcccacgagcaattcagatagaccagtcaccaggcctctagctaaaagagcactgaaatacacagatgaaaaagagacggagggttctaagccaacaaaaactcctaccactacaccacctgaaactcagcagtcacctcatcttagcctgaaggatatcaccaatgtctccttgtatcctgttgtgaaaatcagaagactttctctttctccaaaaaagaataaagcaagcccagcagtggctctgcctaaacgtaggtgcacagccagcgtgaactataaggagcccaccctcgcttcgaaactgagaagaggggacccttttacagatttgtgttttttgaattctcctattttcaagcagaaaaaggatttgagacgttctaaaaaaagagccctggaggtatcacctgccaaagaagcaatttttattttatattatgttcgagaatttgtttcgagattcccagactgtaggaaatgtaaacttgaaacccacatctgcttgaggtaaagtccacgggcttcacatccttagaaaacttttttagtccatgcattcactaatgtatgcagacctttaatagattctagctttatgtgttggggg

SEQ ID NO: 28027 - DNA, 1213 bp, Homo sapiens
  source 1..1213: mol_type = unassigned DNA
ctggagagcttcgaagagccttgaaatgtgaggaggaggaagatagctgttgcagaagtagtggccaaggtatcgttctggacgcgcctgcggcaggagggtcgccgcgtccacttccgccagccccacctccccccggccttcctggagtccctgaaagaggaagaagtaggttttaaggcaaaagatggccaaggaaagatgcctgaaaaagtcctttcaagatagtcttgaagacataaagaagcgaatgaaagagaaaaggaataaaaacttggcagagattggcaaacgcaggtcttttatagctgcaccatgccaaataatcaccaacacttctacactgctgaaaaattaccaagacaacaacaaaatgttagttttagctttggaaaatgaaaaatccaaagtgaaagaagcccaagatatcatcctacagctgagaaaagaatgttactatctcacatgtcagctatatgcattgaaaggaaaacttacatcacaacaaacagtagaacctgctcagaaccaggaaatatgttcctctggaatggaccccaatagtgatgacagctccagaaatttatttgtgaaggatttaccgcaaattcctcttgaagaaactgaacttccaggacaaggagaatcatttcaaatagaagatcagatacctactattcctcaagacacactgggagttgattttgattcagctacaccacctgaaactcagcagtcacctcatcttagcctgaaggatatcaccaatgtctccttgtatcctgttgtgaaaatcagaagactttctctttctccaaaaaagaataaagcaagcccagcagtggctctgcctaaacgtaggtgcacagccagcgtgaactataaggagcccaccctcgcttcgaaactgagaagaggggacccttttacagatttgtgttttttgaattctcctattttcaagcagaaaaaggatttgagacgttctaaaaaaagagccctggaggtatcacctgccaaagaagcaatttttattttatattatgttcgagaatttgtttcgagattcccagactgtaggaaatgtaaacttgaaacccacatctgcttgaggtaaagtccacgggcttcacatccttagaaaacttttttagtccatgcattcactaatgtatgcagacctttaatagattctagctttatgtgttggggg

SEQ ID NO: 28028 - DNA, 1128 bp, Homo sapiens
  source 1..1128: mol_type = unassigned DNA
agttccaggcgacggcggacggtggtacggtcctggagggcccagtgcgcggggctagccgtggctggagagcttcgaagagccttgaaatgtgaggaggaggaagatagctgttgcagaagtagtggccaaggcaaaagatggccaaggaaagatgcctgaaaaagtcctttcaagatagtcttgaagacataaagaagcgaatgaaagagaaaaggaataaaaacttggcagagattggcaaacgcaggtcttttatagctgcaccatgccaaataatcaccaacacttctacactgctgaaaaattaccaagacaacaacaaaatgttagttttagctttggaaaatgaaaaatccaaagtgaaagaagcccaagatatcatcctacagctgagaaaagaatgttactatctcacatgtcagctatatgcattgaaaggaaaacttacatcacaacaaacagtagaacctgctcagaaccaggaaatatgttcctctggaatggaccccaatagtgatgacagctccagaaatttatttgtgaaggatttaccgcaaattcctcttgaagaaactgaacttccaggacaaggagaatcatttcaaatagaagctacaccacctgaaactcagcagtcacctcatcttagcctgaaggatatcaccaatgtctccttgtatcctgttgtgaaaatcagaagactttctctttctccaaaaaagaataaagcaagcccagcagtggctctgcctaaacgtaggtgcacagccagcgtgaactataaggagcccaccctcgcttcgaaactgagaagaggggacccttttacagatttgtgttttttgaattctcctattttcaagcagaaaaaggatttgagacgttctaaaaaaagtatgaaacaaatacaatgaaggttttgttggatattgtttaaattcaatctacacctctttctgttgcttcaggagaggatctgtaagagtacacaaacagagtgagccattgccatagaatattctcttgacaggaccctagctcataaacatttcttcagaactatacttcaaatgggatgctttgtattaaaactttaataaatttaatttattttttcttttgaat

SEQ ID NO: 28029 - DNA, 1187 bp, Homo sapiens
  source 1..1187: mol_type = unassigned DNA
agttccaggcgacggcggacggtggtacggtcctggagggcccagtgcgcggggctagccgtggctggagagcttcgaagagccttgaaatgtgaggaggaggaagatagctgttgcagaagtagtggccaaggcaaaagatggccaaggaaagatgcctgaaaaagtcctttcaagatagtcttgaagacataaagaagcgaatgaaagagaaaaggaataaaaacttggcagagattggcaaacgcaggtcttttatagctgcaccatgccaaataatcaccaacacttctacactgctgaaaaattaccaagacaacaacaaaatgttagttttagctttggaaaatgaaaaatccaaagtgaaagaagcccaagatatcatcctacagctgagaaaagaatgttactatctcacatgtcagctatatgcattgaaaggaaaacttacatcacaacaaacagtagaacctgctcagaaccaggaaatatgttcctctggaatggaccccaatagtgatgacagctccagaaatttatttgtgaaggatttaccgcaaattcctcttgaagaaactgaacttccaggacaaggagaatcatttcaaatagaagatcagatacctactattcctcaagacacactgggagttgattttgattcagctacaccacctgaaactcagcagtcacctcatcttagcctgaaggatatcaccaatgtctccttgtatcctgttgtgaaaatcagaagactttctctttctccaaaaaagaataaagcaagcccagcagtggctctgcctaaacgtaggtgcacagccagcgtgaactataaggagcccaccctcgcttcgaaactgagaagaggggacccttttacagatttgtgttttttgaattctcctattttcaagcagaaaaaggatttgagacgttctaaaaaaagtatgaaacaaatacaatgaaggttttgttggatattgtttaaattcaatctacacctctttctgttgcttcaggagaggatctgtaagagtacacaaacagagtgagccattgccatagaatattctcttgacaggaccctagctcataaacatttcttcagaactatacttcaaatgggatgctttgtattaaaactttaataaatttaatttattttttcttttgaatataaataa

SEQ ID NO: 28030 - DNA, 2261 bp, Homo sapiens
  source 1..2261: mol_type = unassigned DNA
gaatgtggcggcggtagttccaggcgacggcggacggtggtacggtcctggagggcccagtgcgcggggctagccgtggctggagagcttcgaagagccttgaaatgtgaggaggaggaagatagctgttgcagaagtagtggccaaggtatcgttctggacgcgcctgcggcaggagggtcgccgcgtccacttccgccagccccacctccccccggccttcctggagtccctgaaagaggaagaagtaggttttaaggcaaaagatggccaaggaaagatgcctgaaaaagtcctttcaagatagtcttgaagacataaagaagcgaatgaaagagaaaaggaataaaaacttggcagagattggcaaacgcaggtcttttatagctgcaccatgccaaataatcaccaacacttctacactgctgaaaaattaccaagacaacaacaaaatgttagttttagctttggaaaatgaaaaatccaaagtgaaagaagcccaagatatcatcctacagctgagaaaagaatgttactatctcacatgtcagctatatgcattgaaaggaaaacttacatcacaacaaacagtagaacctgctcagaaccaggaaatatgttcctctggaatggaccccaatagtgatgacagctccagaaatttatttgtgaaggatttaccgcaaattcctcttgaagaaactgaacttccaggacaaggagaatcatttcaaatagaagctacaccacctgaaactcagcagtcacctcatcttagcctgaaggatatcaccaatgtctccttgtatcctgttgtgaaaatcagaagactttctctttctccaaaaaagaataaagcaagcccagcagtggctctgcctaaacgtaggtgcacagccagcgtgaactataaggagcccaccctcgcttcgaaactgagaagaggggacccttttacagatttgtgttttttgaattctcctattttcaagcagaaaaaggatttgagacgttctaaaaaaagtatgaaacaaatacaatgaaggttttgttggatattgtttaaattcaatctacacctctttctgttgcttcaggagaggatctgtaagagtacacaaacagagtgagccattgccatagaatattctcttgacaggaccctagctcataaacatttcttcagaactatacttcaaatgggatgctttgtattaaaactttaataaatttaatttattttttcttttgaatataaataactgagcttaagcattatcatcatatcgatttcttatgctgcctaaacctcttaattttagtcgaaatatatctttttttttttttggaggcggaatttcattcttgttgcccaggctggagtgcaatggcacgatctcagcttaccgcaacctccgcctcccaggttcaagcgattctcctgcctcagactcccgagtagctgggactacaggcatgtgccactacgcccggctaattttgtatttttagtagagacagggtttctccatgttggtcaggttgctctcaaactcccaacctcaggtgatctgcccacctcggcctcccaaagtgctgggattactgagccactgtgcccagcccaaaatgtatcttatacaaacattgtagaaatgaataatgattactcaaataagatcttttaattataagcttctggcatctctatttttcccttaagtaggggatactaaagtgaatgattttctaagaggatcttttgaaactctttagtacaatatttgagtaaaataaattattgtggatcttttgaaactctgtgtagtattcgagtaaaataaatatttgacatttacagtagggtacaccctaagttgtttatgaattccttataccactgttatatttaatttttcagataaaatatgtatgggaaaatgactagagaaattgattcttttttaggctcagggacaagataagtgactaattgtgaaccccaagctctaattgtatgttcagagtgatgtctccataaaattacaaatgtcatgtactttcagggtagctccttatttagtcagaaatctcagagattaaatgtgtgaatatttagggtttttgcatatttttgaccaaccaatgaaagcgaattagttcagtttagaaagtttgatgtctatacttgtatatacctctttaaattttagaactttgtaggttattcatttttaaagagcaataaagtttgtataaga

SEQ ID NO: 28031 - DNA, 1162 bp, Homo sapiens
  source 1..1162: mol_type = unassigned DNA
ctggagagcttcgaagagccttgaaatgtgaggaggaggaagatagctgttgcagaagtagtggccaaggtatcgttctggacgcgcctgcggcaggagggtcgccgcgtccacttccgccagccccacctccccccggccttcctggagtccctgaaagaggaagaagtaggttttaaggcaaaagatggccaaggaaagatgcctgaaaaagtcctttcaagatagtcttgaagacataaagaagcgaatgaaagagaaaaggaataaaaacttggcagagattggcaaacgcaggtcttttatagctgcaccatgccaaataatcaccaacacttctacactgctgaaaaattaccaagacaacaacaaaatgttagttttagctttggaaaatgaaaaatccaaagtgaaagaagcccaagatatcatcctacagctgagaaaagaatgttactatctcacatgtcagctatatgcattgaaaggaaaacttacatcacaacaaacagtagaacctgctcagaaccaggaaatatgttcctctggaatggaccccaatagtgatgacagctccagaaatttatttgtgaaggatttaccgcaaattcctcttgaagaaactgaacttccaggacaaggagaatcatttcaaatagaagctacaccacctgaaactcagcagtcacctcatcttagcctgaaggatatcaccaatgtctccttgtatcctgttgtgaaaatcagaagactttctctttctccaaaaaagaataaagcaagcccagcagtggctctgcctaaacgtaggtgcacagccagcgtgaactataaggagcccaccctcgcttcgaaactgagaagaggggacccttttacagatttgtgttttttgaattctcctattttcaagcagaaaaaggatttgagacgttctaaaaaaagagccctggaggtatcacctgccaaagaagcaatttttattttatattatgttcgagaatttgtttcgagattcccagactgtaggaaatgtaaacttgaaacccacatctgcttgaggtaaagtccacgggcttcacatccttagaaaacttttttagtccatgcattcactaatgtatgcagacctttaatagattctagctttatgtgttggggg

SEQ ID NO: 28032 - DNA, 4214 bp, Homo sapiens
  source 1..4214: mol_type = unassigned DNA
aaccgccaacggctgtggcgtttaaacccaagccgcagccgctgctgctcgccgagctcccggagctgggtgggggtgccccacgctgaaagagagtgatggagtgcccagtgatggaaactggctcactttttacctcaggaattaagagacatttgaaagacaaaagaatttcaaagactactaagttgaatgtttctcttgcttcaaaaataaaaacaaaaatactaaataattcttctattttcaaaatatctttaaagcacaacaacagggcattagctcaggctcttagtagagaaaaagagaattctcgaagaattacaactgaaaagatgctattgcaaaaagaagtagagaaactgaattttgagaacacatttcttcgcctaaagctaaataacttgaataagaagcttatagacatagaagctctcatgaacaataacttgataactgcaattgaaatgagcagtctttctgagttccatcagagttcctttctactgtcagctagcaagaagaaacgaattagtaaacagtgcaagttgatgcgtcttccatttgcaagggttccattaacttcaaatgatgatgaagatgaagataaagagaaaatgcagtgtgacaacaatattaaatcaaagacattacctgatattccctcttcaggatcaacaacacaacctttatcaactcaggataattcggaagtgttatttcttaaagaaaataatcaaaatgtatatggtttagatgattcagaacatatttcttctatagttgatgtacctcccagagaaagccattcccactcagaccaaagttctaagacttctctaatgagtgagatgagaaacgcccagtctattggccgcagatgggagaaaccatctcctagtaatgtgactgaaaggaagaagcgtgggtcatcttgggaatcaaataatctttctgcagacactccctgtgcaacagttttagataaacaacacatttcaagtccagaattaaattgcaataatgagataaatggtcatactaatgaaacaaatactgaaatgcaaagaaataaacaggatcttcctggcttatcttctgagtctgccagagaacctaatgcagagtgcatgaatcaaattgaggataatgatgactttcaattgcagaaaactgtgtatgatgctgacatggatttaactgctagtgaagtcagcaaaattgtcacagtctcaacaggcattaaaaagaaaagtaataaaaaaacaaatgaacatggaatgaaaactttcagaaaagtgaaagattccagctctgaaaaaaagagagaaagatcaaagagacagtttaaaaatagttcagatgtcgatattggggaaaagattgaaaacaggacagaaagatctgatgtcctggatggcaaaaggggtgcagaagatcccggttttattttcaataatgaacagctggctcagatgaatgaacagctggctcaggtgaatgaactaaagaaaatgacccttcaaactggctttgaacaaggtgacagagaaaatgtactgtgtaataaaaaggagaaaagaataacaaatgagcaagaggaaacatactctttatcccaaagttcaggtaaatttcaccaggagagtaaatttgataagggtcagaattccctaacttgtaataaaagtaaagcttctagacagacatttgtgattcacaaattagaaaaagataacttactcccaaaccaaaaggataaagtaaccatttatgaaaacctagacgtcacaaatgaatttcacacagccaatctttccaccaaagataatggaaatttatgtgattatgggacccacaatatattggatttgaaaaagtatgtcactgatattcaaccctcagagcaaaatgaatcaaacattaataagcttagaaagaaagtaaaccggaagacagaaataatttctggaatgaaccacatgtatgaggataatgataaagatgtggtgcatggcctaaaaaaaggtaatttttttttcaaaacccaagaggataaagaacctatctctgaaaacatagaagtttccaaagagcttcaaatcccagctctttctactagagataatgaaaatcaatgtgactataggacccagaatgtgttgggtttgcaaaagcagatcaccaatatgtaccccgttcagcaaaatgaatcaaaagttaataagaagcttaggcagaaagtaaatcggaagacagaaataatttctgaagtgaatcatttagataatgacaaaagtatagaatacacagttaaaagtcactcactctttttaacgcaaaaagataaggaaatcatccctggaaacctagaagacccaagtgagtttgaaacacctgctctttctaccaaagatagtggaaacctgtatgattctgagattcaaaatgttttgggggtgaaacatggccatgatatgcaacctgcttgtcaaaatgattcaaaaataggtaagaagcctagactaaatgtatgtcaaaagtcagaaataattcctgaaaccaaccaaatatatgagaatgataacaaaggtgtacatgacctagaaaaagataacttcttctctctaaccccaaaggataaagaaacaatttctgaaaatctacaagtcacaaatgaatttcaaacagttgatcttctcatcaaagataatggaaatttatgtgattatgacacccagaatatattggagttgaaaaagtatgttactgataggaaatctgctgagcaaaatgaatcaaaaataaataagctcaggaataaagtgaattggaagacagaaataatttctgaaatgaaccagatatatgaggataatgataaagatgcacatgtccaagaaagctatacaaaagatcttgattttaaagtaaataaatctaaacaaaaacttgaatgccaagacattatcaataaacactatatggaagtcaacagtaatgaaaaggaaagttgtgatcaaattttagattcctacaaagtagttaaaaaacgtaagaaagaatcatcatgcaaggcaaagaacattttgacaaaagctaagaacaaacttgcttcacagttaacagaatcttcacagacatctatctccttagaatctgatttaaaacatattactagtgaagcagattctgatccaggaaacccagttgaactatgtaagactcagaagcaaagcactaccactttgaataaaaaagatctcccttttgtggaagaaataaaagaaggagagtgtcaggttaaaaaggtaaataaaatgacatctaagtcaaagaaaaggaagacctccatagatccttctccagagagccatgaagtaatggaaagaatacttgacagcgttcagggaaagtctactgtatctgaacaagctgataaggaaaacaatttggagaatgagaaaatggtcaaaaataagccagacttttacacaaaggcatttagatctttgtctgagatacattcacctaacatacaagattcttcctttgacagtgttcgtgaaggtttagtacctttgagcgtttcttctggtaaaaatgtgataataaaagaaaattttgccttggagtgctccccagcctttcaagtaagtgatgatgagcatgagaagatgaacaagatgaaatttaaagtcaaccggagaacccaaaaatcaggaataggtgatagaccattacaggacttgtcaaataccagttttgtttcaaataacactgctgaatctgaaaataagtcagaagatctatcttcagaacggacaagcagaagaagaaggtgtactcctttctattttaaagagccaagcctcagagacaagatgagaagatgaagtgaatttatggattctggtttttctgaattttcaaagcataaggaatcaaaacagaaatatagtatcaagaagatgaaatgcttaatgaaaaggttttttttttgtttctttggcctttcatggagtgttgatttgtccattcttaatgtttattaataggtatatgtgcataaaatagctattttgtaacattaaactttttgagtcattttggtcatcatataacttaccttcctgtttatttaagcttctttttacctagtagcctttaaccaaacaataaccttttaaccaaataaaatgtgttaataaata

SEQ ID NO: 28033 - DNA, 1041 bp, Homo sapiens
  source 1..1041: mol_type = unassigned DNA
ggctgtggcgtttaaacccaagccgcagccgctgctgctcgccgagctcccggagctgggtgggggtgccccacgctgaaagagagtgatggagtgcccagtgatggaaactggctcactttttacctcaggaattaagagacatttgaaagacaaaagaatttcaaagactactaagttgaatgtttctcttgcttcaaaaataaaaacaaaaatactaaataattcttctattttcaaaatatctttaaagcacaacaacagggcattagctcaggctcttagtagagaaaaagagaattctcgaagaattacaactgaaaagatgctattgcaaaaagaagtagagaaactgaattttgagaacacatttcttcgcctaaagctaaataacttgaataagaagcttatagacatagaagctctcatgaacaataacttgataactgcaattgaaatgagcagtctttctgagttccatcagagttcctttctactgtcagctagcaagaagaaacgaattagtaaacagtgcaagttgatgcgtcttccatttgcaagggttccattaacttcaaatgatgatgaagatgaagataaagagaaaatgcagtgtgacaacaatattaaatcaaagacattacctgatattccctcttcaggatcaacaacacaacctttatcaactcaggataattcggaagtgttatttcttaaagaaaataatcaaaatgtatatggtttagatgattcagaacatatttcttctatagttgatgtacctcccagaggtgagattgttttaaaaattcattttgagtatttgtattagttacattcatcagatgttcttcctgagggcaattatgtataacagttaataagttagctctcttatgttaccgatttgctaacttctgccatttaaaactgctggtgatagatttaattttaaagtaaatatgctgacaaacatcacacccacagtggcctaatactgttactctggaagaaatatttagaaataaatggacctaatga

SEQ ID NO: 28034 - DNA, 640 bp, Homo sapiens
  source 1..640: mol_type = unassigned DNA
gacctgcggcccgccagaccctcggcgcggccgccggacgccgcggggcggacgcggaagtgaacgccttctcagctgctcggcaactcgggagcagagcggccccagcggcgcccccgtgcggcccggctctgaggcagcggctcagggagggagggaggccacgtcccgggcacgccacgccacgccacgccccgcccccagattcgtctcgccccagtgggccgcctcggagtcgggtgggtcttccatcccggaggacccgattggctgatggggcaaccgccaacggctgtggcgtttaaacccaagccgcagccgctgctgctcgccgagctcccggagctgggtgggggtgccccacgctgaaagagagtgatggagtgcccagtgatggaaactggctcactttttacctcaggaattaagagacatttgaaagacaaaagaatttcaaagactactaagttgaatgtttctcttgcttcaaaaataaaaacaaaaatactaaataattcttctattttcaaaatatctttaaagcacaacaacagggcattagctcaggctcttagtagagaaaaagagaattctcgaagaattacaactgaaaagatgctattgcaaaaagaagtagaga

SEQ ID NO: 28035 - DNA, 1631 bp, Homo sapiens
  source 1..1631: mol_type = unassigned DNA
gtaagtaagcctgccagacacactgtgacggctgcctgaagctagtgagtcgcggcgccgcgcactggtggttgggtcagtgccgcgcgccgatcggtcgttaccgcgaggcgctggtggccttcaggctggacggcgcgggtcagccctggttcgccggcttctgggtctttgaacagccgcgatgtcgatcttcacccccaccaaccagatccgcctaaccaatgtggccgtggtacggatgaagcgtgccgggaagcgcttcgaaatcgcctgctacaaaaacaaggtcgtcggctggcggagcggcgtggaaaaagacctcgatgaagttctgcagacccactcagtgtttgtaaatgtttctaaaggtcaggttgccaaaaaggaagatctcatcagtgcgtttggaacagatgaccaaactgaaatctgtaagcagattttgactaaaggagaagttcaagtatcagataaagaaagacacacacaactggagcagatgtttagggacattgcaactattgtggcagacaaatgtgtgaatcctgaaacaaagagaccatacaccgtgatccttattgagagagccatgaaggacatccactattcggtgaaaaccaacaagagtacaaaacagcaggctttggaagtgataaagcagttaaaagagaaaatgaagatagaacgtgctcacatgaggcttcggttcatccttccagtcaatgaaggcaagaagctgaaagaaaagctcaagccactgatcaaggtcatagaaagtgaagattatggccaacagttagaaatcgtatgtctgattgacccgggctgcttccgagaaattgatgagctaataaaaaaggaaactaaaggcaaaggttctttggaagtactcaatctgaaagatgtagaagaaggagatgagaaatttgaatgacacccatcaatctcttcacctctaaaacactaaagtgtttccgtttccgacggcactgtttcatgtctgtggtctgccaaatacttgcttaaactatttgacattttctatctttgtgttaacagtggacacagcaaggctttcctacataagtataataatgtgggaatgatttggttttaattataaactggggtctaaatcctaaagcaaaattgaaactccaagatgcaaagtccagagtggcattttgctactctgtctcatgccttgatagctttccaaaatgaaagttacttgaggcagctcttgtgggtgaaaagttatttgtacagtagagtaagattattaggggtatgtctatacaacaaaagggggggtctttcctaaaaaagaaaacatatgatgcttcatttctacttaatggaacttgtgttctgagggtcattatggtatcgtaatgtaaagcttggatgatgttcctgattatctgagaaacagatatagaaaaattgtgccggacttacctttcattgaacatgctgccataacttagattattcttggttaaaaaataaaagtcacttatttctaattcttaaagtttataatatatattaatatagctaaaattgtatgtaatcaataaaaccactcttatgtttattaaactatggcttgtgtttctagacaa

SEQ ID NO: 28036 - DNA, 5583 bp, Homo sapiens
  source 1..5583: mol_type = unassigned DNA
aaaaaaaaaaaaaaactacggcggccgagaaggggcgagtacagcccagtcctgaggtcgcgggaggctgcgaggactgcaaaagggtggagtcggcctcgcccccgcccaggccccgcccctgccgggaacccactttcccagtcctaggcggcggtcagatccttgcaagcatggtcgcgccggggcttgtactcgggctggtgctgccattaatcctgtgggccgacagaagtgcaggtattggttttcgctttgcttcatacatcaataatgatatggtgctgcagaaggagcctgctggggcagtgatatggggcttcggtacacctggagccacagtgaccgtgaccctgcgccaaggtcaggaaaccatcatgaagaaagtgaccagtgtgaaagctcactctgatacgtggatggtggtactggatcctatgaagcctggaggacctttcgaagtgatggcacaacagactttggagaaaataaacttcaccctgagagttcatgacgtcctgtttggagatgtctggctctgtagtgggcagagtaacatgcagatgactgtgttacagatatttaatgctacaagggagttgtctaacactgcggcatatcagtctgtccgcatcctctctgtctctcccattcaagcagagcaggagctggaggaccttgttgcggttgacttgcagtggtctaagcccacctcagaaaacttaggccatggatatttcaagtacatgtcagcagtgtgctggctctttggacgtcacctttatgacactctgcagtatcccatcgggctgatcgcctccagctggggcgggacacccattgaagcctggtcatctggacggtcactgaaagcctgtggggtccctaaacaagggtccattccatacgattctgtaactggtcccagtaagcactctgttctctggaatgccatgatccatccactgtgcaatatgactctgaaaggggtagtatggtaccagggggagtccaatataaattataacacggatctgtacaattgcacattccctgcactcatcgaagactggcgtgaaaccttccaccgtggttcccaggggcagacggagcgtttcttcccatttggacttgtccagttatcttcagatttgtctaagaagagctcagacgatggatttccccagatccgttggcatcaaacagcagacttcggctatgtccccaacccaaagatgcccaatactttcatggctgtagctatggatctctgtgatagagactcgccttttggcagcatccaccctcgagataaacagactgtggcttatcggctgcatttgggggcccgtgctctggcttatggtgagaagaatttgacctttgaaggaccactgcctgagaagatagaactcttggctcacaaggggctgctcaatctcacatattaccagcaaatccaggtgcagaaaaaggacaacaagatatttgagatctcctgttgcagtgaccatcgatgcaagtggcttccagcttctatgaacaccgtctccacccagtccctgaccctggcgatcgattcttgtcatggcactgtggttgctctccgctatgcttggaccacgtggccttgtgaatataagcagtgtcccctataccaccccagtagtgccctgccagcccctcccttcattgctttcattacagaccagggtcctggacatcagagcaatgttgctaaatgactgtttcagtatgatcagaacttagatataaggatgggtccttcagattttagcatttaggagtttcaataataaccattgcttttaaaggaaattaatagaaagcctcattgaatggctttcagctagcacatggctgtttctatattctgatgagcccaggcttataggtaacttgaaatgcttgctttttgttccctagttggtctaagggtctgtattggactaattctgaactacagacaaattggacctcaatgtcatttacttccctcatattaatgggagtgaaatgtctaatacttttgcccctttttatccagagttgtgggaatctcaggattggaagagattttaaaggccacataggccagctagtgttcatgtgttctttataaaatttctcccatccaagtactaaccaggcccgaccctgcttagcttccgagatcagatgagatcaggcgcgttcagggtgatatggccgtagacgtctttacaaaattcctgacaggtggttactgaatctctctatgaactttccattcaaaactttccaagtttttccttatgtggaaccgaaatctttctttctcccgtgaaactttactactatcagataattgaagacagatctctttgtattctcttcaagcccaaaccaattctgttccttcaatctaaatagtggtaatatgaatgtttaagaaatgaaataagaaacatgtgcaggcactttggaaggtgctaagtgactgccctaaggaatgaaaagcaagggccaggtgggagtagcccagcgaaggcacttgggctgccaggaacaggaggcgtgggaaactctggcttaggaaaacatgaacacaggggcaacagaggcaaactgttgttcgagttaaatataaatctcaggctctttaaaggtaaaaggtttaaggataatccatttggaagaagaaaagagtgaggctgaaagtaaagccacatgacaagcatataaaaaaaaatgcagatgatacaaatatgaaagaggccttcagtgtttgtttattaagaatcttaatgcagtttactgatggattaaaaacagctaacattgtctgaaaattatgttacctataagaagttggaaataaataaaagcataatcactagtgatgtgtatgtatttatatccacttgcaaactgtccttgaagcatgtgaaaaggagtaagaatactatctatgggtagctttcctccccttaatgtgaaaaatgagaactaaagcaaaaagcatcactcactgtacatatacaatgtattttacgtagtgtaaaaaatatggtttagatagtgaatatattaatgaaatcatatgtaaatttatttttagtggctgaataatttaaaacattatgtggaattcactatgtttcccccaatttaggaactttttactgtgtgaaaatgaaatttataatactctgtagggtgaatgatggtttttgctttagttctacccctctgtagagttccaaggggttctggtgtagctccaaacagcaggaataactttgtcagtgccaagattttatttagttaaaaaacaaaaaatctacacactttacaaggaacgttggctcccctgaggacttcctagcattcaactcgttcagttaacccctattgcccatgctttgacctctcatgcatctggccccatagaaaccatgaaccttgtaacagattgatgcctgagaaaaagtcaatctacccgtccactcctccactcccaatacacatacccccatgggctgttctaattcgggggcagccagaggtagccaagaactctaagtccagattcctttcacctccaggaacctagagtacatagtgtgaaaaatacggttcaggcaatgattatgttaatgacgccatgcacattcatttttagtggctgagtaatttaaaacatgatgtgggaattcactgcatttccccaaatgtaagaactttttagttttaaaatgaaatttatagtcactgtagaaaatttggacactaaagtataagcaagtaaaaatcacccccaaattcatcattcagagaaacactattttgctgaaccattcacttgacttgagttatataattttatacagtacatattattttgtaatctgtgtttttgacttacttactttaccaaaataattttcttatgtaaataatagaatatagatttagagtgtttcagtttgtggaagcctcattttatttaaccaatttcctattaatggacatatagatttttaacaattttctactattaaaataatactgtaatgaatatcacatgcaaacatcataccacactcgtccagttatttcttagggttcttaacatggaagaggataaatatatatttaaaatttagatatctacagcttaaccctcccaaaggattaaacaacttacattctcaccaaggtagtcctttttttgccctcaccctcattgacactggatgttgtcaaatttaaaaaaaatccttaacaatctgatagatgaaaagatagtttaagtatactaaggcagtgtttttcaaggtgtttttgtttttgtttttgagttggagttttgctctgttgcccaggctggagtgcagtggcgcggtctcggctcactgcaacctctgcctcccgggttcaagcgattcttcctgcctcagcctcccgagtagctgggactacaggcgcgtgccaccacgcctggctaattttttgtatttttattagagaccgacttagccaggatggtctcgatctcctgacctcttgatccacccgcctcagcctcccaaagtgctgggattacaggcgtgagccaccgtgcccagcttttcaagtttcttaaatccatgatccatagtaaaaacattttacacatatcttcatacaagtatatgtatatgtggtatacgtacacactatagttgtatatgcattatagctgaaaaaccagttcaacctttctacatgtggtatgttccaaaaattttaaatgtctttctaaaatgaggctcttttaatacgggtattactcaggctgtaatagtgggaaaatatttgttatatgataaaagcagcatatatcatttctgtgtaaatgccagtatgctcaagccatttatgcagagaaaaaaagaaaaacactgcattaacattttaagcagtccccttcccgatttgctattatacaaagtttgtttcttttacattgtaaagtgtatacaacttataaaaagactatactcaaaatcataaaataccagttaacttagcttctcagtttacagtggccagtgtggtgtgctctaaacactgctgcctgatccctccctctgctggtcagatttattactataaagtaccaatcccatttgtgttgtcctcaattggcaattatgaatggcagtgcattaaccattcaattctcaccactccatccccattcttctacttctgggtccttttgtccctccctttccagacagcccttggtaacctgctgctgggtaactaaggcatcccacaggtagtgttgaggtgttaggtgatagagtaaacctctaccttaatgctattaacagggtccaaaaatccagttgcatggaacatggagttatattattacatggctaatgaaaagacaggactaagtctgttatagagtatgggactaacccccaattatatgtgaatttgtgttatcatatggtttcagtgtactgagctaaaaagcacattatctgaggtgcaatacaaaggttaaagaggttaaagatcccc

SEQ ID NO: 28037 - DNA, 2884 bp, Homo sapiens
  source 1..2884: mol_type = unassigned DNA
actacggcggccgagaaggggcgagtacagcccagtcctgaggtcgcgggaggctgcgaggactgcaaaagggtggagtcggcctcgcccccgcccaggccccgcccctgccgggaacccactttcccagtcctaggcggcggtcagatccttgcaagcatggtcgcgccggggcttgtactcgggctggtgctgccattaatcctgtgggccgacagaagtgcaggtattggttttcgctttgcttcatacatcaataatgatatggtgctgcagaaggagcctgctggggcagtgatatggggcttcggtacacctggagccacagtgaccgtgaccctgcgccaaggtcaggaaaccatcatgaagaaagtgaccagtgtgaaagctcactctgatacgtggatggtggtactggatcctatgaagcctggaggacctttcgaagtgatggcacaacagactttggagaaaataaacttcaccctgagagttcatgacgtcctgtttggagatgtctggctctgtagtgggcagagtaacatgcagatgactgtgttacagatatttaatgctacaagggagttgtctaacactgcggcatatcagtctgtccgcatcctctctgtctctcccattcaagcagagcaggagctggaggaccttgttgcggttgacttgcagtggtctaagcccacctcagaaaacttaggccatggatatttcaagtacatgtcagcagtgtgctggctctttggacgtcacctttatgacactctgcagtatcccatcgggctgatcgcctccagctggggcgggacacccattgaagcctggtcatctggacggtcactgaaagcctgtggggtccctaaacaagggtccattccatacgattctgtaactggtcccagtaagcactctgttctctggaatgccatgatccatccactgtgcaatatgactctgaaaggggtagtatggtaccagggggagtccaatataaattataacacggatctgtacaattgcacattccctgcactcatcgaagactggcgtgaaaccttccaccgtggttcccaggggcagacggagcgtttcttcccatttggacttgtccagttatcttcagatttgtctaagaagagctcagacgatggatttccccagatccgttggcatcaaacagcagacttcggctatgtccccaacccaaagatgcccaatactttcatggctgtagctatggatctctgtgatagagactcgccttttggcagcatccaccctcgagataaacagactgtggcttatcggctgcatttgggggcccgtgctctggcttatggtgagaagaatttgacctttgaaggaccactgcctgagaagatagaactcttggctcacaaggggctgctcaatctcacatattaccagcaaatccaggtgcagaaaaaggacaacaagatatttgagatctcctgttgcagtgaccatcgatgcaagtggcttccagcttctatgaacaccgtctccacccagtccctgaccctggcgatcgattcttgtcatggcactgtggttgctctccgctatgcttggaccacgtggccttgtgaatataagcagtgtcccctataccaccccagtagtgccctgccagcccctcccttcattgctttcattacagaccagggtcctggacatcagagcaatgttgctaaatgactgtttcagtatgatcagaacttagatataaggatgggtccttcagattttagcatttaggagtttcaataataaccattgcttttaaaggaaattaatagaaagcctcattgaatggctttcagctagcacatggctgtttctatattctgatgagcccaggcttataggtaacttgaaatgcttgctttttgttccctagttggtctaagggtctgtattggactaattctgaactacagacaaattggacctcaatgtcatttacttccctcatattaatgggagtgaaatgtctaatacttttgcccctttttatccagagttgtgggaatctcaggattggaagagattttaaaggccacataggccagctagtgttcatgtgttctttataaaatttctcccatccaagtactaaccaggcccgaccctgcttagcttccgagatcagatgagatcaggcgcgttcagggtgatatggccgtagacgtctttacaaaattcctgacaggtggttactgaatctctctatgaactttccattcaaaactttccaagtttttccttatgtggaaccgaaatctttctttctcccgtgaaactttactactatcagataattgaagacagatctctttgtattctcttcaagcccaaaccaattctgttccttcaatctaaatagtggtaatatgaatgtttaagaaatgaaataagaaacatgtgcaggcactttggaaggtgctaagtgactgccctaaggaatgaaaagcaagggccaggtgggagtagcccagcgaaggcacttgggctgccaggaacaggaggcgtgggaaactctggcttaggaaaacatgaacacaggggcaacagaggcaaactgttgttcgagttaaatataaatctcaggctctttaaaggtaaaaggtttaaggataatccatttggaagaagaaaagagtgaggctgaaagtaaagccacatgacaagcatataaaaaaaaatgcagatgatacaaatatgaaagaggccttcagtgtttgtttattaagaatcttaatgcagtttactgatggattaaaaacagctaacattgtctgaaaattatgttacctataagaagttggaaataaataaaagcataatcact

SEQ ID NO: 28038 - DNA, 2247 bp, Homo sapiens
  source 1..2247: mol_type = unassigned DNA
ggccccagggctcagcttccgccttcggcttccccttctgccaagagccctgagccactcacagcacgaccagagaacaggcctgtctcaggcaggccctgcgcctcctatgcggagatgctactgccactgctgctgtcctcgctgctgggcgggtcccaggctatggatgggagattctggatacgagtgcaggagtcagtgatggtgccggagggcctgtgcatctctgtgccctgctctttctcctacccccgacaggactggacagggtctaccccagcttatggctactggttcaaagcagtgactgagacaaccaagggtgctcctgtggccacaaaccaccagagtcgagaggtggaaatgagcacccggggccgattccagctcactggggatcccgccaaggggaactgctccttggtgatcagagacgcgcagatgcaggatgagtcacagtacttctttcgggtggagagaggaagctatgtgagatataatttcatgaacgatgggttctttctaaaagtaacagccctgactcagaagcctgatgtctacatccccgagaccctggagcccgggcagccggtgacggtcatctgtgtgtttaactgggcctttgaggaatgtccacccccttctttctcctggacgggggctgccctctcctcccaaggaaccaaaccaacgacctcccacttctcagtgctcagcttcacgcccagaccccaggaccacaacaccgacctcacctgccatgtggacttctccagaaagggtgtgagcgcacagaggaccgtccgactccgtgtggcctatgcccccagagaccttgttatcagcatttcacgtgacaacacgccagccctggagccccagccccagggaaatgtcccatacctggaagcccaaaaaggccagttcctgcggctcctctgtgctgctgacagccagccccctgccacactgagctgggtcctgcagaacagagtcctctcctcgtcccatccctggggccctagacccctggggctggagctgcccggggtgaaggctggggattcagggcgctacacctgccgagcggagaacaggcttggctcccagcagcgagccctggacctctctgtgcagtatcctccagagaacctgagagtgatggtttcccaagcaaacaggacagtcctggaaaaccttgggaacggcacgtctctcccagtactggagggccaaagcctgtgcctggtctgtgtcacacacagcagccccccagccaggctgagctggacccagaggggacaggttctgagcccctcccagccctcagaccccggggtcctggagctgcctcgggttcaagtggagcacgaaggagagttcacctgccacgctcggcacccactgggctcccagcacgtctctctcagcctctccgtgcactactccccgaagctgctgggcccctcctgctcctgggaggctgagggtctgcactgcagctgctcctcccaggccagcccggccccctctctgcgctggtggcttggggaggagctgctggaggggaacagcagccaggactccttcgaggtcacccccagctcagccgggccctgggccaacagctccctgagcctccatggagggctcagctccggcctcaggctccgctgtgaggcctggaacgtccatggggcccagagtggatccatcctgcagctgccagataagaagggactcatctcaacggcattctccaacggagcgtttctgggaatcggcatcacggctcttcttttcctctgcctggccctgatcatcatgaagattctaccgaagagacggactcagacagaaaccccgaggcccaggttctcccggcacagcacgatcctggattacatcaatgtggtcccgacggctggccccctggctcagaagcggaatcagaaagccacaccaaacagtcctcggacccctcttccaccaggtgctccctccccagaatcaaagaagaaccagaaaaagcagtatcagttgcccagtttcccagaacccaaatcatccactcaagccccagaatcccaggagagccaagaggagctccattatgccacgctcaacttcccaggcgtcagacccaggcctgaggcccggatgcccaagggcacccaggcggattatgcagaagtcaagttccaatgagggtctcttaggctttaggactgggacttcggctag

SEQ ID NO: 28039 - DNA, 3109 bp, Homo sapiens
  source 1..3109: mol_type = unassigned DNA
gcccccaggagacccagaggacaactgggcaaggtgggccggagagtgtgggggaaggcaaaggagttctgtgagctcagcgtctgaagctcatttcatgcatcaggccccagggctcagcttccgccttcggcttccccttctgccaagagccctgagccactcacagcacgaccagagaacaggcctgtctcaggcaggccctgcgcctcctatgcggagatgctactgccactgctgctgtcctcgctgctgggcgggtcccaggctatggatgggagattctggatacgagtgcaggagtcagtgatggtgccggagggcctgtgcatctctgtgccctgctctttctcctacccccgacaggactggacagggtctaccccagcttatggctactggttcaaagcagtgactgagacaaccaagggtgctcctgtggccacaaaccaccagagtcgagaggtggaaatgagcacccggggccgattccagctcactggggatcccgccaaggggaactgctccttggtgatcagagacgcgcagatgcaggatgagtcacagtacttctttcgggtggagagaggaagctatgtgagatataatttcatgaacgatgggttctttctaaaagtaacagccctgactcagaagcctgatgtctacatccccgagaccctggagcccgggcagccggtgacggtcatctgtgtgtttaactgggcctttgaggaatgtccacccccttctttctcctggacgggggctgccctctcctcccaaggaaccaaaccaacgacctcccacttctcagtgctcagcttcacgcccagaccccaggaccacaacaccgacctcacctgccatgtggacttctccagaaagggtgtgagcgcacagaggaccgtccgactccgtgtggcctatgcccccagagaccttgttatcagcatttcacgtgacaacacgccagccctggagccccagccccagggaaatgtcccatacctggaagcccaaaaaggccagttcctgcggctcctctgtgctgctgacagccagccccctgccacactgagctgggtcctgcagaacagagtcctctcctcgtcccatccctggggccctagacccctggggctggagctgcccggggtgaaggctggggattcagggcgctacacctgccgagcggagaacaggcttggctcccagcagcgagccctggacctctctgtgcagtatcctccagagaacctgagagtgatggtttcccaagcaaacaggacagtcctggaaaaccttgggaacggcacgtctctcccagtactggagggccaaagcctgtgcctggtctgtgtcacacacagcagccccccagccaggctgagctggacccagaggggacaggttctgagcccctcccagccctcagaccccggggtcctggagctgcctcgggttcaagtggagcacgaaggagagttcacctgccacgctcggcacccactgggctcccagcacgtctctctcagcctctccgtgcactataagaagggactcatctcaacggcattctccaacggagcgtttctgggaatcggcatcacggctcttcttttcctctgcctggccctgatcatcatgaagattctaccgaagagacggactcagacagaaaccccgaggcccaggttctcccggcacagcacgatcctggattacatcaatgtggtcccgacggctggccccctggctcagaagcggaatcagaaagccacaccaaacagtcctcggacccctcttccaccaggtgctccctccccagaatcaaagaagaaccagaaaaagcagtatcagttgcccagtttcccagaacccaaatcatccactcaagccccagaatcccaggagagccaagaggagctccattatgccacgctcaacttcccaggcgtcagacccaggcctgaggcccggatgcccaagggcacccaggcggattatgcagaagtcaagttccaatgagggtctcttaggctttaggactgggacttcggctagggaggaaggtagagtaagaggttgaagataacagagtgcaaagtttccttctctccctctctctctctctttctctctctctctctctttctctctcttttaaaaaaacatctggccagggcacagtggctcacgcctgtaatcccagcactttgggaggttgaggtgggcagatcgcctgaggtcgggagttcgagaccagcctggccaacttggtgaaaccccgtctctactaaaaatacaaaaattagctgggcatggtggcaggcgcctgtaatcctacctacttgggaagctgaggcaggagaatcacttgaacctgggagacggaggttgcagtgagccaagatcacaccattgcacgccagcctgggcaacaaagcgagactccatctcaaaaaaaaaatcctccaaatgggttgggtgtctgtaatcccagcactttgggaggctaaggtgggtggattgcttgagcccaggagttcgagaccagcctgggcaacatggtgaaaccccatctctacaaaaaatacaaaacatagctgggcttggtggtgtgtgcctgtagtcccagctgtcagacatttaaaccagagcaactccatctggaataggagctgaataaaatgaggctgagacctactgggctgcattctcagacagtggaggcattctaagtcacaggatgagacaggaggtccgtacaagatacaggtcataaagactttgctgataaaacagattgcagtaaagaagccaaccaaatcccaccaaaaccaagttggccacgagagtgacctctggtcgtcctcactgctacactcctgacagcaccatgacagtttacaaatgccatggcaacatcaggaagttacccgatatgtcccaaaagggggaggaatgaataatccaccccttgtttagcaaataagcaagaaataaccataaaagtgggcaaccagcagctctaggcgctgctcttgtctatggagtagccattcttttgttcctttactttcttaataaacttgctttcacctta

SEQ ID NO: 28040 - DNA, 2997 bp, Homo sapiens
  source 1..2997: mol_type = unassigned DNA
ggccccagggctcagcttccgccttcggcttccccttctgccaagagccctgagccactcacagcacgaccagagaacaggcctgtctcaggcaggccctgcgcctcctatgcggagatgctactgccactgctgctgtcctcgctgctgggcgggtcccaggctatggatgggagattctggatacgagtgcaggagtcagtgatggtgccggagggcctgtgcatctctgtgccctgctctttctcctacccccgacaggactggacagggtctaccccagcttatggctactggttcaaagcagtgactgagacaaccaagggtgctcctgtggccacaaaccaccagagtcgagaggtggaaatgagcacccggggccgattccagctcactggggatcccgccaaggggaactgctccttggtgatcagagacgcgcagatgcaggatgagtcacagtacttctttcgggtggagagaggaagctatgtgagatataatttcatgaacgatgggttctttctaaaagtaacagccctgactcagaagcctgatgtctacatccccgagaccctggagcccgggcagccggtgacggtcatctgtgtgtttaactgggcctttgaggaatgtccacccccttctttctcctggacgggggctgccctctcctcccaaggaaccaaaccaacgacctcccacttctcagtgctcagcttcacgcccagaccccaggaccacaacaccgacctcacctgccatgtggacttctccagaaagggtgtgagcgcacagaggaccgtccgactccgtgtggcctatgcccccagagaccttgttatcagcatttcacgtgacaacacgccagccctggagccccagccccagggaaatgtcccatacctggaagcccaaaaaggccagttcctgcggctcctctgtgctgctgacagccagccccctgccacactgagctgggtcctgcagaacagagtcctctcctcgtcccatccctggggccctagacccctggggctggagctgcccggggtgaaggctggggattcagggcgctacacctgccgagcggagaacaggcttggctcccagcagcgagccctggacctctctgtgcagtatcctccagagaacctgagagtgatggtttcccaagcaaacaggacagtcctggaaaaccttgggaacggcacgtctctcccagtactggagggccaaagcctgtgcctggtctgtgtcacacacagcagccccccagccaggctgagctggacccagaggggacaggttctgagcccctcccagccctcagaccccggggtcctggagctgcctcgggttcaagtggagcacgaaggagagttcacctgccacgctcggcacccactgggctcccagcacgtctctctcagcctctccgtgcactactccccgaagctgctgggcccctcctgctcctgggaggctgagggtctgcactgcagctgctcctcccaggccagcccggccccctctctgcgctggtggcttggggaggagctgctggaggggaacagcagccaggactccttcgaggtcacccccagctcagccgggccctgggccaacagctccctgagcctccatggagggctcagctccggcctcaggctccgctgtgaggcctggaacgtccatggggcccagagtggatccatcctgcagctgccagataagaagggactcatctcaacggcattctccaacggagcgtttctgggaatcggcatcacggctcttcttttcctctgcctggccctgatcatcatgaagattctaccgaagagacggactcagacagaaaccccgaggcccaggttctcccggcacagcacgatcctggattacatcaatgtggtcccgacggctggccccctggctcagaagcggaatcagaaagccacaccaaacagtcctcggacccctcttccaccaggtgctccctccccagaatcaaagaagaaccagaaaaagcagtatcagttgcccagtttcccagaacccaaatcatccactcaagccccagaatcccaggagagccaagaggagctccattatgccacgctcaacttcccaggcgtcagacccaggcctgaggcccggatgcccaagggcacccaggcggattatgcagaagtcaagttccaatgagggtctcttaggctttaggactgggacttcggctagggaggaaggtagagtaagaggttgaagataacagagtgcaaagtttccttctctccctctctctctctctttctctctctctctctctttctctctcttttaaaaaaacatctggccagggcacagtggctcacgcctgtaatcccagcactttgggaggttgaggtgggcagatcgcctgaggtcgggagttcgagaccagcctggccaacttggtgaaaccccatctctacaaaaaatacaaaacatagctgggcttggtggtgtgtgcctgtagtcccagctgtcagacatttaaaccagagcaactccatctggaataggagctgaataaaatgaggctgagacctactgggctgcattctcagacagtggaggcattctaagtcacaggatgagacaggaggtccgtacaagatacaggtcataaagactttgctgataaaacagattgcagtaaagaagccaaccaaatcccaccaaaaccaagttggccacgagagtgacctctggtcgtcctcactgctacactcctgacagcaccatgacagtttacaaatgccatggcaacatcaggaagttacccgatatgtcccaaaagggggaggaatgaataatccaccccttgtttagcaaataagcaagaaataaccataaaagtgggcaaccagcagctctaggcgctgctcttgtctatggagtagccattcttttgttcctttactttcttaataaacttgctttcacctt

SEQ ID NO: 28041 - DNA, 2859 bp, Homo sapiens
  source 1..2859: mol_type = unassigned DNA
gcccccaggagacccagaggacaactgggcaaggtgggccggagagtgtgggggaaggcaaaggagttctgtgagctcagcgtctgaagctcatttcatgcatcaggccccagggctcagcttccgccttcggcttccccttctgccaagagccctgagccactcacagcacgaccagagaacaggcctgtctcaggcaggccctgcgcctcctatgcggagatgctactgccactgctgctgtcctcgctgctgggcgggtcccaggctatggatgggagattctggatacgagtgcaggagtcagtgatggtgccggagggcctgtgcatctctgtgccctgctctttctcctacccccgacaggactggacagggtctaccccagcttatggctactggttcaaagcagtgactgagacaaccaagggtgctcctgtggccacaaaccaccagagtcgagaggtggaaatgagcacccggggccgattccagctcactggggatcccgccaaggggaactgctccttggtgatcagagacgcgcagatgcaggatgagtcacagtacttctttcgggtggagagaggaagctatgtgagatataatttcatgaacgatgggttctttctaaaagtaacagccctgactcagaagaccgtccgactccgtgtggcctatgcccccagagaccttgttatcagcatttcacgtgacaacacgccagccctggagccccagccccagggaaatgtcccatacctggaagcccaaaaaggccagttcctgcggctcctctgtgctgctgacagccagccccctgccacactgagctgggtcctgcagaacagagtcctctcctcgtcccatccctggggccctagacccctggggctggagctgcccggggtgaaggctggggattcagggcgctacacctgccgagcggagaacaggcttggctcccagcagcgagccctggacctctctgtgcagtatcctccagagaacctgagagtgatggtttcccaagcaaacaggacagtcctggaaaaccttgggaacggcacgtctctcccagtactggagggccaaagcctgtgcctggtctgtgtcacacacagcagccccccagccaggctgagctggacccagaggggacaggttctgagcccctcccagccctcagaccccggggtcctggagctgcctcgggttcaagtggagcacgaaggagagttcacctgccacgctcggcacccactgggctcccagcacgtctctctcagcctctccgtgcactataagaagggactcatctcaacggcattctccaacggagcgtttctgggaatcggcatcacggctcttcttttcctctgcctggccctgatcatcatgaagattctaccgaagagacggactcagacagaaaccccgaggcccaggttctcccggcacagcacgatcctggattacatcaatgtggtcccgacggctggccccctggctcagaagcggaatcagaaagccacaccaaacagtcctcggacccctcttccaccaggtgctccctccccagaatcaaagaagaaccagaaaaagcagtatcagttgcccagtttcccagaacccaaatcatccactcaagccccagaatcccaggagagccaagaggagctccattatgccacgctcaacttcccaggcgtcagacccaggcctgaggcccggatgcccaagggcacccaggcggattatgcagaagtcaagttccaatgagggtctcttaggctttaggactgggacttcggctagggaggaaggtagagtaagaggttgaagataacagagtgcaaagtttccttctctccctctctctctctctttctctctctctctctctttctctctcttttaaaaaaacatctggccagggcacagtggctcacgcctgtaatcccagcactttgggaggttgaggtgggcagatcgcctgaggtcgggagttcgagaccagcctggccaacttggtgaaaccccgtctctactaaaaatacaaaaattagctgggcatggtggcaggcgcctgtaatcctacctacttgggaagctgaggcaggagaatcacttgaacctgggagacggaggttgcagtgagccaagatcacaccattgcacgccagcctgggcaacaaagcgagactccatctcaaaaaaaaaatcctccaaatgggttgggtgtctgtaatcccagcactttgggaggctaaggtgggtggattgcttgagcccaggagttcgagaccagcctgggcaacatggtgaaaccccatctctacaaaaaatacaaaacatagctgggcttggtggtgtgtgcctgtagtcccagctgtcagacatttaaaccagagcaactccatctggaataggagctgaataaaatgaggctgagacctactgggctgcattctcagacagtggaggcattctaagtcacaggatgagacaggaggtccgtacaagatacaggtcataaagactttgctgataaaacagattgcagtaaagaagccaaccaaatcccaccaaaaccaagttggccacgagagtgacctctggtcgtcctcactgctacactcctgacagcaccatgacagtttacaaatgccatggcaacatcaggaagttacccgatatgtcccaaaagggggaggaatgaataatccaccccttgtttagcaaataagcaagaaataaccataaaagtgggcaaccagcagctctaggcgctgctcttgtctatggagtagccattcttttgttcctttactttcttaataaacttgctttcacctt

SEQ ID NO: 28042 - DNA, 2126 bp, Homo sapiens
  source 1..2126: mol_type = unassigned DNA
ttctgtgagctcagcgtctgaagctcatttcatgcatcaggccccagggctcagcttccgccttcggcttccccttctgccaagagccctgagccactcacagcacgaccagagaacaggcctgtctcaggcaggccctgcgcctcctatgcggagatgctactgccactgctgctgtcctcgctgctgggcgggtcccaggctatggatgggagattctggatacgagtgcaggagtcagtgatggtgccggagggcctgtgcatctctgtgccctgctctttctcctacccccgacaggactggacagggtctaccccagcttatggctactggttcaaagcagtgactgagacaaccaagggtgctcctgtggccacaaaccaccagagtcgagaggtggaaatgagcacccggggccgattccagctcactggggatcccgccaaggggaactgctccttggtgatcagagacgcgcagatgcaggatgagtcacagtacttctttcgggtggagagaggaagctatgtgagatataatttcatgaacgatgggttctttctaaaagtaacagtgctcagcttcacgcccagaccccaggaccacaacaccgacctcacctgccatgtggacttctccagaaagggtgtgagcgcacagaggaccgtccgactccgtgtggcctatgcccccagagaccttgttatcagcatttcacgtgacaacacgccagccctggagccccagccccagggaaatgtcccatacctggaagcccaaaaaggccagttcctgcggctcctctgtgctgctgacagccagccccctgccacactgagctgggtcctgcagaacagagtcctctcctcgtcccatccctggggccctagacccctggggctggagctgcccggggtgaaggctggggattcagggcgctacacctgccgagcggagaacaggcttggctcccagcagcgagccctggacctctctgtgcagtatcctccagagaacctgagagtgatggtttcccaagcaaacaggacagtcctggaaaaccttgggaacggcacgtctctcccagtactggagggccaaagcctgtgcctggtctgtgtcacacacagcagccccccagccaggctgagctggacccagaggggacaggttctgagcccctcccagccctcagaccccggggtcctggagctgcctcgggttcaagtggagcacgaaggagagttcacctgccacgctcggcacccactgggctcccagcacgtctctctcagcctctccgtgcactactccccgaagctgctgggcccctcctgctcctgggaggctgagggtctgcactgcagctgctcctcccaggccagcccggccccctctctgcgctggtggcttggggaggagctgctggaggggaacagcagccaggactccttcgaggtcacccccagctcagccgggccctgggccaacagctccctgagcctccatggagggctcagctccggcctcaggctccgctgtgaggcctggaacgtccatggggcccagagtggatccatcctgcagctgccagataagaagggactcatctcaacggcattctccaacggagcgtttctgggaatcggcatcacggctcttcttttcctctgcctggccctgatcatcatgaagattctaccgaagagacggactcagacagaaaccccgaggcccaggttctcccggcacagcacgatcctggattacatcaatgtggtcccgacggctggccccctggctcagaagcggaatcagaaagccacaccaaacagtcctcggacccctcttccaccaggtgctccctccccagaatcaaagaagaaccagaaaaagcagtatcagttgcccagtttcccagaacccaaatcatccactcaagccccagaatcccaggagagccaagaggagctccattatgccacgctcaacttcccaggcgtcagacccaggcctgaggcccggatgcccaagggcacccaggcggattatgcagaagtcaagttccaatgagggtctcttaggctttaggactgggacttcggctagggaggaaggtagag

SEQ ID NO: 28043 - DNA, 1960 bp, Homo sapiens
  source 1..1960: mol_type = unassigned DNA
agcacgaccagagaacaggcctgtctcaggcaggccctgcgcctcctatgcggagatgctactgccactgctgctgtcctcgctgctgggcgggtcccaggctatggatgggagattctggatacgagtgcaggagtcagtgatggtgccggagggcctgtgcatctctgtgccctgctctttctcctacccccgacaggactggacagggtctaccccagcttatggctactggttcaaagcagtgactgagacaaccaagggtgctcctgtggccacaaaccaccagagtcgagaggtggaaatgagcacccggggccgattccagctcactggggatcccgccaaggggaactgctccttggtgatcagagacgcgcagatgcaggatgagtcacagtacttctttcgggtggagagaggaagctatgtgagatataatttcatgaacgatgggttctttctaaaagtaacagtgctcagcttcacgcccagaccccaggaccacaacaccgacctcacctgccatgtggacttctccagaaagggtgtgagcgcacagaggaccgtccgactccgtgtggcctatgcccccagagaccttgttatcagcatttcacgtgacaacacgccagccctggagccccagccccagggaaatgtcccatacctggaagcccaaaaaggccagttcctgcggctcctctgtgctgctgacagccagccccctgccacactgagctgggtcctgcagaacagagtcctctcctcgtcccatccctggggccctagacccctggggctggagctgcccggggtgaaggctggggattcagggcgctacacctgccgagcggagaacaggcttggctcccagcagcgagccctggacctctctgtgcagtatcctccagagaacctgagagtgatggtttcccaagcaaacaggacagtcctggaaaaccttgggaacggcacgtctctcccagtactggagggccaaagcctgtgcctggtctgtgtcacacacagcagccccccagccaggctgagctggacccagaggggacaggttctgagcccctcccagccctcagaccccggggtcctggagctgcctcgggttcaagtggagcacgaaggagagttcacctgccacgctcggcacccactgggctcccagcacgtctctctcagcctctccgtgcactataagaagggactcatctcaacggcattctccaacggagcgtttctgggaatcggcatcacggctcttcttttcctctgcctggccctgatcatcatgaagattctaccgaagagacggactcagacagaaaccccgaggcccaggttctcccggcacagcacgatcctggattacatcaatgtggtcccgacggctggccccctggctcagaagcggaatcagaaagccacaccaaacagtcctcggacccctcttccaccaggtgctccctccccagaatcaaagaagaaccagaaaaagcagtatcagttgcccagtttcccagaacccaaatcatccactcaagccccagaatcccaggagagccaagaggagctccattatgccacgctcaacttcccaggcgtcagacccaggcctgaggcccggatgcccaagggcacccaggcggattatgcagaagtcaagttccaatgagggtctcttaggctttaggactgggacttcggctagggaggaaggtagagtaagaggttgaagataacagagtgcaaagtttccttctctccctctctctctctctttctctctctctctctctttctctctcttttaaaaaaacatctggccagggcacagtggctcacgcctgtaatcccagcactttgggaggttgaggtgggcagatcgcctgaggtcgggagttcgagaccagcctggccaacttggtgaaaccccgtctctact

SEQ ID NO: 28044 - DNA, 2664 bp, Homo sapiens
  source 1..2664: mol_type = unassigned DNA
gcccccaggagacccagaggacaactgggcaaggtgggccggagagtgtgggggaaggcaaaggagttctgtgagctcagcgtctgaagctcatttcatgcatcaggccccagggctcagcttccgccttcggcttccccttctgccaagagccctgagccactcacagcacgaccagagaacaggcctgtctcaggcaggccctgcgcctcctatgcggagatgctactgccactgctgctgtcctcgctgctgggcgggtcccaggctatggatgggagattctggatacgagtgcaggagtcagtgatggtgccggagggcctgtgcatctctgtgccctgctctttctcctacccccgacaggactggacagggtctaccccagcttatggctactggttcaaagcagtgactgagacaaccaagggtgctcctgtggccacaaaccaccagagtcgagaggtggaaatgagcacccggggccgattccagctcactggggatcccgccaaggggaactgctccttggtgatcagagacgcgcagatgcaggatgagtcacagtacttctttcgggtggagagaggaagctatgtgagatataatttcatgaacgatgggttctttctaaaagtaacagtgctcagcttcacgcccagaccccaggaccacaacaccgacctcacctgccatgtggacttctccagaaagggtgtgagcgcacagaggaccgtccgactccgtgtggcctatgcccccagagaccttgttatcagcatttcacgtgacaacacgccagatcctccagagaacctgagagtgatggtttcccaagcaaacaggacagtcctggaaaaccttgggaacggcacgtctctcccagtactggagggccaaagcctgtgcctggtctgtgtcacacacagcagccccccagccaggctgagctggacccagaggggacaggttctgagcccctcccagccctcagaccccggggtcctggagctgcctcgggttcaagtggagcacgaaggagagttcacctgccacgctcggcacccactgggctcccagcacgtctctctcagcctctccgtgcactataagaagggactcatctcaacggcattctccaacggagcgtttctgggaatcggcatcacggctcttcttttcctctgcctggccctgatcatcatgaagattctaccgaagagacggactcagacagaaaccccgaggcccaggttctcccggcacagcacgatcctggattacatcaatgtggtcccgacggctggccccctggctcagaagcggaatcagaaagccacaccaaacagtcctcggacccctcttccaccaggtgctccctccccagaatcaaagaagaaccagaaaaagcagtatcagttgcccagtttcccagaacccaaatcatccactcaagccccagaatcccaggagagccaagaggagctccattatgccacgctcaacttcccaggcgtcagacccaggcctgaggcccggatgcccaagggcacccaggcggattatgcagaagtcaagttccaatgagggtctcttaggctttaggactgggacttcggctagggaggaaggtagagtaagaggttgaagataacagagtgcaaagtttccttctctccctctctctctctctttctctctctctctctctttctctctcttttaaaaaaacatctggccagggcacagtggctcacgcctgtaatcccagcactttgggaggttgaggtgggcagatcgcctgaggtcgggagttcgagaccagcctggccaacttggtgaaaccccgtctctactaaaaatacaaaaattagctgggcatggtggcaggcgcctgtaatcctacctacttgggaagctgaggcaggagaatcacttgaacctgggagacggaggttgcagtgagccaagatcacaccattgcacgccagcctgggcaacaaagcgagactccatctcaaaaaaaaaatcctccaaatgggttgggtgtctgtaatcccagcactttgggaggctaaggtgggtggattgcttgagcccaggagttcgagaccagcctgggcaacatggtgaaaccccatctctacaaaaaatacaaaacatagctgggcttggtggtgtgtgcctgtagtcccagctgtcagacatttaaaccagagcaactccatctggaataggagctgaataaaatgaggctgagacctactgggctgcattctcagacagtggaggcattctaagtcacaggatgagacaggaggtccgtacaagatacaggtcataaagactttgctgataaaacagattgcagtaaagaagccaaccaaatcccaccaaaaccaagttggccacgagagtgacctctggtcgtcctcactgctacactcctgacagcaccatgacagtttacaaatgccatggcaacatcaggaagttacccgatatgtcccaaaagggggaggaatgaataatccaccccttgtttagcaaataagcaagaaataaccataaaagtgggcaaccagcagctctaggcgctgctcttgtctatggagtagccattcttttgttcctttactttcttaataaacttgctttcacctt

SEQ ID NO: 28045 - DNA, 1776 bp, Homo sapiens
  source 1..1776: mol_type = unassigned DNA
actcacagcacgaccagagaacaggcctgtctcaggcaggccctgcgcctcctatgcggagatgctactgccactgctgctgtcctcgctgctgggcgggtcccaggctatggatgggagattctggatacgagtgcaggagtcagtgatggtgccggagggcctgtgcatctctgtgccctgctctttctcctacccccgacaggactggacagggtctaccccagcttatggctactggttcaaagcagtgactgagacaaccaagggtgctcctgtggccacaaaccaccagagtcgagaggtggaaatgagcacccggggccgattccagctcactggggatcccgccaaggggaactgctccttggtgatcagagacgcgcagatgcaggatgagtcacagtacttctttcgggtggagagaggaagctatgtgagatataatttcatgaacgatgggttctttctaaaagtaacaggaaccaaaccaacgacctcccacttctcagtgctcagcttcacgcccagaccccaggaccacaacaccgacctcacctgccatgtggacttctccagaaagggtgtgagcgcacagaggaccgtccgactccgtgtggcctatgcccccagagaccttgttatcagcatttcacgtgacaacacgccagccctggagccccagccccagggaaatgtcccatacctggaagcccaaaaaggccagttcctgcggctcctctgtgctgctgacagccagccccctgccacactgagctgggtcctgcagaacagagtcctctcctcgtcccatccctggggccctagacccctggggctggagctgcccggggtgaaggctggggattcagggcgctacacctgccgagcggagaacaggcttggctcccagcagcgagccctggacctctctgtgcagtatcctccagagaacctgagagtgatggtttcccaagcaaacaggacagtcctggaaaaccttgggaacggcacgtctctcccagtactggagggccaaagcctgtgcctggtctgtgtcacacacagcagccccccagccaggctgagctggacccagaggggacaggttctgagcccctcccagccctcagaccccggggtcctggagctgcctcgggttcaagtggagcacgaaggagagttcacctgccacgctcggcacccactgggctcccagcacgtctctctcagcctctccgtgcactataagaagggactcatctcaacggcattctccaacggagcgtttctgggaatcggcatcacggctcttcttttcctctgcctggccctgatcatcatgaagattctaccgaagagacggactcagacagaaaccccgaggcccaggttctcccggcacagcacgatcctggattacatcaatgtggtcccgacggctggccccctggctcagaagcggaatcagaaagccacaccaaacagtcctcggacccctcttccaccaggtgctccctccccagaatcaaagaagaaccagaaaaagcagtatcagttgcccagtttcccagaacccaaatcatccactcaagccccagaatcccaggagagccaagaggagctccattatgccacgctcaacttcccaggcgtcagacccaggcctgaggcccggatgcccaagggcacccaggcggattatgcagaagtcaagttccaatgagggtctcttaggctttaggactgggacttcggctagggaggaaggtagag

SEQ ID NO: 28046 - DNA, 3173 bp, Homo sapiens
  source 1..3173: mol_type = unassigned DNA
cgaggctcctcctctgtggatggtcactgcccctccaccaggcttcctgctggaggagtttccttcccagccaggccggcccagaagccagatggtcccgggacaggcccagccccagagcccagagatgctgctgctgcccctgctgctgcccgtgctgggggcggggtccctgaacaaggatcccagttacagtcttcaagtgcagaggcaggtgccggtgccggagggcctgtgtgtcatcgtgtcttgcaacctctcctacccccgggatggctgggacgagtctactgctgcttatggctactggttcaaaggacggaccagcccaaagacgggtgctcctgtggccactaacaaccagagtcgagaggtggaaatgagcacccgggaccgattccagctcactggggatcccggcaaagggagctgctccttggtgatcagagacgcgcagagggaggatgaggcatggtacttctttcgggtggagagaggaagccgtgtgagacatagtttcctgagcaatgcgttctttctaaaagtaacagccctgactaagaagcctgatgtctacatccccgagaccctggagcccgggcagccggtgacggtcatctgtgtgtttaactgggctttcaagaaatgtccagccccttctttctcctggacgggggctgccctctcccctagaagaaccagaccaagcacctcccacttctcagtgctcagcttcacgcccagcccccaggaccacgacaccgacctcacctgccatgtggacttctccagaaagggtgtgagcgcacagaggaccgtccgactccgtgtggcctatgcccccaaagaccttattatcagcatttcacatgacaacacgtcagccctggaactccagggaaacgtcatatatctggaagttcagaaaggccagttcctgcggctcctctgtgctgctgacagccagccccctgccacgctgagctgggtcctgcaggacagagtcctctcctcgtcccacccctggggccccagaaccctggggctggagctgcgtggggtaagggccggggattcagggcgctacacctgccgagcggagaacaggcttggctcccagcagcaagccctggacctctctgtgcagtatcctccagagaacctgagagtgatggtttcccaagcaaacaggacagtcctggaaaacctcgggaacggcacatccctcccggtcctggagggccaaagcctgcgcctggtctgtgtcacccacagcagccccccagccaggctgagctggacccggtggggacagaccgtgggcccctcccagccctcagaccccggggtcctggagctgccacccattcaaatggagcacgaaggagagttcacctgccacgctcagcaccctctgggctcccagcacgtctctctcagcctctccgtgcactaccctccacagctgctgggcccctcctgctcctgggaggctgagggtctgcactgcagctgctcctcccaggccagcccggccccctctctgcgctggtggcttggggaggagctgctggaggggaacagcagtcagggctccttcgaggtcacccccagctcagccgggccctgggccaacagctccctgagcctccatggagggctcagctccggcctcaggctccgctgtaaggcctggaacgtccacggggcccagagtggctctgtcttccagctgctaccagggaagctggagcatgggggaggacttggcctgggggctgccctgggagctggcgtcgctgccctgctcgctttctgttcctgccttgtcgtcttcagggtgaagatctgcaggaaggaagctcgcaagagggcagcagctgagcaggacgtgccctccaccctgggacccatctcccagggtcaccagcatgaatgctcggcaggcagctcccaagaccacccgcccccaggtgcagccacctacaccccggggaagggggaagagcaggagctccactatgcctccctcagcttccagggcctgaggctctgggagcctgcggaccaggaggcccccagcaccaccgagtactcggagatcaagatccacacaggacagcccctgaggggcccaggctttgggcttcaattggagagggagatgtcagggatggttccaaagtgaagaggtctccatggcaacaggacaccagcaagtgtgtgggagtcgcactggtgtgacggccagaactggactcagatttcagccccatccccaatgaagagcttgagtttgaagattatactttttttgagacagggtctgactctgtcctccaggccagagtccagtggtgcaatctcagctcactgtagcctcaacctgccaggttgaagtgagcctcccatttcagcctcccaagtagctgggactacaattgtgagccaccatgccaggctcattgttatatttttagtagagacagggttttgccatgtttccctggctggtctcagactcctgggctcaagcaatctgcccgcctctgcctcccaaagtgctgggattacagacgtgagccaccacagctggctgaagattatactttcaattcagagcgagtttgaagatgacactttgaggcatcgtgtctatggttcattactacagaagcttctctggatgtgtaaagcacaggaaaccaggcagaggaggcacagggtgctctccagaacgagaagccagctcctggagttgtttgctgcaactgccattccccgttgatgaccatgctcttccttcagaagagggagagtgagaggaccaagtccaagtggttcccatttgaacatttaaaaaaaaaaaaaaggctgggcatggtggctcacgcctgtaatctcaacactttgggaggctgaagtgggtggatcacaagtcaggagttcaagaccagcctgggcaagatggtgaaaccccatctctactaaaaatacaaaaattagccgggcatggtggcgggcgcctaaaatcccagctactcgggagactaggcagagaattggttgaacccgggaggtggaggttgcagtgagccgagatcgtcccactgcactccagcctgggcaacagagtgagactctgtttctaaataaataaatgaataaataaa

SEQ ID NO: 28047 - DNA, 2875 bp, Homo sapiens
  source 1..2875: mol_type = unassigned DNA
cgaggctcctcctctgtggatggtcactgcccctccaccaggcttcctgctggaggagtttccttcccagccaggccggcccagaagccagatggtcccgggacaggcccagccccagagcccagagatgctgctgctgcccctgctgctgcccgtgctgggggcggggtccctgaacaaggatcccagttacagtcttcaagtgcagaggcaggtgccggtgccggagggcctgtgtgtcatcgtgtcttgcaacctctcctacccccgggatggctgggacgagtctactgctgcttatggctactggttcaaaggacggaccagcccaaagacgggtgctcctgtggccactaacaaccagagtcgagaggtggaaatgagcacccgggaccgattccagctcactggggatcccggcaaagggagctgctccttggtgatcagagacgcgcagagggaggatgaggcatggtacttctttcgggtggagagaggaagccgtgtgagacatagtttcctgagcaatgcgttctttctaaaagtaacagccctgactaagaagcctgatgtctacatccccgagaccctggagcccgggcagccggtgacggtcatctgtgtgtttaactgggctttcaagaaatgtccagccccttctttctcctggacgggggctgccctctcccctagaagaaccagaccaagcacctcccacttctcagtgctcagcttcacgcccagcccccaggaccacgacaccgacctcacctgccatgtggacttctccagaaagggtgtgagcgcacagaggaccgtccgactccgtgtggcctatgcccccaaagaccttattatcagcatttcacatgacaacacgtcagccctggaactccagggaaacgtcatatatctggaagttcagaaaggccagttcctgcggctcctctgtgctgctgacagccagccccctgccacgctgagctgggtcctgcaggacagagtcctctcctcgtcccacccctggggccccagaaccctggggctggagctgcgtggggtaagggccggggattcagggcgctacacctgccgagcggagaacaggcttggctcccagcagcaagccctggacctctctgtgcagtatcctccagagaacctgagagtgatggtttcccaagcaaacaggacagtcctggaaaacctcgggaacggcacatccctcccggtcctggagggccaaagcctgcgcctggtctgtgtcacccacagcagccccccagccaggctgagctggacccggtggggacagaccgtgggcccctcccagccctcagaccccggggtcctggagctgccacccattcaaatggagcacgaaggagagttcacctgccacgctcagcaccctctgggctcccagcacgtctctctcagcctctccgtgcactggaagctggagcatgggggaggacttggcctgggggctgccctgggagctggcgtcgctgccctgctcgctttctgttcctgccttgtcgtcttcagggtgaagatctgcaggaaggaagctcgcaagagggcagcagctgagcaggacgtgccctccaccctgggacccatctcccagggtcaccagcatgaatgctcggcaggcagctcccaagaccacccgcccccaggtgcagccacctacaccccggggaagggggaagagcaggagctccactatgcctccctcagcttccagggcctgaggctctgggagcctgcggaccaggaggcccccagcaccaccgagtactcggagatcaagatccacacaggacagcccctgaggggcccaggctttgggcttcaattggagagggagatgtcagggatggttccaaagtgaagaggtctccatggcaacaggacaccagcaagtgtgtgggagtcgcactggtgtgacggccagaactggactcagatttcagccccatccccaatgaagagcttgagtttgaagattatactttttttgagacagggtctgactctgtcctccaggccagagtccagtggtgcaatctcagctcactgtagcctcaacctgccaggttgaagtgagcctcccatttcagcctcccaagtagctgggactacaattgtgagccaccatgccaggctcattgttatatttttagtagagacagggttttgccatgtttccctggctggtctcagactcctgggctcaagcaatctgcccgcctctgcctcccaaagtgctgggattacagacgtgagccaccacagctggctgaagattatactttcaattcagagcgagtttgaagatgacactttgaggcatcgtgtctatggttcattactacagaagcttctctggatgtgtaaagcacaggaaaccaggcagaggaggcacagggtgctctccagaacgagaagccagctcctggagttgtttgctgcaactgccattccccgttgatgaccatgctcttccttcagaagagggagagtgagaggaccaagtccaagtggttcccatttgaacatttaaaaaaaaaaaaaaggctgggcatggtggctcacgcctgtaatctcaacactttgggaggctgaagtgggtggatcacaagtcaggagttcaagaccagcctgggcaagatggtgaaaccccatctctactaaaaatacaaaaattagccgggcatggtggcgggcgcctaaaatcccagctactcgggagactaggcagagaattggttgaacccgggaggtggaggttgcagtgagccgagatcgtcccactgcactccagcctgggcaacagagtgagactctgtttctaaataaataaatg

SEQ ID NO: 28048 - DNA, 2479 bp, Homo sapiens
  source 1..2479: mol_type = unassigned DNA
atggtcccgggacaggcccagccccagagcccagagatgctgctgctgcccctgctgctgcccgtgctgggggcggggtccctgaacaaggatcccagttacagtcttcaagtgcagaggcaggtgccggtgccggagggcctgtgtgtcatcgtgtcttgcaacctctcctacccccgggatggctgggacgagtctactgctgcttatggctactggttcaaaggacggaccagcccaaagacgggtgctcctgtggccactaacaaccagagtcgagaggtggaaatgagcacccgggaccgattccagctcactggggatcccggcaaagggagctgctccttggtgatcagagacgcgcagagggaggatgaggcatggtacttctttcgggtggagagaggaagccgtgtgagacatagtttcctgagcaatgcgttctttctaaaagtaacagccctgactaagaagcctgatgtctacatccccgagaccctggagcccgggcagccggtgacggtcatctgtgtgtttaactgggctttcaagaaatgtccagccccttctttctcctggacgggggctgccctctcccctagaagaaccagaccaagcacctcccacttctcagtgctcagcttcacgcccagcccccaggaccacgacaccgacctcacctgccatgtggacttctccagaaagggtgtgagcgcacagaggaccgtccgactccgtgtggcctatgcccccaaagaccttattatcagcatttcacatgacaacacgtcagccctggaactccagggaaacgtcatatatctggaagttcagaaaggccagttcctgcggctcctctgtgctgctgacagccagccccctgccacgctgagctgggtcctgcaggacagagtcctctcctcgtcccacccctggggccccagaaccctggggctggagctgcgtggggtaagggccggggattcagggcgctacacctgccgagcggagaacaggcttggctcccagcagcaagccctggacctctctgtgcagtatcctccagagaacctgagagtgatggtttcccaagcaaacaggacagtcctggaaaacctcgggaacggcacatccctcccggtcctggagggccaaagcctgcgcctggtctgtgtcacccacagcagccccccagccaggctgagctggacccggtggggacagaccgtgggcccctcccagccctcagaccccggggtcctggagctgccacccattcaaatggagcacgaaggagagttcacctgccacgctcagcaccctctgggctcccagcacgtctctctcagcctctccgtgcactggaagctggagcatgggggaggacttggcctgggggctgccctgggagctggcgtcgctgccctgctcgctttctgttcctgccttgtcgtcttcagggtgaagatctgcaggaaggaagctcgcaagagggcagcagctgagcaggacgtgccctccaccctgggacccatctcccagggtcaccagcatgaatgctcggcaggcagctcccaagaccacccgcccccaggtgcagccacctacaccccggggaagggggaagagcaggagctccactatgcctccctcagcttccagggcctgaggctctgggagcctgcggaccaggaggcccccagcaccaccgagtactcggagatcaagatccacacaggacagcccctgaggggcccaggctttgggcttcaattggagagggagatgtcagggatggttccaaagtgaagaggtctccatggcaacaggacaccagcaagtgtgtgggagtcgcactggtgtgacggccagaactggactcagatttcagccccatccccaatgaagagcttgagtttgaagattatactttttttgagacagggtctgactctgtcctccaggccagagtccagtggtgcaatctcagctcactgtagcctcaacctgccaggttgaagtgagcctcccatttcagcctcccaagtagctgggactacaattgtgagccaccatgccaggctcattgttatatttttagtagagacagggttttgccatgtttccctggctggtctcagactcctgggctcaagcaatctgcccgcctctgcctcccaaagtgctgggattacagacgtgagccaccacagctggctgaagattatactttcaattcagagcgagtttgaagatgacactttgaggcatcgtgtctatggttcattactacagaagcttctctggatgtgtaaagcacaggaaaccaggcagaggaggcacagggtgctctccagaacgagaagccagctcctggagttgtttgctgcaactgccattccccgttgatgaccatgctcttccttcagaagagggagagtgagaggaccaagtccaagtggttcccatttgaacattt

SEQ ID NO: 28049 - DNA, 2121 bp, Homo sapiens
  source 1..2121: mol_type = unassigned DNA
gaagaaccctgaggaacagacttacctcagcaaccctggcacctccaacccgacacatgctactgctgctgctactgctgccacccctgctctgtgggagagtgggggctaaggaacagaaggattacctgctgacaatgcagaagtccgtgacggtgcaggagggcctgtgtgtctctgtgctttgctccttctcctacccccaaaatggctggactgcctccgatccagttcatggctactggttccgggcaggggaccatgtaagccggaacattccagtggccacaaacaacccagctcgagcagtgcaggaggagactcgggaccgattccacctccttggggacccacagaacaaggattgtaccctgagcatcagagacaccagagagagtgatgcagggacatacgtcttttgtgtagagagaggaaatatgaaatggaattataaatatgaccagctctctgtgaatgtgacagcgtcccaggacctactgtcaagatacaggctggaggtgccagagtcggtgactgtgcaggagggtctgtgtgtctctgtgccctgcagtgtcctttacccccattacaactggactgcctctagccctgtttatggatcctggttcaaggaaggggccgatataccatgggatattccagtggccacaaacaccccaagtggaaaagtgcaagaggatacccacggtcgattcctcctccttggggacccacagaccaacaactgctccctgagcatcagagatgccaggaagggggattcagggaagtactacttccaggtggagagaggaagcaggaaatggaactacatatatgacaagctctctgtgcatgtgacagccctgactcacatgcccaccttctccatcccggggaccctggagtctggccaccccaggaacctgacctgctctgtgccctgggcctgtgaacaggggacgccccccacgatcacctggatgggggcctccgtgtcctccctggaccccactatcactcgctcctcgatgctcagcctcatcccacagccccaggaccatggcaccagcctcacctgtcaggtgaccttgcctggggccggcgtgaccatgaccagggctgtccgactcaacatatcctatcctcctcagaacttgaccatgactgtcttccaaggagatggcacagcatccacaaccttgaggaatggctcggccctttcagtcctggagggccagtccctgcaccttgtctgtgctgtcgacagcaatccccctgccaggctgagctggacctgggggagcctgaccctgagcccctcacagtcctcgaaccttggggtgctggagctgcctcgagtgcatgtgaaggatgaaggggaattcacctgccgagctcagaaccctctaggctcccagcacatttccctgagcctctccctgcaaaacgagtacacaggcaaaatgaggcctatatcaggagtgacgctaggggcattcgggggagctggagccacagccctggtcttcctgtacttctgcatcatcttcgttgtagtgaggtcctgcaggaagaaatcggcaaggccagcagtgggcgtgggggatacaggcatggaggacgcaaacgctgtcaggggctcagcctctcagggacccctgattgaatccccggcagatgacagccccccacaccatgctccgccagccctggccaccccctccccagaggaaggagagatccagtatgcatccctcagcttccacaaagcgaggcctcagtacccacaggaacaggaggccatcggctatgagtactccgagatcaacatccccaagtgagaaactgcagagactcaggcctgtttgagggctcacgacccctgcagcaaagaagcccgagactgattcctttagaattaacagccctccatgctgtgcaacaggacatcagaacttattcctcttgtcaaactgaaaatgcgtgcctgatgaccaaactctccctttctccatccaatcggtccacactccccgcccccggcctctggtacccaccattctcttctctacttctctgaggtcgactattttaggttccaaatatagtgagatcgta

SEQ ID NO: 28050 - DNA, 2498 bp, Homo sapiens
  source 1..2498: mol_type = unassigned DNA
gtgcgcgtccacagctctcactcaccctccggcttcctgtcggggctttctcagccccaccccacgtttggacatttggagcatttccttccctgacagccggacctgggactgggctggggccctggcggatggagacatgctgcccctgctgctgctgcccctgctgtggggggggtccctgcaggagaagccagtgtacgagctgcaagtgcagaagtcggtgacggtgcaggagggcctgtgcgtccttgtgccctgctccttctcttacccctggagatcctggtattcctctcccccactctacgtctactggttccgggacggggagatcccatactacgctgaggttgtggccacaaacaacccagacagaagagtgaagccagagacccagggccgattccgcctccttggggatgtccagaagaagaactgctccctgagcatcggagatgccagaatggaggacacgggaagctatttcttccgcgtggagagaggaagggatgtaaaatatagctaccaacagaataagctgaacttggaggtgacagccctgatagagaaacccgacatccactttctggagcctctggagtccggccgccccacaaggctgagctgcagccttccaggatcctgtgaagcgggaccacctctcacattctcctggacggggaatgccctcagccccctggaccccgagaccacccgctcctcggagctcaccctcacccccaggcccgaggaccatggcaccaacctcacctgtcagatgaaacgccaaggagctcaggtgaccacggagagaactgtccagctcaatgtctcctatgctccacagaccatcaccatcttcaggaacggcatagccctagagatcctgcaaaacacctcataccttccggtcctggagggccaggctctgcggctgctctgtgatgctcccagcaacccccctgcacacctgagctggttccagggctcccctgccctgaacgccacccccatctccaataccgggatcttggagcttcgtcgagtaaggtctgcagaagaaggaggcttcacctgccgcgctcagcacccgctgggcttcctgcaaatttttctgaatctctcagtttactccctcccacagttgctgggcccctcctgctcctgggaggctgagggtctgcactgcagatgctcctttcgagcccggccggccccctccctgtgctggcggcttgaggagaagccgctggaggggaacagcagccagggctcattcaaggtcaactccagctcagctgggccctgggccaacagctccctgatcctccacggggggctcagctccgacctcaaagtcagctgcaaggcctggaacatctatgggtcccagagcggctctgtcctgctgctgcaagggagatcgaacctcgggacaggagtggttcctgcagcccttggtggtgctggtgtcatggccctgctctgtatctgtctgtgcctcatcttctttttaatagtgaaagcccgcaggaagcaagcagctgggagaccagagaaaatggatgatgaagaccccattatgggtaccatcacctcgggttccaggaagaagccctggccagacagccccggagatcaagcatctcctcctggggatgcccctcccttggaagaacaaaaggagctccattatgcctcccttagtttttctgagatgaagtcgagggagcctaaggaccaggaggccccaagcaccacggagtactcggagatcaagacaagcaagtgaggatttgcccagagttcagtcctggctggaggagccacagcctgtctgggggaaaggacaagtcagggaccacttgctgaagcacgaagagcccttgtggcaatgttaacattaactgatgtttaagtgctccaagcagatggaattagagaggtgggctcaaatctaggccctggcactgtcatcaagcaattcactgcatccctctgtgcctcagtttcccattctgtaaatcagagatcatgcatgctacctcaaaggttgttgtgaacattaaagaaatcaacacatggaaatcaaccaacatgggtcctggaacagggcgttgtgctcagtgctttctggtctctcttccttgaatagaaaggtcctgctggcaagttctctcaaggctggggatgaccaggcacaaaaaacagggcagcaatatgttggtgtcactccccttcccaaaactcttcgaagactccctaggaaagaccagcccctcagcctggcacttggttcatgatgtgggatcttatatccttgccagagtcatatctttgcccacttttacctgcaatccttgcatcatattcctttggctccagtccttcatttatgagacccataggaatccttccaacagccaaagagttgagtctaactctttcctgcccaaacccattcacggccccctggccttagacaatatatcaca

SEQ ID NO: 28051 - DNA, 2086 bp, Homo sapiens
  source 1..2086: mol_type = unassigned DNA
cacagctctcactcaccctccggcttcctgtcggggctttctcagccccaccccacgtttggacatttggagcatttccttccctgacagccggacctgggactgggctggggccctggcggatggagacatgctgcccctgctgctgctgcccctgctgtggggggggtccctgcaggagaagccagtgtacgagctgcaagtgcagaagtcggtgacggtgcaggagggcctgtgcgtccttgtgccctgctccttctcttacccctggagatcctggtattcctctcccccactctacgtctactggttccgggacggggagatcccatactacgctgaggttgtggccacaaacaacccagacagaagagtgaagccagagacccagggccgattccgcctccttggggatgtccagaagaagaactgctccctgagcatcggagatgccagaatggaggacacgggaagctatttcttccgcgtggagagaggaagggatgtaaaatatagctaccaacagaataagctgaacttggaggtgacagccctgatagagaaacccgacatccactttctggagcctctggagtccggccgccccacaaggctgagctgcagccttccaggatcctgtgaagcgggaccacctctcacattctcctggacggggaatgccctcagccccctggaccccgagaccacccgctcctcggagctcaccctcacccccaggcccgaggaccatggcaccaacctcacctgtcagatgaaacgccaaggagctcaggtgaccacggagagaactgtccagctcaatgtctcctatgctccacagaccatcaccatcttcaggaacggcatagccctagagatcctgcaaaacacctcataccttccggtcctggagggccaggctctgcggctgctctgtgatgctcccagcaacccccctgcacacctgagctggttccagggctcccctgccctgaacgccacccccatctccaataccgggatcttggagcttcgtcgagtaaggtctgcagaagaaggaggcttcacctgccgcgctcagcacccgctgggcttcctgcaaatttttctgaatctctcagtttactccctcccacagttgctgggcccctcctgctcctgggaggctgagggtctgcactgcagatgctcctttcgagcccggccggccccctccctgtgctggcggcttgaggagaagccgctggaggggaacagcagccagggctcattcaaggtcaactccagctcagctgggccctgggccaacagctccctgatcctccacggggggctcagctccgacctcaaagtcagctgcaaggcctggaacatctatgggtcccagagcggctctgtcctgctgctgcaagggagatcgaacctcgggacaggagtggttcctgcagcccttggtggtgctggtgtcatggccctgctctgtatctgtctgtgcctcatcttctttttaatagtgaaagcccgcaggaagcaagcagctgggagaccagagaaaatggatgatgaagaccccattatgggtaccatcacctcgggttccaggaagaagccctggccagacagccccggagatcaagcatctcctcctggggatgcccctcccttggaagaacaaaaggagctccattatgcctcccttagtttttctgagatgaagtcgagggagcctaaggaccaggaggccccaagcaccacggagtactcggagatcaagacaagcaagtgaggatttgcccagagttcagtcctggctggaggagccacagcctgtctgggggaaaggacaagtcagggaccacttgctgaagcacgaagagcccttgtggcaatgttaacattaactgatgtttaagtgctccaagcagatggaattagagaggtgggctcaaatctaggccctggcactgtcatcaagcaattcactgcatccctctgtgcctcagtttcccattctgtaaatcagagatcatgcatgctacctcaaaggttgttgtgaacattaaagaaatcaacacatggaaatcaa

SEQ ID NO: 28052 - DNA, 1746 bp, Homo sapiens
  source 1..1746: mol_type = unassigned DNA
gcgggacacagtctcttctcctctgctcttctttgggcaggtctctgggtctcaaagtttccgtctgctctgtgcagagggagtggagctccgagggcttgtggcttcgcagttcctcttctgtgaacagccgagatcacgcgctcctccccagccacccgttcctccccgcagtccttcccctccactcccttccccttctctgctcatgcagggagcccaggaagcctccgcctcagagatgctaccgctgctgctgcccctgctgtgggcaggggccctggctcaggagcggagattccagctggaggggccagagtcactgacggtgcaggagggtctgtgcgtcctcgtaccctgcagattgcccactacccttccagcctcgtactatggttatggctactggttcctggaaggggctgatgttccagtggccacaaacgacccagacgaagaagtgcaggaggagacccggggccgattccacctcctctgggatcccagaaggaagaactgctccctgagcatcagagatgcccggaggagggacaatgctgcatacttctttcggttgaagtccaaatggatgaaatacggttatacatcttccaagctctctgtgcgtgtgatggccctgacccacaggcccaacatctccatcccagggaccctggagtctggccatcccagcaatctgacctgctctgtgccctgggtctgtgagcaggggacgccccccatcttctcctggatgtcagctgcccccacctccctgggccccaggaccacccagtcctcggtgctcacaatcaccccacggccccaggaccacagcaccaacctcacctgtcaggtgacgttccctggagccggtgtgaccatggagagaaccatccagctcaatgtctcctatgctccacagaaagtggccatcagcatcttccaaggaaacagcgcagccttcaaaatcctgcaaaacacctcgtccctccctgtcctggagggccaggctctgcggctgctctgtgatgctgacggcaacccccctgcacacctgagctggttccagggcttccccgccctgaacgccacccccatctccaataccggggtcctggagctgcctcaagtagggtctgcagaagaaggagatttcacctgccgtgctcagcatcctctgggctccctgcaaatctctctgagtctctttgtgcattggtcatcagcaccagttccagacaggcatagtttcagaccaccctgctgaggctggccccatctcagaagatgagcaggagctccactacgctgtcctacacttccacaaggtgcaacctcaggaaccaaaggtcaccgacactgagtactcagaaatcaagatacacaagtgaggaattgtccaaagccataaccttgattggagagaacatggtacctctcagtgtattggttactagggctgccacagcaatgtaccacaaaccgagtgacataaacacagaactttattttcgtatagtttcagatgttagaggtctgagaacaaggtgttatcagggttggtcccttctaaggcctctcttgttggcttgtagatggctgtctcctccttgtgtcttcacatggtctttcctctgagtgtgtttgtgtcctaatcttctcttcttataaagacactagtcatattggattagggcctccccatgacctaatttaaataaattaactatttaaagaccctcc

SEQ ID NO: 28053 - DNA, 1940 bp, Homo sapiens
  source 1..1940: mol_type = unassigned DNA
cgcgctcctccccagccacccgttcctccccgcagtccttcccctccactcccttccccttctctgctcatgcagggagcccaggaagcctccgcctcagagatgctaccgctgctgctgcccctgctgtgggcaggggccctggctcaggagcggagattccagctggaggggccagagtcactgacggtgcaggagggtctgtgcgtcctcgtaccctgcagattgcccactacccttccagcctcgtactatggttatggctactggttcctggaaggggctgatgttccagtggccacaaacgacccagacgaagaagtgcaggaggagacccggggccgattccacctcctctgggatcccagaaggaagaactgctccctgagcatcagagatgcccggaggagggacaatgctgcatacttctttcggttgaagtccaaatggatgaaatacggttatacatcttccaagctctctgtgcgtgtgatggccctgacccacaggcccaacatctccatcccagggaccctggagtctggccatcccagcaatctgacctgctctgtgccctgggtctgtgagcaggggacgccccccatcttctcctggatgtcagctgcccccacctccctgggccccaggaccacccagtcctcggtgctcacaatcaccccacggccccaggaccacagcaccaacctcacctgtcaggtgacgttccctggagccggtgtgaccatggagagaaccatccagctcaatgtctcctccttcaaaatcctgcaaaacacctcgtccctccctgtcctggagggccaggctctgcggctgctctgtgatgctgacggcaacccccctgcacacctgagctggttccagggcttccccgccctgaacgccacccccatctccaataccggggtcctggagctgcctcaagtagggtctgcagaagaaggagatttcacctgccgtgctcagcatcctctgggctccctgcaaatctctctgagtctctttgtgcattggaaaccagaaggcagggctggtggtgtcctgggagcagtctggggagctagcatcacaaccctggttttcctctgtgtttgcttcatcttcagagtgaagactagaaggaagaaagcagcccagccagtgcaaaacacggatgatgtgaaccccgtcatggtctcaggctccaggggtcatcagcaccagttccagacaggcatagtttcagaccaccctgctgaggctggccccatctcagaagatgagcaggagctccactacgctgtcctacacttccacaaggtgcaacctcaggaaccaaaggtcaccgacactgagtactcagaaatcaagatacacaagtgaggaattgtccaaagccataaccttgattggagagaacatggtacctctcagtgtattggttactagggctgccacagcaatgtaccacaaaccgagtgacataaacacagaactttattttcgtatagtttcagatgttagaggtctgagaacaaggtgttatcagggttggtcccttctaaggcctctcttgttggcttgtagatggctgtctcctccttgtgtcttcacatggtctttcctctgagtgtgtttgtgtcctaatcttctcttcttataaagacactagtcatattggattagggcctccccatgacctaatttaaataaattaactatttaaagaccctccaaatacagtaaccttctgagatattgagatttaggacttccaacatatgaattttagaagggaacaatttagcccataacactgtgtccaattcttttaaaattaatgtttttgttgtaaatggactatataaataccttcgtatatatggcagaccacaggacttctgtccaagagaactgagttcaactccatctatgccagc

SEQ ID NO: 28054 - DNA, 2074 bp, Homo sapiens
  source 1..2074: mol_type = unassigned DNA
gcgggacacagtctcttctcctctgctcttctttgggcaggtctctgggtctcaaagtttccgtctgctctgtgcagagggagtggagctccgagggcttgtggcttcgcagttcctcttctgtgaacagccgagatcacgcgctcctccccagccacccgttcctccccgcagtccttcccctccactcccttccccttctctgctcatgcagggagcccaggaagcctccgcctcagagatgctaccgctgctgctgcccctgctgtgggcaggggccctggctcaggagcggagattccagctggaggggccagagtcactgacggtgcaggagggtctgtgcgtcctcgtaccctgcagattgcccactacccttccagcctcgtactatggttatggctactggttcctggaaggggctgatgttccagtggccacaaacgacccagacgaagaagtgcaggaggagacccggggccgattccacctcctctgggatcccagaaggaagaactgctccctgagcatcagagatgcccggaggagggacaatgctgcatacttctttcggttgaagtccaaatggatgaaatacggttatacatcttccaagctctctgtgcgtgtgatggccctgacccacaggcccaacatctccatcccagggaccctggagtctggccatcccagcaatctgacctgctctgtgccctgggtctgtgagcaggggacgccccccatcttctcctggatgtcagctgcccccacctccctgggccccaggaccacccagtcctcggtgctcacaatcaccccacggccccaggaccacagcaccaacctcacctgtcaggtgacgttccctggagccggtgtgaccatggagagaaccatccagctcaatgtctcctccttcaaaatcctgcaaaacacctcgtccctccctgtcctggagggccaggctctgcggctgctctgtgatgctgacggcaacccccctgcacacctgagctggttccagggcttccccgccctgaacgccacccccatctccaataccggggtcctggagctgcctcaagtagggtctgcagaagaaggagatttcacctgccgtgctcagcatcctctgggctccctgcaaatctctctgagtctctttgtgcattggaaaccagaaggcagggctggtggtgtcctgggagcagtctggggagctagcatcacaaccctggttttcctctgtgtttgcttcatcttcagagtgaagactagaaggaagaaagcagcccagccagtgcaaaacacggatgatgtgaaccccgtcatggtctcaggctccaggggtcatcagcaccagttccagacaggcatagtttcagaccaccctgctgaggctggccccatctcagaagatgagcaggagctccactacgctgtcctacacttccacaaggtgcaacctcaggaaccaaaggtcaccgacactgagtactcagaaatcaagatacacaagtgaggaattgtccaaagccataaccttgattggagagaacatggtacctctcagtgtattggttactagggctgccacagcaatgtaccacaaaccgagtgacataaacacagaactttattttcgtatagtttcagatgttagaggtctgagaacaaggtgttatcagggttggtcccttctaaggcctctcttgttggcttgtagatggctgtctcctccttgtgtcttcacatggtctttcctctgagtgtgtttgtgtcctaatcttctcttcttataaagacactagtcatattggattagggcctccccatgacctaatttaaataaattaactatttaaagaccctccaaatacagtaaccttctgagatattgagatttaggacttccaacatatgaattttagaagggaacaatttagcccataacactgtgtccaattcttttaaaattaatgtttttgttgtaaatggactatataaataccttcgtatatatggcagaccacaggacttctgtccaagagaactgagttcaactccatctatg

SEQ ID NO: 28055 - DNA, 1870 bp, Homo sapiens
  source 1..1870: mol_type = unassigned DNA
aaagtttccgtctgctctgtgcagagggagtggagctccgagggcttgtggcttcgcagttcctcttctgtgaacagccgagatcacgcgctcctccccagccacccgttcctccccgcagtccttcccctccactcccttccccttctctgctcatgcagggagcccaggaagcctccgcctcagagatgctaccgctgctgctgcccctgctgtgggcaggggccctggctcaggagcggagattccagctggaggggccagagtcactgacggtgcaggagggtctgtgcgtcctcgtaccctgcagattgcccactacccttccagcctcgtactatggttatggctactggttcctggaaggggctgatgttccagtggccacaaacgacccagacgaagaagtgcaggaggagacccggggccgattccacctcctctgggatcccagaaggaagaactgctccctgagcatcagagatgcccggaggagggacaatgctgcatacttctttcggttgaagtccaaatggatgaaatacggttatacatcttccaagctctctgtgcgtgtgatggccctgacccacaggcccaacatctccatcccagggaccctggagtctggccatcccagcaatctgacctgctctgtgccctgggtctgtgagcaggggacgccccccatcttctcctggatgtcagctgcccccacctccctgggccccaggaccacccagtcctcggtgctcacaatcaccccacggccccaggaccacagcaccaacctcacctgtcaggtgacgttccctggagccggtgtgaccatggagagaaccatccagctcaatgtctcctatgctccacagaaagtggccatcagcatcttccaaggaaacagcgcagccttcaaaatcctgcaaaacacctcgtccctccctgtcctggagggccaggctctgcggctgctctgtgatgctgacggcaacccccctgcacacctgagctggttccagggcttccccgccctgaacgccacccccatctccaataccggggtcctggagctgcctcaagtagggtctgcagaagaaggagatttcacctgccgtgctcagcatcctctgggctccctgcaaatctctctgagtctctttgtgcattggaaaccagaaggcagggctggtggtgtcctgggagcagtctggggagctagcatcacaaccctggttttcctctgtgtttgcttcatcttcagagtgaagactagaaggaagaaagcagcccagccagtgcaaaacacggatgatgtgaaccccgtcatggtctcaggctccaggggtcatcagcaccagttccagacaggcatagtttcagaccaccctgctgaggctggccccatctcagaagatgagcaggagctccactacgctgtcctacacttccacaaggtgcaacctcaggaaccaaaggtcaccgacactgagtactcagaaatcaagatacacaagtgaggaattgtccaaagccataaccttgattggagagaacatggtacctctcagtgtattggttactagggctgccacagcaatgtaccacaaaccgagtgacataaacacagaactttattttcgtatagtttcagatgttagaggtctgagaacaaggtgttatcagggttggtcccttctaaggcctctcttgttggcttgtagatggctgtctcctccttgtgtcttcacatggtctttcctctgagtgtgtttgtgtcctaatcttctcttcttataaagacactagtcatattggattagggcctccccatgacctaatttaaataaattaactatttaaagaccctcca

SEQ ID NO: 28056 - DNA, 1811 bp, Homo sapiens
  source 1..1811: mol_type = unassigned DNA
gtctgctctgtgcagagggagtggagctccgagggcttgtggcttcgcagttcctcttctgtgaacagccgagatcacgcgctcctccccagccacccgttcctccccgcagtccttcccctccactcccttccccttctctgctcatgcagggagcccaggaagcctccgcctcagagatgctaccgctgctgctgcccctgctgtgggcaggggccctggctcaggagcggagattccagctggaggggccagagtcactgacggtgcaggagggtctgtgcgtcctcgtaccctgcagattgcccactacccttccagcctcgtactatggttatggctactggttcctggaaggggctgatgttccagtggccacaaacgacccagacgaagaagtgcaggaggagacccggggccgattccacctcctctgggatcccagaaggaagaactgctccctgagcatcagagatgcccggaggagggacaatgctgcatacttctttcggttgaagtccaaatggatgaaatacggttatacatcttccaagctctctgtgcgtgtgatggccctgacccacaggcccaacatctccatcccagggaccctggagtctggccatcccagcaatctgacctgctctgtgccctgggtctgtgagcaggggacgccccccatcttctcctggatgtcagctgcccccacctccctgggccccaggaccacccagtcctcggtgctcacaatcaccccacggccccaggaccacagcaccaacctcacctgtcaggtgacgttccctggagccggtgtgaccatggagagaaccatccagctcaatgtctcctggatgttgaggcggccacctctttccaccccagatgctccacagaaagtggccatcagcatcttccaaggaaacagcgcagccttcaaaatcctgcaaaacacctcgtccctccctgtcctggagggccaggctctgcggctgctctgtgatgctgacggcaacccccctgcacacctgagctggttccagggcttccccgccctgaacgccacccccatctccaataccggggtcctggagctgcctcaagtagggtctgcagaagaaggagatttcacctgccgtgctcagcatcctctgggctccctgcaaatctctctgagtctctttgtgcattggaaaccagaaggcagggctggtggtgtcctgggagcagtctggggagctagcatcacaaccctggttttcctctgtgtttgcttcatcttcagggtcatcagcaccagttccagacaggcatagtttcagaccaccctgctgaggctggccccatctcagaagatgagcaggagctccactacgctgtcctacacttccacaaggtgcaacctcaggaaccaaaggtcaccgacactgagtactcagaaatcaagatacacaagtgaggaattgtccaaagccataaccttgattggagagaacatggtacctctcagtgtattggttactagggctgccacagcaatgtaccacaaaccgagtgacataaacacagaactttattttcgtatagtttcagatgttagaggtctgagaacaaggtgttatcagggttggtcccttctaaggcctctcttgttggcttgtagatggctgtctcctccttgtgtcttcacatggtctttcctctgagtgtgtttgtgtcctaatcttctcttcttataaagacactagtcatattggattagggcctccccatgacctaatttaaataaattaactatttaaagaccctcc

SEQ ID NO: 28057 - DNA, 1713 bp, Homo sapiens
  source 1..1713: mol_type = unassigned DNA
aaagtttccgtctgctctgtgcagagggagtggagctccgagggcttgtggcttcgcagttcctcttctgtgaacagccgagatcacgcgctcctccccagccacccgttcctccccgcagtccttcccctccactcccttccccttctctgctcatgcagggagcccaggaagcctccgcctcagagatgctaccgctgctgctgcccctgctgtgggcagcctcgtactatggttatggctactggttcctggaaggggctgatgttccagtggccacaaacgacccagacgaagaagtgcaggaggagacccggggccgattccacctcctctgggatcccagaaggaagaactgctccctgagcatcagagatgcccggaggagggacaatgctgcatacttctttcggttgaagtccaaatggatgaaatacggttatacatcttccaagctctctgtgcgtgtgatggccctgacccacaggcccaacatctccatcccagggaccctggagtctggccatcccagcaatctgacctgctctgtgccctgggtctgtgagcaggggacgccccccatcttctcctggatgtcagctgcccccacctccctgggccccaggaccacccagtcctcggtgctcacaatcaccccacggccccaggaccacagcaccaacctcacctgtcaggtgacgttccctggagccggtgtgaccatggagagaaccatccagctcaatgtctcctccttcaaaatcctgcaaaacacctcgtccctccctgtcctggagggccaggctctgcggctgctctgtgatgctgacggcaacccccctgcacacctgagctggttccagggcttccccgccctgaacgccacccccatctccaataccggggtcctggagctgcctcaagtagggtctgcagaagaaggagatttcacctgccgtgctcagcatcctctgggctccctgcaaatctctctgagtctctttgtgcattggaaaccagaaggcagggctggtggtgtcctgggagcagtctggggagctagcatcacaaccctggttttcctctgtgtttgcttcatcttcagagtgaagactagaaggaagaaagcagcccagccagtgcaaaacacggatgatgtgaaccccgtcatggtctcaggctccaggggtcatcagcaccagttccagacaggcatagtttcagaccaccctgctgaggctggccccatctcagaagatgagcaggagctccactacgctgtcctacacttccacaaggtgcaacctcaggaaccaaaggtcaccgacactgagtactcagaaatcaagatacacaagtgaggaattgtccaaagccataaccttgattggagagaacatggtacctctcagtgtattggttactagggctgccacagcaatgtaccacaaaccgagtgacataaacacagaactttattttcgtatagtttcagatgttagaggtctgagaacaaggtgttatcagggttggtcccttctaaggcctctcttgttggcttgtagatggctgtctcctccttgtgtcttcacatggtctttcctctgagtgtgtttgtgtcctaatcttctcttcttataaagacactagtcatattggattagggcctccccatgacctaatttaaataaattaactatttaaagaccctcc

SEQ ID NO: 28058 - DNA, 1475 bp, Homo sapiens
  source 1..1475: mol_type = unassigned DNA
gcagttcctgagagaagaaccctgaggaacagacgttccctcgcggccctggcacctccaaccccagatatgctgctgctgctgctgctgcccctgctctgggggagggagagggtggaaggacagaagagtaaccggaaggattactcgctgacgatgcagagttccgtgaccgtgcaagagggcatgtgtgtccatgtgcgctgctccttctcctacccagtggacagccagactgactctgacccagttcatggctactggttccgggcagggaatgatataagctggaaggctccagtggccacaaacaacccagcttgggcagtgcaggaggaaactcgggaccgattccacctccttggggacccacagaccaaaaattgcaccctgagcatcagagatgccagaatgagtgatgcggggagatacttctttcgtatggagaaaggaaatataaaatggaattataaatatgaccagctctctgtgaacgtgacagaccctcctcagaacttgactgtgactgtcttccaaggagaaggcacagcatccacagctctggggaacagctcatctctttcagtcctagagggccagtctctgcgcttggtctgtgctgttgacagcaatccccctgccaggctgagctggacctggaggagtctgaccctgtacccctcacagccctcaaaccctctggtactggagctgcaagtgcacctgggggatgaaggggaattcacctgtcgagctcagaactctctgggttcccagcacgtttccctgaacctctccctgcaacaggagtacacaggcaaaatgaggcctgtatcaggagtgttgctgggggcggtcgggggagctggagccacagccctggtcttcctctccttctgtgtcatcttcattgtagtgaggtcctgcaggaagaaatcggcaaggccagcagcggacgtgggagacataggcatgaaggatgcaaacaccatcaggggctcagcctctcagggtaacctgactgagtcctgggcagatgataacccccgacaccatggcctggctgcccactcctcaggggaggaaagagagatccagtatgcacccctcagctttcataagggggagcctcaggacctatcaggacaagaagccaccaacaatgagtactcagagatcaagatccccaagtaagaaaatgcagaggctcgggcttgtttgagggttcacgacccctccagcaaaggagtctgaggctgattccagtagaattagcagccctcaatgctgtgcaacaagacatcagaacttattcctcttgtctaactgaaaatgcatgcctgatgaccaaactctccctttccccatccaatcggtccacactccccgccctggcctctggtacccaccattctcctctgtacttctctaaggatgactactttagattccgaatatagtgagattgtaacgtg

SEQ ID NO: 28059 - DNA, 1754 bp, Homo sapiens
  source 1..1754: mol_type = unassigned DNA
gcagttcctgagagaagaaccctgaggaacagacgttccctcgcggccctggcacctccaaccccagatatgctgctgctgctgctgctgcccctgctctgggggagggagagggtggaaggacagaagagtaaccggaaggattactcgctgacgatgcagagttccgtgaccgtgcaagagggcatgtgtgtccatgtgcgctgctccttctcctacccagtggacagccagactgactctgacccagttcatggctactggttccgggcagggaatgatataagctggaaggctccagtggccacaaacaacccagcttgggcagtgcaggaggaaactcgggaccgattccacctccttggggacccacagaccaaaaattgcaccctgagcatcagagatgccagaatgagtgatgcggggagatacttctttcgtatggagaaaggaaatataaaatggaattataaatatgaccagctctctgtgaacgtgacagccttgacccacaggcccaacatccttatccccggtaccctggagtctggctgcttccagaatctgacctgctctgtgccctgggcctgtgagcaggggacgccccctatgatctcctggatggggacctctgtgtcccccctgcacccctccaccacccgctcctcagtgctcaccctcatcccacagccccagcaccacggcaccagcctcacctgtcaggtgaccttgcctggggccggcgtgaccacgaacaggaccatccaactcaatgtgtcctaccctcctcagaacttgactgtgactgtcttccaaggagaaggcacagcatccacagctctggggaacagctcatctctttcagtcctagagggccagtctctgcgcttggtctgtgctgttgacagcaatccccctgccaggctgagctggacctggaggagtctgaccctgtacccctcacagccctcaaaccctctggtactggagctgcaagtgcacctgggggatgaaggggaattcacctgtcgagctcagaactctctgggttcccagcacgtttccctgaacctctccctgcaacaggagtacacaggcaaaatgaggcctgtatcaggagtgttgctgggggcggtcgggggagctggagccacagccctggtcttcctctccttctgtgtcatcttcattgtagtgaggtcctgcaggaagaaatcggcaaggccagcagcggacgtgggagacataggcatgaaggatgcaaacaccatcaggggctcagcctctcagggtaacctgactgagtcctgggcagatgataacccccgacaccatggcctggctgcccactcctcaggggaggaaagagagatccagtatgcacccctcagctttcataagggggagcctcaggacctatcaggacaagaagccaccaacaatgagtactcagagatcaagatccccaagtaagaaaatgcagaggctcgggcttgtttgagggttcacgacccctccagcaaaggagtctgaggctgattccagtagaattagcagccctcaatgctgtgcaacaagacatcagaacttattcctcttgtctaactgaaaatgcatgcctgatgaccaaactctccctttccccatccaatcggtccacactccccgccctggcctctggtacccaccattctcctctgtacttctctaaggatgactactttagattccgaatatagtgagattgtaacgtg

SEQ ID NO: 28060 - DNA, 713 bp, Homo sapiens
  source 1..713: mol_type = unassigned DNA
atgctgctgctgctgctgctgcccctgctctgggggagggagagggtggaaggacagaagagtaaccggaaggattactcgctgacgatgcagagttccgtgaccgtgcaagagggcatgtgtgtccatgtgcgctgctccttctcctacccagtggacagccagactgactctgacccagttcatggctactggttccgggcagggaatgatataagctggaaggctccagtggccacaaacaacccagcttgggcagtgcaggaggaaactcgggaccgattccacctccttggggacccacagaccaaaaattgcaccctgagcatcagagatgccagaatgagtgatgcggggagatacttctttcgtatggagaaaggaaatataaaatggaattataaatatgaccagctctctgtgaacgtgacagagtgaggtcctgcaggaagaaatcggcaaggccagcagcggacgtgggagacataggcatgaaggatgcaaacaccatcaggggctcagcctctcagggtaacctgactgagtcctgggcagatgataacccccgacaccatggcctggctgcccactcctcaggggaggaaagagagatccagtatgcacccctcagctttcataagggggagcctcaggacctatcaggacaagaagccaccaacaatgagtactcagagatcaagatccccaagtaa

SEQ ID NO: 28061 - DNA, 2948 bp, Homo sapiens
  source 1..2948: mol_type = unassigned DNA
agtttctgagagaagaaccctgaggaacagacgttccctggcggccctggcgccttcaaacccagacatgctgctgctgctgctgctgctgcccctgctctgggggacaaaggggatggagggagacagacaatatggggatggttacttgctgcaagtgcaggagctggtgacggtgcaggagggcctgtgtgtccatgtgccctgctccttctcctacccccaggatggctggactgactctgacccagttcatggctactggttccgggcaggagacagaccataccaagacgctccagtggccacaaacaacccagacagagaagtgcaggcagagacccagggccgattccaactccttggggacatttggagcaacgactgctccctgagcatcagagacgccaggaagagggataaggggtcatatttctttcggctagagagaggaagcatgaaatggagttacaaatcacagttgaattacaaaactaagcagctgtctgtgtttgtgacagccctgacccataggcctgacatcctcatcctagggaccctagagtctggccactccaggaacctgacctgctctgtgccctgggcctgtaagcaggggacaccccccatgatctcctggattggggcctccgtgtcctccccgggccccactactgcccgctcctcagtgctcacccttaccccaaagccccaggaccacggcaccagcctcacctgtcaggtgaccttgcctgggacaggtgtgaccacgaccagtaccgtccgcctcgatgtgtcctaccctccttggaacttgaccatgactgtcttccaaggagatgccacagcatccacagccctgggaaatggctcatctctttcagtccttgagggccagtctctgcgcctggtctgtgctgtcaacagcaatccccctgccaggctgagctggacccgggggagcctgaccctgtgcccctcacggtcctcaaaccctgggctgctggagctgcctcgagtgcacgtgagggatgaaggggaattcacctgccgagctcagaacgctcagggctcccagcacatttccctgagcctctccctgcagaatgagggcacaggcacctcaagacctgtatcacaagtgacactggcagcagtcgggggagctggagccacagccctggccttcctgtccttctgcatcatcttcatcatagtgaggtcctgcaggaagaaatcggcaaggccagcagcgggcgtgggggatacaggcatggaagatgcaaaggccatcaggggctcggcctctcagggacccctgactgaatcctggaaagatggcaaccccctgaagaagcctcccccagctgttgccccctcgtcaggggaggaaggagagctccattatgcaaccctcagcttccataaagtgaagcctcaggacccgcagggacaggaggccactgacagtgaatactcggagatcaagatccacaagcgagaaactgcagagactcaggcctgtttgaggaatcacaacccctccagcaaagaagtcagaggctgattctcatagaacaagaaccctctagagccccatgctatgcagtaggtcaccagggctccctcctcctgtctaaccaaaacttggaccaatgtctcccctttccccggctaccagggacccatccctgcctctagcttctactacccaccattctcctctcgacctctctgaggttgactattttagattccacatagagatgaggtcatgtggtacttgcctctctgtgtgtggctcattttacacaaaaaaatatcccctaggttcatccatgttctctcaaatgacagaatcaagcactgaatatttttttttctttgagagatggagtttcgctctgttgcccaggctggagtgcagtggttcaatctctgctcactgcaacctccacctcctgggttcaaacgattctcctgcctcagcttcccaagtagctggtactacaggcgtgtgtcaccacgcccagctaatttttgtattttttagtagagacggggtttcactataagtgggccaggctagtctcaaactcctgacctcaagtgatctgcctgccttggcctcccaaagtgctgggatttcaggcatgagccaccgcacccagcttgcattgaatattttcaaggagctaaaagaagattttaaatggtctcacaaaaacagataaatatttgcacagatgggtgtgctaatcattgtgccttgatggttccacgatgtatccgggtgtggaaatctcactgggtctctctcaaggccactcggctactcaggacagggctggaatttaaagcctgtccgattctgaggtctcttctctcatctagcactgagtcaagcaatcagcaggctgggcaccccttagccataagttttcaggaaataaattccttgagggcattgacttttacaaaagagggagcagcaatggcctagagtctcaggaacaagacaggtgcactgaggagatgaaggccgggaccccctgcccaacctgtatggcgggtctgtacttattttgtttacccccaatttaaaacgtttttttttattgcaggttgtttgtttgatatggtttggctgtgtccccacccaaatcttatctagaattgtaatcagaattataatccccatgtgttgggggagggacctggtgggaggtgataggatcatgggggtggttcccccatgctgttctgatagtgagtgagttatcacgagatctgatggttttgtaagtggtggtttcccctgctcttctctcttgcctgccaccatgtaagatgtgcctggttccccttccgccatgattgtaagtttcctgaggcctcccccgccatgtggaactgtgagtcaattacacctctttcatttataaatt

SEQ ID NO: 28062 - DNA, 2669 bp, Homo sapiens
  source 1..2669: mol_type = unassigned DNA
agtttctgagagaagaaccctgaggaacagacgttccctggcggccctggcgccttcaaacccagacatgctgctgctgctgctgctgctgcccctgctctgggggacaaaggggatggagggagacagacaatatggggatggttacttgctgcaagtgcaggagctggtgacggtgcaggagggcctgtgtgtccatgtgccctgctccttctcctacccccaggatggctggactgactctgacccagttcatggctactggttccgggcaggagacagaccataccaagacgctccagtggccacaaacaacccagacagagaagtgcaggcagagacccagggccgattccaactccttggggacatttggagcaacgactgctccctgagcatcagagacgccaggaagagggataaggggtcatatttctttcggctagagagaggaagcatgaaatggagttacaaatcacagttgaattacaaaactaagcagctgtctgtgtttgtgacagaccctccttggaacttgaccatgactgtcttccaaggagatgccacagcatccacagccctgggaaatggctcatctctttcagtccttgagggccagtctctgcgcctggtctgtgctgtcaacagcaatccccctgccaggctgagctggacccgggggagcctgaccctgtgcccctcacggtcctcaaaccctgggctgctggagctgcctcgagtgcacgtgagggatgaaggggaattcacctgccgagctcagaacgctcagggctcccagcacatttccctgagcctctccctgcagaatgagggcacaggcacctcaagacctgtatcacaagtgacactggcagcagtcgggggagctggagccacagccctggccttcctgtccttctgcatcatcttcatcatagtgaggtcctgcaggaagaaatcggcaaggccagcagcgggcgtgggggatacaggcatggaagatgcaaaggccatcaggggctcggcctctcagggacccctgactgaatcctggaaagatggcaaccccctgaagaagcctcccccagctgttgccccctcgtcaggggaggaaggagagctccattatgcaaccctcagcttccataaagtgaagcctcaggacccgcagggacaggaggccactgacagtgaatactcggagatcaagatccacaagcgagaaactgcagagactcaggcctgtttgaggaatcacaacccctccagcaaagaagtcagaggctgattctcatagaacaagaaccctctagagccccatgctatgcagtaggtcaccagggctccctcctcctgtctaaccaaaacttggaccaatgtctcccctttccccggctaccagggacccatccctgcctctagcttctactacccaccattctcctctcgacctctctgaggttgactattttagattccacatagagatgaggtcatgtggtacttgcctctctgtgtgtggctcattttacacaaaaaaatatcccctaggttcatccatgttctctcaaatgacagaatcaagcactgaatatttttttttctttgagagatggagtttcgctctgttgcccaggctggagtgcagtggttcaatctctgctcactgcaacctccacctcctgggttcaaacgattctcctgcctcagcttcccaagtagctggtactacaggcgtgtgtcaccacgcccagctaatttttgtattttttagtagagacggggtttcactataagtgggccaggctagtctcaaactcctgacctcaagtgatctgcctgccttggcctcccaaagtgctgggatttcaggcatgagccaccgcacccagcttgcattgaatattttcaaggagctaaaagaagattttaaatggtctcacaaaaacagataaatatttgcacagatgggtgtgctaatcattgtgccttgatggttccacgatgtatccgggtgtggaaatctcactgggtctctctcaaggccactcggctactcaggacagggctggaatttaaagcctgtccgattctgaggtctcttctctcatctagcactgagtcaagcaatcagcaggctgggcaccccttagccataagttttcaggaaataaattccttgagggcattgacttttacaaaagagggagcagcaatggcctagagtctcaggaacaagacaggtgcactgaggagatgaaggccgggaccccctgcccaacctgtatggcgggtctgtacttattttgtttacccccaatttaaaacgtttttttttattgcaggttgtttgtttgatatggtttggctgtgtccccacccaaatcttatctagaattgtaatcagaattataatccccatgtgttgggggagggacctggtgggaggtgataggatcatgggggtggttcccccatgctgttctgatagtgagtgagttatcacgagatctgatggttttgtaagtggtggtttcccctgctcttctctcttgcctgccaccatgtaagatgtgcctggttccccttccgccatgattgtaagtttcctgaggcctcccccgccatgtggaactgtgagtcaattacacctctttcatttataaatt
